United States Patent Application Publication US 2026/0227408 A1 - sequence listing, part 3

SEQ ID NO: 9585 - protein, 356 aa, Homo sapiens
MPALEPAPPLLADLGPALEPESPAALGPPGYLHSAPGPAPAPGEGPPPGTVLEPQSAPESSCPCRGSVKNQPSEELPDMTTFPPRLLAEQLTLMDAELFKKVVLHECLGCIWGQGHLKGNEHMAPTVRATIAHFNRLTNCITTSCLGDHSMRARDRARVVEHWIKVARECLSLNNFSSVHVIVSALCSNPIGQLHKTWAGVSSKSMKELKELCKKDTAVKRDLLIKAGSFKVATQERNPQRVQMRLRRQKKGVVPFLGDFLTELQRLDSAIPDDLDGNTNKRSKEVRVLQEMQLLQVAAMNYRLRPLEKFVTYFTRMEQLSDKERWGFTMMSRIVSNSWPQAIHPPQPPKVLTLQV

SEQ ID NO: 9586 - protein, 906 aa, Homo sapiens
MDSTACLKSLLLTVSQYKAVKSEANATQLLRHLEVISGQKLTRLFTSNQILTSECLSCLVELLEDPNISASLILSIIGLLSQLAVDIETRDCLQNTYNLNSVLAGVVCRSSHTDSVFLQCIQLLQKLTYNVKIFYSGANIDELITFLIDHIQSSEDELKMPCLGLLANLCRHNLSVQTHIKTLSNVKSFYRTLITLLAHSSLTVVVFALSILSSLTLNEEVGEKLFHARNIHQTFQLIFNILINGDGTLTRKYSVDLLMDLLKNPKIADYLTRYEHFSSCLHQVLGLLNGKDPDSSSKVLELLLAFCSVTQLRHMLTQMMFEQSPPGSATLGSHTKCLEPTVALLRWLSQPLDGSENCSVLALELFKEIFEDVIDAANCSSADRFVTLLLPTILDQLQFTEQNLDEALTRKKCERIAKAIEVLLTPLCGDDTLKMHIAKILTTVKCTTLIEQQFTYGKIDLGFGTKVADSELCKLAADVILKTLDLINKLKPLVPGMEVSFYKILQDPRLITPLAFALTSDNREQVQSGLRILLEAAPLPDFPALVLGESIAANNAYRQQETEHIPRKMPWQSSNHSFPTSIKCLTPHLKDGVPGLNIEELIEKLQSGMVVKDQICDVRISDIMDVYEMKLSTLASKESRLQDLLETKALALAQADRLIAQHRCQRTQAETEARTLASMLREVERKNEELSVLLKAQQVESERAQSDIEHLFQHNRKLESVAEEHEILTKSYMELLQRNESTEKKNKDLQITCDSLNKQIETVKKLNESLKEQNEKSIAQLIEKEEQRKEVQNQLVDREHKLANLHQKTKVQEEKIKTLQKEREDKEETIDILRKELSRTEQIRKELSIKASSLEVQKAQLEGRLEEKESLVKLQQEELNKHSHMIAMIHSLSGGKINPETVNLSI

SEQ ID NO: 9587 - protein, 136 aa, Homo sapiens; identical to SEQ ID NO: 5304

SEQ ID NO: 9588 - protein, 222 aa, Homo sapiens
MKQESAAPNTPPTSQSPTPSAQFPRNDGDPQALWIFGYGSLVWRPDFAYSDSRVGFVRGYSRRFWQGDTFHRGSDKMPGRVVTLLEDHEGCTWGVAYQVQGEQVSKALKYLNVREAVLGGYDTKEVTFYPQDAPDQPLKALAYVATPQNPGYLGPAPEEAIATQILACRGFSGHNLEYLLRLADFMQLCGPQAQDEHLAAIVDAVGTMLPCFCPTEQALALV

SEQ ID NO: 9589 - protein, 136 aa, Homo sapiens; identical to SEQ ID NO: 5304

SEQ ID NO: 9590 - protein, 144 aa, Homo sapiens
VCTDSAAPMWSCIVWELHSGANLLTYRGGQAGPRGLALLNGEYLLAAQLGKNYISAWELQRKDQLQQKIMCPGPVTCLTASPNGLYVLAGVAESIHLWEVSTGNLLVILSRHYQDVSCLQFTGDSSHFISGGKDCLVLVWSLCR

SEQ ID NO: 9591 - protein, 69 aa, Homo sapiens
EAGKDDYVKALPGQLKPFETLLSQNQGGKTFIVGDQVSIWPHAVPSSPPSASRWTQVSPSLTTTCWTCC

SEQ ID NO: 9592 - protein, 379 aa, Homo sapiens
METLCPAPRLAVPASPRGSPCSPTPRKPCRGTQEFSPLCLRALAFCALAKPRASSLGPGPGELAARSPVLRGPQAPLRPGGWAPDGLKHLWAPTGRPGVPNTAAGEDADVAACPRRGEEEEGGGGFPHFGVRSCAPPGRCPAPPHPRESTTSFASAPPRPAPGLEPQRGPAASPPQEPSSRPPSPPAGLSTEPAGPGTAPRPFLPGQPAEVDGNPPPAAPEAPAASPSTASPAPAAPGDLRQEHFDRLIRRSKLWCYAKGFALDTPSLRRGPERPPAKGPARGAAKKRRLPAPPPRTAQPRRPAPTLPTTSTFSLLNCFPCPPALVVGEDGDLKPASSLRLQGDSKPPPAHPLWRWQMGGPAVPEPPGLKFWGINMDES

SEQ ID NO: 9593 - protein, 103 aa, Homo sapiens
EGLNLPSQLAHRLAEKSCRNLRKALLMCEACRVQQYPFTADQEIPETDWEVYLRETANAIVSQQTPQRLLEVRGRLYELLTHCIPPEIIMKACKEESRSCDIF

SEQ ID NO: 9594 - protein, 179 aa, Homo sapiens
MSSTQFNKGPSYGLSAEVKNRLLSKYDPQKEAELRTWIEGLTGLSIGPDFQKGLKDGTILCTLMNKLQPGSVPKINRSMQNWHQLENLSNFIKAMVSYGMNPVDLFEANDLFESGNMTQVQAKTKGLQSGVDIGVKYSEKQERNFDDATMKAGQCVIGLQMGTNKCASQSGMTAYGTRR

SEQ ID NO: 9595 - protein, 353 aa, Homo sapiens
MRCLAPRPAGSYLSEPQGSSQCATMELGPLEGGYLELLNSDADPLCLYHFYDQMDLAGEEEIELYSEPDTDTINCDQFSRLLCDMEGDEETREAYANIAELDQYVFQDSQLEGLSKDIFKHIGPDEVIGESMEMPAEVGQKSQKRPFPEELPADLKHWKPAEPPTVVTGSLLVGPVSDCSTLPCLPLPALFNQEPASGQMRLEKTDQIPMPFSSSSLSCLNLPEGPIQFVPTISTLPHGLWQISEAGTGVSSIFIYHGEVPQASQVPPPSGFTVHGLPTSPDRPGSTSPFAPSATDLPSMPEPALTSRANMTEHKTSPTQCPAAGEVSNKLPKWPGREVPRKTQLGSSLLFGT

SEQ ID NO: 9596 - protein, 103 aa, Homo sapiens [sequence omitted]

SEQ ID NO: 9597 - protein, 136 aa, Homo sapiens; identical to SEQ ID NO: 5304

SEQ ID NO: 9598 - protein, 78 aa, Homo sapiens
RCAALRMLLADQGQSWKEEVVTVETWQEGSLKASCLYGQLPKFQDGDLTLYQSNTILRHLGRTLGWGSQTAPWLAHPQ

SEQ ID NO: 9599 - protein, 574 aa, Homo sapiens
MCPHFAQDLWPEQGMEDSFQKAILRRYGKYGHENLQLRKGCKSVDEYKVNKEGYNGLNQCFTTAQSKVFQCDKYLKVFYKFLNSNRPKIRHTEKKSFKCKKRVKLFCMLSHKTQHKSIYHREKSYKCKECGKTFNWSSTLTNHRKIYTEEKPYKCEEYNKSPKQLSTLTTHEIIHAGEKLYKCEECGEAFNRSSNLTTHKIIHTGEKPYKCEECGKAFIWSSTLTEHKKIHTRKKPYKCEECGKAFIWSSTLTRHKRMHTGEKPYKCEECGKAFSQSSTLTTHKIIHTGEKRYKCLECGKAFKQLSTLTTHKIIHVGEKLYKCEECGKGFNRSSNLTTHKIIHTGEKPYKCEECGKAFIWSSTLTKHKRIHTREKPYKCEECGKAFIWSSTLTRHKRMHTGEKPYKCEECGKSFSQSSTLTTHKIIHTGEKPYKCEECGKAFNWSSTLTKHKIIHTEEKPYKCEKCGKAFKQSSILTNHKRIHTGEKPYKCEECGKSFNRSSTFTKHKVIHTGVKPYKCEECGKAFFWSSTLTKHKRIHTGEQPYKWEKFGKAFNRSSHLTTDKITHWREILQV

SEQ ID NO: 9600 - protein, 237 aa, Homo sapiens
MPKAKGKTRRQKFGYSVNRKRLNRNARRKAAPRIECSHIRHAWDHAKSVRQNLAEMGLAVDPNRAVPLRKRKVKAMEVDIEERPKELVRKPYVLNDLEAEASLPEKKGNTLSRDLIDYVRYMVENHGEDYKQSGKTSSILCRRGRWRWSDWFTSQLPQAEASPGPVKLEPGCKARRCCVAPEELARSHGIRRLHTRAHSPLWGRNCSQRLQFIFIWGFTEKPEPAVFRVGDVNIVCT

SEQ ID NO: 9601 - protein, 641 aa, Homo sapiens
MPDNRQPRNRQPRIRSGNEPRSAPAMEPDGRGAWAHSRAALDRLEKLLRCSRCTNILREPVCLGGCEHIFCSNCVSDCIGTGCPVCYTPAWIQDLKINRQLDSMIQLCSKLRNLLHDNELSDLKEDKPRKSLFNDAGNKKNSIKMWFSPRSKKVRYVVSKASVQTQPAIKKDASAQQDSYEFVSPSPPADVSERAKKASARSGKKQKKKTLAEINQKWNLEAEKEDGEFDSKEESKQKLVSFCSQPSVISSPQINGEIDLLASGSLTESECFGSLTEVSLPLAEQIESPDTKSRNEVVTPEKGDIPSVEYLLQNGSDPNVKDHAGWTPLHEACNHGHLKVVELLLQHKALVNTTGYQNDSPLHDAAKNGHVDIVKLLLSYGASRNAVNIFGLRPVDYTDDESMKSLLLLPEKNESSSASHCSVMNTGQRRDGPLVLIGSGLSSEQQKMLSELAVILKAKKYTEFDSTVTHVVVPGDAVQSTLKCMLGILNGCWILKFEWVKACLRRKVCEQEEKYEIPEGPRRSRLNREQLLPKLFDGCYFYLWGTFKHHPKDNLIKLVTAGGGQILSRKPKPDSDVTQTINTVAYHARPDSDQRFCTQYIIYEDLCNYHPERVRQGKVWKAPSSWFIDCVMSFELLPLDS

SEQ ID NO: 9602 - protein, 49 aa, Homo sapiens
MRDPDDQYKLTEDTRQLGLVVCRGTSVVLICPQDGMEAIPNPFIQQQDA

SEQ ID NO: 9603 - protein, 1131 aa, Homo sapiens
MRCLAPRPAGSYLSEPQGSSQCATMELGPLEGGYLELLNSDADPLCLYHFYDQMDLAGEEEIELYSEPDTDTINCDQFSRLLCDMEGDEETREAYANIAELDQYVFQDSQLEGLSKDIFIEHIGPDEVIGESMEMPAEVGQKSQKRPFPEELPADLKHWKPAEPPTVVTGSLLVGPVSDCSTLPCLPLPALFNQEPASGQMRLEKTDQIPMPFSSSSLSCLNLPEGPIQFVPTISTLPHGLWQISEAGTGVSSIFIYHGEVPQASQVPPPSGFTVHGLPTSPDRPGSTSPFAPSATDLPSMPEPALTSRANMTEHKTSPTQCPAAGEVSNKLPKWPEPVEQFYRSLQDTYGAEPAGPDGILVEVDLVQARLERSSSKSLERELATPDWAERQLAQGGLAEVLLAAKEHRRPRETRVIAVLGKAGQGKSYWAGAVSRAWACGRLPQYDFVFSVPCHCLNRPGDAYGLQDLLFSLGPQPLVAADEVFSHILKRPDRVLLILDGFEELEAQDGFLHSTCGPAPAEPCSLRGLLAGLFQKKLLRGCTLLLTARPRGRLVQSLSKADALFELSGFSMEQAQAYVMRYFESSGMTEHQDRALTLLRDRPLLLSHSHSPTLCRAVCQLSEALLELGEDAKLPSTLTGLYVGLLGRAALDSPPGALAELAKLAWELGRRHQSTLQEDQFPSADVRTWAMAKGLVQHPPRAAESELAFPSFLLQCFLGALWLALSGEIKDKELPQYLALTPRKKRPYDNWLEGVPRFLAGLIFQPPARCLGALLGPSAAASVDRKQKVLARYLKRLQPGTLRARQLLELLHCAHEAEEAGIWQHVVQELPGRLSFLGTRLTPPDAHVLGKALEAAGQDFSLDLRSTGICPSGLGSLVGLSCVTRFRAALSDTVALWESLQQHGETKLLQAAEEKFTIEPFKAKSLKDVEDLGKLVQTQRTRSSSEDTAGELPAVRDLKKLEFALGPVSGPQAFPKLVRILTAFSSLQHLDLDALSENKIGDEGVSQLSATFPQLKSLETLNLSQNNITDLGAYKLAEALPSLAASLLRLSLYNNCICDVGAESLARVLPDMVSLRVMDVQYNKFTAAGAQQLAASLRRCPHVETLAMWTPTIPFSVQEHLQQQDSRISLR

SEQ ID NO: 9604 - protein, 291 aa, Homo sapiens
MFQAFPGDYDSGSRCSSSPSAESQYLSSVDSFGSPPTAAASQECAGLGEMPGSFVPTVTAITTSQDLQWLVQPTLISSMAQSQGQPLASQPPVVDPYDMPGTSYSTPGMSGYSSGGASGSGGPSTSGTTSGPGPARPARARPRRPREETLTPEEEEKRRVRRERNKLAAAKCRNRRRELTDRLQAETDQLEEEKAELESEIAELQKEKERLEFVLVAHKPGCKIPYEEGPGPGPLAEEVQVLGDPFPVVNPSYTSSFVLTCPEVSAFAGAQRTSGSDQPSDPLNSPSLLAL

SEQ ID NO: 9605 - protein, 310 aa, Homo sapiens
RKLIRAALRELRQRKRDQRDKERERRLQEARGRPGEGRGNTATETTTRHSQRAADGSAVSTVTKTERLVHSNDGTRTARTTTVESSFVRRSENGSGSTMMQTKTFSSSSSSKKMGSIFDREDQASPRAGSLAALEKRQAEKKKELMKAQSLPKTSASQARKAMIEKLEKEGAAGPGGPRAAVQRSTSFGVPNANSIKQMLLDWCRAKTRGYEHVDIQNFSSSWSDGMAFCALVHNFFPEAFDYGQLSPQNRRQNFEVAFSSAETHADCPQLLDTEDMVRLREPDWKCVYTYIQEFYRCLVQKGLVKTKKS

SEQ ID NO: 9606 - protein, 79 aa, Homo sapiens
MAQEKMKLGFKSLPSSTTADGNILRRVNSAPLINGLGFNSQVLQADMLRIRTNRTTFRNRRSLEITSPTSVEQKPKDLF

SEQ ID NO: 9607 - protein, 108 aa, Homo sapiens
TNGNRCCAWSGIKSHPRSWTRPPRMRRMRTETSRCTSARAWPRLESPSAAGWRKGPWAQPIVSGVYGHGSGRGKGQSSLHPQFIPGPGPCRGTSGGCRDLRISGLLAD

SEQ ID NO: 9608 - protein, 76 aa, Homo sapiens
LGTSGWHRARRCTTTSTNGNRCCAWSGIKSHPRSWTRPPRMRRMRTETSRCTSARAWPRGTSGGCRDLRISGLLAD

SEQ ID NO: 9609 - protein, 74 aa, Homo sapiens
KSRAAKVIKTLTEINIAFLPYESQVYSLDSADSFQSFYSPHKAQMKNPILERLAEQIATLCATLKEYPAVRYRG

SEQ ID NO: 9610 - protein, 119 aa, Homo sapiens
IMEDTIEDKLDTKHYPYISTRSSASFSTTAVSARYGHWHKNKAPGEYRSGPRLIIFILGGVSLNEMRCAYEVTQANGKWEVLIGSTHILTPTKFLMDLRHPDFRESSRVSFEDQAPTME

SEQ ID NO: 9611 - protein, 1070 aa, Homo sapiens
MTSPAKFKKDKEIIAEYDTQVKEIRAQLTEQMKCLDQQCELRVQLLQDLQDFFRKKAEIEMDYSRNLEKLAERFLAKTRSTKDQQFKKDQNVLSPVNCWNLLLNQVKRESRDHTTLSDIYLNNIIPRFVQVSEDSGRLFKKSKEVGQQLQDDLMKVLNELYSVMKTYHMYNADSISAQSKLKEAEKQEEKQIGKSVKQEDRQTPRSPDSTANVRIEEKHVRRSSVKKIEKMKEKRQAKYTENKLKAIKARNEYLLALEATNASVFKYYIHDLSDLIDCCDLGYHASLNRALRTFLSAELNLEQSKHEGLDAIENAVENLDATSDKQRLMEMYNNVFCPPMKFEFQPHMGDMASQLCAQQPVQSELVQRCQQLQSRLSTLKIENEEVKKTMEATLQTIQDIVTVEDFDVSDCFQYSNSMESVKSTVSETFMSKPSIAKRRANQQETEQFYFTKMKEYLEGRNLITKLQAKHDLLQKTLGESQRTDCSLARRSSTVRKQDSSQAIPLVVESCIRFISRHGLQHEGIFRVSGSQVEVNDIKNAFERGEDPLAGDQNDHDMDSIAGVLKLYFRGLEHPLFPKDIFHDLMACVTMDNLQERALHIRKVLLVLPKTTLIIMRYLFAFLNHLSQFSEENMMDPYNLAICFGPSLMSVPEGHDQVSCQAHVNELIKTIIIQHENIFPSPRELEGPVYSRGGSMEDYCDSPHGETTSVEDSTQDVTAEHHTSDDECEPIEAIAKFDYVGRTARELSFKKGASLLLYQRASDDWWEGRHNGIDGLIPHQYIVVQDTEDGVVERSSPKSEIEVISEPPEEKVTARAGASCPSGGHVADIYLANINKQRKRPESGSIRKTFRSDSHGLSSSLTDSSSPGVGASCRPSSQPIMSQSLPKEGPDKCSISGHGSLNSISRHSSLKNRLDSPQIRKTATAGRSKSFNNHRPMDPEVIAQDIEATMNSALNELRELERQSSVKHTPDVVLDTLEPLKTSPVVAPTSEPSSPLHTQLLKDPEPAFQRSASTAGDIACAFRPVKSVKMAAPVKPPATRPKPTVFPKTNATSPGVNSSTSPQSTDKSCTV

SEQ ID NO: 9612 - protein, 48 aa, Homo sapiens
MAEVQVLVLDGRGHLLGRLAAIVAKQAGRWWSYAVKASTFLAISTETS

SEQ ID NO: 9613 - protein, 102 aa, Homo sapiens
MHDVIKKVKKKGEWKVLVVDQLSMRMLSSCCKMTDIMTEGITIVEDINKRREPLPSLEAVYLITPSEKSVHSLISDFKDPPTAKYRAAHVFFTDSCPDALFN

SEQ ID NO: 9614 - protein, 91 aa, Homo sapiens
NDTKEDVFVHQTAIKKNNPRKYLRSVGDGETVEFDVVEGEKGAEAANVTGPDGVPVEGSRYAADRRRYRRGYYGRRRGPPRNISDVWFNRR

SEQ ID NO: 9615 - protein, 118 aa, Homo sapiens
MNTSLSWFEQLDVLLNATDGNVVRNKQWLYPLGVSTELIGLCICFFCSSGCIFLGSPPQNSTAVTPAVLWEESEIMQKELKLLQYQLSQHQELLLKQLAEGRQAQVGSWKDLHSCCPI

SEQ ID NO: 9616 - protein, 97 aa, Homo sapiens
MPAERPAGSGGSEAPAMVEQLDTAVITPAMLEEEEQLEAAGLERERKMLEKARMSWDRESTEIRYRRLQHLLEKSNIYSKFLLTKMEQQQLETVMKI

SEQ ID NO: 9617 - protein, 579 aa, Homo sapiens; identical to SEQ ID NO: 4336

SEQ ID NO: 9618 - protein, 96 aa, Homo sapiens
VTVLVMCHTRELAFQISKEYERFSKYMPSVKVSVFFGGLSIKKDEEVLKKNCPHVVVGTPGRILALVRNRSFSLKNVKHFVLDECDKMLEQLGSPP

SEQ ID NO: 9619 - protein, 100 aa, Homo sapiens
MRMLSSCCKMTDIMTEGITIVEDINKRREPLPSLEAVYLITPSEKSVHSLISDFKDPPTAKYRAAHVFFTDSCPDALFNELVKSRAAKVIKTLTEINIAF

SEQ ID NO: 9620 - protein, 464 aa, Homo sapiens
METGFPAIMYPGSFIGGWGEEYLSWEGPGLPDFVFQQPVESEAMHCSNPKSGVVLATVARGPDACQILTRAPLGQDPPQRTVLGLLTANGQYRRTCGQGITRIRCYSGSENAFPPAGKKALPDCGVQEPPKQGFDIYMDELEQGDRDSCSVREGMAFEDVYEVDTGTLKSDLHFLLDFNTVSPMLVDSSLLSQSEDISSLGTDVINVTEYAEEIYQYLREAEIRHRPKAHYMKKQPDITEGMRTILVDWLVEVGEEYKLRAETLYLAVNFLDRFLSCMSVLRGKLQLVGTAAMLLASKYEEIYPPEVDEFVYITDDTYTKRQLLKMEHLLLKVLAFDLTVPTTNQFLLQYLRRQGVCVRTENLAKYVAELSLLEADPFLKYLPSLIAAAAFCLANYTVNKHFWPETLAAFTGYSLSEIVPCLSELHKAYLDIPHRPQQAIREKYKASKYLCVSLMEPPAVLLLQ

SEQ ID NO: 9621 - protein, 97 aa, Homo sapiens
MNTSLSWFEQLDVLLNATDGNVVRNKQWLYPLGVSTELIGLCICFFCSSGCIFLGSPPQNSTAVTPAVLWEESEIMQKELKLLQYQPAPGAAAETAG

SEQ ID NO: 9622 - protein, 156 aa, Homo sapiens
GRKEPDSYDGITTNQRGVTIAALGADCIPIVFADPVKKACGVAHAGWKGTLLGVAMATVNAMIAEYGCSLEDIVVVLGPSVGPCCFTLPRESAEAFHNLHPACVQLFDSPNPCIDIRKATRYIFPGTFSCQHPYFFSYCFGYWENKLLLSFEKYFS

SEQ ID NO: 9623 - protein, 145 aa, Homo sapiens
MNTSLSWFEQLDVLLNATDGNVVRNKQWLYPLGVSTELIGLCICFFCSSGCIFLGSPPQNSTAVTPAVLWEESEIMQKELKLLQYQLSQHQELLLKQLAEGRQAQVGSWKIPRGAPFLTWSPASFSSMPRVLSKRTYSFGAPKCS

SEQ ID NO: 9624 - protein, 112 aa, Homo sapiens
MGAPEIRMSKPLEAEKQGLDSPSEHTDTERNGPDTNHQNPQNKTSPFSVSPTGPSTKIKAEDPSGDSAPAAPLPPQPAQPHLPQAQLMLTGSQLAGLHEVRLIVVSPEETEA

SEQ ID NO: 9625 - protein, 1184 aa, Homo sapiens
MHVNASARRWGRGGAAALPGPAASPRRPAPRTGPVGRPTLAPSPSRAHAHAKTNLLPGRAVQAPDAVPGAGSSRAPARWRPRDPGSSAPDAWQRFRPAPLRAQPRPPPRPAPGPPPPRKGGCGGQWRAPQDRTRGLRSRNSPRPPLAQPRLRHANQWRAPPGTPAADWRRPARSGRAVRDGGGGAGGSERELGLADGMEDYEQELCGVEDDFHNQFAAELEVLAELEGASTPSPSGVPLFTAGRPPRTFEEALARGDAASSPAPAASVGSSQGGARKRQVDADLQPAGSLPHAPRIKRPRLQVVKRLNFRSEEMEEPPPPDSSPTDITPPPSPEDLAELWGHGFSEAAADVGLTRASPAARNPVLRRPPILEDYVHVTSTEGVRAYLVLRADPMAPGVQGSLLHVPWRGGGQLDLLGVSLASLKKQVDGERRERLLQEAQKLSDTLHRSGEEEAAQPLGAPEEEPTDGQDASSHCLWVDEFAPRHYTELLSDDFTNRCLLKWLKLWDLVVFGHERPSRKPRPSVEPARVSKEATAPGKWKSHEQVLEEMLEAGLDPSQRPKQKVALLCGPPGLGKTTLAHVIARHAGYSVVEMNASDDRSPEVFRTRIEAATQMESVLGAGGKPNCLVIDEIDGAPVAAINVLLSILNRKGPQEVGPQGPAVPSGGGRRRRAEGGLLMRPIICICNDQFAPSLRQLKQQAFLLHFPPTLPSRLVQRLQEGMRADPGVLAALCEKTDNDIRACINTLQFLYSRGQRELSVRDVQATRVGLKDQRRGLFSVWQEVFQLPRAQRSSQHVSVLTCHGTPGDAGLVVLQDMGDAGLGLWDVLLLAWTRRGTFPGRFYRVLHAAASAGEHEKVVQGLFDNFLRLRLRDSSLGAVCVALDWLAFDDLLAGAAHHSQSFQLLRYPPFLPVAFHVLFASSHTPRITFPSSQQEAQNRMSQMRNLIQTLVSGIAPATRSRATPQALLLDALCLLLDILAPKLRPVSTQLYSTREKQQLASLVGTMLAYSLTYRQERTPDGQYIYRLEPNVEELCRFPELPARKPLTYQTKQLIAREIEVEKMRRAEASARVENSPQVDGSPPGLEGLLGGIGEKGVHRPAPRNHEQRLEHIMRRAAREEQPEKDFFGRVVVRSTAVPSAGDTAPEQDSVERRMGTAVGRSEVWFRFNEGVSNAVRRSLYIRDLL

SEQ ID NO: 9626 - protein, 120 aa, Homo sapiens
IKWKGWSYIHSTWESEESLQQQKVKGLKKLENFKKKEDEIKQWLGKVSPEDVEYFNCQQELASELNKQYQIVERVIAHSRKPAPSNEPEYLCKWMGLPYSECSWEDEALIGKKFQNCIDS

SEQ ID NO: 9627 - protein, 165 aa, Homo sapiens
MVLEYCPGGELFDYIISQDRLSEEETRVVFRQIVSAVAYVHSQGYAHRDLKPENLLFDEYHKLKLIDFGLCAKPKGNKDYHLQTCCGSLAYAAPELIQGKSYLGSEMEFHCVAQAGVQWRDLGSLQPPTLGFKRFSCLSLPSSWDCRCLEHGHTVICSYVWISTI

SEQ ID NO: 9628 - protein, 392 aa, Homo sapiens [sequence omitted]

SEQ ID NO: 9629 - protein, 329 aa, Homo sapiens
MATATPVPPRMGSRAGGPTTPLSPTRLSRLQEKEELRELNDRLAVYIDKVRSLETENSALQLQVTEREEVRGRELTGLKALYETELADARRALDDTARERAKLQIELGKCKAEHDQLLLNYAKKESDLNGAQIKLREYEAALNSKDAALATALGDKKSLEGDLEDLKDQIAQLEASLAAAKKQLADETLLKVDLENRCQSLTEDLEFRKSMYEEEINETRRKHETRLVEVDSGRQIEYEYKLAQALHEMREQHDAQVRLYKEELEQTYHAKLENARLSSEMNTSTVNSAREELMESRMRIESLSSQLSNLQKECLLLSHISFIMLPIRP

SEQ ID NO: 9630 - protein, 748 aa, Homo sapiens
MKTSPRRPLILKRRRLPLPVQNAPSETSEEEPKRSPAQQESNQAEASKEVAESNSCKFPAGIKIINHPTMPNTQVVAIPNNANIHSIITALTAKGKESGSSGPNKFILISCGGAPTQPPGLRPQTQTSYDAKRTEVTLETLGPKPAARDVNLPRPPGALCEQKRETCDGEAAGCTINNSLSNIQWLRKMSSDGLGSRSIKQEMEEKENCHLEQRQVKVEEPSRPSASWQNSVSERPPYSYMAMIQFAINSTERKRMTLKDIYTWIEDHFPYFKHIAKPGWKNSIRHNLSLHDMFVRETSANGKVSFWTIHPSANRYLTLDQVFKQQQKRPNPELRRNMTIKTELPLGARRKMKPLLPRVSSYLVPIQFPVNQSLVLQPSVKVPLPLAASLMSSELARHSKRVRIAPKVLLAEEGIAPLSSAGPGKEEKLLFGEGFSPLLPVQTIKEEEIQPGEEMPHLARPIKVESPPLEEWPSPAPSFKEESSHSWEDSSQSPTPRPKKSYSGLRSPTRCVSEMLVIQHRERRERSRSRRKQHLLPPCVDEPELLFSEGPSTSRWAAELPFPADSSDPASQLSYSQEVGGPFKTPIKETLPISSTPSKSVLPRTPESWRLTPPAKVGGLDFSPVQTSQGASDPLPDPLGLMDLSTTPLQSAPPLESPQRLLSSEPLDLISVPFGNSSPSDIDVPKPGSPEPQVSGLAANRSLTEGLVLDTMNDSLSKILLDISFPGLDEDPLGPDNINWSQFIPELQ

SEQ ID NO: 9631 - protein, 262 aa, Homo sapiens
MQEGELAISPISPVAAMPPLGTHVQARCEAQINLLGEGGICKLPGRLRDVLYELLQYIKTQRRALVCGPFFGGIFRLKTPTQHSPVPPEEVTGPSQMDTRRGHLLQPPDPGLTSNFGHLDDPGLARWTPGKEESLNLCHCAELGCRTQGVCSFPAMPQAPIDGRIADCRLLWDYVYQLLLDTRYEPYIKWEDKDAKIFRVVDPNGLARLWGNHKNRVNMTYEKMSRALRHYYKLNIIKKEPGQKLLFRNGLQLIFIFIWSFQ

SEQ ID NO: 9632 - protein, 157 aa, Homo sapiens
MVLEYCPGGELFDYIISQDRLSEEETRVVFRQIVSAVAYVHSQGYAHRDLKPENLLFDEYHKLKLIDFGLCAKPKGNKDYHLQTCCGSLAYAAPELIQGKSYLGSEAGVQWRDLGSLQPPTLGFKRFSCLSLPSSWDCRCLEHGHTVICSYVWISTI

SEQ ID NO: 9633 - protein, 147 aa, Homo sapiens
MHDVIKKVKKKGEWKVLVVDQLSMRMLSSCCKMTDIMTEGITIVEDINKRREPLPSLEAVYLITPSEKSVHSLISDFKDPPTAKYRAAHVFFTDSCPDALFNELVKSRAAKVIKTLTEINIAFLPYESQVYSLDSADSFQSFYSPHK

SEQ ID NO: 9634 - protein, 602 aa, Homo sapiens
MPQLNGGGGDDLGANDELISFKDEGEQEEKSSENSSAERDLADVKSSLVNESETNQNSSSDSEAERRPPPRSESFRDKSRESLEEAAKRQDGGLFKGPPYPGYPFIMIPDLTSPYLPNGSLSPTARTLHFQSGSTHYSAYKTIEHQIAVQYLQMKWPLLDVQAGSLQSRQALKDARSPSPAHIVSNKVPVVQHPHHVHPLTPLITYSNEHFTPGNPPPHLPADVDPKTGIPRPPHPPDISPYYPLSPGTVGQIPHPLGWLVPQQGQPVYPITTGGFRHPYPTALTVNASMSRFPPHMVPPHHTLHTTGIPHPAIVTPTVKQESSQSDVGSLHSSKHQDSKKEEEKKKPHIKKPLNAFMLYMKEMRAKVVAECTLKESAAINQILGRRWHALSREEQAKYYELARKERQLHMQLYPGWSARDNYGKKKKRKRDKQPGETNDANTPKKCRALFGLDRQTLWCKPCRRKKKCVRYIQGEGSCLSPPSSDGSLLDSPPPSPNLLGSPPRDAKSQTEQTQPLSLSLKPDPLAHLSMMPPPPALLLAEATHKASALCPNGALDLPPAALQPAAPSSSIAQPSTSSLHSHSSLAGTQPQPLSLVTKSLE

SEQ ID NO: 9635 - protein, 33 aa, Homo sapiens
MEEDQELERKAIEELLKEAKRGKTRAETMGPMG

SEQ ID NO: 9636 - protein, 149 aa, Homo sapiens
MHDVIKKVKKKGEWKVLVVDQLSMRMLSSCCKMTDIMTEGITIVEDINKRREPLPSLEAVYLITPSEKSVHSLISDFKDPPTAKYRAAHVFFTDSCPDALFNELVKSRAAKVIKTLTEINIAFLPYESQVYSLDSADSFQSFYSPHKAQ

SEQ ID NO: 9637 - protein, 166 aa, Homo sapiens
MATATPVPPRMGSRAGGPTTPLSPTRLSRLQEKEELRELNDRLAVYIDKVRSLETENSALQLQVTEREEVRGRELTGLKALYETELADARRALDDTARERAKLQIELGKCKAEHDQLLLNYAKKESDLNGAQIKLREYEAALNSKDAALATALGDKKSLEGDLEDL

SEQ ID NO: 9638 - protein, 118 aa, Homo sapiens
MNTSLSWFEQLDVLLNATDGNVVRNKQWLYPLGVSTELIGLCICFFCSSGCIFLGSPPQNSTAVTPAVLWEESEIMQKELKLLQYQLSQHQELLLKQLAEGRQAQVGSWKLLIQSSGQ

SEQ ID NO: 9639 - protein, 43 aa, Homo sapiens
MSGPIDNAIDWNPDWRRLPRELKIRVRKLQKERITILLPKRPP

SEQ ID NO: 9640 - protein, 410 aa, Homo sapiens
MFPFLSFNINGLNPTAHYNVFVEVVLADPNHWRFQGGKWVTCGKADNNMQGNKMYVHPESPNTGSHWMRQEISFGKLKLTNNKGANNNNTQMIVLQSLHKYQPRLHIVEVTEDGVEDLNEPSKTQTFTFSETQFIAVTAYQNTDITQLKIDHNPFAKGFRDNYDSMYTASENDRLTPSPTDSPRSHQIVPGGRYGVQSFFPEPFVNTLPQARYYNGERTVPQTNGLLSPQQSEEVANPPQRWLVTPVQQPGTNKLDISSYESEYTSSTLLPYGIKSLPLQTSHALGYYPDPTFPAMAGWGGRGSYQRKMAAGLPWTSRTSPTVFSEDQLSKEKVKEEIGSSWIETPPSIKSLDSNDSGVYTSACKRRRLSPSNSSNENSPSIKCEDINAEEYSKDTSKGMGGYYAFYTTP

SEQ ID NO: 9641 - protein, 150 aa, Homo sapiens
MEVRSESTNGDGRQSQADEHNDVQKKTFTKWINARFSKSGKPPINDMFTDLKDGRKLLDLLEGLTGTSLPKERGSTRVHALNNVNRVLQVLHQNNVELVNIGGTDIVDGNHKLTLGLLWSIILHWQVKDVMKDVMSDLQQTNSEKILLSW

SEQ ID NO: 9642 - protein, 559 aa, Homo sapiens
MPGGGPQGAPAAAGGGGVSHRAGSRDCLPPAACFRRRRLARRPGYMRSSTGPGIGFLSPAVGTLFRFPGGVSGEESHHSESRARQCGLDSRGLLVRSPVSKSAAAPTVTSVRGTSAHFGIQLRGGTRLPDRLSWPCGPGSAGWQQEFAAMDSSETLDASWEAACSDGARRVRAAGSLPSAELSSNSCSPGCGPEVPPTPPGSHSAFTSSFSFIRLSLGSAGERGEAEGCPPSREAESHCQSPQEMGAKAASLDGPHEDPRCLSRPFSLLATRVSADLAQAARNSSRPERDMHSLPDMDPGSSSSLDPSLAGCGGDGSSGSGDAHSWDTLLRKWEPVLRDCLLRNRRQMEVISLRLKLQKLQEDAVENDDYDKAETLQQRLEDLEQEKISLHFQLPSRQPALSSFLGHLAAQVQAALRRGATQQASGDDTHTPLRMEPRLLEPTAQDSLHVSITRRDWLLQEKQQLQKEIEALQARMFVLEAKDQQLRREIEEQEQQLQWQGCDLTPLVGQLSLGQLQEVSKALQDTLASAGQIPFHAEPPETIRRNKCEGKYYEVHGNT

SEQ ID NO: 9643 - protein, 580 aa, Homo sapiens
MHDVIKKVKKKGEWKVLVVDQLSMRMLSSCCKMTDIMTEGITIVEDINKRREPLPSLEAVYLITPSEKSVHSLISDFKDPPTAKYRAAHVFFTDSCPDALFNELVKSRAAKVIKTLTEINIAFLPYESQVYSLDSADSFQSFYSPHKAQMKNPILERLAEQIATLCATLKEYPAVRYRGEYKDNALLAQLIQDKLDAYKADDPTMGEGPDKARSQLLILDRGFDPSSPVLHELTFQAMSYDLLPIENDVYKYETSGIGEARVKEVLLDEDDDLWIALRHKHIAEVSQEVTRSLKDFSSSKRMNTGEKTTMRDLSQMLKKMPQYQKELSKYSTHLHLAEDCMKHYQGTVDKLCRVEQDLAMGTDAEGEKIKDPMRAIVPILLDANVSTYDKIRIILLYIFLKNGITEENLNKLIQHAQIPPEDSEIITNMAHLGVPIVTDSTLRRRSKPERKERISEQTYQLSRWTPIIKDIMEDTIEDKLDTKHYPYISTRSSASFSTTAVSARYGHWHKNKAPGEYRSGPRLIIFILGGVSLNEMRCAYEVTQANGKWEVLIGSTHILTPQKLLDTLKKLNKTDEEISS

SEQ ID NO: 9644 - protein, 83 aa, Homo sapiens [sequence omitted]

SEQ ID NO: 9645 - protein, 417 aa, Homo sapiens
MGRKKIQITRIMDERNRQVTFTKRKFGLMKKAYELSVLCDCEIALIIFNSTNKLFQYASTDMDKVLLKYTEYNEPHESRTNSDIVEAVPPPNFEMPVSIPVSSHNSLVYSNPVSSLGNPNLLPLAHPSLQRNSMSPGVTHRPPSAGNTGGLMGGDLTSGAGTSAGNGYGNPRNSPGLLVSPGNLNKNMQAKSPPPMNLGMNNRKPDLRVLIPPGSKNTMPSVNQRINNSQSAQSLATPVVSVATPTLPGQGMGGYPSAISTTYGTEYSLSSADLSSLSGFNTASALHLGSVTGWQQQHLHNMPPSALSQLGACTSTHLSQSSNLSLPSTQSLNIKSEPVSPPRDRTTTPSRYPQHTRHEAGRSPVDSLSSCSSSYDGSDREDHRNEFHSPIGLTRPSPDERESPSVKRMRLSEGWAT

SEQ ID NO: 9646 - protein, 962 aa, Homo sapiens
MEDGKPVWAPHPTDGFQMGNIVDIGPDSLTIEPLNQKGKTFLALINQVFPAEEDSKKDVEDNCSLMYLNEATLLHNIKVRYSKDRIYTYVANILIAVNPYFDIPKIYSSEAIKSYQGKSLGTRPPHVFAIADKAFRDMKVLKMSQSIIVSGESGAGKTENTKFVLRYLTESYGTGQDIDDRIVEANPLLEAFGNAKTVRNNNSSRFGKFVEIHFNEKSSVVGGFVSHYLLEKSRICVQGKEERNYHIFYRLCAGASEDIREKLHLSSPDNFRYLNRGCTRYFANKETDKQILQNRKSPEEDEYLKAGSMKDPLLDDHGDFIRMCTAMKKIGLDDEEKLDLFRVVAGVLHLGNIDFEEAGSTSGGCNLKNKSAQSLEYCAELLGLDQDDLRVSLTTRVMLTTAGGTKGTVIKVPLKVEQANNARDALAKTVYSHLFDHVVNRVNQCFPFETSSYFIGVLDIAGFEYFEHNSFEQFCINYCNEKLQQFFNERILKEEQELYQKEGLGVNEVHYVDNQDCIDLIEAKLVGILDILDEENRLPQPSDQHFTSAVHQKHKDHFRLTIPRKSKLAVHRNIRDDEGFIIRHFAGAVCYETTQFVEKNNDALHMSLESLICESRDKFIRELFESSTNNNKDTKQKAGKLSFISVGNKFKTQLNLLLDKLRSTGASFIRCIKPNLKMTSHHFEGAQILSQLQCSGMVSVLDLMQGGYPSRASFHELYNMYKKYMPDKLARLDPRLFCKALFKALGLNENDYKFGLTKVFFRPGKFAEFDQIMKSDPDHLAELVKRVNHWLTCSRWKKVQWCSLSVIKLKNKIKYRAEACIKMQKTIRMWLCKRRHKPRIDGLVKVGTLKKRLDKFNEVVSVLKDGKPEMNKQIKNLEISIDTLMAKIKSTMMTQEQIQKEYDALVKSSEELLSALQKKKQQEEEAERLRRIQEEMEKERKRREEDEKRRRKEEEERRMKLE

SEQ ID NO: 9647 - protein, 860 aa, Homo sapiens
MATAAVLRGPAAHWVESFQKAREEGSGSGTWRGRWRRRSVISFGSKNRTIGVAAKNQQITHANNTVSNFKRFHGRAFNDPFIQKEKENLSYDLVPLKNGGVGIKVMYMGEEHLFSVEQITAMLLTKLKETAENSLKKPVTDCVISVPSFFTDAERRSVLDAAQIVGLNCLRLMNDMTAVALNYGIYKQDLPSLDEKPRIVVFVDMGHSAFQVSACAFNKGKLKVLGTAFDPFLGGKNFDEKLVEHFCAEFKTKYKLDAKSKIRALLRLYQECEKLKKLMSSNSTDLPLNIECFMNDKDVSGKMNRSQFEELCAELLQKIEVPLYSLLEQTHLKVEDVSAVEIVGGATRIPAVKERIAKFFGKDISTTLNADEAVARGCALQCAILSPAFKVREFSVTDAVPFPISLIWNHDSEDTEGVHEVFSRNHAAPFSKVLTFLRRGPFELEAFYSDPQGVPYPEAKIGRFVVQNVSAQKDGEKSRVKVKVRVNTHGIFTISTASMVEKVPTEENEMSSEADMECLNQRPPENPDTDKNVQQDNSEAGTQPQVQTDAQQTSQSPPSPELTSEENKIPDADKANEKKVDQPPEAKKPKIKVVNVELPIEANLVWQLGKDLLNMYIETEGKMIMQDKLEKERNDAKNAVEEYVYEFRDKLCGPYEKFICEQDHQNFLRLLTETEDWLYEEGEDQAKQAYVDKLEELMKIGTPVKVRFQEAEERPKMFEELGQRLQHYAKIAADFRNKDEKYNHIDESEMKKVEKSVNEVMEWMNNVMNAQAKKSLDQDPVVRAQEIKTKIKELNNTCEPVVTQPKPKIESPKLERTPNGPNIDKKEEDLEDKNNFGAEPPHQNGECYPNEKNSVNMDLD

SEQ ID NO: 9648 - protein, 141 aa, Homo sapiens
MKQPIMADGPRCKRRKQANPRRKNVVNYDNVVDTGSETDEEDKLHIAEDDGIANPLDQETSPASVPNHESSPHVSQALLPREEEEDEIREGGVEHPWHNNEILQASVDGPEEMKEDYDTMGPEATIQTAINNGTVKNANCT

SEQ ID NO: 9649 - protein, 584 aa, Homo sapiens
MPQLNGGGGDDLGANDELISFKDEGEQEEKSSENSSAERDLADVKSSLVNESETNQNSSSDSEAERRPPPRSESFRDKSRESLEEAAKRQDGGLFKGPPYPGYPFIMIPDLTSPYLPNGSLSPTARTYLQMKWPLLDVQAGSLQSRQALKDARSPSPAHIVSNKVPVVQHPHHVHPLTPLITYSNEHFTPGNPPPHLPADVDPKTGIPRPPHPPDISPYYPLSPGTVGQIPHPLGWLVPQQGQPVYPITTGGFRHPYPTALTVNASMSSFLSSRFPPHMVPPHHTLHTTGIPHPAIVTPTVKQESSQSDVGSLHSSKHQDSKKEEEKKKPHIKKPLNAFMLYMKEMRAKVVAECTLKESAAINQILGRRWHALSREEQAKYYELARKERQLHMQLYPGWSARDNYGKKKKRKRDKQPGETNDANTPKKCRALFGLDRQTLWCKPCRRKKKCVRYIQGEGSCLSPPSSDGSLLDSPPPSPNLLGSPPRDAKSQTEQTQPLSLSLKPDPLAHLSMMPPPPALLLAEATHKASALCPNGALDLPPAALQPAAPSSSIAQPSTSSLHSHSSLAGTQPQPLSLVTKSLE

SEQ ID NO: 9650 - protein, 471 aa, Homo sapiens
MGRKKIQITRIMDERNRQVTFTKRKFGLMKKAYELSVLCDCEIALIIFNSTNKLFQYASTDMDKVLLKYTEYNEPHESRTNSDIVEALNKKENKGCESPDPDSSYALTPRTEEKYKKINEEFDNMIKSHKIPAVPPPNFEMPVSIPVSSHNSLVYSNPVSSLGNPNLLPLAHPSLQRNSMSPGVTHRPPSAGNTGGLMGGDLTSGAGTSAGNGYGNPRNSPGLLVSPGNLNKNMQAKSPPPMNLGMNNRKPDLRVLIPPGSKNTMPSVSEDVDLLLNQRINNSQSAQSLATPVVSVATPTLPGQGMGGYPSAISTTYGTEYSLSSADLSSLSGFNTASALHLGSVTGWQQQHLHNMPPSALSQLGACTSTHLSQSSNLSLPSTQSLNIKSEPVSPPRDRTTTPSRYPQHTRHEAGRSPVDSLSSCSSSYDGSDREDHRNEFHSPIGLTRPSPDERESPSVKRMRLSEGWAT

SEQ ID NO: 9651 - protein, 86 aa, Homo sapiens
MKELSVLSLICSCFYTQPHPNTVYQYGDMEVKQLDKRASGQSFEVILKSPSDLSPESPMLSSPPKKKDTSLEELQKRLEAAEERRK

SEQ ID NO: 9652 - protein, 60 aa, Homo sapiens
MTFGQSKLYRSEDYGKNFKDITDLINNTFIRTEFGMAIGPENSGKVVLTAEVSGGSRGGR

SEQ ID NO: 9653 - protein, 835 aa, Homo sapiens
MERTDSVTLFWIRGGHSNSPAGSVAHSTTSDIRPSHSVPEGVHGRVAVGQDARFPSLTSPVLRTPSSEPDEPHQARSGPNPPGMESMGMVYSVPSSCNGPTESTFSTSWKGDAFTYMTPSATSQSNQVNENGKNPSCGNSWVSLNKVPPLVPKEAATLLVARDNPAGCSGSAGYPERLIQQRHMPERPSKIGLLTSGTSRLETGPGGASRFRERSLSVPTDSGTTDVDYDEEQKANEACALPFASTSSEGSNSADNIASLSAQQEAQHRRQRSKSISLRKAKKKPSPPTRSVSLVKDEPGLLPEGGSALPKDQRPKSLCLSLEHQGHHSSHPDAQGHPAIPNHKDPESTQFSHHWYLTDWKSGDTYQSLSSSSTATGTTVIECTQVQGSSESLASPSTSRATTPSQLSIEVEAREISSPGRPPGLMSPSSGYSSQSETPTPTVSMSLTLGHLPPPSSSVRVRPVVPERKSSLPPTSPMEKFPKSRLSFDLPLTSSPNLDLSGMSISIRSKTKVSRHHSETNFGVKLAQKTNPNQPIMPMVTQSDLRSVRLRSVSKSEPEDDIESPEYAEEPRAEEVFTLPERKTKPPVAEKPPVARRPPSLVHKPPSVPEEYALTSPTLAMPPRSSIQHARPLPQDSYTVVRKPKPSSFPDGRSPGESTAPSSLVFTPFASSSDAFFSGTQQPPQGSVEDEGPKVRVLPERISLQSQEEAEKKKGKIPPPVPKKPSVLYLPLTSPTAQMEAYVAEPRLPLSPIITLEEDTKCPATGDDLQSLGQRVTSTPQADSEREASPLGSSVEPGTEEKSLISDKTAEWIAEDDDDVFVASRTTEDLFTVIH

SEQ ID NO: 9654 - protein, 84 aa, Homo sapiens
MGRLVAVGLLGIALALLGERLLALRNRLKASREVESVDLPHCHLIKGIEAGSEDIDILPNGLAFFSVVSVFFLPQIQQRRYKGI

SEQ ID NO: 9655 - protein, 118 aa, Homo sapiens
MTFGQSKLYRSEDYGKNFKDITDLINNTFIRTEFGMAIGPENSGKVVLTAEVSGGSRGGRIFRSSDFAKNFVQTDLPFHPLTQMMYSPQNSDYLLALSTENGLWVSKNFGGKWEEIHK

SEQ ID NO: 9656 - protein, 166 aa, Homo sapiens
MVEKGSDHSSDKSPSTPEQGVQRSCSSQSGRSGGKNSKKSQSWYNVLSPTYKQRNEDFRKLFKQLPDTERLIVDYSCALQRDILLQGRLYLSENWICFYSNIFRWETLLTVRLKDICSMTKEKTARLIPNAIQVCTDSEKHFFTSFGARDRTYMMMFRLWQNALLE

SEQ ID NO: 9657 - protein, 1225 aa, Homo sapiens
MPFYRRTVVPQRLCPRNPPQQLAELRDVSHLAALSLLRQLADLCGHSLALLEDLEGHLLALGRRTDSLYRRTVRLRRRLPCRLLGPEEDEEELAAANSGRENATATAHSRSSWRQPVNVFLSSGRPPSVEELLREAQLNLQSLLQEEYEEQYSEARLVGQTFRSSDEATKPTPNPRPQSARRLEFILMPTKRQLSEDETTTQGVRAPEASLSLSTTADKQTAWNSLFPLPILEEKRWPQLCSTQSDIVPINISGQQFDKHASLRHSLFNTETAVNPKSTLRRRRTIIGFSNFSQRDQGHSNSPAGSVAHSTTSDIRPSHSVPEGVHGRVAVGQDARFPSLTSPVLRTPSSEPDEPHQARSGPNPPGMESMGMVYSVPSSCNGPTESTFSTSWKGDAFTYMTPSATSQSNQVNENGKNPSCGNSWVSLNKVPPLVPKEAATLLVARDNPAGCSGSAGYPERLIQQRHMPERPSKIGLLTSGTSRLETGPGGASRFRERSLSVPTDSGTTDVDYDEEQKANEACALPFASTSSEGSNSADNIASLSAQQEAQHRRQRSKSISLRKAKKKPSPPTRSVSLVKDEPGLLPEGGSALPKDQRPKSLCLSLEHQGHHSSHPDAQGHPAIPNHKDPESTQFSHHWYLTDWKSGDTYQSLSSSSTATGTTVIECTQVQGSSESLASPSTSRATTPSQLSIEVEAREISSPGRPPGLMSPSSGYSSQSETPTPTVSMSLTLGHLPPPSSSVRVRPVVPERKSSLPPTSPMEKFPKSRLSFDLPLTSSPNLDLSGMSISIRSKTKVSRHHSETNFGVKLAQKTNPNQPIMPMVTQSDLRSVRLRSVSKSEPEDDIESPEYAEEPRAEEVFTLPERKTKPPVAEKPPVARRPPSLVHKPPSVPEEYALTSPTLAMPPRSSIQHARPLPQDSYTVVRKPKPSSFPDGRSPGESTAPSSLVFTPFASSSDAFFSGTQQPPQGSVEDEGPKVRVLPERISLQSQEEAEKKKGKIPPPVPKKPSVLYLPLTSPTAQMEAYVAEPRLPLSPIITLEEDTKCPATGDDLQSLGQRVTSTPQADSEREASPLGSSVEPGTEEKSLISDKTAEWIAEDDDDVFVASRTTEDLFTVIHRSKRKLLGWKEPGEAFVGGRTSSHSPIKNTAESPISESTATAGSGSSANLDAGRNDDFKALLQKKGSKATPRSRPSAAELLKTTNPLARRIIAQFSKDYETTDNPST

SEQ ID NO: 9658 - protein, 950 aa, Homo sapiens
MMGNSHHKQPRSKSQSRMHSATGHSNSPAGSVAHSTTSDIRPSHSVPEGVHGRVAVGQDARFPSLTSPVLRTPSSEPDEPHQARSGPNPPGMESMGMVYSVPSSCNGPTESTFSTSWKGDAFTYMTPSATSQSNQVNENGKNPSCGNSWVSLNKVPPLVPKEAATLLVARDNPAGCSGSAGYPERLIQQRHMPERPSKIGLLTSGTSRLETGPGGASRFRERSLSVPTDSGTTDVDYDEEQKANEACALPFASTSSEGSNSADNIASLSAQQEAQHRRQRSKSISLRKAKKKPSPPTRSVSLVKDEPGLLPEGGSALPKDQRPKSLCLSLEHQGHHSSHPDAQGHPAIPNHKDPESTQFSHHWYLTDWKSGDTYQSLSSSSTATGTTVIECTQVQGSSESLASPSTSRATTPSQLSIEVEAREISSPGRPPGLMSPSSGYSSQSETPTPTVSMSLTLGHLPPPSSSVRVRPVVPERKSSLPPTSPMEKFPKSRLSFDLPLTSSPNLDLSGMSISIRSKTKVSRHHSETNFGVKLAQKTNPNQPIMPMVTQSDLRSVRLRSVSKSEPEDDIESPEYAEEPRAEEVFTLPERKTKPPVAEKPPVARRPPSLVHKPPSVPEEYALTSPTLAMPPRSSIQHARPLPQDSYTVVRKPKPSSFPDGRSPGESTAPSSLVFTPFASSSDAFFSGTQQPPQGSVEDEGPKVRVLPERISLQSQEEAEKKKGKIPPPVPKKPSVLYLPLTSPTAQMEAYVAEPRLPLSPIITLEEDTKCPATGDDLQSLGQRVTSTPQADSEREASPLGSSVEPGTEEKSLISDKTAEWIAEDDDDVFVASRTTEDLFTVIHRSKRKLLGWKEPGEAFVGGRTSSHSPIKNTAESPISESTATAGSGSSANLDAGRNDDFKALLQKKGSKATPRSRPSAAELLKTTNPLARRIIAQFSKDYETTDNPST

SEQ ID NO: 9659 - protein, 117 aa, Homo sapiens
CKLLSTELQAELSRTGRSREVLELGQVLDTGKRKRHVPYSVSETRLEEALENLCERILDYSVHAERKGSLRYAKGQSQTMATLKGLVQKGVKVDLGIPLELWDEPSVEVTYLKKQSG

SEQ ID NO: 9660 - protein, 48 aa, Homo sapiens
MVRTKADSVPGTYRKVVAARAPRKVLGSSTSATNSTSVSSRKGYKMFT

SEQ ID NO: 9661 - protein, 2509 aa, Homo sapiens
MEEVVIAGMSGKLPESENLQEFWDNLIGGVDMVTDDDRRWKAGLYGLPRRSGKLKDLSRFDASFFGVHPKQAHTMDPQLRLLLEVTYEAIVDGGINPDSLRGTHTGVWVGVSGSETSEALSRDPETLVGYSMVGCQRAMMANRLSFFFDFRGPSIALDTACSSSLMALQNAYQAIHSGQCPAAIVGGINVLLKPNTSVQFLRLGMLSPEGTCKAFDTAGNGYCRSEGVVAVLLTKKSLARRVYATILNAGTNTDGFKEQGVTFPSGDIQEQLIRSLYQSAGVAPESFEYIEAHGTGTKVGDPQELNGITRALCATRQEPLLIGSTKSNMGHPEPASGLAALAKVLLSLEHGLWAPNLHFHSPNPEIPALLDGRLQVVDQPLPVRGGNVGINSFGFGGSNVHIILRPNTQPPPAPAPHATLPRLLRASGRTPEAVQKLLEQGLRHSQDLAFLSMLNDIAAVPATAMPFRGYAVLGGERGGPEVQQVPAGERPLWFICSGMGTQWRGMGLSLMRLDRFRDSILRSDEAVKPFGLKVSQLLLSTDESTFDDIVHSFVSLTAIQIGLIDLLSCMGLRPDGIVGHSLGEVACGYADGCLSQEEAVLAAYWRGQCIKEAHLPPGAMAAVGLSWEECKQRCPPGVVPACHNSKDTVTISGPQAPVFEFVEQLRKEGVFAKEVRTGGMAFHSYFMEAIAPPLLQELKKVIREPKPRSARWLSTSIPEAQWHSSLARTSSAEYNVNNLVSPVLFQEALWHVPEHAVVLEIAPHALLQAVLKRGLKPSCTIIPLMKKDHRDNLEFFLAGIGRLHLSGIDANPNALFPPVEFPAPRGTPLISPLIKWDHSLAWDVPAAEDFPNGSGSPSAAIYNIDTSSESPDHYLVDHTLDGRVLFPATGYLSIVWKTLARALGLGVEQLPVVFEDVVLHQATILPKTGTVSLEVRLLEASRAFEVSENGNLVVSGKVYQWDDPDPRLFDHPESPTPNPTEPLFLAQAEVYKELRLRGYDYGPHFQGILEASLEGDSGRLLWKDNWVSFMDTMLQMSILGSAKHGLYLPTRVTAIHIDPATHRQKLYTLQDKAQVADVVVSRWLRVTVAGGVHISGLHTESAPRRQQEQQVPILEKFCFTPHTEEGCLSERAALQEELQLCKGLVQALQTKVTQQGLKMVVPGLDGAQIPRDPSQQELPRLLSAACRLQLNGNLQLELAQVLAQERPKLPEDPLLSGLLDSPALKACLDTAVENMPSLKMKVVLAGHGHLYSRIPGLLSPHPLLQLSYTATDRHPQALEAAQAELQQHDVAQGQWDPADPAPSALGSADLLVCNCAVAALGDPASALSNMVAALREGGFLLLHTLLRGHPLGDIVAFLTSTEPQYGQGILSQDAWESLFSRVSLRLVGLKKSFYGSTLFLCRRPTPQDSPIFLPVDDTSFRWVESLKGILADEDSSRPVWLKAINCATSGVVGLVNCLRREPGGNRLRCVLLSNLSSTSHVPEVDPGSAELQKVLQGDLVMNVYRDGAWGAFRHFLLEEDKPEEPTAHAFVSTLTRGDLSSIRWVCSSLRHAQPTCPGAQLCTVYYASLNFRDIMLATGKLSPDAIPGKWTSQDSLLGMEFSGRDASGKRVMGLVPAKGLATSVLLSPDFLWDVPSNWTLEEAASVPVVYSTAYYALVVRGRVRPGETLLIHSGSGGVGQAAIAIALSLGCRVFTTVGSAEKRAYLQARFPQLDSTSFANSRDTSFEQHVLWHTGGKGVDLVLNSLAEEKLQASVRCLATHGRFLEIGKFDLSQNHPLGMAIFLKNVTFHGVLLDAFFNESSADWREVWALVQAGIRDGVVRPLKCTVFHGAQVEDAFRYMAQGKHIGKVVVQVLAEEPEAVLKGAKPKLMSAISKTFCPAHKSYIIAGGLGGFGLELAQWLIQRGVQKLVLTSRSGIRTGYQAKQVRRWRRQGVQVQVSTSNISSLEGARGLIAEAAQLGPVGGVFNLAVVLRDGLLENQTPEFFQDVCKPKYSGTLNLDRVTREACPELDYFVVFSSVSCGRGNAGQSNYGFANSAMERICEKRRHEGLPGLAVQWGAIGDVGILVETMSTNDTIVSGTLPQRMASCLEVLDLFLNQPHMVLSSFVLAEKAAAYRDRDSQRDLVEAVAHILGIRDLAAVNLDSSLADLGLDSLMSVEVRQTLERELNLVLSVREVRQLTLRKLQELSSKADEASELACPTPKEDGLAQQQTQLNLRSLLVNPEGPTLMRLNSVQSSERPLFLVHPIEGSTTVFHSLASRLSIPTYGLQCTRAAPLDSIHSLAAYYIDCIRQVQPEGPYRVAGYSYGACVAFEMCSQLQAQQSPAPTHNSLFLFDGSPTYVLAYTQSYRAKLTPGCEAEAETEAICFFVQQFTDMEHNRVLEALLPLKGLEERVAAAVDLIIKSHQGLDRQELSFAARSFYYKLRAAEQYTPKAKYHGNVMLLRAKTGGAYGEDLGADYNLSQVCDGKVSVHVIEGDHRTLLEGSGLESIISIIHSSLAEPRVSVREG

SEQ ID NO: 9662 - protein, 651 aa, Homo sapiens
ETVEKAEAPLITESAFDAGFEKLLKEITEAPPYQPQVSVREETHEKESSQSEQTRFLGTVPHFYRAASQTSEMKDKSNGLESQVNQCDKMLGGDALVTDLLVDFCGSRSGVEIPRTPQLYVAHEIGTIKTVTPPEDRDSESGVAGGQGTLQEPGFGEASEAISVSRNRQPIPLLMNKENSTKTSKVELTLASPYMKQEKEEEKEGFSESDFSDGNTSSNAESWRNPSSSEEEPSPVLKTLERSAARKMPSKSLEDISSDSSNQAKVDNQPEELVRSAEDDEKPDQKPVTNECVPRISTVPTQPDNPFSHPDKLKRMSKSVPAFLQDEVSGSVMSVYSGDFGNLEVKGNIQFAIEYVESLKELHVFVAQCKDLAAADVKKQRSDPYVKAYLLPDKGKMGKKKTLVVKKTLNPVYNEILRYKIEKQILKTQKLNLSIWHRDTFKRNSFLGEVELDLETWDWDNKQNKQLRWYPLKRKTAPVALEAENRGEMKLALQYVPEPVPGKKLPTTGEVHIWVKECLDLPLLRGSHLNSFVKCTILPDTSRKSRQKTRAVGKTTNPIFNHTMVYDGFRPEDLMEACVELTVWDHYKLTNQFLGGLRIGFGTGKSYGTEVDWMDSTSEEVALWEKMVNSPNTWIEATLPLRMLLIAKISK

SEQ ID NO: 9663 - protein, 96 aa, Homo sapiens
MGLLMGEARAVLKWADGKMIKNEVDMQVLHLLGPKLEADLEKKFKVAKARLEETDRRTAKDVVENGETADQTLSLMEQLRGEALKFHKPGENYKTP

SEQ ID NO: 9664 - protein, 116 aa, Homo sapiens
MVRTKADSVPGTYRKVVAARAPRKVLGSSTSATNSTSVSSRKAENKYAGGNPVCVRPTPKWQKGIGEFFRLSPKDSEKENQIPEEAGSSGLGKAKRKLQDVHLRLRPSDYISYGNK

SEQ ID NO: 9665 - protein, 1276 aa, Homo sapiens
LKERMDEPNAEQVYNPSQFENLRKFWDLEANSNSKDNDKNITTTSQKNSAPFNRQKHKEFSDIKLSGKNTHEAEVLLSPKKVMAREEMEKLNSKGILQVLPDEITFPLSPLRKYTYQLPGNESSKENVEKNTEGIVTPVFKEEKDYSEQEIQESIIKTNVLSKDCKDTFNDSLQKLLSETSTPAIQPSGGKVHGKQVLEPSVSENRTWPQKTDFADTEEEVKGPEKIINEHVDKTVVHPKVKRNSLTASLDKLLKEATGTSPSPLQAKLAPVITGTNSKLEEGRFFGKGIEQSHNTSADKREILAPFPVRDETFGNTALLKKAESGECQLSTQNLIQMAAEDSHPLDPTSQLSRKGSFGDVASPPQDMLFPQDAHLVPQARVHPSQTEISETVEKVILPPRPVLNDVSAALQKLCGEVWLSYPAGREVGPGEVNPEFPEAVQPVCSPLNPPGVISPWATMDTIVPDRKDFYSSNVVPDKTHEVGSYLAAQMSPSDQTLSSFASIVAQYGKGLPQEVEEIVRETIVQPKSEFLEFSAGLEKLLKEETETFPSKYESDTGNLSPSKLIGSTEEPRRATSECHPEELKETVEKAEAPLITESAFDAGFEKLLKEITEAPPYQPQVSVREETHEKESSQSEQTRFLGTVPHFYRAASQTSEMKDKSNGLESQVNQCDKMLGGDALVTDLLVDFCGSRSGVEIPRTPQLYVAHEIGTIKTVTPPEDRDSESGVAGGQGTLQEPGFGEASEAISVSRNRQPIPLLMNKENSTKTSKVELTLASPYMKQEKEEEKEGFSESDFSDGNTSSNAESWRNPSSSEEEPSPVLKTLERSAARKMPSKSLEDISSDSSNQAKVDNQPEELVRSAEDDEKPDQKPVTNECVPRISTVPTQPDNPFSHPDKLKRMSKSVPAFLQDESDDRETDTASESSYQLSRHKKSPSSLTNLSSSSGMTSLSSVSGSVMSVYSGDFGNLEVKGNIQFAIEYVESLKELHVFVAQCKDLAAADVKKQRSDPYVKAYLLPDKGKMGKKKTLVVKKTLNPVYNEILRYKIEKQILKTQKLNLSIWHRDTFKRNSFLGEVELDLETWDWDNKQNKQLRWYPLKRKTAPVALEAENRGEMKLALQYVPEPVPGKKLPTTGEVHIWVKECLDLPLLRGSHLNSFVKCTILPDTSRKSRQKTRAVGKTTNPIFNHTMVYDGFRPEDLMEACVELTVWDHYKLTNQFLGGLRIGFGTGKSYGTEVDWMDSTSEEVALWEKMVNSPNTWIEATLPLRMLLIAKISK

SEQ ID NO: 9666 - protein, 87 aa, Homo sapiens
SSWSMTFEERENRRLQEASMRLEQENDDLAHELVTSKIALRNDLDQAEDKADVLNKELLLTKQRLVETEEEKRKQEEETAQENHMCN

SEQ ID NO: 9667 - protein, 2223 aa, Homo sapiens
MIDLSFLTEEEQEAIMKVLQRDAALKRAEEERVRHLPEKIKDDQQLKNMSGQWFYEAKAKRHRDKIHGADIIRASMRKKRPQIAAEQSKDRENGAKESWVNNVNKDAFLPPELAGVVEEPEEDAAPASPSSSVVNPASSVIDMSQENTRKPNVSPEKQRKNPFNSSKLPEGHSSQQTKNEQSKNGRTGLFQTSKEDELSESKEKSTVADTSIQKLEKSKQTLPGLSNGSQIKAPIPKARKMIYKSTDLNKDDNQSFPRQRTDSLKARGAPRGILKRNSSSSSTDSETLRYNHNFEPKSKIVSPGLTIHERISEKEHSLEDNSSPNSLEPLKHVRFSAVKDELPQSPGLIHGREVGEFSVLESDRLKNGMEDAGDTEEFQSDPKPSQYRKPSLFHQSTSSPYVSKSETHQPMTSGSFPINGLHSHSEVLTARPQSMENSPTINEPKDKSSELTRLESVLPRSPADELSHCVEPEPSQVPGGSSRDRQQGKPPPLPALKAKTSSRSGPYATEIKKSTDDSIFKVLDWFNRSSYSDDNKSFLQHPRGIESKEKTDSKSQVAVDLVTDDTTLRENGSKTLSPSKIELKPVRSDSPFQAEGDMLVSESCQDNNVNIKSKFMNLSQKGTPKEGPGILQPFESYGTPSQGSKNMDYSQDSKSPGKGNGASPSNSNYSYSVLKESDAENQVPCNTNNIGNLGEEEPKFHAHEENRGHSEVNFDSSTVVKEPGLKDNMNAERKSKVGNTYILKASLEPENIKSTPGVANNGSPWKKPEVQFQQEAGEVPKNQVQREKYKRVSDRISFWEGEKAGAKITHEKPTSSCSQEQPSAKAYQPVKKSQGVSSMDSLSTDQSEYNQAIPKRVVLDEDDQASQLSNSYSSNKSKETKPQIAGPSRYYLSAEQSDKVSLFQNKKNEPIKRSQVADSLPSRRNITLPALQPPSNVGSERHAPLEKDRPLVRESNANFKVMSLKERMDEPNAEQVYNPSQFENLRKFWDLEANSNSKDNDKNITTTSQKNSAPFNRQKHKEFSDIKLSGKNTHEAEVLLSPKKVMAREEMEKLNSKGILQVLPDEITFPLSPLRKYTYQLPGNESSKENVEKNTEGIVTPVFKEEKDYSEQEIQESIIKTNVLSKDCKDTFNDSLQKLLSETSTPAIQPSGGKVHGKQVLEPSVSENRTWPQKTDFADTEEEVKGPEKIINEHVDKTVVHPKVKRNSLTASLDKLLKEATGTSPSPLQAKLAPVITGTNSKLEEGRFFGKGIEQSHNTSADKREILAPFPVRDETFGNTALLKKAESGECQLSTQNLIQMAAEDSHPLDPTSQLSRKGSFGDVASPPQDMLFPQDAHLVPQARVHPSQTEISETVEKVILPPRPVLNDVSAALQKLCGEVWLSYPAGREVGPGEVNPEFPEAVQPVCSPLNPPGVISPWATMDTIVPDRKDFYSSNVVPDKTHEVGSYLAAQMSPSDQTLSSFASIVAQYGKGLPQEVEEIVRETIVQPKSEFLEFSAGLEKLLKEETETFPSKYESDTGNLSPSKLIGSTEEPRRATSECHPEELKETVEKAEAPLITESAFDAGFEKLLKEITEAPPYQPQVSVREETHEKESSQSEQTRFLGTVPHFYRAASQTSEMKDKSNGLESQVNQCDKMLGGDALVTDLLVDFCGSRSGVEIPRTPQLYVAHEIGTIKTVTPPEDRDSESGVAGGQGTLQEPGFGEASEAISVSRNRQPIPLLMNKENSTKTSKVELTLASPYMKQEKEEEKEGFSESDFSDGNTSSNAESWRNPSSSEEEPSPVLKTLERSAARKMPSKSLEDISSDSSNQAKVDNQPEELVRSAEDVSTVPTQPDNPFSHPDKLKRMSKSVPAFLQDESDDRETDTASESSYQLSRHKKSPSSLTNLSSSSGMTSLSSVSGSVMSVYSGDFGNLEVKGNIQFAIEYVESLKELHVFVAQCKDLAAADVKKQRSDPYVKAYLLPDKGKMGKKKTLVVKKTLNPVYNEILRYKIEKQILKTQKLNLSIWHRDTFKRNSFLGEVELDLETWDWDNKQNKQLRWYPLKRKTAPVALEAENRGEMKLALQYVPEPVPGKKLPTTGEVHIWVKECLDLPLLRGSHLNSFVKCTILPDTSRKSRQKTRAVGKTTNPIFNHTMVYDGFRPEDLMEACVELTVWDHYKLTNQFLGGLRIGFGTGKSYGTEVDWMDSTSEEVALWEKMVNSPNTWIEATLPLRMLLIAKISK

SEQ ID NO: 9668 - protein, 169 aa, Homo sapiens
MSGRGKQGGKARAKAKTRSSRAGLQFPVGRVHRLLRKGNYSERVGAGAPVYLAAVLEYLTAEILELAGNAARDNKKTRIIPRHLQLAIRNDEELNKLLGKVTIAQGGVLPNIQAVLLPKKTESHHKAKGFRSSQWLVPSRLLASPRVGKRHASSWPPRLLERALQPPAA

SEQ ID NO: 9669 - protein, 683 aa, Homo sapiens
MPENPATDKLQVLQVLDRLKMKLQEKGDTSQNEKLSMFYETLKSPLFNQILTLQQSIKQLKGQLNHIPSDCSANFDFSRKGLLVFTDGSITNGNVHRPSNNSTVSGLFPWTPKLGNEDFNSVIQQMAQGRQIEYIDIERPSTGGLGFSVVALRSQNLGKVDIFVKDVQPGSVADRDQRLKENDQILAINHTPLDQNISHQQAIALLQQTTGSLRLIVAREPVHTKSSTSSSLNDTTLPETVCWGHVEEVELINDGSGLGFGIVGGKTSGVVVRTIVPGGLADRDGRLQTGDHILKIGGTNVQGMTSEQVAQVLRNCGNSVRMLVARDPAGDISVTPPAPAALPVALPTVASKGPGSDSSLFETYNVELVRKDGQSLGIRIVGYVGTSHTGEASGIYVKSIIPGSAAYHNGHIQVNDKIVAVDGVNIQGFANHDVVEVLRNAGQVVHLTLVRRKTSSSTSPLEPPSDRGTVVEPLKPPALFLTGAVETETNVDGEDEEIKERIDTLKNDNIQALEKLEKVPDSPENELKSRWENLLGPDYEVMVATLDTQIADDAELQKYSKLLPIHTLRLGVEVDSFDGHHYISSIVSGGPVDTLGLLQPEDELLEVNGMQLYGKSRREAVSFLKEVPPPFTLVCCRRLFDDEASVDEPRRTETSLPETENSLKYKRLTTIWMSILKKMMMGN

SEQ ID NO: 9670 - protein, 603 aa, Homo sapiens
MPVSTSLHQDGSQERPVSLTSTTSSSGSSCDSRSAMEEPSSSEAPAKNGAGSLRSRHLPNSNNNSSSWLNVKGPLSPFNSRAAAGPAHHKLSYLGRVVREIVETERMYVQDLRSIVESQEFDIYTQYCNNYPNSVAALTECMRDKQQAKFFRDRQELLQHSLPLGSYLLKPVQRILKYHLLLQEIAKHFDEEEDGFEVVEDAIDTMTCVAWYINDMKRRHEHAVRLQEIQSLLINWKGPDLTTYGELVLEGTFRVHRVRNERTFFLFDKTLLITKKRGDHFVYKGNIPCSSLMLIESTRDSLCFTVTHYKHSKQQYSIQAKTVEEKRNWTHHIKRLILENHHATIPQKAKEAILEMDSYYPNRYRCSPERLKKAWSSQDEVSTNVRQGRRQSEPTKHLLRQLNEKARAAGMKGKGRRESESSRSSRRPSGRSPTSTEKRMSFESISSLPEVEPDPEAGSEQEVFSAVEGPSAEETPSDTESPEVLETQLDAHQGLLGMDPPGDMVDFVAAESTEDLKALSSEEEEEMGGAAQEPESLLPPSVLDQASVIAERFVSSFSRRSSVAQEDSKSSGFGSPRLVSRSSSVLSLEGSEKGLARHGSATD

SEQ ID NO: 9671 - protein, 165 aa, Homo sapiens
RPPRPPPRGTPPRRHSFRKHLYLLRGLPGSGKTTLARQLQHDFPRALIFSTDDFFFREDGAYEFNPDFLEEAHEWNQKRARKAMRNGISPIIIDNTNLHAWEMKPYAVMALENNYEVIFREPDTRWKFNVQELARQIVSSKWICGLLHQNCLRWLLKSEFMDPIQ

SEQ ID NO: 9672 - protein, 798 aa, Homo sapiens
MDLSALRVEEVQNVINAMQKILECPICLELIKEPVSTKCDHIFCKFCMLKLLNQKKGPSQCPLCKNDITKRSLQESTRFSQLVEELLKIICAFQLDTGLEYANSYNFAKKENNSPEHLKDEVSIIQSMGYRNRAKRLLQSEPENPSLQETSLSVQLSNLGTVRTLRTKQRIQPQKTSVYIELAACEFSETDVTNTEHHQPSNNDLNTTEKRAAERHPEKYQGSSVSNLHVEPCGTNTHASSLQHENSSLLLTKDRMNVEKAEFCNKSKQPGLARSQHNRWAGSKETCNDRRTPSTEKKVDLNADPLCERKEWNKQKLPCSENPRDTEDVPWITLNSSIQKVNEWFSRSDELLGSDDSHDGESESNAKVADVLDVLNEVDEYSGSSEKIDLLASDPHEALICKSERVHSKSVESNIEDKIFGKTYRKKASLPNLSHVTENLIIGAFVTEPQIIQERPLTNKLKRKRRPTSGLHPEDFIKKADLAVQKTPEMINQGTNQTEQNGQVMNITNSGHENKTKGDSIQNEKNPNPIESLEKESAFKTKAEPISSSISNMELELNIHNSKAPKKNRLRRKSSTRHIHALELVVSRNLSPPNCTELQIDSCSSSEEIKKKKYNQMPVRHSRNLQLMEGKEPATGAKKSNKPNEQTSKRHDSDTFPELKLTNAPGSFTKCSNTSELKEFVNPSLPREEKEEKLETVKVSNNAEDPKDLMLSGERVLQTERSVESSSISLVPGTDYGTQESISLLEVSTLGKAKTEPNKCVSQCAAFENPKGLIHGCSKDNRNDTEGFKYPLGHEVNH

SEQ ID NO: 9673 - protein, 150 aa, Homo sapiens
MEEVVIAGMSGKLPESENLQEFWDNLIGGVDMVTDDDRRWKAGLYGLPRRSGKLKDLSRFDASFFGVHPKQAHTMDPQLRLLLEVTYEAIVDGGINPDSLRGTHTGVWVGVSGSETSEALSRDPETLVGYSMVGCQRAMMANRLSFFFDF

SEQ ID NO: 9674 - protein, 170 aa, Homo sapiens
MSGRGKQGGKARAKAKTRSSRAGLQFPVGRVHRLLRKGNYSERVGAGAPVYLAAVLEYLTAEILELAGNAARDNKKTRIIPRHLQLAIRNDEELNKLLGKVTIAQGGVLPNIQAVLLPKKTESHHKAKAGFRSSQWLVPSRLLASPRVGKRHASSWPPRLLERALQPPAA

SEQ ID NO: 9675 - protein, 188 aa, Homo sapiens
AKNLYSRLFSWLVNRINESIKAQTKVRKKVMGVLDIYGFEIFENADNSFEQFIINYCNEKLQQIFIELTLKEEQEEYIREDIEWTHIDYFNNAIICDLIENNTNGILAMLDEECLRPGTVTDETFLEKLNQVCATHQHFESRMSKCSRFLNDTSLPHSCFRIQHYAGKVLYQVEGFVDKNNDLLYRDL

SEQ ID NO: 9676 - protein, 866 aa, Homo sapiens
LKERMDEPNAEQVYNPSQFENLRKFWDLEANSNSKDNDKNITTTSQKNSAPFNRQKHKEFSDIKLSGKNTHEAEVLLSPKKVMAREEMEKLNSKGILQVLPDEITFPLSPLRKYTYQLPGNESSKENVEKNTEGIVTPVFKEEKDYSEQEIQESIIKTNVLSKDCKDTFNDSLQKLLSETSTPAIQPSGGKVHGKQVLEPSVSENRTWPQKTDFADTEEEVKGPEKIINEHVDKTVVHPKVKRNSLTASLDKLLKEATGTSPSPLQAKLAPVITGTNSKLEEGRFFGKGIEQSHNTSADKREILAPFPVRDETFGNTALLKKAESGECQLSTQNLIQMAAEDSHPLDPTSQLSRKGSFGDVASPPQDMLFPQDAHLVPQARVHPSQTEISETVEKVILPPRPVLNDVSAALQKLCGEVWLSYPAGREVGPGEVNPEFPEAVQPVCSPLNPPGVISPWATMDTIVPDRKDFYSSNVVPDKTHEVGSYLAAQMSPSDQTLSSFASIVAQYGKGLPQEVEEIVRETIVQPKSEFLEFSAGLEKLLKEETETFPSKYESDTGNLSPSKLIGSTEEPRRATSECHPEELKETVEKAEAPLITESAFDAGFEKLLKEITEAPPYQPQVSVREETHEKESSQSEQTRFLGTVPHFYRAASQTSEMKDKSNGLESQVNQCDKMLGGDALVTDLLVDFCGSRSGVEIPRTPQLYVAHEIGTIKTVTPPEDRDSESGVAGGQGTLQEPGFGEASEAISVSRNRQPIPLLMNKENSTKTSKVELTLASPYMKQEKEEEKEGFSESDFSDGNTSSNAESWRNPSSSEEEPSPVLKTLERSAARKMPSKSLEDISSDSSNQAKVDNQPEELVRSAEDDF

SEQ ID NO: 9677 - protein, 544 aa, Homo sapiens
ALELEGPLITPGSGTDVLYIGPLKGSIYSSPGLYSKTMTPTYDAHDGSPLSPTSAWFGDSALSEGNPGILAVSQPITSPEILAKMFKPQALLDKAKINQGWLDSSRSLMEQDVKENEALLLRFKYYSFFDLNPKYDAIRINQLYEQAKWAILLEEIECTEEEMMMFAALQYHINKLSIMTSENHLNNSDKEVDEVDAALSDLEITLEGGKTSTILGDITSIPELADYIKVFKPKKLTLKGYKQYWCTFKDTSISCYKSKEESSGTPAHQMNLRGCEVTPDVNISGQKFNIKLLIPVAEGMNEIWLRCDNEKQYAHWMAACRLASKGKTMADSSYNLEVQNILSFLKMQHLNPDPQLIPEQITTDITPECLVSPRYLKKYKNKQEKGCKKHMPGYIRDLITARILEAHQNVAQMSLIEAKMRFIQAWQSLPEFGITHFIARFQGGKKEELIGIAYNRLIRMDASTGDAIKTWRFSNMKQWNVNWEIKMVTVEFADEVRLSFICTEVDCKVVHEFIGGYIFLSTRAKDQNESLDEEMFYKLTSGWV

SEQ ID NO: 9678 - protein, 85 aa, Homo sapiens
SVSADEAARTAPFHLDLWFYFTLQNWVLDFGRPIAMLVFPLEWFPLNKPSVGDYFHMAYNVITPFLLLKGVTYCDRGGVMLPTPL

SEQ ID NO: 9679 - protein, 55 aa, Homo sapiens
MHDVIKKVKKKGEWKVLVVDQLSMRMLSSCCKMTDIMTEGITNSSSNLCAKTRSS

SEQ ID NO: 9680 - protein, 536 aa, Homo sapiens
MWRLPRALCVHAAKTSKLSGPWSRPAAFMSTLLINQPQYAWLKELGLREENEGVYNGSWGGRGEVITTYCPANNEPIARVRQASVADYEETVKKAREAWKIWADIPAPKRGEIVRQIGDALREKIQVLGSLVSLEMGKILVEGVGEVQEYVDICDYAVGLSRMIGGPILPSERSGHALIEQWNPVGLVGIITAFNFPVAVYGWNNAIAMICGNVCLWKGAPTTSLISVAVTKIIAKVLEDNKLPGAICSLTCGGADIGTAMAKDERVNLLSFTGSTQVGKQVGLMVQERFGRSLLELGGNNAIIDADLSLVVPSALFAAVGTAGQRCTTARRLFIHESIHDEVVNRLKKAYAQIRVGNPWDPNVLYGPLHTKQAVSMFLGAVEEAKKEGGTVVYGGKVMDRPGNYVEPTIVTGLGHDASIAHTETFAPILYVFKFKNEEEVFAWNNEVKQGLSSSIFTKDLGRIFRWLGPKGSDCGIVNVNIPTSGAEIGGAFGGEKHTGGGRESGSDAWKQYMRRSTCTINYSKDLPLAQGIKFQ

SEQ ID NO: 9681 - protein, 499 aa, Homo sapiens
MWRLPRALCVHAAKTSKLSGPWSRPAAFMSTLLINQPQYAWLKELGLREENEGVYNGSWGGRGEIPAPKRGEIVRQIGDALREKIQVLGSLVSLEMGKILVEGVGEVQEYVDICDYAVGLSRMIGGPILPSERSGHALIEQWNPVGLVGIITAFNFPVAVYGWNNAIAMICGNVCLWKGAPTTSLISVAVTKIIAKVLEDNKLPGAICSLTCGGADIGTAMAKDERVNLLSFTGSTQVGKQVGLMVQERFGRSLLELGGNNAIIAFEDADLSLVVPSALFAAVGTAGQRCTTARRLFIHESIHDEVVNRLKKAYAQIRVGNPWDPNVLYGPLHTKQAVSMFLGAVEEAKKEGGTVVYGGKVMDRPGNYVEPTIVTGLGHDASIAHTETFAPILYVFKFKNEEEVFAWNNEVKQGLSSSIFTKDLGRIFRWLGPKGSDCGIVNVNIPTSGAEIGGAFGGEKHTGGGRESGSDAWKQYMRRSTCTINYSKDLPLAQGIKFQ

SEQ ID NO: 9682 - protein, 56 aa, Homo sapiens
MSQEGAVPASAVPLEELSSWPEELCRRELPSVLPRLLSLSQHSDSWIEHIHCEIIR

SEQ ID NO: 9683 - protein, 574 aa, Homo sapiens
MAPIGLKAVVGEKIMHDVIKKVKKKGEWKVLVVDQLSMRMLSSCCKMTDIMTEGITIVEDINKRREPLPSLEAVYLITPSEKSVHSLISDFKDPPTAKYRAAHVFFTDSCPDALFNELVKSRAAKVIKTLTEINIAFLPYESQVYSLDSADSFQSFYSPHKAQMKNPILERLAEQIATLCATLKEYPAVRYRGEYKDNALLAQLIQDKLDAYKADDPTMGEGPDKARSQLLILDRGFDPSSPVLHELTFQAMSYDLLPIENDVYKYETSGIGEARVKEVLLDEDDDLWIALRHKHIAEVSQEVTRSLKDFSSSKRMNTGEKTTMRDLSQMLKKMPQYQKELSKYSTHLHLAEDCMKHYQGTVDKLCRVEQDLAMGTDAEGEKIKDPMRAIVPILLDANVSTYDKIRIILLYIFLKNGITEENLNKLIQHAQIPPEDSEIITNMAHLGVPIVTDSTLRRRSKPERKERISEQTYQLSRWTPIIKDIMEDTIEDKLDTKHYPYISTRSSASFSTTAVSARYGHWHKNKAPGEYRSGPRLIIFILGGVSLNEMRCAYEVTQANGKWEVLIVPVEAGS

SEQ ID NO: 9684 - protein, 589 aa, Homo sapiens
MHDVIKKVKKKGEWKVLVVDQLSMRMLSSCCKMTDIMTEGITIVEDINKRREPLPSLEAVYLITPSEKSVHSLISDFKDPPTAKYRAAHVFFTDSCPDALFNELVKSRAAKVIKTLTEINIAFLPYESQVYSLDSADSFQSFYSPHKAQMKNPILERLAEQIATLCATLKEYPAVRYRGEYKDNALLAQLIQDKLDAYKADDPTMGEGPDKARSQLLILDRGFDPSSPVLHELTFQAMSYDLLPIENDVYKYETSGIGEARVKEVLLDEDDDLWIALRHKHIAEVSQEVTRSLKDFSSSKRMNTGEKTTMRDLSQMLKKMPQYQKELSKYSTHLHLAEDCMKHYQGTVDKLCRVEQDLAMGTDAEGEKIKDPMRAIVPILLDANVSTYDKIRIILLYIFLKNGITEENLNKLIQHAQIPPEDSEIITNMAHLGVPIVTDSTLRRRSKPERKERISEQTYQLSRWTPIIKDIMEDTIEDKLDTKHYPYISTRSSASFSTTAVSARYGHWHKNKAPGEYRSGPRLIIFILGGVSLNEMRCAYEVTQANGKWEVLIGSTHILTPTKFLMDLRHPDFRESSRVSFEDQAPTME

SEQ ID NO: 9685 - protein, 149 aa, Homo sapiens
MSTRSVSSSSYRRMFGGPGTASRPSSSRSYVTTSTRTYSLGSALRPSTSRSLYASSPGGVYATRSSAVRLRSSVPGVRLLQDSVDFSLADAINTEFKNTRTNEKVELQELNDRFANYIDKVRFLEQQNKILLAELEQLKGQGKSRLGDL

SEQ ID NO: 9686 - protein, 1081 aa, Homo sapiens
MDDLDALLADLESTTSHISKRPVFLSEETPYSYPTGNHTYQEIAVPPPVPPPPSSEALNGTILDPLDQWQPSSSRFIHQQPQSSSPVYGSSAKTSSVSNPQDSVGSPCSRVGEEEHVYSFPNKQKSAEPSPTVMSTSLGSNLSELDRLLLELNAVQHNPPGFPADEANSSPPLPGALSPLYGVPETNSPLGGKAGPLTKEKPKRNGGRGLEDVRPSVESLLDELESSVPSPVPAITVNQGEMSSPQRVTSTQQQTRISASSATRELDELMASLSDFKTSSSTVALSAPGLSSSAPSSYCSLPPSPPPMPSVFLPPTTIPSPRGQGHTPEFPCTEQSGRGLLPPVAPSWLDLAGLGVMPDTFNSRSPSVEGSLWAVGTESQGRDWRHLPTITSELSGAPRCHTVPCAGSTALQEPGEPQGPPASPSCPEEALAATWEQPWASEVFGPERMPPSGAARSFQEVTEPAVVAVDRQAIFPDTWTLTEEHGLQQERPRPEPGRLGSSSPASVTTEQLGAKMTERGSVARPTQGPETPRSPEGTTEAATQDGKEQPELPCAMAMGTPSTTERISTSGQIRSVIRRSWESGHAHPMSREPSPRRRLDPATLSRTPSQEQLIAELQGRLGIQPEAEEPAEAAGPSAQDWLTEGVIITVQPRGKRAGGQLVEKVVFPPGSPIPLRRTISVLASPSVPLLQHRTDAAASSSSPLPSLLASSPLGPSAYTCGSSGVQSAGEEPHDEGVQGPALPIPAPHTMRSVGCQTDEDPLFPPMQIQGLEQRADGERCWAAGWPRDGGRSSPGGQDEGGFMAQGKTGSSSPPGGPPKPGSQLDSMLGSLQSDLNKLGVATVAKGVCGACKKPIAGQVVTAMGKTWHPEHFVCTHCQEEIGSRNFFERDGQPYCEKDYHNLFSPRCYYCNGPILDKVVTALDRTWHPEHFFCAQCGAFFGPEGFHEKDGKAYCRKDYFDMFAPKCGGCARAILENYISALNTLWHPECFVCRECFTPFVNGSFFEHDGQPYCEVHYHERRGSLCSGCQKPITGRCITAMAKKFHPEHFVCAFCLKQLNKGTFKEQNDKPYCQNCFLKLFC

SEQ ID NO: 9687 - protein, 108 aa, Homo sapiens
MEATRRRQHLGATGGPGAQLGASFLQARHGSVSADEAARTAPFHLDLWFYFTLQNWVLDFGRPIAMLVFPLEWFPLNKPSVGDYFHMAYNVITPFLLLKWLPAPPVCP

SEQ ID NO: 9688 - protein, 1249 aa, Homo sapiens
MRYKKYIGILEAAVGITPLNKRELLPESRRHVNLWQQPGVRSTTLLSSPCEWDWHPGCSSRSKYSRKHRAVPVHGPRCQAPGMEELIWEQYTVTLQKDSKRGFGIAVSGGRDNPHFENGETSIVISDVLPGGPADGLLQENDRVVMVNGTPMEDVLHSFAVQQLRKSGKVAAIVVKRPRKVQVAALQASPPLDQDDRAFEVMDEFDGRSFRSGYSERSRLNSHGGRSRSWEDSPERGRPHERARSRERDLSRDRSRGRSLERGLDQDHARTRDRSRGRSLERGLDHDFGPSRDRDRDRSRGRSIDQDYERAYHRAYDPDYERAYSPEYRRGARHDARSRGPRSRSREHPHSRSPSPEPRGRPGPIGVLLMKSRANEEYGLRLGSQIFVKEMTRTGLATKDGNLHEGDIILKINGTVTENMSLTDARKLIEKSRGKLQLVVLRDSQQTLINIPSLNDSDSEIEDISEIESNRSFSPEERRHQYSDYDYHSSSEKLKERPSSREDTPSRLSRMGATPTPFKSTGDIAGTVVPETNKEPRYQEDPPAPQPKAAPRTFLRPSPEDEAIYGPNTKMVRFKKGDSVGLRLAGGNDVGIFVAGIQEGTSAEQEGLQEGDQILKVNTQDFRGLVREDAVLYLLEIPKGEMVTILAQSRADVYRDILACGRGDSFFIRSHFECEKETPQSLAFTRGEVFRVVDTLYDGKLGNWLAVRIGNELEKGLIPNKSRAEQMASVQNAQRDNAGDRADFWRMRGQRSGVKKNLRKSREDLTAVVSVSTKFPAYERVLLREAGFKRPVVLFGPIADIAMEKLANELPDWFQTAKTEPKDAGSEKSTGVVRLNTVRQIIEQDKHALLDVTPKAVDLLNYTQWFPIVIFFNPDSRQGVKTMRQRLNPTSNKSSRKLFDQANKLKKTCAHLFTATINLNSANDSWFGSLKDTIQHQQGEAVWVSEGKMEGMDDDPEDRMSYLTAMGADYLSCDSRLISDFEDTDGEGGAYTDNELDEPAEEPLVSSITRSSEPVQHEESIRKPSPEPRAQMRRAASSDQLRDNSPPPAFKPEPPKAKTQNKEESYDFSKSYEYKSNPSAVAGNETPGASTKGYPPPVAAKPTFGRSILKPSTPIPPQEGEEVGESSEEQDNAPKSVLGKVKIFEKMDHKARLQRMQELQEAQNARIEIAQKHPDIYAVPIKTHKPDPGTPQHTSSRPPEPQKAPSRPYQDTRGSYGSDAEEEEYRQQLSEHSKRGYYGQSARYRDTEL

SEQ ID NO: 9689 - protein, 479 aa, Homo sapiens
MWRLPRALCVHAAKTSKLSGPWSRPAAFMSTLLINQPQYAWLKELGLREENEGVYNGSWGGRGEVITTYCPANNEPIARVRQASVADYEETVKKAREAWKIWADIPAPKRGEIVRQIGDALREKIQVLGSLVSLEMGKILVEGVGEVQEYVDICDYAVGLSRMIGGPILPSERSGHALIEQWNPVGLVGIITAFNFPVAVYGWNNAIAMICGNVCLWKGAPTTSLISVAVTKIIAKVLEDNKLPGAICSLTCGGADIGTAMAKDERVNLLSFTGSTQVGKQVGLMVQERFGRSLLELGGNNAIIANVLYGPLHTKQAVSMFLGAVEEAKKEGGTVVYGGKVMDRPGNYVEPTIVTGLGHDASIAHTETFAPILYVFKFKNEEEVFAWNNEVKQGLSSSIFTKDLGRIFRWLGPKGSDCGIVNVNIPTSGAEIGGAFGGEKHTGGGRESGSDAWKQYMRRSTCTINYSKDLPLAQGIKFQ

SEQ ID NO: 9690 - protein, 260 aa, Homo sapiens
MNNFQAILTQVRMLLSSHQPSLVQALLDNLLKEDLLSREYHCTLLHEPDSEALARKISLTLLEKGDLDLALLGWARSGLQPPAAERGPGHSDHGGSSQCATMELGPLEGGYLELLNSDADPLCLYHFYDQMDLAGEEEIELYSEPDTDTINCDQFSRLLCDMEGDEETREAYANIAELDQYVFQDSQLEGLSKDIFIEHIGPDEVIGESMEMPAEVGQKSQKRPFPEELPADLKHWKPAEPPTVVTGSLLVGPVSDCSTL

SEQ ID NO: 9691 - protein, 706 aa, Homo sapiens
MDDLDALLADLESTTSHISKRPVFLSEETPYSYPTGNHTYQEIAVPPPVPPPPSSEALNGTILDPLDQWQPSSSRFIHQQPQSSSPVYGSSAKTSSVSNPQDSVGSPCSRVGEEEHVYSFPNKQKSAEPSPTVMSTSLGSNLSELDRLLLELNAVQHNPPGFPADEANSSPPLPGALSPLYGVPETNSPLGGKAGPLTKEKPKRNGGRGLEDVRPSVESLLDELESSVPSPVPAITVNQGEMSSPQRVTSTQQQTRISASSATRELDELMASLSDFKTSSSTVALSAPGLSSSAPSSYCSLPPSPPPMPSVFLPPTTIPSPRGQGHTPEFPCTEQSGRGLLPPVAPSWLDLAGLGVMPDTFNSRSPSVEGSLWAVGTESQGRDWRHLPTITSELSGAPRCHTVPCAGSTALQEPGEPQGPPASPSCPEEALAATWEQPWASEVFGPERMPPSGAARSFQEVTEPAVVAVDRQAIFPDTWTLTEEHGLQQERPRPEPGRLGSSSPASVTTEQLGAKMTERGSVARPTQGPETPRSPEGTTEAATQDGKEQPELPCAMAMGTPSTTERISTSGQIRSVIRRSWESGHAHPMSREPSPRRRLDPATLSRTPSQEQLIAELQGRLGIQPEAEEPAEAAGPSAQDWLTEGVIITVQPRGKRAGGQLVEKVARRCPWLGLGQSQAPGVRVLPWPQCWPEGRSGERVGVSCLL

SEQ ID NO: 9692 - protein, 75 aa, Homo sapiens
QARHGSVSADEAARTAPFHLDLWFYFTLQNWVLDFGRPIAMLVFPLEWFPLNKPSVGDYFHMAYNVITPFLLLKP

SEQ ID NO: 9693 - protein, 521 aa, Homo sapiens
MWRLPRALCVHAAKTSKLSGPWSRPAAFMSTLLINQPQYAWLKELGLREENEGVYNGSWGGRGEVITTYCPANNEPIARVRQASVADYEETVKKAREAWKIWADIPAPKRGEIVRQIGDALREKIQVLGSLVSLEMGKILVEGVGEVQEYVDICDYAVGLSRMIGGPILPSERSGHALIEQWNPVGLVGIITAFNFPVAVYGWNNAIAMICGNVCLWKGAPTTSLISVAVTKIIAKVLEDNKLPGAICSLTCGGADIGTAMAKDERVNLLSFTGSTQVGKQVGLMVQERFGRSLLELGGNNAIIAFEDADLSLVVPSALFAAVGTAGQRCTTARRLFIHESIHDEVVNRLKKAYAQIRVGNPWDPNVLYGPLHTKQAVSMFLGAVEEAKKEGGTVVYGGKVMDRPGNYVEPTIVTGLGHDASIAHTETFAPILYVFKFKNEEEVFAWNNEVKQGLSSSIFTKDLGRIFRWLGPKGSDCGIVNVNIPTSGAEIGGAFGGEKHTGGGRESGSDAWKQYMRRST

SEQ ID NO: 9694 - protein, 89 aa, Homo sapiens
MKNGLMFVKLVNPCSGEGAIYLFNMCLQQLFEVKVFKEKHHSWFINQSVQSGGLLHFATPVDPLFLLLHYLIKADKEGKFQPLDQVVVD

SEQ ID NO: 9695 - protein, 299 aa, Homo sapiens
MLSVASHSGTLLVLAMAIRSDFHETFRRIARLFYWFPKSLTCSKNRKSKLLWSQGGEGKYICHAHCRDLVHLDYPQNGNVSSCMPTSEVRYSIKKNSQDVEKEKETHSYLSKEEIKEKVHKYNLAVTDKLKMTLNSNGIYTGFIKVQMELCKPPQTSPNSGKLSPSSNGCMNTLHISSTNTVGEVIEALLKKFLVTESPAKFALYKRCHREDQVYACKLSDREHPLYLRLVAGPRTDTLSFVLREHEIGEWEAFSLPELQNFLRILDKEEDEQLQNLKRRYTAYRQKLEEALREVWKPD

SEQ ID NO: 9696 - protein, 1102 aa, Homo sapiens
MKEDYDTMGPEATIQTAINNGTVKNANCTSDFEEYFAKRKLEERDGHAVSIEEYLQRSDTAIIYPEAPEELSRLGTPEANGQEENDLPPGTPDAFAQLLTCPYCDRGYKRLTSLKEHIKYRHEKNEENFSCPLCSYTFAYRTQLERHMVTHKPGTDQHQMLTQGAGNRKFKCTECGKAFKYKHHLKEHLRIHSGEKPYECPNCKKRFSHSGSYSSHISSKKCIGLISVNGRMRNNIKTGSSPNSVSSSPTNSAITQLRNKLENGKPLSMSEQTGLLKIKTEPLDFNDYKVLMATHGFSGTSPFMNGGLGATSPLGVHPSAQSPMQHLGVGMEAPLLGFPTMNSNLSEVQKVLQIVDNTVSRQKMDCKAEEISKLKGYHMKDPCSQPEEQGVTSPNIPPVGLPVVSHNGATKSIIDYTLEKVNEAKACLQSLTTDSRRQISNIKKEKLRTLIDLVTDDKMIENHNISTPFSCQFCKESFPGPIPLHQHERYLCKMNEEIKAVLQPHENIVPNKAGVFVDNKALLLSSVLSEKGMTSPINPYKDHMSVLKAYYAMNMEPNSDELLKISIAVGLPQEFVKEWFEQRKVYQYSNSRSPSLERSSKPLAPNSNPPTKDSLLPRSPVKPMDSITSPSIAELHNSVTNCDPPLRLTKPSHFTNIKPVEKLDHSRSNTPSPLNLSSTSSKNSHSSSYTPNSFSSEELQAEPLDLSLPKQMKEPKSIIATKNKTKASSISLDHNSVSSSSENSDEPLNLTFIKKEFSNSNNLDNKSTNPVFSMNPFSAKPLYTALPPQSAFPPATFMPPVQTSIPGLRPYPGLDQMSFLPHMAYTYPTGAATFADMQQRRKYQRKQGFQGELLDGAQDYMSGLDDMTDSDSCLSRKKIKKTESGMYACDLCDKTFQKSSSLLRHKYEHTGKRPHQCQICKKAFKHKHHLIEHSRLHSGEKPYQCDKCGKRFSHSGSYSQHMNHRYSYCKREAEEREAAEREAREKGHLEPTELLMNRAYLQSITPQGYSDSEERESMPRDGESEKEHEKEGEDGYGKLGRQDGDEEFEEEEEESENKSMDTDPETIRDEEETGDHSMDDSSEDGKMETKSDHEEDNMEDGM

SEQ ID NO: 9697 - protein, 139 aa, Homo sapiens
MMTAKAVDKIPVTLSGFVHQLSDNIYPVEDLAATSVTIFPNAELGGPFDQMNGVAGDGMINIDMTGEKRSLDLPYPSSFAPVSAPRNQTFTYMGKFSIDPQYPGASCYPEGIINIVSAGILQGVTSPASTTASSSVTSA

SEQ ID NO: 9698 - protein, 894 aa, Homo sapiens
MSGRPAPVSRKQRLMAAVGERAAGGAPLSCFICGGGIGRGKELKLQVKQPAAGAGTPAQPFFPFLQQQEPAPGARELSPADGCVLVCAVCRCFLGEQWAAFERARTPVDKRMYWLKRPHQCDAGAGGRRGGAGAPREWNVAYALGSATGDDDEDDGGGPRLRGAAEETRDSDLSELSDTDPLSEPDPPARDAASPHQDGAPGPGPRGGRGQEWRPAPGPAPGQGAEASAQGRAEEEGLPAKAHADGEPKSGVRRRRKGVGRHWVPEARASVLRSIQDPWQGPLVQEAPADGMKGPPSGRATKTLESRPLGETLRGFCTSEDSDINITSGEEDHKEQPFPGVCNPKEKNSGRVPRALQDSRAAPAEGLCCYICGAPLSPASHHQVHVQKQEKLAQAPFFPFLWLHSPPPGAQPISEGGSTLVCASCFSSLTQQWQSFELANVPVLQRLYVVPLDSHAPGMASKGRRLPREEGLPSGALREACYLCGEDCTPDARAVPSRILNGNARSAMHFPFLSLLPCPPNAQGPNKRCEVRSCPKCFSVLEDVWALYRACQNEELITSVQGFLGRYHQAFSASDPALSELPASAQGGPVSICYICGAELGPGKEFQLNVNPASRLGEKEPFFPFLTVYPPAPRARPVDSTGLVATCVLCYHDLLAQWLQHEARSSHHAVSAWSRQYQVETFVCFFCQQEKKRCLGLKSVRVARLPLFLYTLRASHSLLVDDGQQLIIGACVECGTLVCAGQGLTRQGPMSWSSPVAAATKPVCGSLEASAASHPPTRESETRPRAPTETLPRGPRMAQELRPAQCLQSSREEDGPDLTGAGMSHEPKSPSLGMLSTATRTTATVNPLTPSPLNGALVPSGSPATSSALSAQAAPSSSFAAALRKLAKQAEEPR

SEQ ID NO: 9699 - protein, 122 aa, Homo sapiens
MKQPIMADGPRCKRRKQANPRRKNVVNYDNVVDTGSETDEEDKLHIAEDDGIANPLDQETSPASVPNHESSPHVSQALLPREEEEDEIREGGVEHPWHNNEILQASVDGPESSLFLCLACLV

SEQ ID NO: 9700 - protein, 22 aa, Homo sapiens
MAPIGLKAVVGERRGLIRILNP

SEQ ID NO: 9701 - protein, 139 aa, Homo sapiens
MELGPLEGGYLELLNSDADPLCLYHFYDQMDLAGEEEIELYSEPDTDTINCDQFSRLLCDMEGDEETREAYANIAELDQYVFQDSQLEGLSKDIFIEHIGPDEVIGESMEMPAEVGQKSQKRPFPEELPADLKHWKPGV

SEQ ID NO: 9702 - protein, 116 aa, Homo sapiens
MSKPLEAEKQGLDSPSEHTDTERNGPDTNHQNPQNKTSPFSVSPTGPSTKIKAEDPSGDSAPAAPLPPQPAQPHLPQAQLMLTGSQLAGLTALMPAQQQLLLQQAQAQLLAAAVQQ

SEQ ID NO: 9703 - protein, 612 aa, Homo sapiens
MKQPIMADGPRCKRRKQANPRRKNVVNYDNVVDTGSETDEEDKLHIAEDDGIANPLDQETSPASVPNHESSPHVSQALLPREEEEDEIREGGVEHPWHNNEILQASVDGPEEMKEDYDTMGPEATIQTAINNGTVKNANCTSDFEEYFAKRKLEERDGHAVSIEEYLQRSDTAIIYPEAPEELSRLGTPEANGQEENDLPPGTPDAFAQLLTCPYCDRGYKRLTSLKEHIKYRHEKNEENFSCPLCSYTFAYRTQLERHMVTHKPGTDQHQMLTQGAGNRKFKCTECGKAFKYKHHLKEHLRIHSGEKPYECPNCKKRFSHSGSYSSHISSKKCIGLISVNGRMRNNIKTGSSPNSVSSSPTNSAITQLRNKLENGKPLSMSEQTGLLKIKTEPLDFNDYKVLMATHGFSGTSPFMNGGLGATSPLGVHPSAQSPMQHLGVGMEAPLLGFPTMNSNLSEVQKVLQIVDNTVSRQKMDCKAEEISKLKGYHMKDPCSQPEEQGVTSPNIPPVGLPVVSHNGATKSIIDYTLEKVNEAKACLQSLTTDSRRQISNIKKEKLRTLIDLVTDDKMIENHNISTPFSCQFCKESFPGPIPLHQHERYLCKMNEEIKA

SEQ ID NO: 9704 - protein, 46 aa, Homo sapiens
MEEDQELERKAIEELLKEAKRGKTRAETMGPMGCLFNMKMMRMRTL

SEQ ID NO: 9705 - protein, 1239 aa, Homo sapiens
MKQPIMADGPRCKRRKQANPRRKNVVNYDNVVDTGSETDEEDKLHIAEDDGIANPLDQETSPASVPNHESSPHVSQALLPREEEEDEIREGGVEHPWHNNEILQASVDGPEEMKEDYDTMGPEATIQTAINNGTVKNANCTSDFEEYFAKRKLEERDGHAVSIEEYLQRSDTAIIYPEAPEELSRLGTPEANGQEENDLPPGTPDAFAQLLTCPYCDRGYKRLTSLKEHIKYRHEKNEENFSCPLCSYTFAYRTQLERHMVTHKPGTDQHQMLTQGAGNRKFKCTECGKAFKYKHHLKEHLRIHSDSSLGRQLQLLSNQGNVTVILIIILGEKPYECPNCKKRFSHSGSYSSHISSKKCIGLISVNGRMRNNIKTGSSPNSVSSSPTNSAITQLRNKLENGKPLSMSEQTGLLKIKTEPLDFNDYKVLMATHGFSGTSPFMNGGLGATSPLGVHPSAQSPMQHLGVGMEAPLLGFPTMNSNLSEVQKVLQIVDNTVSRQKMDCKAEEISKLKGYHMKDPCSQPEEQGVTSPNIPPVGLPVVSHNGATKSIIDYTLEKVNEAKACLQSLTTDSRRQISNIKKEKLRTLIDLVTDDKMIENHNISTPFSCQFCKESFPGPIPLHQHERYLCKMNEEIKAVLQPHENIVPNKAGVFVDNKALLLSSVLSEKGMTSPINPYKDHMSVLKAYYAMNMEPNSDELLKISIAVGLPQEFVKEWFEQRKVYQYSNSRSPSLERSSKPLAPNSNPPTKDSLLPRSPVKPMDSITSPSIAELHNSVTNCDPPLRLTKPSHFTNIKPVEKLDHSRSNTPSPLNLSSTSSKNSHSSSYTPNSFSSEELQAEPLDLSLPKQMKEPKSIIATKNKTKASSISLDHNSVSSSSENSDEPLNLTFIKKEFSNSNNLDNKSTNPVFSMNPFSAKPLYTALPPQSAFPPATFMPPVQTSIPGLRPYPGLDQMSFLPHMAYTYPTGAATFADMQQRRKYQRKQGFQGELLDGAQDYMSGLDDMTDSDSCLSRKKIKKTESGMYACDLCDKTFQKSSSLLRHKYEHTGKRPHQCQICKKAFKHKHHLIEHSRLHSGEKPYQCDKCGKRFSHSGSYSQHMNHRYSYCKREAEEREAAEREAREKGHLEPTELLMNRAYLQSITPQGYSDSEERESMPRDGESEKEHEKEGEDGYGKLGRQDGDEEFEEEEEESENKSMDTDPETIRDEEETGDHSMDDSSEDGKMETKSDHEEDNMEDGM

SEQ ID NO: 9706 - protein, 771 aa, Homo sapiens
MAGRRAPGEKRWQLVRWYVQEGRFRIEERTLTAFQWLYSPQQHRILSRADLESPSRIDKTMLASLKVKKQELANSSDATLPDRPLSPPLTAPPTMKSSEFFEMLEKMQGIKLEEQKPGPQKNKDDYIPYPSIDEVVEKGGPYPQVILPQFGGYWIEDPENVGTPTSLGSSICEEEEEDNLSPNTFGYKLECKGEARAYRRHFLGKDHLNFYCTGSSLGNLILSVKCEEAEGIEYLRVILRSKLKTVHERIPLAGLSKLPSVPQIAKAFCDDAVGLRFNPVLYPKASQMIVSYDEHEVNNTFKFGVIYQKARQTLEEELFGNNEESPAFKEFLDLLGDTITLQDFKGFRGGLDVTHGQTGVESVYTTFRDREIMFHVSTKLPFTDGDAQQLQRKRHIGNDIVAIIFQEENTPFVPDMIASNFLHAYIVVQVETPGTETPSYKVSVTAREDVPTFGPPLPSPPVFQKGPEFREFLLTKLTNAENACCKSDKFAKLEDRTRAALLDNLHDELHAHTQAMLGLGPEEDKFENGGHGGFLESFKRAIRVRSHSMETMVGGQKKSHSGGIPGSLSGGISHNSMEVTKTTFSPPVVAATVKNQSRSPIKRRSGLFPRLHTGSEGQGDSRARCDSTSSTPKTPDGGHSSQEIKSETSSNPSSPEICPNKEKPFMKLKENGRAISRSSSSTSSVSSTAGEGEAMEEGDSGGSQPSTTSPFKQEVFVYSPSPSSESPSLGAAATPIIMSRSPTDAKSRNSPRSNLKFRFDKLSHASSGAGH

SEQ ID NO: 9707 - protein, 180 aa, Homo sapiens
MSQEGAVPASAVPLEELSSWPEELCRRELPSVLPRLLSLSQHSDSWIEHIQILKIIVEMFLPHMNHLTLEQTFFSQVLPKTVKLFDDMMYELTSQARGLSSQNLEIQTTLRNILQTMVQLLGALTGCVQHICATQESIILENIQSLPSSVLHIIKSTFVHCKFQTFSRLFSRRPILFKSS

SEQ ID NO: 9708 - protein, 207 aa, Homo sapiens
SLLDELESSVPSPVPAITVNQGEMSSPQRVTSTQQQTRISASSATRELDELMASLSDFKVVFPPGSPIPLRRTISVLASPSVPLLQHRTDAAASSSSPLPSLLASSPLGPSAYTCGSSGVQSAGEEPHDEGVQGPALPIPAPHTMRSVGCQTDEDPLFPPMQIQGLEQRADGERCWAAGWPRDGGRSSPGGQDEGGFMAQGKTGSSS

SEQ ID NO: 9709 - protein, 275 aa, Homo sapiens
MTSKGPEEEHPSVTLFRQYLRIRTVQPKPDYGAAVAFFEETARQLGLGCQKVEVAPGYVVTVLTWPGTNPTLSSILLNSHTDVVPVFKEHWSHDPFEAFKDSEGYIYARGAQDMKCVSIQYLEAVRRLKVEGHRFPRTIHMTFVPDEEVGGHQGMELFVQRPEFHALRAGFALDEGIANPTDAFTVFYSERSPWWVRVTSTGRPGHASRFMEDTAAEKLHKVVNSILAFREKEWQRLQSNPHLKEGSVTSVNLTKLEGGVAYNVIPATMSASFDF

SEQ ID NO: 9710 - protein, 462 aa, Homo sapiens
MGRKKIQITRIMDERNRQVTFTKRKFGLMKKAYELSVLCDCEIALIIFNSTNKLFQYASTDMDKVLLKYTEYNEPHESRTNSDIVETLRKKGLNGCDSPDPDADDSVGHSPESEDKYRKINEDIDLMISRQRLCAVPPPNFEMPVSIPVSSHNSLVYSNPVSSLGNPNLLPLAHPSLQRNSMSPGVTHRPPSAGGLMGGDLTSGAGTSAGNGYGNPRNSPGLLVSPGNLNKNMQAKSPPPMNLGMNNRKPDLRVLIPPGSKNTMPSVNQRINNSQSAQSLATPVVSVATPTLPGQGMGGYPSAISTTYGTEYSLSSADLSSLSGFNTASALHLGSVTGWQQQHLHNMPPSALSQLGACTSTHLSQSSNLSLPSTQSLNIKSEPVSPPRDRTTTPSRYPQHTRHEAGRSPVDSLSSCSSSYDGSDREDHRNEFHSPIGLTRPSPDERESPSVKRMRLSEGWAT

SEQ ID NO: 9711 - protein, 163 aa, Homo sapiens
MSKPLEAEKQGLDSPSEHTDTERNGPDTNHQNPQNKTSPFSVSPTGPSTKIKAEDPSGDSAPAAPLPPQPAQPHLPQAQLMLTGSQLAGLTALMPAQQQLLLQQAQAQLLAAAVQQSSAAAAANAAAAAAAASASSSTSSSSSSSASSSTSQPPASSGGGDLP

SEQ ID NO: 9712 - protein, 264 aa, Homo sapiens
MVGALCGCWFRLGGARPLIPLGPLTTRSAMTSKGPEEEHPSVTLFRQYLRIRTVQPKPDYGAAVAFFEETARQLGLGCQKVEVAPGYVVTVLTWPGTNPTLSSILLNSHTDVVPVFKEHWSHDPFEAFKDSEGYIYARGAQDMKCVSIQYLEAVRRLKVEGHRFPRTIHMTFVPDEEVGGHQGMELFVQRPEFHALRAGFALDEGIANPTDAFTVFYSERSPWWVRVTSTGRPGHASRFMEDTAAEKLHKVVNSILAFREKEWQ

SEQ ID NO: 9713 - protein, 560 aa, Homo sapiens
MAKFLAELLGCTLPSKGASPMFESKSHSRVGLKSSTKQKTTIFSTLASEKSLSDCKKEQQWKPSMYSSITPVCFPSPLIEKPIGKESMPQTPPFSAMFDSSGYNRNLYQSAEDSCGGLYYHDNNLLSGSLEALIQHLVPNVDYYPDRTYIFTFLLSSRLFMHPYELMAKVCHLCVEHQRLSDPDSDKNQMRKIAPKILQLLTEWTETFPYDFRDERMMRNLKDLAHRIASGEEQTYRKNVQQMMQCLIRKLAALSQYEEVLAKISSTSTDRLTVLKTKPQSIQRDIITVCNDPYTLAQQLTHIELERLNYIGPEEFVQAFVQKDPLDNDKSCYSERKKTRNLEAYVEWFNRLSYLVATEICMPVKKKHRARMIEYFIDVARECFNIGNFNSLMAIISGMNMSPVSRLKKTWAKVKTAKFDILEHQMDPSSNFYNYRTALRGAAQRSLTAHSSREKIVIPFFSLLIKDIYFLNEGCANRLPNGHVNFEKFWELAKQVSEFMTWKQVECPFERDRKILQYLLTVPVFSEDALYLASYESEGPENHIEKDRWKSLRSSLLGRV

SEQ ID NO: 9714 - protein, 109 aa, Homo sapiens
MSTRSVSSSSYRRMFGGPGTASRPSSSRSYVTTSTRTYSLGSALRPSTSRSLYASSPGGVYATRSSAVRLRSSVPGVRLLQDSVDFSLADAINTEFKNTRTNEKVELQE

SEQ ID NO: 9715 - protein, 68 aa, Homo sapiens
KNLTRPGSSGRRGRPRASCGAQKRSRRPKMRPARRRGGRRQLLLRALDAVATCWEKLFALRAPASRDS

SEQ ID NO: 9716 - protein, 77 aa, Homo sapiens
MEATRRRQHLGATGGPGAQLGASFLQARHGSVSADEAARTAPFHLDLWFYFTLQNWVLDFGRPIAMTEMESWISPLF

SEQ ID NO: 9717 - protein, 577 aa, Homo sapiens
MAPIGLKAVVGEKIMHDVIKKVKKKGEWKVLVVDQLSMRMLSSCCKMTDIMTEGITIVEDINKRREPLPSLEAVYLITPSEKSVHSLISDFKDPPTAKYRAAHVFFTDSCPDALFNELVKSRAAKVIKTLTEINIAFLPYESQVYSLDSADSFQSFYSPHKAQMKNPILERLAEQIATLCATLKEYPAVRYRGEYKDNALLAQLIQDKLDAYKADDPTMGEGPDKARSQLLILDRGFDPSSPVLHELTFQAMSYDLLPIENDVYKYETSGIGEARVKEVLLDEDDDLWIALRHKHIAEVSQEVTRSLKDFSSSKRMNTGEKTTMRDLSQMLKKMPQYQKELSKYSTHLHLAEDCMKHYQGTVDKLCRVEQDLAMGTDAEGEKIKDPMRAIVPILLDANVSTYDKIRIILLYIFLKNGITEENLNKLIQHAQIPPEDSEIITNMAHLGVPIVTDSTLRRRSKPERKERISEQTYQLSRWTPIIKDIMEDTIEDKLDTKHYPYISTRSSASFSTTAVSARYGHWHKNKAPGEYRSGPRLIIFILGGVSLNEMRCAYEVTQANGKWEVLIGEWPFRTLAR

SEQ ID NO: 9718 - protein, 674 aa, Homo sapiens
MTIRYQGRQYRLRMAFLQKIEALVKDMQNPETGVRMQNQRVLVTSVPHAMTGSDVLQWIVQRLWISSLEAQNLGNFIVRYGYIYPLQDPKNLILKPDGSLYRFQTPYFWPTQQWPAEDTDYAIYLAKRNIKKKGILEEYEKENYNFLNQKMNYKWDFVIMQAKEQYRAGKERNKADRYALDCQEKAYWLVHRCPPGMDNVLDYGLDRVTNPNEVKVNQKQTVVAVKKEIMYYQQALMRSTVKSSVSLGGIVKYSEQFSSNDAIMSGCLPSNPWITDDTQFWDLNAKLVEIPTKMRVERWAFNFSELIRDPKGRQSFQYFLKKEFSGENLGFWEACEDLKYGDQSKVKEKAEEIYKLFLAPGARRWINIDGKTMDITVKGLKHPHRYVLDAAQTHIYMLMKKDSYARYLKSPIYKDMLAKAIEPQETTKKSSTLPFMRRHLRSSPSPVILRQLEEEAKAREAANTVDITQPGQHMAPSPHLTVYTGTCMPPSPSSPFSSSCRSPRKPFASPSRFIRRPSTTICPSPIRVALESSSGLEQKGECSGSMAPRGPSVTESSEASLDTSWPRSRPRAPPKARMALSFSRFLRRGCLASPVFARLSPKCPAVSHGRVQPLGDVGQQLPRLKSKRVANFFQIKMDVPTGSGTCLMDSEDAGTGESGDRATEKEVICPWESL

SEQ ID NO: 9719 - protein, 135 aa, Homo sapiens
MPAANMMENRPLPALQVPEPQGAPEGSPVWSSSSTPTLRRRRFKMRRMKNVQEQSLEAGLARDLPAVLAPGKEFLQLPSIEITPSSDEDTPWSNCSTPSASPRRKRFLLRKWLRVRERKECSESSSSLRIFTAQS

SEQ ID NO: 9720 - protein, 112 aa, Homo sapiens
MHDVIKKVKKKGEWKVLVVDQLSMRMLSSCCKMTDIMTEGITRAGLLDHMLWKISISAESRSPAWRLCISSLHPRSPSTLSSVTLRTRRLLNTGLHTSSSLTLVQMPCLMNW

SEQ ID NO: 9721 - protein, 93 aa, Homo sapiens
EMNQSDSKEVDSSEESSQDSSENSSESEDEDDSIPSEVTIDNIKLPNSEGGKVETGFHRVSQDGLNLLTSCSTLLDLPKCWDYRHEPPCPAGN

SEQ ID NO: 9722 - protein, 1202 aa, Homo sapiens
MKQPIMADGPRCKRRKQANPRRKNVVNYDNVVDTGSETDEEDKLHIAEDDGIANPLDQETSPASVPNHESSPHVSQALLPREEEEDEIREGGVEHPWHNNEILQASVDGPEEMKEDYDTMGPEATIQTAINNGTVKNANCTSDFEEYFAKRKLEERDGHAVSIEEYLQRSDTAIIYPEAPEELSRLGTPEANGQEENDLPPGTPDAFAQLLTCPYCDRGYKRLTSLKEHIKYRHEKNEENFSCPLCSYTFAYRTQLERHMVTHKPGTDQHQMLTQGAGNRKFKCTECGKAFKYKHHLKEHLRIHSGEKPYECPNCKKRFSHSGSYSSHISSKKCIGLISVNGRMRNNIKTGSSPNSVSSSPTNSAITQLRNKLENGKPLSMSEQTGLLKIKTEPLDFNDYKVLMATHGFSGTSPFMNGGLGATSPLGVHPSAQSPMQHLGVGMEAPLLGFPTMNSNLSEVQKVLQIVDNTVSRQKMDCKAEEISKLKGYHMKDPCSQPEEQGVTSPNIPPVGLPVVSHNGATKSIIDYTLEKVNEAKACLQSLTTDSRRQISNIKKEKLRTLIDLVTDDKMIENHNISTPFSCQFCKESFPGPIPLHQHERYLCKMNEEIKAVLQPHENIVPNKAGVFVDNKALLLSSVLSEKGMTSPINPYKDHMSVLKAYYAMNMEPNSDELLKISIAVGLPQEFVKEWFEQRKVYQYSNSRSPSLERSSKPLAPNSNPPTKDSLLPRSPVKPMDSITSPSIAELHNSVTNCDPPLRLTKPSHFTNIKPVEKLDHSRSNTPSPLNLSSTSSKNSHSSSYTPNSFSSEELQAEPLDLSLPKQMKEPKSIIATKNKTKASSISLDHNSVSSSSENSDEPLNLTFIKKEFSNSNNLDNKSTNPVFSMNPFSAKPLYTALPPQSAFPPATFMPPVQTSIPGLRPYPGLDQMSFLPHMAYTYPTGAATFADMQQRRKYQRKQGFQGELLDGAQDYMSGLDDMTDSDSCLSRKKIKKTESGMYACDLCDKTFQKSSSLLRHKYEHTGKRPHQCQICKKAFKHKHHLIEHSRLHSGEKPYQCDKCGKRFSHSGSYSQHMNHRALPLRGTLTRRRGRVCRGMARARRSTRKKARMATGSWADRMATRSSRRKRKKVKIKVWIRIPKRYEMKKRLEITPWTIVRRMGKWKPNQTTRKTIWKMACNKLLHFKLPIFFSSSIVTCLKTLLC

SEQ ID NO: 9723 - protein, 592 aa, Homo sapiens
MSRSRASIHRGSIPAMSYAPFRDVRGPSMHRTQYVHSPYDRPGWNPRFCIISGNQLLMLDEDEIHPLLIRDRRSESSRNKLLRRTVSVPVEGRPHGEHEYHLGRSRRKSVPGGKQYSMEGAPAAPFRPSQGFLSRRLKSSIKRTKSQPKLDRTSSFRQILPRFRSADHDRARLMQSFKESHSHESLLSPSSAAEALELNLDEDSIIKPVHSSILGQEFCFEVTTSSGTKCFACRSAAERDKWIENLQRAVKPNKDNSRRVDNVLKLWIIEARELPPKKRYYCELCLDDMLYARTTSKPRSASGDTVFWGEHFEFNNLPAVRALRLHLYRDSDKKRKKDKAGYVGLVTVPVATLAGRHFTEQWYPVTLPTGSGGSGGMGSGGGGGSGGGSGGKGKGGCPAVRLKARYQTMSILPMELYKEFAEYVTNHYRMLCAVLEPALNVKGKEEVASALVHILQSTGKAKDFLSDMAMSEVDRFMEREHLIFRENTLATKAIEEYMRLIGQKYLKDAIGEFIRALYESEENCEVDPIKCTASSLAEHQANLRMCCELALCKVVNSHCLPSCSCGPSFPVSLTPVSTPSPPTTPLSMFPGS

SEQ ID NO: 9724 - protein, 360 aa, Homo sapiens
MHDVIKKVKKKGEWKVLVVDQLSMRMLSSCCKMTDIMTEGITIVEDINKRREPLPSLEAVYLITPSEKSVHSLISDFKDPPTAKYRAAHVFFTDSCPDALFNELVKSRAAKVIKTLTEINIAFLPYESQVYSLDSADSFQSFYSPHKAQMKNPILERLAEQIATLCATLKEYPAVRYRGEYKDNALLAQLIQDKLDAYKADDPTMGEGPDKARSQLLILDRGFDPSSPVLHELTFQAMSYDLLPIENDVYKYETSGIGEARVKEVLLDEDDDLWIALRHKHIAEVSQEVTRSLKDFSSSKRMNTGEKTTMRDLSQMLKKMPQYQKELSKYSTHLHLAEDCMKHYQGTVDKLCRVEQNHRK

SEQ ID NO: 9725 - protein, 554 aa, Homo sapiens
MWRLPRALCVHAAKTSKLSGPWSRPAAFMSTLLINQPQYAWLKELGLREENEGVYNGSWGGRGEVITTYCPANNEPIARVRQASVADYEETVKKAREAWKIWADIPAPKRGEIVRQIGDALREKIQVLGSLVSLEMGKILVEGVGEVQEYVDICDYAVGLSRMIGGPILPSERSCCVVQAGLKLLSSRSGHALIEQWNPVGLVGIITAFNFPVAVYGWNNAIAMICGNVCLWKGAPTTSLISVAVTKIIAKVLEDNKLPGAICSLTCGGADIGTAMAKDERVNLLSFTGSTQVGKQVGLMVQERFGRSLLELGGNNAIIAFEDADLSLVVPSALFAAVGTAGQRCTTARRLFIHESIHDEVVNRLKKAYAQIRVGNPWDPNVLYGPLHTKQAVSMFLGAVEEAKKEGGTVVYGGKVMDRPGNYVEPTIVTGLGHDASIAHTETFAPILYVFKFKNEEEVFAWNNEVKQGLSSSIFTKDLGRIFRWLGPKGSDCGIVNVNIPTSGAEIGGAFGGEKHTGGGRESGSDAWKQYMRRSTCTINYSKDLPLAQGIKFQ

SEQ ID NO: 9726 - protein, 544 aa, Homo sapiens
WRLPRALCVHAAKTSKLSGPWSRPAAFMSTLLINQPQYAWLKELGLREENEGVYNGSWGGRGEVITTYCPANNEPIARVRQASVADYEETVKKAREAWKIWADIPAPKRGEIVRQIGDALREKIQVLGSLVSLEMGKILVEGVGEVQEYVDICDYAVGLSRMIGGPILPSERSGHALIEQWNPVGLVGIITAFNFPVAVYGWNNAIAMICGNVCLWKGAPTTSLISVAVTKIIAKVLEDNKLPGAICSLTCGGADIGTAMAKDERVNLLSFTGSTQVGKQVGLMVQERFGRSLLELGGNNAIIAFEDADLSLVVPSALFAAVGTAGQRCTTARRLFIHESIHDEVVNRLKKAYAQIRVGNPWDPNVLYGPLHTKQAVSMFLGAVEEAKKEGGTVVYGGKVMDRPGNYVEPTIVTGLGHDASIAHTETFAPILYVFKFKNEEEVFAWNNEVKQGLSSSIFTKDLGRIFRWLGPKGSDCGIVNVNIPTSGAEIGGAFGGEKHTGGGRESGSDAWKQYMRRSTWKMYTKRVYWDDFSFILITVAASS

SEQ ID NO: 9727 - protein, 345 aa, Homo sapiens
RSPTGVCSGESHPSWRTCRGTWQGSTGCILELENIPPASTPQQWESGPQLTQHWYQAGLGCGQASVTGHKLSGALPSLDIVVWSELPPGAGLGSSAAYSVCLAAALLTVCEEIPNPLKDGDCVNRWTKEDLELINKWAFQGERMIHGNPSGVDNAVSTWGGALRYHQGKISSLKRSPALQILLTNTKVPRNTRALVAGVRNRLLKFPEIVAPLLTSIDAISLECERVLGEMGEAPAPEQYLVLEELIDMNQHHLNALGVGHASLDQLCQVTRARGLHSKLTGAGGGGCGITLLKPGLEQPEVEATKQALTSCGFDCLETSIGAPGVSIHSATSLDSRVQQALDGL

SEQ ID NO: 9728 - protein, 955 aa, Homo sapiens
MVTHKPGTDQHQMLTQGAGNRKFKCTECGKAFKYKHHLKEHLRIHSGEKPYECPNCKKRFSHSGSYSSHISSKKCIGLISVNGRMRNNIKTGSSPNSVSSSPTNSAITQLRNKLENGKPLSMSEQTGLLKIKTEPLDFNDYKVLMATHGFSGTSPFMNGGLGATSPLGVHPSAQSPMQHLGVGMEAPLLGFPTMNSNLSEVQKVLQIVDNTVSRQKMDCKAEEISKLKGYHMKDPCSQPEEQGVTSPNIPPVGLPVVSHNGATKSIIDYTLEKVNEAKACLQSLTTDSRRQISNIKKEKLRTLIDLVTDDKMIENHNISTPFSCQFCKESFPGPIPLHQHERYLCKMNEEIKAVLQPHENIVPNKAGVFVDNKALLLSSVLSEKGMTSPINPYKDHMSVLKAYYAMNMEPNSDELLKISIAVGLPQEFVKEWFEQRKVYQYSNSRSPSLERSSKPLAPNSNPPTKDSLLPRSPVKPMDSITSPSIAELHNSVTNCDPPLRLTKPSHFTNIKPVEKLDHSRSNTPSPLNLSSTSSKNSHSSSYTPNSFSSEELQAEPLDLSLPKQMKEPKSIIATKNKTKASSISLDHNSVSSSSENSDEPLNLTFIKKEFSNSNNLDNKSTNPVFSMNPFSAKPLYTALPPQSAFPPATFMPPVQTSIPGLRPYPGLDQMSFLPHMAYTYPTGAATFADMQQRRKYQRKQGFQGELLDGAQDYMSGLDDMTDSDSCLSRKKIKKTESGMYACDLCDKTFQKSSSLLRHKYEHTGKRPHQCQICKKAFKHKHHLIEHSRLHSGEKPYQCDKCGKRFSHSGSYSQHMNHRYSYCKREAEEREAAEREAREKGHLEPTELLMNRAYLQSITPQGYSDSEERESMPRDGESEKEHEKEGEDGYGKLGRQDGDEEFEEEEEESENKSMDTDPETIRDEEETGDHSMDDSSEDGKMETKSDHEEDNMEDGM

SEQ ID NO: 9729 - protein, 124 aa, Homo sapiens [sequence omitted]

SEQ ID NO: 9730 - protein, 174 aa, Homo sapiens
MPAANMMENRPLPALQVPEPQGAPEGSPVWSSSSTPTLRRRRFKMRRMKNVQEQSLEAGLARDLPAVLAPGKEFLQLPSIEITPSSDEDTPWSNCSTPSASPRRKRFLLRKWLRVRERKECSESRVLSLNGFVFLCGATESLITFPGIPSPNLFNYIDFNSLKLADFHCTKLKI

SEQ ID NO: 9731 - protein, 1133 aa, Homo sapiens
LAAANSGRENATATAHSRSSWRQPVNVFLSSGRPPSVEELLREAQLNLQSLLQEEYEEQYSEARLVGQTFRSSDEATKPTPNPRPQSARRLEFILMPTKRQLSEDETTTQGVRAPEASLSLSTTADKQTAWNSLFPLPILEEKRWPQLCSTQSDIVPINISGQQFDKHASLRHSLFNTETAVNPKSTLRRRRTIIGFSNFSQRDQGHSNSPAGSVAHSTTSDIRPSHSVPEGVHGRVAVGQDARFPSLTSPVLRTPSSEPDEPHQARSGPNPPGMESMGMVYSVPSSCNGPTESTFSTSWKGDAFTYMTPSATSQSNQVNENGKNPSCGNSWVSLNKVPPLVPKEAATLLVARDNPAGCSGSAGYPERLIQQRHMPERPSKIGLLTSGTSRLETGPGGASRFRERSLSVPTDSGTTDVDYDEEQKANEACALPFASTSSEGSNSADNIASLSAQQEAQHRRQRSKSISLRKAKKKPSPPTRSVSLVKDEPGLLPEGGSALPKDQRPKSLCLSLEHQGHHSSHPDAQGHPAIPNHKDPESTQFSHHWYLTDWKSGDTYQSLSSSSTATGTTVIECTQVQGSSESLASPSTSRATTPSQLSIEVEAREISSPGRPPGLMSPSSGYSSQSETPTPTVSMSLTLGHLPPPSSSVRVRPVVPERKSSLPPTSPMEKFPKSRLSFDLPLTSSPNLDLSGMSISIRSKTKVSRHHSETNFGVKLAQKTNPNQPIMPMVTQSDLRSVRLRSVSKSEPEDDIESPEYAEEPRAEEVFTLPERKTKPPVAEKPPVARRPPSLVHKPPSVPEEYALTSPTLAMPPRSSIQHARPLPQDSYTVVRKPKPSSFPDGRSPGESTAPSSLVFTPFASSSDAFFSGTQQPPQGSVEDEGPKVRVLPERISLQSQEEAEKKKGKIPPPVPKKPSVLYLPLTSPTAQMEAYVAEPRLPLSPIITLEEDTKCPATGDDLQSLGQRVTSTPQADSEREASPLGSSVEPGTEEKSLISDKTAEWIAEDDDDVFVASRTTEDLFTVIHRSKRKLLGWKEPGEAFVGGRTSSHSPIKNTAESPISESTATAGSGSSANLDAGRNDDFKALLQKKGSKATPRSRPSAAELLKTTNPLARRIIAQFSKDYETTDNPST

SEQ ID NO: 9732 - protein, 61 aa, Homo sapiens
MAAQIPESDQIKQFKEFLGTYNKLTETCFLDCVKDFTTREVKPEEQNEALAAKAGLLGQPR

SEQ ID NO: 9733 - protein, 325 aa, Homo sapiens
MRECISIHVGQAGVQIGNACWELYCLEHGIQPDGQMPSDKTIGGGDDSFNTFFSETGAGKHVPRAVFVDLEPTVIDEVRTGTYRQLFHPEQLITGKEDAANNYARGHYTIGKEIIDLVLDRIRKFQTNLVPYPRIHFPLATYAPVISAEKAYHEQLTVAEITNACFEPANQMVKCDPRHGKYMACCLLYRGDVVPKDVNAAIATIKTKRTIQFVDWCPTGFKVGINYQPPTVVPGGDLAKVQRAVCMLSNTTAVAEAWARLDHKFDLPLRRIMRRLEQIVLTERMRVKSINLCAVLLHSFVLELSYFCSVNVYCRKLLIKLKFPF

SEQ ID NO: 9734 - protein, 906 aa, Homo sapiens
MDMEYMGSGKLGQILKQIWRQNQMLKQALLGDDLCEGAGGATWMATVVFLGQELSSALHQLLEHTSGTLRSTCQQLHVLLDKENQCVSRKEIITFIDCLIKITEHLGSTAALLKKEEKEICNLCGMHDECTPQQTMSSIQDTKAADIAARGELNVIETATVSPTNGEESHYTNQVQLEKNKTHMSSALVEKENNTSLNGRVLGQEESQNKMFPDNAENEDDKQIEHMTVENINGNREETHGIIQTTETEIQETSESPREEMTTSSIICDISKKYINSTLPNDSENIKHKNNIMEKEYLDVLSDVTGPQVSCYITAPSYVLQQLECRIINHMSSLIVGDNEELVSNVITIECSDKEKRVPFPIGIAIPFTARYRGNYRDIMVKVCDINLQSSYLNPNSLEGMKGGYKGTCASVKVYKLGIFSVVSCLKKESFTVTKKGLALKSSMDSRISLNYPPGVFTSPVLVQLKIQPVDPALVAHLKAQQDTFYSVQSTSPLIHIQHPSTYPFQKPVTLFLPCSPYLDKNNLGSEIDHKRRASATINRITPSYFNRTKIASIRKPRKNASECLKLLGFRSQDSGWCGLDDVVKTIQSGLVSVELYEHLERFIVLHLSSTMDNSHLVTFVKSLEEAMLSTTACIVLSHQKDNPHRIAVLVVPSKDLSQVLKDLHLEGFGGPPEPSRHFQVREGEQLLLRFTGNIFASSNGKDYGKDYTLIFHLQRKPRLELQIKEVDEFGNYSCPHYKGTIVVYKVPKGKIVPNLNQSLVINENHSQLPICKLPLKLPKHKKLINRPQSTKRVSKDPVEALWDNLLHWLAEELSEENAESLSSTLPLRRSTIQLIKLKNPDDLTEQIHEFLCFWKKSLPTFTDKLRLLARHLRKIGRSDLAEELKFKWENKVFTEPQQCFDVAPE

SEQ ID NO: 9735 - protein, 39 aa, Homo sapiens
LHPQTATTKVPEIRDVTRIERIEMEFPRVSQDGLDLLTS

SEQ ID NO: 9736 - protein, 50 aa, Homo sapiens
LHPQTATTKVPEIRDVTRIERIGAHSHIRGLGLDDALEPRQLPDVVEMPW

SEQ ID NO: 9737 - protein, 60 aa, Homo sapiens
MAAQIPESDQIKQFKEFLGTYNKLTETCFLDCVKDFTTREVKPEENEALAAKAGLLGQPR

SEQ ID NO: 9738 - protein, 117 aa, Homo sapiens [sequence omitted]

SEQ ID NO: 9739 - protein, 142 aa, Homo sapiens
MAAGGDHGSPDSYRSPLASRYASPEMCFVFSDRYKFRTWRQLWLWLAEAEQVLRLGLALSPRLECSGTILARYNLCILGSSCPLTSASQAGTRGARHHARQIFVLFCRDGSHCVFQCGLELLDSSDPPTLASQRYIGFAYHR

SEQ ID NO: 9740 - protein, 72 aa, Homo sapiens
MAFANLRKVLISDSLDPCCRKILQDGGLQVVEKQNLSKEELIAELQDCEGLIVRSATKVTADVINAAEKLQV

SEQ ID NO: 9741 - protein, 97 aa, Homo sapiens
MAFANLRKVLISDSLDPCCRKILQDGGLQVVEKQNLSKEELIAELQDCEGLIVRSATKVTADVINAAEKLQVVGRAGTGVDNVDLEAATRKGILVMK

SEQ ID NO: 9742 - protein, 526 aa, Homo sapiens
MAFANLRKVLISDSLDPCCRKILQDGGLQVVEKQNLSKEELIAELQDCEGLIVRSATKVTADVINAAEKLQVVGRAGTGVDNVDLEAATRKGILVMNTPNGNSLSAAELTCGMIMCLARQIPQATASMKDGKWERKKFMGTELNGKTLGILGLGRIGREVATRMQSFGMKTIGYDPIISPEVSASFGVQQLPLEEIWPLCDFITVHTPLLPSTTGLLNDNTFAQCKKGVRVVNCARGGIVDEGALLRALQSGQCAGAALDVFTEEPPRDRALVDHENVISCPHLGASTKEAQSRCGEEIAVQFVDMVKGKSLTGVVNAQALTSAFSPHTKPWIGLAEALGTLMRAWAGSPKGTIQVITQGTSLKNAGNCLSPAVIVGLLKEASKQADVNLVNAKLLVTTSHSPAAPGEQGFGECLLAVALAGAPYQAVGLVQGTTPVLQGLNGAVFRPEVPLRRDLPLLLFRTQTSDPAMLPTMIGLLAEAGVRLLSYQTSLVSDGETWHVMGISSLLPSLEAWKQHVTEAFQFHF

SEQ ID NO: 9743 - protein, 74 aa, Homo sapiens
MIQFYLEEVMPQAENQDPDIKAHVNSLGENLKTLRLRLRRCHRFLPCENKSKAVEQVKNAFNKLQEKGIYKAMS

SEQ ID NO: 9744 - protein, 165 aa, Homo sapiens
MAFANLRKVLISDSLDPCCRKILQDGGLQVVEKQNLSKEELIAELQDCEGLIVRSATKVTADVINAAEKLQVVGRAGTGVDNVDLEAATRKGILVMNTPNGNSLSAAELTCGMIMCLARPETFRDQEITFPMARPAFPPAGGGSGGIYLCSNSSLQFPSELSGIH

SEQ ID NO: 9745 - protein, 188 aa, Homo sapiens
MRGSGRLRTPELCCSRPPPPGPGRPWLPSCLEKGRASQRLGGKKNGGRDRAEYKSRFSGLYLTRCSNSSERQRERAGGRLGWKSRASRAALRASWEGRSGANRGLRLWPSPPADPPASGPQPLPHPRNFAHSSGRALCTGTYNTRARTRLSRRGEAILPIWGHFPAAARTRFSERLSLQLLRRWIFFG

SEQ ID NO: 9746 - protein, 70 aa, Homo sapiens
MNTPNGNSLSAAELTCGMIMCLARPETFRDQEITFPMARPAFPPAGGGSGGIYLCSNSSLQFPSELSGIH

SEQ ID NO: 9747 - protein, 533 aa, Homo sapiens
MAFANLRKVLISDSLDPCCRKILQDGGLQVVEKQNLSKEELIAELQDCEGLIVRSATKVTADVINAAEKLQVVGRAGTGVDNVDLEAATRKGILVMNTPNGNSLSAAELTCGMIMCLARQIPQATASMKDGKWERKKFMGTELNGKTLGILGLGRIGREVATRMQSFGMKTIGYDPIISPEVSASFGVQQLPLEEIWPLCDFITVHTPLLPSTTGLLNDNTFAQCKKGVRVVNCARGGIVDEGALLRALQSGQCAGAALDVFTEEPPRDRALVDHENVISCPHLGASTKEAQSRCGEEIAVQFVDMVKGKSLTGVVNAQALTSAFSPHTKPWIGLAEALGTLMRAWAGSPKGTIQVITQGTSLKNAGNCLSPAVIVGLLKEASKQADVNLVNAKLLVKEAGLNVTTSHSPAAPGEQGFGECLLAVALAGAPYQAVGLVQGTTPVLQGLNGAVFRPEVPLRRDLPLLLFRTQTSDPAMLPTMIGLLAEAGVRLLSYQTSLVSDGETWHVMGISSLLPSLEAWKQHVTEAFQFHF

SEQ ID NO: 9748 - protein, 123 aa, Homo sapiens
MAFANLRKVLISDSLDPCCRKILQDGGLQVVEKQNLSKEELIAELQDCEGLIVRSATKVTADVINAAEKLQVVGRAGTGVDNVDLEAATRKGILVMNTPNGNSLSAAELTCGMIMCLARTSFV

SEQ ID NO: 9749 - protein, 445 aa, Homo sapiens
MAFANLRKVLISDSLDPCCRKILQDGGLQVVEKQNLSKEELIAELQDCEGLIVRSATKVTADVINAAEKLQVVGRAGTGVDNVDLEAATRKGILVMNTPNGNSLSAAELTCGMIMCLARQIPQATASMKDGKWERKKFMGTELNGKTLGILGLGRIGREVATRMQSFGMKTIGYDPIISPEVSASFGVQQLPLEEIWPLCDFITVHTPLLPSTTGLLNDNTFAQCKKGVRVVNCARGGIVDEGALLRALQSGQCAGAALDVFTEEPPRDRALVDHENVISCPHLGASTKEAQSRCGEEIAVQFVDMVKGKSLTGVVTTSHSPAAPGEQGFGECLLAVALAGAPYQAVGLVQGTTPVLQGLNGAVFRPEVPLRRDLPLLLFRTQTSDPAMLPTMIGLLAEAGVRLLSYQTSLVSDGETWHVMGISSLLPSLEAWKQHVTEAFQFHF

SEQ ID NO: 9750 - protein, 455 aa, Homo sapiens
LAQRRGRGPGGPQSTPRNPRVSRGERSHCPTQTVKKLLEEQRRRQQQQPDAGGVQGQFLPPPEQPLTPSVNEAVTGHPPFPAHSETVGSGPSSLGFPDWDPNTHAAYTDSPYSCPASAAENFLPPDFYPPSDPGQPCPFPQGMEAGPWRVSAPPSGPPQFPAVVPGPSLEVARAHMLALGPQQLLAQDEEGDTLLHLFAARGLRWAAYAAAEVLQVYRRLDIREHKGKTPLLVAAAANQPLIVEDLLNLGAEPNAADHQGRSVLHVAATYGLPGVLLAVLNSGVQVDLEARDFEGLTPLHTAILALNVAMRPSDLCPRVLSTQARDRLDCVHMLLQMGANHTSQEIKSNKTVLHLAVQAANPTLVQLLLELPRGDLRTFVNMKAHGNTALHMAAALPPGPAQEAIVRHLLAAGADPTLRNLENEQPVHLLRPGPGPEGLRQLLKRSRVAPPGLSS

SEQ ID NO: 9751 - protein, 275 aa, Homo sapiens
VDLEAATRKGILVMNTPNGNSLSAAELTCGMIMCLARQIPQATASMKDGKWERKKFMGTELNGKTLGILGLGRIGREVATRMQSFGMKTIGYDPIISPEVSASFGVQQLPLEEIWPLCDFITVHTPLLPSTTGLLNDNTFAQCKKGVRVVNCARGGIVDEGALLRALQSGQCAGAALDVFTEEPPRDRALVDHENVISCPHLGASTKEAQSRCGEEIAVQFVDMVKGKSLTGVASWQRQACGCCPTRLHWCQMGRPGTSWASPPCCPAWKRGSSM

SEQ ID NO: 9752 - protein, 145 aa, Homo sapiens
MAFANLRKVLISDSLDPCCRKILQDGGLQVVEKQNLSKEELIAELQGWHRCGQCGSGGRNKEGHLGYEHPQWEQPQCRRTHLWNDHVPGQADSPGDGFDEGRQMGAEEVHGNRAEWKDPGNSWPGQDWERGSYPDAVLWDEDYRV

SEQ ID NO: 9753 - protein, 239 aa, Homo sapiens
MAFANLRKVLISDSLDPCCRKILQDGGLQVVEKQNLSKEELIAELQDCEGLIVRSATKVTADVINAAEKLQVVGRAGTGVDNVDLEAATRKGILVMKQIPQATASMKDGKWERKKFMGTELNGKTLGILGLGRIGREVATRMQSFGMKTIGYDPIISPEVSASFGVQQLPLEEIWPLCDFITVHTPLLPSTTGLLNDNTFAQCKKGVRVVNCARGGIVDEGALLRALQSGQCAGAALDV

SEQ ID NO: 9754 - protein, 89 aa, Homo sapiens
MNTPNGNSLSAAELTCGMIMCLARQIPQATASMKDGKWERKKFMGTELNGKTLGILGLGRIGREVATRMQSFGMKTIGYDPIISPEVSA

SEQ ID NO: 9755 - protein, 429 aa, Homo sapiens
MAFANLRKVLISDSLDPCCRKILQDGGLQVVEKQNLSKEELIAELQDCEGLIVRSATKVTADVINAAEKLQVVGRAGTGVDNVDLEAATRKGILVMNTPNGNSLSAAELTCGMIMCLARQIPQATASMKDGKWERKKFMGTELNGKTLGILGLGRIGREVATRMQSFGMKTIGYDPIISPEVSASFGVQQLPLEEIWPLCDFITVHTPLLPSTTGLLNDNTFAQCKKGVRVVNCARGGIVDEGALLRALQSGQCAGAALDVFTEEPPRDRALVDHENVISCPHLGASTKEAQSRCGEEIAVQFVDMVKGKSLTGVVNAQALTSAFSPHTKPWIGLAEALGTLMRAWAGSPKGTIQVITQGHHLPQPCCTRGARLRGMPPGRGPGRRPLPGCGLGPRHYACTAGAQWSCLQARSASPQGPAPAPIPDSDL

SEQ ID NO: 9756 - protein, 63 aa, Homo sapiens
MAFANLRKVLISDSLDPCCRKILQDGGLQVVEKQNLSKEELIAELQVWTMWIWRPQQGRASWL

SEQ ID NO: 9757 - protein, 143 aa, Homo sapiens
MEVTADQPRWVSHHHPAVLNGQHPDTHHPGLSHSYMDAAQYPLPEEVDVLFNIDGQGNHVPPYYGNSVRATVQRYPPTHHGSQVCRPPLLHGSLPWLDGGKALGSHHTASPWNLSPFSKTSIHHGSPGPLSVYPPASSSSLSG

SEQ ID NO: 9758 - protein, 48 aa, Homo sapiens
MATNWGSLLQDKQQLEELARQAVDRALAEGVLLRTSQEPTSSEHHQTG

SEQ ID NO: 9759 - protein, 44 aa, Homo sapiens
MAVSSWDLDLLSFIRRHPWQAEPAGATSPAARGIWSPQCLLAQN

SEQ ID NO: 9760 - protein, 121 aa, Homo sapiens
MAQEKMKLGFKSLPSSTTADGNILRRVNSAPLINGLGFNSQVLQADMLRIRTNRTTFRNRRSLLLPPPPFHGSISRLHQIKQEEAMDLINRETMSEWKLQSEIQISHSWEEGLKLSTSSYF

SEQ ID NO: 9761 - protein, 985 aa, Homo sapiens
MHRRRLALGLGFCLLAGTSLSVLWVYLENWLPVSYVPYYLPCPEILPMMMALSCLCHQQHEAALQEGEATPARGMVTVPSAQAAGAQAHTAADTHTLVGAHRLRGNLQPRASAAHLPATEPDHWGHGVCRGESSTQEIGEELINGVIYSISLRKVQLHHGGNKGQRWLGYENESALNLYETCKVRTVKAGTLEKLVEHLVPAFQGSDLSYVTIFLCTYRAFTTTQQVLDLLFKRYGRCDALTASSRYGCILPYSDEDGGPQDQLKNAISSILGTWLDQYSEDFCQPPDFPCLKQLVAYVQLNMPGSDLERRAHLLLAQLEHSEPIEAEPEALSPVPALKPTPELELALTPARAPSPVPAPAPEPEPAPTPAPGSELEVAPAPAPELQQAPEPAVGLESAPAPALELEPAPEQDPAPSQTLELEPAPAPVPSLQPSWPSPVVAENGLSEEKPHLLVFPPDLVAEQFTLMDAELFKKVVPYHCLGSIWSQRDKKGKEHLAPTIRATVTQFNSVANCVITTCLGNRSTKAPDRARVVEHWIEVARECRILKNFSSLYAILSALQSNSIHRLKKTWEDVSRDSFRIFQKLSEIFSDENNYSLSRELLIKEGTSKFATLEMNPKRAQKRPKETGIIQGTVPYLGTFLTDLVMLDTAMKDYLYGRLINFEKRRKEFEVIAQIKLLQSACNNYSIAPDEQFGAWFRAVERLSETESYNLSCELEPPSESASNTLRTKKNTAIVKRWSDRQAPSTELSTSGSSHSKSCDQLRCGPYLSSGDIADALSVHSAGSSSSDVEEINISFVPESPDGQEKKFWESASQSSPETSGISSASSSTSSSSASTTPVAATRTHKRSVSGLCNSSSALPLYNQQVGDCCIIRVSLDVDNGNMYKSILVTSQDKAPAVIRKAMDKHNLEEEEPEDYELLQILSDDRKLKIPENANVFYAMNSTANYDFVLKKRTFTKGVKVKHGASSTLPRMKQKGLKIAKGIF

SEQ ID NO: 9762 - protein, 632 aa, Homo sapiens
MQLFAFADCLSKRLPDDCLGACALWKLGFGADHNAEQEAAAAGPVTGSSVTSSPVTGSQVLTWVLSVKPGWPPQQTVLQSQLLTEDDVDLEALVNDMNASLESLYSACSMQSDTVPLLQNGQHARSQPRASGPPRSIQPQVSPRQRVQRSQPVHILAVRRLQEEDQQFRTSSLPAIPNPFPELCGPGSPPVLTPGSLPPSQAAAKQDVKVFSEDGTSKVVEILADMTARDLCQLLVYKSHCVDDNSWTLVEHHPHLGLERCLEDHELVVQVESTMASESKFLFRKNYAKYEFFKNPMNFFPEQMVTWCQQSNGSQTQLLQNFLNSSSCPEIQGFLHVKELGKKSWKKLYVCLRRSGLYCSTKGTSKEPRHLQLLADLEDSNIFSLIAGRKQYNAPTDHGLCIKPNKVRNETKELRLLCAEDEQTRTCWMTAFRLLKYGMLLYQNYRIPQQRKALLSPFSTPVRSVSENSLVAMDFSGQTGRVIENPAEAQSAALEEGHAWRKRSTRMNILGSQSPLHPSTLSTVIHRTQHWFHGRISREESHRIIKQQGLVDGLFLLRDSQSNPKAFVLTLCHHQKIKNFQILPCEDDGQTFFSLDDGNTKFSDLIQLVDFYQLNKGVLPCKLKHHCIRVAL

SEQ ID NO: 9763 - protein, 1319 aa, Homo sapiens
MWTLGRRAVAGLLASPSPAQAQTLTRVPRPAELAPLCGRRGLRTDIDATCTPRRAVNVAPVAVPSLRKSEDHALQTGHVLDYLCFCLLGFQSASEQRSNPDSVVHRMAGVRSTTLLSSPCEWDWHPGCSSRSKYSRKHRAVPVHGPRCQAPGMEELIWEQYTVTLQKDSKRGFGIAVSGGRDNPHFENGETSIVISDVLPGGPADGLLQENDRVVMVNGTPMEDVLHSFAVQQLRKSGKVAAIVVKRPRKVQVAALQASPPLDQDDRAFEVMDEFDGRSFRSGYSERSRLNSHGGRSRSWEDSPERGRPHERARSRERDLSRDRSRGRSLERGLDQDHARTRDRSRGRSLERGLDHDFGPSRDRDRDRSRGRSIDQDYERAYHRAYDPDYERAYSPEYRRGARHDARSRGPRSRSREHPHSRSPSPEPRGRPGPIGVLLMKSRANEEYGLRLGSQIFVKEMTRTGLATKDGNLHEGDIILKINGTVTENMSLTDARKLIEKSRGKLQLVVLRDSQQTLINIPSLNDSDSEIEDISEIESNRSFSPEERRHQYSDYDYHSSSEKLKERPSSREDTPSRLSRMGATPTPFKSTGDIAGTVVPETNKEPRYQEDPPAPQPKAAPRTFLRPSPEDEAIYGPNTKMVRFKKGDSVGLRLAGGNDVGIFVAGIQEGTSAEQEGLQEGDQILKVNTQDFRGLVREDAVLYLLEIPKGEMVTILAQSRADVYRDILACGRGDSFFIRSHFECEKETPQSLAFTRGEVFRVVDTLYDGKLGNWLAVRIGNELEKGLIPNKSRAEQMASVQNAQRDNAGDRADFWRMRGQRSGVKKNLRKSREDLTAVVSVSTKFPAYERVLLREAGFKRPVVLFGPIADIAMEKLANELPDWFQTAKTEPKDAGSEKSTGVVRLNTVRQIIEQDKHALLDVTPKAVDLLNYTQWFPIVIFFNPDSRQGVKTMRQRLNPTSNKSSRKLFDQANKLKKTCAHLFTATINLNSANDSWFGSLKDTIQHQQGEAVWVSEGKMEGMDDDPEDRMSYLTAMGADYLSCDSRLISDFEDTDGEGGAYTDNELDEPAEEPLVSSITRSSEPVQHEESIRKPSPEPRAQMRRAASSDQLRDNSPPPAFKPEPPKAKTQNKEESYDFSKSYEYKSNPSAVAGNETPGASTKGYPPPVAAKPTFGRSILKPSTPIPPQEGEEVGESSEEQDNAPKSVLGKVKIFEKMDHKARLQRMQELQEAQNARIEIAQKHPDIYAVPIKTHKPDPGTPQHTSSRPPEPQKAPSRPYQDTRGSYGSDAEEEEYRQQLSEHSKRGYYGQSARYRDTEL

SEQ ID NO: 9764 - protein, 170 aa, Homo sapiens
MGFVKVVKNKAYFKRYQVKFRRRREGKTDYYARKRLVIQDKNKYNTPKYRMIVRVTNRDIICQIAYARIEGDMIVCAAYAHELPKYGVKVGLTNYAAAYCTGLLLARRMEEMYKKAHAAIRENPVYEKKPKKEVKKKRWNRPKMSLAQKKDRVAQKKASFLRAQERAAES

SEQ ID NO: 9765 - protein, 227 aa, Homo sapiens
GNTLKVLGNFDEAIVCCQRHLDISRELNDKVGEARALYNLGNVYHAKGKSFGCPGPQDVGEFPEEVRDALQAAVDFYEENLSLVTALGDRAAQGRAFGNLGNTHYLLGNFRDAVIAHEQRLLIAKEFGDKAAERRAYSNLGNAYIFLGEFETASEYYKIGEGRACWSLGNAYTALGNHDQAMHFAEKHLEISREVGDKSGELTARLNLSDLQMVLGLSYSTNNSIMS

SEQ ID NO: 9766 - protein, 151 aa, Homo sapiens
EDLEKTKEELKTVMSAPPPPPPPPVIPPTENEHDEHDENNAEASAELSNEGVMNHRSEEERVTETQKNERVKKQLQALSSELAQARDETKKTQNDVLHAENVKAGRDKYKTLRQIRQGNTKQRIDEFEAMWGPKLYALFQMRSCQSSIKQM

SEQ ID NO: 9767 - protein, 284 aa, Homo sapiens
MEAIKKKMQMLKLDKENAIDRAEQAEADKKAAEDKCKQVEEELTHLQKKLKGTEDELDKYSEDLKDAQEKLELTEKKASDAEGDVAALNRRIQLVEEELDRAQERLATALQKLEEAEKAADESERGMKVIENRAMKDEEKMEIQEMQLKEAKHIAEEADRKYEEVARKLVILEGELERAEERAEVSELKCGDLEEELKNVTNNLKSLEAASEKYSEKEDKYEEEIKLLSDKLKEAETRAEFAERTVAKLEKTIDDLEEKLAQAKEENVGLHQTLDQTLNELNCI

SEQ ID NO: 9768 - protein, 146 aa, Homo sapiens
VAEQFTLMDAELFKKVVPYHCLGSIWSQRDKKGKEHLAPTIRATVTQFNSVANCVITTCLGNRSTKAPDRARVVEHWIEVARECRILKNFSSLYAILSALQSNSIHRLKKTWEDVSRDSFRIFQKLSEIFSDENNYSLSRELLIKA

SEQ ID NO: 9769 - protein, 283 aa, Homo sapiens
MKSARAKTPRKPTVKKGSQTNLKDPVGVYCRVRPLGFPDQECCIEVINNTTVQLHTPEGYRLNRNGDYKETQYSFKQVFGTHTTQKELFDVVANPLVNDLIHGKNGLLFTYGVTGSGKTHTMTGSPGEGGLLPRCLDMIFNSIGSFQAKRYVFKSNDRNSMDIQCEVDALLERQKREAMPNPKTSSSKRQVDPEFADMITVQEFCKAEEVDEDSVYGVFVSYIEIYNNYIYDLLEEVPFDPIKPKPPQSKLLREDKNHNMYVAGCTEVEVKSTEEAFEVFWRG

SEQ ID NO: 9770 - protein, 165 aa, Homo sapiens
MNDTVTIRTRKFMTNRLLQRKQMVIDVLHPGKATVPKTEIREKLAKMYKTTPDVIFVFGFRTHFGGGKTTGFGMIYDSLDYAKKNEPKHRLARHGLYEKKKTSRKQRKERKNRMKKVRGTAKANVGAGKKASLERGRRALQFLWHLHAACKTGCFFFCLWMRHRG

SEQ ID NO: 9771 - protein, 34 aa, Homo sapiens
MLKMSGWQRQSQNQSWNLRRECSRRKCIFIHHHT

SEQ ID NO: 9772 - protein, 132 aa, Homo sapiens
MNDTVTIRTRKFMTNRLLQRKQMVIDVLHPGKATVPKTEIREKLAKMYKTTPDVIFVFGFRTHFGGGKTTGFGMIYDSLDYAKKNEPKHRLARHGLYEKKKTSRKQRKERKNRMKKVRGTAKANVGAGKKKK

SEQ ID NO: 9773 - protein, 48 aa, Homo sapiens
MDSSSSSSAAGLGAVDPQLQHFIEVETQKQRFQQLVHQMTELCWVPVA

SEQ ID NO: 9774 - protein, 347 aa, Homo sapiens
ITAQNSSGLTCDPGTGHVAYLAGCVVVILDPKENKQQHIFNTARKSLSALAFSPDGKYIVTGENGHRPAVRIWDVEEKNQVAEMLGHKYGVACVAFSPNMKHIVSMGYQHDMVLNVWDWKKDIVVASNKVSCRVIALSFSEDSSYFVTVGNRHVRFWFLEVSTETKVTSTVPLVGRSGILGELHNNIFCGVACGRGRMAGSTFCVSYSGLLCQFNEKRVLEKWINLKVSLSSCLCVSQELIFCGCTDGIVRIFQAHSLHYLANLPKPHYLGVDVAQGLEPSFLFHRKAEAVYPDTVALTFDPIHQWLSCVYKDHSIYIWDVKDINRVGKVWSELFHSSYVWNVEFSR

SEQ ID NO: 9775 - protein, 80 aa, Homo sapiens
MEVTADQPRWVSHHHPAVLNGQHPDTHHPGLSHSYMDAAQYPLPEEVDVLFNIDGQGNHVPPYYGNSVRATVQRYPPTHH

SEQ ID NO: 9776 - protein, 230 aa, Homo sapiens
MLTQFAEGRLEDQLDKYDHWADRFEDLPLYFMTFHGQQSIRTVIDTMQHAVYVYDICHVIIDNLQFMMGHEQLSTDRIAAQDYIIGVFRKFATDNNCHVTLVIHPRKEDDDKELQTASIFGSAKASQEADNVLILQDRKLVTGPGKRYLQVSKNRFDGDVGVFPLEFNKNSLTFSIPPKNKARLKKIKDDTGPVAKKPSSGKKGATTQNSEICSGQAPTPDQPDTSKRSK

SEQ ID NO: 9777 - protein, 343 aa, Homo sapiens
MAASQAVEEMRSRVVLGEFGVRNVHTTDFPGNYSGYDDAWDQDRFEKNFRVDVVHMDENSLEFDMVGIDAAIANAFRRILLAEVPTMAVEKVLVYNNTSIVQDEILAHRLGLIPIHADPRLFEYRNQGDEEGTEIDTLQFRLQVRCTRNPHAAKDSSDPNELYVNHKVYTRHMTWIPLGNQADLFPEGTIRPVHDDILIAQLRPGQEIDLLMHCVKGIGKDHAKFSPVATASYRLLPDITLLEPVEGEAAEELSRCFSPGVIEVQEVQGKKVARVANPRLDTFSREIFRNEKLKKVVRLARVRDHYIYGVSLCCSGWRAVARSRLTATSTSRVQAILLPQPLE

SEQ ID NO: 9778 - protein, 531 aa, Homo sapiens
MWVLLRSGYPLRILLPLRGEWMGRRGLPRNLAPGPPRRRYRKETLQALDMPVLPVTATEIRQYLRGHGIPFQDGHSCLRALSPFAESSQLKGQTGVTTSFSLFIDKTTGHFLCMTSLAEGSWEDFQASVEGRGDGAREGFLLSKAPEFEDSEEVRRIWNRAIPLWELPDQEEVQLADTMFGLTKVTDDTLKRFSVRYLRPARSLVFPWFSPGGSGLRGLKLLEAKCQGDGVSYEETTIPRPSAYHNLFGLPLISRRDAEVVLTSRELDSLALNQSTGLPTLTLPRGTTCLPPALLPYLEQFRRIVFWLGDDLRSWEAAKLFARKLNPKRCFLVRPGDQQPRPLEALNGGFNLSRILRTALPAWHKSIVSFRQLREEVLGELSNVEQAAGLRWSRFPDLNRILKGHRKGELTVFTGPTGSGKTTFISEYALDLCSQGVNTLWGSFEISNVRLARVMLTQFAEGRLEDQLDKYDHWADRFEDLPLYFMTFHGQQSIRTVIDTMQHAVYVYDICHVIIDNLQFMMGHEQLSTDR

SEQ ID NO: 9779 - protein, 338 aa, Homo sapiens
MAPFCFPARSLQEFATVLRNLEDERIRMIENASEVLITPLEKFRKEQIGAAKEAKKKYDKETEKYCGILEKHLNLSSKKKESQLQEADSQVDLVRQHFYEVSLEYVFKVQEVQERKMFEFVEPLLAFLQGLFTFYHHGYELAKDFGDFKTQLTISIQNTRNRFEGTRSEVESLMKKMKENPLEHKTISPYTMEGYLYVQEKRHFGTSWVKHYCTYQRDSKQITMVPFDQKSGGKGGEDESVILKSCTRRKTDSIEKRFCFDVEAVDRGNLDPEMDMYTRRYRVNMKAEVEVMHLQANEHQRLAAEHQKLEERHGADSSSQTSGGTLDLELLASRPVKQ

SEQ ID NO: 9780 - protein, 171 aa, Homo sapiens
MSILKIHAREIFDSRGNPTVEVDLFTSKGLFRAAVPSGASTGIYEALELRDNDKTRYMGKGVSKAVEHINKTIAPALVSKKLNVTEQEKIDKLMIEMDGTENKSKFGANAILGVSLAVCKAGAVEKGVPLYRHIADLAGNSEVILPVPAFNVINGGSHAGNKLAMQEFMIL

SEQ ID NO: 9781 - protein, 58 aa, Homo sapiens
MPPYTVVYFPVRAIRAAPQVPGRRPHPVPVQYHPASPGPHPWALWEGPAGGSPGGHGE

SEQ ID NO: 9782 - protein, 1098 aa, Homo sapiens; identical to SEQ ID NO: 9494

SEQ ID NO: 9783 - protein, 172 aa, Homo sapiens
KKLKGTEDELDKYSEDLKDAQEKLELTEKKASDAEGDVAALNRRIQLVEEELDRAQERLATALQKLEEAEKAADESERGMKVIENRAMKDEEKMEIQEMQLKEAKHIAEEADRKYEEVARKLVILEGELERAEERAEVSELKCGDLEEELKNVTNNLKSLEAASEKRRGLTM

SEQ ID NO: 9784 - protein, 65 aa, Homo sapiens
MLKLLNQKKGPSQCPLCKNDITKRSLQESTRFSQLVEELLKIICAFQLDTGLEYANSYNFAKKEN

SEQ ID NO: 9785 - protein, 579 aa, Homo sapiens
KVKKKGEWKVLVVDQLSMRMLSSCCKMTDIMTEGITIVEDINKRREPLPSLEAVYLITPSEKSVHSLISDFKDPPTAKYRAAHVFFTDSCPDALFNELVKSRAAKVIKTLTEINIAFLPYESQVYSLDSADSFQSFYSPHKAQMKNPILERLAEQIATLCATLKEYPAVRYRGEYKDNALLAQLIQDKLDAYKADDPTMGEGPDKARSQLLILDRGFDPSSPVLHELTFQAMSYDLLPIENDVYKYETSGIGEARVKEVLLDEDDDLWIALRHKHIAEVSQEVTRSLKDFSSSKRMNTGEKTTMRDLSQMLKKMPQYQKELSKYSTHLHLAEDCMKHYQGTVDKLCRVEQDLAMGTDAEGEKIKDPMRAIVPILLDANVSTYDKIRIILLYIFLKNGITEENLNKLIQHAQIPPEDSEIITNMAHLGVPIVTDSTLRRRSKPERKERISEQTYQLSRWTPIIKDIMEDTIEDKLDTKHYPYISTRSSASFSTTAVSARYGHWHKNKAPGEYRSGPRLIIFILGGVSLNEMRCAYEVTQANGKWEVLIAPVIKLSAPCLHMYCMNVVLLTFLLPPNFSWT

SEQ ID NO: 9786 - protein, 373 aa, Homo sapiens
MSTLCPPPSPAVAKTEIALSGKSPLLAATFAYWDNILGPRVRHIWAPKTEQVLLSDGEITFLANHTLNGEILRNAESGAIDVKFFVLSEKGVIIVSLIFDGNWNGDRSTYGLSIILPQTELSFYLPLHRVCVDRLTHIIRKGRIWMHKERQENVQKIILEGTERMEDQGQSIIPMLTGEVIPVMELLSSMKSHSVPEEIDIADTVLNDDDIGDSCHEGFLLNAISSHLQTCGCSVVVGSSAEKVNKIVRTLCLFLTPAERKCSRLCEAESSFKYESGLFVQGLLKDSTGSFVLPFRQVMYAPYPTTHIDVDVNTVKQMPPCHEHIYNQRRYMRSELTAFWRATSEEDMAQDTIIYTDESFTPDLYVMLCLLVL

SEQ ID NO: 9787 - protein, 86 aa, Homo sapiens
MIDSVKLRRDSAADFFSHYEYLCALQNSVPLPAVRACLREGVLDFNADRLRGVDWAPLLSTLKINKDLPLVSIKSFFQPWLGDTGL

SEQ ID NO: 9788 - protein, 248 aa, Homo sapiens
MAGLNSLEAVKRKIQALQQQADEAEDRAQGLQRELDGERERREKAEGDVAALNRRIQLVEEELDRAQERLATALQKLEEAEKAADESERGMKVIENRAMKDEEKMEIQEMQLKEAKHIAEEADRKYEEVARKLVILEGELERAEERAEVSELKCGDLEEELKNVTNNLKSLEAASEKYSEKEDKYEEEIKLLSDKLKEAETRAEFAERTVAKLEKTIDDLEDELYAQKLKYKAISEELDHALNDMTSL

SEQ ID NO: 9789 - protein, 492 aa, Homo sapiens
MSTLCPPPSPAVAKTEIALSGKSPLLAATFAYWDNILGPRVRHIWAPKTEQVLLSDGEITFLANHTLNGEILRNAESGAIDVKFFVLSEKGVIIVSLIFDGNWNGDRSTYGLSIILPQTELSFYLPLHRVCVDRLTHIIRKGRIWMHKERQENVQKIILEGTERMEDQGQSIIPMLTGEVIPVMELLSSMKSHSVPEEIDIADTVLNDDDIGDSCHEGFLLNAISSHLQTCGCSVVVGSSAEKVNKIVRTLCLFLTPAERKCSRLCEAESSFKYESGLFVQGLLKDSTGSFVLPFRQVMYAPYPTTHIDVDVNTVKQMPPCHEHIYNQRRYMRSELTAFWRATSEEDMAQDTIIYTDESFTPDLFMCTCAGVLYRNIFQDVLHRDTLVKAFLDQVFQLKPGLSLRSTFLAQFLLVLHRKALTLIKYIEDDTQKGKKPFKSLRNLKIDLDLTAEGDLNIIMALAEKIKPGLHSFIFGRPFYTSVQERDVLMTF

SEQ ID NO: 9790 - protein, 197 aa, Homo sapiens
MQRASRLKRELHMLATEPPPGITCWQDKDQMDDLRAQILGGANTPYEKGVFKLEVIIPERYPFEPPQIRFLTPIYHPNIDSAGRICLDVLKLPPKGAWRPSLNIATVLTSIQLLMSEPNPDDPLMADISSEFKYNKPAFLKNARQWTEKHARQKQKADEEEMLDNLPEAGDSRVHNSTQKRKASQLVGIEKKFHPDV

SEQ ID NO: 9791 - protein, 240 aa, Homo sapiens
MELNEIMSSECHSSVCAKIVQLLGQNEVDYRQKQVVILSQDSFYRVLTSEQKAKALKGQFNFDHPDAFDNELILKTLKEITEGKTVQIPVYDFVSHSRKEETVTVYPADVVLFEGILAFYSQEVRDLFQMKLFVDTDADTRLSRRVLRDISERGRDLEQILSQYITFVKPAFEEFCLPTKKYADVIIPRGADNLVAINLIVQHIQDILNGGPSKRQTNGCLNGYTPSRKRQASESSSRPH

SEQ ID NO: 9792 - protein, 169 aa, Homo sapiens
MFSSSAKIVKPNGEKPDEFESGISQALLELEMNSDLKAQLRELNITAAKKIQVRLVRELEKKFSGKHVVFIAQRRILPKPTRKSRTKNKQKRPRSRTLTAVHDAILEDLVFPSEIVGKRIRVKLDGSRLIKVHLDKAQQNNVEHKVETFSGVYKKLTGKDVNFEFPEFQ

SEQ ID NO: 9793 - protein, 217 aa, Homo sapiens
MAQEKMKLGFKSLPSSTTADGNILRRVNSAPLINGLGFNSQVLQADMLRIRTNRTTFRNRRSLLLPPPPFHGSISRLHQIKQEEAMDLINRETMSEWKLQSEIQISHSWEEGLKLNDNGLQKSSSLKCIDLTPVSSMASSIKKTGKQCFSPSLQTCVSCTGSPSSPIPSPMQQYIILLPATFDGNDSNAGSSGNSSAEIGTVTNSPVSPSDTGSHLF

SEQ ID NO: 9794 - protein, 138 aa, Homo sapiens
DLSELERDNTGRCRLSSPVPAVCRKEPCVLGVDEAGRGPVLGPMVYAICYCPLPRLADLEALKVADSKTLLESERERLFAKMEDTDFVGWALDVLSPNLISTSMLGRVKYNLNSLSHDTATGLIQYALDQGVNVTQVS

SEQ ID NO: 9795 - protein, 226 aa, Homo sapiens
MERARRIEGWNSNEAPPPRPTLAEGDVAALNRRIQLVEEELDRAQERLATALQKLEEAEKAADESERGMKVIENRAMKDEEKMEIQEMQLKEAKHIAEEADRKYEEVARKLVILEGELERAEERAEVSELKCGDLEEELKNVTNNLKSLEAASEKYSEKEDKYEEEIKLLSDKLKEAETRAEFAERTVAKLEKTIDDLEEKLAQAKEENVGLHQTLDQTLNELNCI

SEQ ID NO: 9796 - protein, 310 aa, Homo sapiens
HLKHLAIAQELNDRIGEGRACWSLGNAYTALGNHDQAMHFAEKHLEISREVGDKSGELTARLNLSDLQMVLGLSYSTNNSIMSENTEIDSSLNGVRPKLGRRHSMENMELMKLTPEKVQNWNSEILAKQKPLIAKPSAKLLFVNRLKGKKYKTNSSTKVLQDASNSIDHRIPNSQRKISADTIGDEGFFDLLSRFQSNRMDDQRCCLQEKNCHTASTTTSSTPPKMMLKTSSVPVVSPNTDEFLDLLASSQSRRLDDQRASFSNLPGLRLTQNSQSVLSHLMTNDNKEADEDFFDILVKCQENGIQGREW

SEQ ID NO: 9797 - protein, 3112 aa, Homo sapiens
MGRNQRKAPQRLERPGRPASGEQESGSASADGAPSRERRSDRGQADRAKPAAEPATAGGQGTPGGRRKPTAEGNGGCRRPGAGLSPKAQERQSNAQRQGRGPRGGRGGRLEEGSLSGGEELGGRRRRKRKDKGPSARRGRRTPRSLNGDTSGGDGGSSCPDSETREAQESGSQRGTARELRPTPEPTDMGSEGTKTGPESALEPSSDGLDSDWPHADTRGREGSSGTGPLGASEHSGGDSDSSPLGTGPGRGSRAAMASRTFEDSSRAPRDTGPAKDASDNRAQRGAEPETMQASTARAPRHQVGKAVGQVPAAAGEGEAGAAAGAGPEDPAPLAALLVVRRLLARPPPGAASQAVGPRRAGLKERLLSVARALGLLRWLRRRLRLRRRPPEGEGQGTGPRASEGWGRRKPDEGRGHGRGSKGRGRGKADEGRGHERGDEGRGRGKADEGRGHERGYEGRGCGKADEGRGHERGDEGRDHQRGYEGWGREPGLRHRLALRLAGLAGLGGMPRASPGGRSPQVPTSPVPGDPFDQEDETPDPKFAVVFPRIHRAGRASSSRSSEEASADAPTGEGRGWPRAGVGGHSEGCRTSGEGVSGLRRGSLLAPTAPDGPSLDESGSSSEAELETLNDEPPVRWAQGSGPHEGPRLGAAVLLPRLSLETRLQQEGDPGLRGSLRELWEPEDEDEAVLERDLELSLRPGLEAPPFPGAKGRSLGDGLEDMEDLARLRLVCDSSVLLCLKKRFHLGRIYTFGGPVLLVLNPHRSLPLFSPEVQASYHPRKALSTTPHIFAIVASAYDLAQNTGQDPCILLCGHSGSGKTEAAKKIMQFLSSLEQDQTGNRECQVEDMLPILSSFGHAKTILNANASRFGQVFCLYLQQGVIVGASVSHYLLETSRVVFQAQAERSFHVFYKLLAGLDSIERERLSLQGPETYYYLNQGQACRLQGKEDAQDFEGLLKALQGLGLCPEELNAVWAVLAAILQLGNICFSSSERESQEVAAVSSWAEIHTAARLLRVPPECLEGAVTRRVTETPYGQVSRSLPVESAFDARDALAKALYSRLFHRLLRRTNARLAPPGEGGSIGTVTVVDAYGFEALRVNGLEQLCNNLASERLQLFSSQMLLAQEEEECRRELLSWVPVPQPPRESCLDLLVDQPHSLLSILDAQTWLSQATDHTFLQKSHYHHGDHPSYAKPRLPLPVFTVRHYAGTVTYQVHKFLNRNRDQLDPAVVEMLGQSQLQLVGSLFQEAEPQSRGGRGRPTLASRFQQALEDLIARLGRSHVYFIQCLTPNPGKLPGLFDVGHVTEQLHQAAILEAVGTRSANFPVRVPFEAFLASFQALGSEGQEDLSDREKCGAVLSQVLGAESPLYHLGATKVLLQEQGWQRLEELRDQQRSQALVDLHRSFHTCISRQRVLPRMQARMRGFQARSAGVGARAEVGGPVFTHSSNSCWLTVCLIYPWARCWKRYLRRRAALGQLNTILLVAQPLLQRRQRLQLGRWQGWHSSERALERVPSMELGRLEIPAELAVMLKTAESHRDALAGSITECLPPEVPARPSLTLPADIDLFPFSSFVAIGFQEPSLPRPGQPLAKPLTQLDGDNPQRALDINKVMLRLLGDGSLESWQRQIMGAYLVRQGQCRPGLRNELFSQLVAQLWQNPDEQQSQRGWALMAVLLSAFPPLPVLQKPLLKFVSDQAPRGMAALCQHKLLGALEQSQLASGATRAHPPTQLEWLAGWRRGRMALDVFTFSEECYSAEVESWTTGEQLAGWILQSRDAWQDLAGCDFVLDLISQTEDLGDPARPRSYPITPLGSAEAIPLAPGIQAPSLPPGPPPGPAPTLPSRDHTGEVQRSGSLDGFLDQIFQPVISSGLSDLEQSWALSSRMKGGGAIGPTQQGYPMVYPGMIQMPAYQPGMVPAPMPMMPAMGTVPAMPAMVVPPQPPLPSLDAGQLAVQQQNFIQQQALILAQQMTAQAMSLSLEQQMQQRQQQARASEAASQASPSAVTSKPRKPPTPPEKPQRDLGSEGGCLRETSEEAEDRPYQPKSFQQKRNYFQRMGQPQITVRTMKPPAKVHIPQGEAQEEEEEEEEEEEQEEQEVETRAVPSPPPPPIVKKPLKQGGAKAPKEAEAEPAKETAAKGHGQGPAQGRGTVVRSSDSKPKRPQPSREIGNIIRMYQSRPGPVPVPVQPSRPPKAFLRKIDPKDEALAKLGINGAHSSPPMLSPSPGKGPPPAVAPRPKAPLQLGPSSSIKEKQGPLLDLFGQKLPIAHTPPPPPAPPLPLPEDPGTLSAERRCLTQPVEDQGVSTQLLAPSGSVCFSYTGTPWKLFLRKEVFYPRENFSHPYYLRLLCEQILRDTFSESCIRISQNERRKMKDLLGGLEVDLDSLTTTEDSVKKRIVVAARDNWANYFSRFFPVSGESGSDVQLLAVSHRALAHDPGLEVGAGGKVTSVHARSLRSFAEVLGVECRGGSTLELSLKSEQLVLHTARARAIEALVELFLNELKKDSGYVIALRSYITDNCSLLSFHRGDLIKLLPVATLEPGWQFGSAGGRSGLFPADIVQPAAAPDFSFSKEQRSGWHKGQLSNGEPGLARWDRASERPAHPWSQAHSDDSEATSLSSVAYAFLPDSHSYTMQEFARRYFRRSQALLGQTDGGAAGKDTDSLVQYTKAPIQESLLSLSDDVSKLAVASFLALMRFMGDQSKPRGKDEMDLLYELLKLCQQEKLRDEIYCQVIKQVTGHPRPEHCTRGWSFLSLLTGFFPPSTRLMPYLTKFLQDSGPSQELARSSQEHLQRTVKYGGRRRMPPPGEMKAFLVAAEVQEELCRQMGITEPQEVQEFALFLIKEKSQLVRPLQPAEYLNSVVVDQDVSLHSRRLHWETPLHFDNSTYISTHYSQVLWDYLQGKLPVSAKADAQLARLAALQHLSKANRNTPSGQDLLAYVPKQLQRQVNTASIKNLMGQELRRLEGHSPQEAQISFIADLGDQAEQVPGPQQSDFLPAPSPPAEAMSQLPLFGYTVYGVLRVSMQALSGPTLLGLNRQHLILMDPSSQSLYCRIALKSLQRLHLLSPLEEKGPPGLEVNYGSADNPQTIWFELPQAQELLYTTVFLIDSSASCTEWPSIN

SEQ ID NO: 9798 - protein, 93 aa, Homo sapiens
MEENLISMREDHSFHVRYRMEASCLELALEGERLCKSGDCRAGVSFFEAAVQVGTEDLKTLSAIYSQLGNAYFYLHDYAKALEYHHHDLTLAR

SEQ ID NO: 9799 - protein, 248 aa, Homo sapiens
MAGLNSLEAVKRKIQALQQQADEAEDRAQGLQRELDGERERREKAEGDVAALNRRIQLVEEELDRAQERLATALQKLEEAEKAADESERGMKVIENRAMKDEEKMEIQEMQLKEAKHIAEEADRKYEEVARKLVILEGELERAEERAEVSELKCGDLEEELKNVTNNLKSLEAASEKYSEKEDKYEEEIKLLSDKLKEAETRAEFAERTVAKLEKTIDDLEEKLAQAKEENVGLHQTLDQTLNELNCI

SEQ ID NO: 9800 - protein, 57 aa, Homo sapiens
MKLRSSHNASKTLNANNMETLIECQSEGDIKEHPLLASCESEDSICQLIGHSHYSMP

SEQ ID NO: 9801 - protein, 339 aa, Homo sapiens
MSSNKEQRSAVFVILFALITILILYSSNSANEVFHYGSLRGRSRRPVNLKKWSITDGYVPILGNKTLPSRCHQCVIVSSSSHLLGTKLGPEIERAECTIRMNDAPTTGYSADVGNKTTYRVVAHSSVFRVLRRPQEFVNRTPETVFIFWGPPSKMQKPQGSLVRVIQRAGLVFPNMEAYAVSPGRMRQFDDLFRGETGKDREKSHSWLSTGWFTMVIAVELCDHVHVYGMVPPNYCSQRPRLQRMPYHYYEPKGPDECVTYIQNEHSRKGNHHRFITEKRVFSSWAQLNKHTYAPASCPVSPGSSTAFWSSAACGLRTTSSGWGLPVKRSSASSAASGQ

SEQ ID NO: 9802 - protein, 307 aa, Homo sapiens
MAASQAVEEMRSRVVLGEFGVRNVHTTDFPGNYSGYDDAWDQDRFEKNFRVDVVHMDENSLEFDMVGIDAAIANAFRRILLAEVPTMAVEKVLVYNNTSIVQDEILAHRLGLIPIHADPRLFEYRNQGDEEGTEIDTLQFRLQVRCTRNPHAAKDSSDPNELYVNHKVYTRHMTWIPLGNQADLFPEGTIRPVHDDILIAQLRPGQEIDLLMHCVKGIGKDHAKFSPVATASYRLLPDITLLEPVEGEAAEELSRCFSPGVIEVQEVQGKKVARVANPRLDTFSREIFRNEKLKKVVRLARVRDHYI

SEQ ID NO: 9803 - protein, 434 aa, Homo sapiens
MSILKIHAREIFDSRGNPTVEVDLFTSKGLFRAAVPSGASTGIYEALELRDNDKTRYMGKGVSRPIKYINEFLAPALCTQKLNVTEQEKIDKLMIEMDGTENKSKFGANAILGVSLAVCKAGAVEKGVPLYRHIADLAGNSEVILPVPAFNVINGGSHAGNKLAMQEFMILPVGAANFREAMRIGAEVYHNLKNVIKEKYGKDATNVGDEGGFAPNILENKEGLELLKTAIGKAGYTDKVVIGMDVAASEFFRSGKYDLDFKSPDDPSRYISPDQLADLYKSFIKDYPVVSIEDPFDQDDWGAWQKFTASAGIQVVGDDLTVTNPKRIAKAVNEKSCNCLLLKVNQIGSVTESLQACKLAQANGWGVMVSHRSGETEDTFIADLVVGLCTGQIKTGAPCRSERLAKYNQLLRIEEELGSKAKFAGRNFRNPLAK

SEQ ID NO: 9804 - protein, 101 aa, Homo sapiens
MSILKIHAREIFDSRGNPTVEVDLFTSKGLFRAAVPSGASTGIYEALELRDNDKTRYMGKGVSRPIKYINEFLAPALCTQVSQRLLSTSIKLLRLPWLARN

SEQ ID NO: 9805 - protein, 81 aa, Homo sapiens
MATNWGSLLQDKQQLEELARQAVDRALAEGVLLRTSQEPTSSECPAGASLCCADGLQPASGCCQPERCLPGANSFQHHQTG

SEQ ID NO: 9806 - protein, 33 aa, Homo sapiens
MGKGVSKAVEHINKTIAPALVSKKLNVTEQEKI

SEQ ID NO: 9807 - protein, 238 aa, Homo sapiens
MIVRVTNRDIICQIAYARIEGDMIVCAAYAHELPKYGVKVGLTNYAAAYCTGLLLARRLLNRFGMDKIYEGQVEVTGDEYNVESIDGQPGAFTCYLDAGLARTTTGNKVFGALKGAVDGGLSIPHSTKRFPGYDSESKEFNAEVHRKHIMGQNVADYMRYLMEEDEDAYKKQFSQYIKNSVTPDMMEEMYKKAHAAIRENPVYEKKPKKEVKKKRWNRPKMSLAQKKDRVAQKKASFL

SEQ ID NO: 9808 - protein, 76 aa, Homo sapiens
GARQHVFLVSEYLKDASKKMKNGLMFVKLVNPCSGEGAIYLFNMCLQQLFEVKVFKEKHHSWFINQSVQSGEVSAP

SEQ ID NO: 9809 - protein, 48 aa, Homo sapiens
WSHPRKFGQGSRSCRVCSNRHGLIRKYGLNMCRQCFRQYAKDIGFIKR

SEQ ID NO: 9810 - protein, 138 aa, Homo sapiens
MGAYKYIQELWRKKQSDVMRFLLRVRCWQYRQLSALHRAPRPTRPDKARRLGYKAKQGYVIYRIRVRRGGRKRPVPKGATYGKPVHHGVNQLKFARSLQSVAEERAGRHCGALRVLNSYWVGEDSTYKFFEVILIDPF

SEQ ID NO: 9811 - protein, 169 aa, Homo sapiens
MGAYKYIQELWRKKQSDVMRFLLRVRCWQYRQLSALHRAPRPTRPDKARRLGYKAKQGYVIYRIRVRRGGRKRPVPKGATYGKPVHHGVNQLKFARSLQSVAEERAGRHCGALRVLNSYWVGEDSTYKFFEVILIDPFHKAIRRNPDTQWITKPVHKHREMRGLTSAGR

SEQ ID NO: 9812 - protein, 57 aa, Homo sapiens
MAQEKMKLGFKSLPSSTTADGNILRRVNSAPLINGLGCFVTSDLHLQPLEWKWLSSK

SEQ ID NO: 9813 - protein, 81 aa, Homo sapiens
MPDINSRDRSGPRATRIDGSGEEIRWRPSCADTRGGEGRALPARKGSPSSLSRRGEEETQEETPGAEPQFLLHGCEMPRML

SEQ ID NO: 9814 - protein, 199 aa, Homo sapiens
MSKAEWDTDQWKTENYINESTEAQSKQKEQKSSEDSYYRFNDLNYRWVSLDNWTYSKEFKIPFEISKWQKVNLILEGVDTVSKILFNEVTIGETDNMFNRYSFDITNVVRDVNSIELRFQSAVLYAAQQSKAHTRYQVPPDCPPLVQKGECHVNFVRKEQCSFSWDWGPSFPTQGIWKDVRIEAYNICHLNYFTFSPIY

SEQ ID NO: 9815 - protein, 81 aa, Homo sapiens
MDLSALRVEEVQNVINAMQKILECPICLELIKEPVSTKCDHIFCKQCLPLTPRLEFSGVIIVHFYLAIWVQAISHLSPSSS

SEQ ID NO: 9816 - protein, 70 aa, Homo sapiens
MSILKIHAREIFDSRGNPTVEVDLFTSKGLFRAAVPSGASTGIYEALELRDNDKTRYMGKETERHRTRED

SEQ ID NO: 9817 - protein, 291 aa, Homo sapiens
MDENSLEFDMVGIDAAIANAFRRILLAEVPTMAVEKVLVYNNTSIVQDEILAHRLGLIPIHADPRLFEYRNQGDEEGTEIDTLQFRLQVRCTRNPHAAKDSSDPNELYVNHKVYTRHMTWIPLGNQADLFPEGTIRPVHDDILIAQLRPGQEIDLLMHCVKGIGKDHAKFSPVATASYRLLPDITLLEPVEGEAAEELSRCFSPGVIEVQEVQGKKVARVANPRLDTFSREIFRNEKLKKVVRLARVRDHYIFSVESTGVLPPDVLVSEAIKVLMGKCRRFLDELDAVQMD

SEQ ID NO: 9818 - protein, 128 aa, Homo sapiens
MLTQFAEGRLEDQLDKYDHWADRFEDLPLYFMTFHGQQSIRTVIDTMQHAVYVYDICHVIIDNLQFMMGHEQLSTDRIAAQDYIIGVFRKFATDNNCHVTLVIHPRKEDDDKELQTASIFGSAKVSGL

SEQ ID NO: 9819 - protein, 145 aa, Homo sapiens
MVALCSLQHLGSSDPRALPTLPTATSGQRPAKRRRKSPAMAALTRDPQFQKLQQWYREHRSELNLRRLFDANKDRFNHFSLTLNTNHGHILVDYSKNLVTEDVMRMLVDLAKSRGVEAARERMFNGEKINYTEGRAVLHVALRNR

SEQ ID NO: 9820 - protein, 346 aa, Homo sapiens
MAASQAVEEMRSRVVLGEFGVRNVHTTDFPGNYSGYDDAWDQDRFEKNFRVDVVHMDENSLEFDMVGIDAAIANAFRRILLAEVPTMAVEKVLVYNNTSIVQDEILAHRLGLIPIHADPRLFEYRNQGDEEGTEIDTLQFRLQVRCTRNPHAAKDSSDPNELYVNHKVYTRHMTWIPLGNQADLFPEGTIRPVHDDILIAQLRPGQEIDLLMHCVKGIGKDHAKFSPVATASYRLLPDITLLEPVEGEAAEELSRCFSPGVIEVQEVQGKKVARVANPRLDTFSREIFRNEKLKKVVRLARVRDHYIFSVESTGVLPPDVLVSEAIKVLMGKCRRFLDELDAVQMD

SEQ ID NO: 9821 - protein, 62 aa, Homo sapiens
IYLFNMCLQQLFEVKVFKEKHHSWFINQSVQSGGLLHFATPVDPLFLLLHYLIKADKEVIQK

SEQ ID NO: 9822 - protein, 122 aa, Homo sapiens
RVATGGRPGTSPALFSGRGAATGGRQGGRFDTKCLAAATWGRLPGPEETLPGQDSWNGVPSRAGLGMCALAAALVVHCYSKSPSNKDAALLEAARANNMQEVSRNRCALLHSAAVQEYGYGN

SEQ ID NO: 9823 - protein, 178 aa, Homo sapiens [sequence omitted]

SEQ ID NO: 9824 - protein, 940 aa, Homo sapiens
PEGSAVPDSWETLPGTQVTRKEPGALRPCSLRDCLMQDITVLIQQVEVDPSFPEDCLQSSEPLEAGAGKEGKKDDKPTLGAGAPDCSEVGEGHAQVGLGALQLVPDDNRGKEGNDDQDDWSTQEIEACLQDFDNMTWEIECTSEMLKKLSSKVMTKVIKKKIILAIQQLGNGEWTQGLQKRLKHLKGSIQLFEAKLDKGARMLWELAIDFSPRCSENPEKIIATEQNTCAMEKSGRIYTEIIRIWDIVLDHCKLADSIKAICNAYNRGLSCVLRKKLKGINKGQVSANMKIQKRIPRCYVEDTEAEKGREHVNPEYFPPASAVETEYNIMKFHSFSTNMAFNILNDTTATVEYPFRVGELEYAVIDLNPRPLEPIILIGRSGTGKTTCCLYRLWKKFHVYWEKAEQAGSPLLAKQVWLKRRLEVEPGKESPGGEEEEEEEDEEEEDSIEVETVESIDEQEYEACAGGAGVEPAGDGQAAEVCAPEHPHQLEHLHQIFVTKNHVLCQEVQRNFIELSKSTKATSHYKPLDPNIHKLQDLRDENFPLFVTSKQLLLLLDASLPKPFFLRNEDGSLKRTIIGWSAQEESTIPSWQEDEEEAEVDGDYSEEDKAVEMRTGDSDPRVYVTFEVFKNEIWPKMTKGRTAYNPALIWKEIKSFLKGSFEALSCPHGRLTEEVYKKLGRKRCPNFKEDRSEIYSLFSLYQQIRSQKGYFDEEDVLYNISRRLSKLRVLPWSIHELYGDEIQDFTQAELALLMKCINDPNSMFLTGDTAQSIMKGVAFRFSDLRSLFHYASRNTIDKQCAVRKPKKIHQLYQNYRSHSGILNLASGVVDLLQFYFPESFDRLPRDSGLFDGPKPTVLESCSVSDLAILLRGNKRKTQPIEFGAHQVILVANETAKEKIPEELGLALVLTIYEAKGLEFDDVLLYNFFTDSEGCPSWSKL

SEQ ID NO: 9825 - protein, 270 aa, Homo sapiens
MAQEKMKLGFKSLPSSTTADGNILRRVNSAPLINGLGFNSQVLQADMLRIRTNRTTFRNRRSLLLPPPPFHGSISRLHQIKQEEAMDLINRETMSEWKLQSEIQISHSWEEGLKLNDNGLQKSSSLKCIDLTPVSSMASSIKKTGKQCFSPSLQTCVSCTGSPSSPIPSPMQQYIIRSQNPTNIIRPSILGPLKRKGEMAFQYQPKKIFQGTTNMLSSDTSQLSENNVYLLPATFDGNDSNAGSSGNSSAEIGTVTNSPVSPSDTGSHLF

SEQ ID NO: 9826 - protein, 183 aa, Homo sapiens
MAGLNSLEAVKRKIQALQQQADEAEDRAQGLQRELDGERERREKAEGDVAALNRRIQLVEEELDRAQERLATALQKLEEAEKAADESERGMKVIENRAMKDEEKMEIQEMQLKEAKHIAEEADRKYEEVARKLVILEGELERAEERAEVSELKCGDLEEELKNVTNNLKSLEAASEKRRGLTM

SEQ ID NO: 9827 - protein, 87 aa, Homo sapiens
MGHQQLYWSHPRKFGQGSRSCRVCSNRHGLIRKYGLNMCRQCFRQYAKDIGFIKVGVCRRTPCCLGREGCGGYFFRERQTDRSSLEW

SEQ ID NO: 9828 - protein, 212 aa, Homo sapiens
MAYFPGTGRTDQETQLDLSLCGREPESLENLFLDPDMAQEKMKLGFKSLPSSTTADGNILRRVNSAPLINGLGFNSQVLQADMLRIRTNRTTFRNRRSLLLPPPPFHGSISRLHQIKQEEAMDLINRETMSEWKLQSEIQISHSWEEGLKLNDNGLQKSSSLKCIDLTPVSSMASSIKKTGKQCFSPSLQTCVSCTGSPSSPIPSPMQQYIM

SEQ ID NO: 9829 - protein, 125 aa, Homo sapiens
MSILKIHAREIFDSRGNPTVEVDLFTSKGLFRAAVPSGASTGIYEALELRDNDKTRYMGKGVSKAVEHINKTIAPALVSKKLNVTEQEKIDKLMIEMDGTENKSKFGANAILGVSLAVCKAGAVE

SEQ ID NO: 9830 - protein, 658 aa, Homo sapiens
HLLFGKVNNIPSQSTRHSTVATECLSKNTEENLLSLKNSLNDCSNQVILAKASQEHHLSEETKCSASLFSSQCSELEDLTANTNTQDPFLIGSSKQMRHQSESQGVGLSDKELVSDDEERGTGLEENNQEEQSMDSNLGEAASGCESETSVSEDCSGLSSQSDILTTQQRDTMQHNLIKLQQEMAELEAVLEQHGSQPSNSYPSIISDSSALEDLRNPEQSTSEKDSHIHGQRNNSMFSKRPREHISAVLTSQKSSEYPISQNPEGLSADKFEVSADSSTSKNKEPGVERSSPSKCPSLDDRWYMHSCSGSLQNRNYPSQEELIKVVDVEEQQLEESGPHDLTETSYLPRQDLEGTPYLESGISLFSDDPESDPSEDRAPESARVGNIPSSTSALKVPQLKVAESAQSPAAAHTTDTAGYNAMEESVSREKPELTASTERVNKRMSMVVSGLTPEEFMLVYKFARKHHITLTNLITEETTHVVMKTDAEFVCERTLKYFLGIAGGKWVVSYFWVTQSIKERKMLNEHDFEVRGDVVNGRNHQGPKRARESQDRKIFRGLEICCYGPFTNMPTDQLEWMVQLCGASVVKELSSFTLGTGVHPIVVVQPDAWTEDNGFHAIGQMCEAPVVTREWVLDSVALYQCQELDTYLIPQIPHSHY

SEQ ID NO: 9831 - protein, 47 aa, Homo sapiens
MQRASRLKRELHMLATEPPPGITCWQDKDQMDDLRARRNIRWSQHTL

SEQ ID NO: 9832 - protein, 219 aa, Homo sapiens
GLQRELDGERERREKAEGDVAALNRRIQLVEEELDRAQERLATALQKLEEAEKAADESERGMKVIENRAMKDEEKMEIQEMQLKEAKHIAEEADRKYEEVARKLVILEGELERAEERAEVSELKCGDLEEELKNVTNNLKSLEAASEKYSEKEDKYEEEIKLLSDKLKEAETRAEFAERTVAKLEKTIDDLEDELYAQKLKYKAISEELDHALNDMTSL

SEQ ID NO: 9833 - protein, 89 aa, Homo sapiens
KLAKMYKTTPDVIFVFGFRTHFGGGKTTGFGMIYDSLDYAKKNEPKHRLARHGLYEKKKTSRKQRKERKNRMKKVRGTAKANVGAGKKK

SEQ ID NO: 9834 - protein, 53 aa, Homo sapiens
QYIEFVADRLMLELGFSKVLGDREVQSRWSPGPRGDSTPVREMETNHPPSVRG

SEQ ID NO: 9835 - protein, 248 aa, Homo sapiens
KQVEEELTHLQKKLKGTEDELDKYSEDLKDAQEKLELTEKKASDAEGDVAALNRRIQLVEEELDRAQERLATALQKLEEAEKAADESERGMKVIENRAMKDEEKMEIQEMQLKEAKHIAEEADRKYEEVARKLVILEGELERAEERAEVSELKCGDLEEELKNVTNNLKSLEAASEKYSEKEDKYEEEIKLLSDKLKEAETRAEFAERTVAKLEKTIDDLEDELYAQKLKYKAISEELDHALNDMTSL

SEQ ID NO: 9836 - protein, 150 aa, Homo sapiens
MAPRKGKEKKEEQVISLGPQVAEGENVFGVCHIFASFNDTFVHVTDLSGKETICRVTGGMKVKADRDESSPYAAMLAAQDVAQRCKELGITALHIKLRATGGNRTKTPGPGAQSALRALARSGMKIGRIEDVTPIPSDSTRRKGGRRGRR

SEQ ID NO: 9837 - protein, 131 aa, Homo sapiens; identical to SEQ ID NO: 5329

SEQ ID NO: 9838 - protein, 611 aa, Homo sapiens
MKFHSFSTNMAFNILNDTTATVEYPFRVGELEYAVIDLNPRPLEPIILIGRSGTGKTTCCLYRLWKKFHVYWEKAEQAGSPLLAKQVWLKRRLEVEPGKESPGGEEEEEEEDEEEEDSIEVETVESIDEQEYEACAGGAGVEPAGDGQAAEVCAPEHPHQLEHLHQIFVTKNHVLCQEVQRNFIELSKSTKATSHYKPLDPNIHKLQDLRDENFPLFVTSKQLLLLLDASLPKPFFLRNEDGSLKRTIIGWSAQEESTIPSWQEDEEEAEVDGDYSEEDKAVEMRTGDSDPRVYVTFEVFKNEIWPKMTKGRTAYNPALIWKEIKSFLKGSFEALSCPHGRLTEEVYKKLGRKRCPNFKEDRSEIYSLFSLYQQIRSQKGYFDEEDVLYNISRRLSKLRVLPWSIHELYGDEIQDFTQAELALLMKCINDPNSMFLTGDTAQSIMKGVAFRFSDLRSLFHYASRNTIDKQCAVRKPKKIHQLYQNYRSHSGILNLASGVVDLLQFYFPESFDRLPRDSGLFDGPKPTVLESCSVSDLAILLRGNKRKTQPIEFGAHQVILVANETAKEKIPEELGLALVLTIYEAKGLEFDDVLLYNFFTDSEGCPSWSKL

SEQ ID NO: 9839 - protein, 40 aa, Homo sapiens
MLTQFAEGRLEDQLDKYDHWADRFEDLPLYFMTFHGQQSI

SEQ ID NO: 9840 - protein, 151 aa, Homo sapiens
MAASQAVEEMRSRVVLGEFGVRNVHTTDFPGNYSGYDDAWDQDRFEKNFRVDVVHMDENSLEFDMVGIDAAIANAFRRILLAEVPTMAVEKVLVYNNTSIVQDEILAHRLGLIPIHADPRLFEYRNQGEKMKFWEKWTIWVQILVDCDVGR

SEQ ID NO: 9841 - protein, 83 aa, Homo sapiens
MEENLISMREDHSFHVRYRMEASCLELALEGERLCKSGDCRAGVSFFEAAVQVGTEDLKTLSAIYSQLGNAYFYLHDYAKALE

SEQ ID NO: 9842 - protein, 1629 aa, Homo sapiens
MDLTAYAELLKESGNQVLKNGNFSLAIRKYDEAIQILLQLYQWGVPPRDLAVLLCNKSNAFFSLGKWNEAFVAAKECLQWDPTYVKGYYRAGYSLLRLHQPYEAARMFFEGLRLVQRSQDQAPVADFLVGVFTTMSSDSIVLQSFLPCFDHIFTTGFPTEVWQSVIEKLAKKGLWHSFLLLSAKKDRLPRNIHVPELSLKSLFEKYVFIGLYEKMEQVPKLVQWLISIGASVETIGPYPLHALMRLCIQARENHLFRWLMDHKPEWKGRINQKDGDGCTVLHVVAAHSPGYLVKRQTEDVQMLLRFGADPTLLDRQSRSVVDVLKRNKNFKAIEKINSHLEKLATCSKDLSGFSNGDGPTSENDIFRKVLEQLVKYMNSGNRLLHKNFLKQEVVQRFLRLLSTLQEIPPDLVCDINQDCATTVFKFLLEKQRWPEVLLLLTRKVSGEPPLGDCLIKDCNFSDLDICTIIPHLSTWDQRKKQLLGCLIDSGALPDGLQESQERPVVTCLKHEDFELAFLLLTKGADPRAISLTEGDTPLHAALHIFLEIKADIGFSFLSHLLDLFWSNPTEFDYLNPNVQDSNGNTLMHILFQKGMLKRVKKLLDLLVKFDINFNLKNKEGKDARHRIKKNDSLLLAWNKALMENRRRSRQDSAAHLGKLSKSTAPGHTSQLKSQGSFKSVPCGATARTLPEGSAVPDSWETLPGTQVTRKEPGALRPCSLRDCLMQDITVLIQQVEVDPSFPEDCLQSSEPLEAGAGKEGKKDDKPTLGAGAPDCSEVGEGHAQVGLGALQLVPDDNRGKEGNDDQDDWSTQEIEACLQDFDNMTWEIECTSEMLKKLSSKVMTKVIKKKIILAIQQLGNGEWTQGLQKRLKHLKGSIQLFEAKLDKGARMLWELAIDFSPRCSENPEKIIATEQNTCAMEKSGRIYTEIIRIWDIVLDHCKLADSIKAICNAYNRGLSCVLRKKLKGINKGQVSANMKIQKRIPRCYVEDTEAEKGREHVNPEYFPPASAVETEYNIMKFHSFSTNMAFNILNDTTATVEYPFRVGELEYAVIDLNPRPLEPIILIGRSGTGKTTCCLYRLWKKFHVYWEKAEQAGSPLLAKQVWLKRRLEVEPGKESPGGEEEEEEEDEEEEDSIEVETVESIDEQEYEACAGGAGVEPAGDGQAAEVCAPEHPHQLEHLHQIFVTKNHVLCQEVQRNFIELSKSTKATSHYKPLDPNIHKLQDLRDENFPLFVTSKQLLLLLDASLPKPFFLRNEDGSLKRTIIGWSAQEESTIPSWQEDEEEAEVDGDYSEEDKAVEMRTGDSDPRVYVTFEVFKNEIWPKMTKGRTAYNPALIWKEIKSFLKGSFEALSCPHGRLTEEVYKKLGRKRCPNFKEDRSEIYSLFSLYQQIRSQKGYFDEEDVLYNISRRLSKLRVLPWSIHELYGDEIQDFTQAELALLMKCINDPNSMFLTGDTAQSIMKGVAFRFSDLRSLFHYASRNTIDKQCAVRKPKKIHQLYQNYRSHSGILNLASGVVDLLQFYFPESFDRLPRDSGLFDGPKPTVLESCSVSDLAILLRGNKRKTQPIEFGAHQVILVANETAKEKIPEELGLALVLTIYEAKGLEFDDVLLYNFFTDSEGCPSWSKL

SEQ ID NO: 9843 - protein, 1128 aa, Homo sapiens
MEELIWEQYTVTLQKDSKRGFGIAVSGGRDNPHFENGETSIVISDVLPGGPADGLLQENDRVVMVNGTPMEDVLHSFAVQQLRKSGKVAAIVVKRPRKVQVAALQASPPLDQDDRAFEVMDEFDGRSFRSGYSERSRLNSHGGRSRSWEDSPERGRPHERARSRERDLSRDRSRGRSLERGLDQDHARTRDRSRGRSLERGLDHDFGPSRDRDRDRSRGRSIDQDYERAYHRAYDPDYERAYSPEYRRGARHDARSRGPRSRSREHPHSRSPSPEPRGRPGPIGVLLMKSRANEEYGLRLGSQIFVKEMTRTGLATKDGNLHEGDIILKINGTVTENMSLTDARKLIEKSRGKLQLVVLRDSQQTLINIPSLNDSDSEIEDISEIESNRSFSPEERRHQYSDYDYHSSSEKLKERPSSREDTPSRLSRMGATPTPFKSTGDIAGTVVPETNKEPRYQEDPPAPQPKAAPRTFLRPSPEDEAIYGPNTKMVRFKKGDSVGLRLAGGNDVGIFVAGIQEGTSAEQEGLQEGDQILKVNTQDFRGLVREDAVLYLLEIPKGEMVTILAQSRADVYRDILACGRGDSFFIRSHFECEKETPQSLAFTRGEVFRVVDTLYDGKLGNWLAVRIGNELEKGLIPNKSRAEQMASVQNAQRDNAGDRADFWRMRGQRSGVKKNLRKSREDLTAVVSVSTKFPAYERVLLREAGFKRPVVLFGPIADIAMEKLANELPDWFQTAKTEPKDAGSEKSTGVVRLNTVRQIIEQDKHALLDVTPKAVDLLNYTQWFPIVIFFNPDSRQGVKTMRQRLNPTSNKSSRKLFDQANKLKKTCAHLFTATINLNSANDSWFGSLKDTIQHQQGEAVWVSEGKMEGMDDDPEDRMSYLTAMGADYLSCDSRLISDFEDTDGEGGAYTDNELDEPAEEPLVSSITRSSEPVQHEESIRKPSPEPRAQMRRAASSDQLRDNSPPPAFKPEPPKAKTQNKEESYDFSKSYEYKSNPSAVAGNETPGASTKGYPPPVAAKPTFGRSILKPSTPIPPQEGEEVGESSEEQDNAPKSVLGKVKIFEKMDHKARLQRMQELQEAQNARIEIAQKHPDIYAVPIKTHKPDPGTPQHTSKPRKKDWMCMSCRRP

SEQ ID NO: 9844 - protein, 564 aa, Homo sapiens
MKYILVTGGVISGIGKGIIASSVGTILKSCGLHVTSIKIDPYINIDAGTFSPYEHGEVFVLDDGGEVDLDLGNYERFLDIRLTKDNNLTTGKIYQYVINKERKGDYLGKTVQVVPHITDAIQEWVMRQALIPVDEDGLEPQVCVIELGGTVGDIESMPFIEAFRQFQFKVKRENFCNIHVSLVPQPSSTGEQKTKPTQNSVRELRGLGLSPDLVVCRCSNPLDTSVKEKISMFCHVEPEQVICVHDVSSIYRVPLLLEEQGVVDYFLRRLDLPIERQPRKMLMKWKEMADRYDRLLETCSIALVGKYTKFSDSYASVIKALEHSALAINHKLEIKYIDSADLEPITSQEEPVRYHEAWQKLCSAHGVLVPGGFGVRGTEGKIQAIAWARNQKKPFLGVCLGMQLAVVEFSRNVLGWQDANSTEFDPTTSHPVVVDMPEHNPGQMGGTMRLGKRRTLFQTKNSVMRKLYGDADYLEERHRHRFEVNPVWKKCLEEQGLKFVGQDVEGERMEIVELEDHPFFVGVQYHPEFLSRPIKPSPPYFGLLLASVGRLSHYLQKGCRLSPR

SEQ ID NO: 9845 - protein, 24 aa, Homo sapiens
MLVDGPSERPALCFLLLAVAMSFF

SEQ ID NO: 9846 - protein, 129 aa, Homo sapiens
MDHHQPGTGRYQVLLNEEDNSESSAIEQPPTSNPAPQIVQAASSAPALETDSSPPPYSSITVEVPTTSDTEVYGEFYPVPPPYSVATSLPTYDEAEKAKAAAMAAAAAETSQRNFGMMIKHSVFLIYMF

SEQ ID NO: 9847 - protein, 60 aa, Homo sapiens
MTLEEFSAGEQKTERMDKVGDALEEVLSKALSQRTITVGVYEAAKLLNVIHIHLNGRILP

SEQ ID NO: 9848 - protein, 851 aa, Homo sapiens
MEELIWEQYTVTLQKDSKRGFGIAVSGGRDNPHFENGETSIVISDVLPGGPADGLLQENDRVVMVNGTPMEDVLHSFAVQQLRKSGKVAAIVVKRPRKVQVAALQASPPLDQDDRAFEVMDEFDGRSFRSGYSERSRLNSHGGRSRSWEDSPERGRPHERARSRERDLSRDRSRGRSLERGLDQDHARTRDRSRGRSLERGLDHDFGPSRDRDRDRSRGRSIDQDYERAYHRAYDPDYERAYSPEYRRGARHDARSRGPRSRSREHPHSRSPSPEPRGRPGPIGVLLMKSRANEEYGLRLGSQIFVKEMTRTGLATKDGNLHEGDIILKINGTVTENMSLTDARKLIEKSRGKLQLVVLRDSQQTLINIPSLNDSDSEIEDISEIESNRSFSPEERRHQYSDYDYHSSSEKLKERPSSREDTPSRLSRMGATPTPFKSTGDIAGTVVPETNKEPRYQEDPPAPQPKAAPRTFLRPSPEDEAIYGPNTKMVRFKKGDSVGLRLAGGNDVGIFVAGIQEGTSAEQEGLQEGDQILKVNTQDFRGLVREDAVLYLLEIPKGEMVTILAQSRADVYRDILACGRGDSFFIRSHFECEKETPQSLAFTRGEVFRVVDTLYDGKLGNWLAVRIGNELEKGLIPNKSRAEQMASVQNAQRDNAGDRADFWRMRGQRSGVKKNLRKSREDLTAVVSVSTKFPAYERVLLREAGFKRPVVLFGPIADIAMEKLANELPDWFQTAKTEPKDAGSEKSTGVVRLNTVRQIIEQDKHALLDVTPKAVDLLNYTQWFPIVIFFNPDSRQGVKTMRQRLNPTSNKSSRKLFDQANKLKKTCAHLFTATINLNSANDSWFGSLKDT

SEQ ID NO: 9849 - protein, 69 aa, Homo sapiens
MDSLEWNWALVYELSGEHHDEEWSVKTYQEVAQKFVETHPEFIGIKIIYSDHRWGMRTLATPCMTTRKL

SEQ ID NO: 9850 - protein, 451 aa, Homo sapiens
MKYILVTGGVISGIGKGIIASSVGTILKSCGLHVTSIKIDPYINIDAGTFSPYEHGEVFVLDDGGEVDLDLGNYERFLDIRLTKDNNLTTGKIYQYVINKERKGDYLGKTVQVVPHITDAIQEWVMRQALIPVDEDGLEPQVCVIELGGTVGDIESMPFIEAFRQFQFKVKRENFCNIHVSLVPQPSSTGEQKTKPTQNSVRELRGLGLSPDLVVCRCSNPLDTSVKEKISMFCHVEPEQVICVHDVSSIYRVPLLLEEQGVVDYFLRRLDLPIERQPRKMLMKWKEMADRYDRLLETCSIALVGKYTKFSDSYASVIKALEHSALAINHKLEIKYIDSADLEPITSQEEPVRYHEAWQKLCSAHGVLVPGGFGVRGTEGKIQAIAWARNQKKPFLGVCLGMQLAVVEFSRNVLGWQDANSTEFDPTTSHPVGNSMETQTTWKRGTATDLR

SEQ ID NO: 9851 - protein, 191 aa, Homo sapiens
LFSEKRVELLKELSRKPDIYERLASALAPSIYEHEDIKKGILLQLFGGTRKDFSHTGRGKFRAEINILLCGDPGTSKSQLLQYVYNLVPRGQYTSGKGSSAVGLTAYVMKDPETRQLVLQTGALVLSDNGICCIDEFDKMNESTRSVLHEVMEQQTLSIAKGVTFCLYCCTSLEFVLKLLQGACFLRKMWL

SEQ ID NO: 9852 - protein, 140 aa, Homo sapiens
MSGRGKQGGKARAKAKTRSSRAGLQFPVGRVHRLLRKGNYSERVGAGAPVYLAAVLEYLTAEILELAGNAARDNKKTRIIPRHLQLAIRNDEELNKLLAGFRSSQWLVPSRLLASPRVGKRHASSWPPRLLERALQPPAA

SEQ ID NO: 9853 - protein, 651 aa, Homo sapiens
SEKLKERPSSREDTPSRLSRMGATPTPFKSTGDIAGTVVPETNKEPRYQEDPPAPQPKAAPRTFLRPSPEDEAIYGPNTKMVRFKKGDSVGLRLAGGNDVGIFVAGIQEGTSAEQEGLQEGDQILKVNTQDFRGLVREDAVLYLLEIPKGEMVTILAQSRADVYRDILACGRGDSFFIRSHFECEKETPQSLAFTRGEVFRVVDTLYDGKLGNWLAVRIGNELEKGLIPNKSRAEQMASVQNAQRDNAGDRADFWRMRGQRSGVKKNLRKSREDLTAVVSVSTKFPAYERVLLREAGFKRPVVLFGPIADIAMEKLANELPDWFQTAKTEPKDAGSEKSTGVVRLNTVRQIIEQDKHALLDVTPKAVDLLNYTQWFPIVIFFNPDSRQGVKTMRQRLNPTSNKSSRKLFDQANKLKKTCAHLFTATINLNSANDSWFGSLKDTIQHQQGEAVWVSEGKAKTQNKEESYDFSKSYEYKSNPSAVAGNETPGASTKGYPPPVAAKPTFGRSILKPSTPIPPQEGEEVGESSEEQDNAPKSVLGKVKIFEKMDHKARLQRMQELQEAQNARIEIAQKHPDIYAVPIKTHKPDPGTPQHTSSRPPEPQKAPSRPYQDTRGSYGSDAEEEEYRQQLSEHSKRGYYGQSARYRDTEL

SEQ ID NO: 9854 - protein, 749 aa, Homo sapiens
MSSPASTPSRRGSRRGRATPAQTPRSEDARSSPSQRRRGEDSTSTGELQPMPTSPGVDLQSPAAQDVLFSSPPQMHSSAIPLDFDVSSPLTYGTPSSRVEGTPRSGVRGTPVRQRPDLGSAQKGLQVDLQSDGAAAEDIVASEQSLGQKLVIWGTDVNVAACKENFQRFLQRFIDPLAKEEENVGIDITEPLYMQRLGEINVIGEPFLNVNCEHIKSFDKNLYRQLISYPQEVIPTFDMAVNEIFFDRYPDSILEHQIQVRPFNALKTKNMRNLNPEGIYRAVPIRVNPRVSNVKSVYKTHIDVIHYRKTDAKRLHGLDEEAEQKLFSEKRVELLKELSRKPDIYERLASALAPSIYEHEDIKKGILLQLFGGTRKDFSHTGRGKFRAEINILLCGDPGTSKSQLLQYVYNLVPRGQYTSGKGSSAVGLTAYVMKDPETRQLVLQTGALVLSDNGICCIDEFDKMNESTRSVLHEVMEQQTLSIAKAGIICQLNARTSVLAAANPIESQWNPKKTTIENIQLPHTLLSRFDLIFLLLDPQDEAYDRRLAHHLVALYYQSEEQAEEELLDMAVLKDYIAYAHSTIMPRLSEEASQALIEAYVDMRKIGSSRGMVSAYPRQLESLIRLAEAHAKVRLSNKVEAIDVEEAKRLHREALKQSATDPRTGIVDISILTTGMSATSRKRKEELAEALKKLILSKGKTPALKYQQLFEDIRGQSDIAITKDMFEEALRALADDDFLTVTGKTVRLL

SEQ ID NO: 9855 - protein, 160 aa, Homo sapiens
MSSPASTPSRRGSRRGRATPAQTRESPEPGPLQPPAPPRLPSRRSWQRWVGARDPGAQPRAGRCRLVRTDTHSRLWPGCCLIRLPFASVWFGSVLGVRMPGHLPLRDVEARIPPPRGSCSRCQPRLEWTCRALLRRTCCFPALPKCILQLSLLTLMLVHH

SEQ ID NO: 9856 - protein, 373 aa, Homo sapiens
MAKERRRAVLELLQRPGNARCADCGAPDPDWASYTLGVFICLSCSGIHRNIPQVSKVKSVRLDAWEEAQVEFMASHGNDAARARFESKVPSFYYRPTPSDCQLLREQWIRAKYERQEFIYPEKQEPYSAGYREGFLWKRGRDNGQFLSRKFVLTEREGALKYFNRNDAKEPKAVMKIEHLNATFQPAKIGHPHGLQVTYLKDNSTRNIFIYHEDGKIVDWFNALRAARFHYLQVAFPGAGDADLVPKLSRNYLKEGYMEKTGPKQTEGFRKRWFTMDDRRLMYFKDPLDAFARGEVFIGSKESGYTVLHGFPPSTQGHHWPHGITIVTPDRKFLFACETESDQREWVAAFQKAVDRPMLPQEYAVEAHFKHKP

SEQ ID NO: 9857 - protein, 106 aa, Homo sapiens
LGEINVIGEPFLNVNCEHIKSFDKNLYRQLISYPQEVIPTFDMAVNEIFFDRYPDSILEHQIQVRPFNALKTKNMRNLNPEDQASGVSGRHACRADTTHSYPVCSQ

SEQ ID NO: 9858 - protein, 1025 aa, Homo sapiens
MSNGYSTDENFRYLISCFRARVKMYIQVEPVLDYLTFLPAEVKEQIQRTVATSGNMQAVELLLSTLEKGVWHLGWTREFVEALRRTGSPLAARYMNPELTDLPSPSFENAHDEYLQLLNLLQPTLVDKLLVRDVLDKCMEEELLTIEDRNRIAAAENNGNESGVRELLKRIVQKENWFSAFLNVLRQTGNNELVQELTGSDCSESNAEIENLSQVDGPQVEEQLLSTTVQPNLEKEVWGMENNSSESSFADSSVVSESDTSLAEGSVSCLDESLGHNSNMGSDSGTMGSDSDEENVAARASPEPELQLRPYQMEVAQPALEGKNIIICLPTGSGKTRVAVYIAKDHLDKKKKASEPGKVIVLVNKVLLVEQLFRKEFQPFLKKWYRVIGLSGDTQLKISFPEVVKSCDIIISTAQILENSLLNLENGEDAGVQLSDFSLIIIDECHHTNKEAVYNNIMRHYLMQKLKNNRLKKENKPVIPLPQILGLTASPGVGGATKQAKAEEHILKLCANLDAFTIKTVKENLDQLKNQIQEPCKKFAIADATREDPFKEKLLEIMTRIQTYCQMSPMSDFGTQPYEQWAIQMEKKAAKEGNRKERVCAEHLRKYNEALQINDTIRMIDAYTHLETFYNEEKDKKFAVIEDDSDEGGDDEYCDGDEDEDDLKKPLKLDETDRFLMTLFFENNKMLKRLAENPEYENEKLTKLRNTIMEQYTRTEESARGIIFTKTRQSAYALSQWITENEKFAEVGVKAHHLIGAGHSSEFKPMTQNEQKEVISKFRTGKINLLIATTVAEEGLDIKECNIVIRYGLVTNEIAMVQARGRARADESTYVLVAHSGSGVIEHETVNDFREKMMYKAIHCVQNMKPEEYAHKILELQMQSIMEKKMKTKRNIAKHYKNNPSLITFLCKNCSVLACSGEDIHVIEKMHHVNMTPEFKELYIVRENKALQKKCADYQINGEIICKCGQAWGTMMVHKGLDLPCLKIRNFVVVFKNNSTKKQYKKWVELPITFPNLDYSECCLFSDED

SEQ ID NO: 9859 - protein, 66 aa, Homo sapiens
TIEENIKIFEEEEVEFISVPVPEFADSDPANIVHDFNKKLLKVFRNVKPAIVSQFGILKTNLPWKL

SEQ ID NO: 9860 - protein, 989 aa, Homo sapiens
MPVRGDRGFPPRRELSGWLRAPGMEELIWEQYTVTLQKDSKRGFGIAVSGGRDNPHFENGETSIVISDVLPGGPADGLLQENDRVVMVNGTPMEDVLHSFAVQQLRKSGKVAAIVVKRPRKVQVAALQASPPLDQDDRAFEVMDEFDGRSFRSGYSERSRLNSHGGRSRSWEDSPERGRPHERARSRERDLSRDRSRGRSLERGLDQDHARTRDRSRGRSLERGLDHDFGPSRDRDRDRSRGRSIDQDYERAYHRAYDPDYERAYSPEYRRGARHDARSRGPRSRSREHPHSRSPSPEPRGRPGPIGVLLMKSRANEEYGLRLGSQIFVKEMTRTGLATKDGNLHEGDIILKINGTVTENMSLTDARKLIEKSRGKLQLVVLRDSQQTLINIPSLNDSDSEIEDISEIESNRSFSPEERRHQYSDYDYHSSSEKLKERPSSREDTPSRLSRMGATPTPFKSTGDIAGTVVPETNKEPRYQEDPPAPQPKAAPRTFLRPSPEDEAIYGPNTKMVRFKKGDSVGLRLAGGNDVGIFVAGIQEGTSAEQEGLQEGDQILKVNTQDFRGLVREDAVLYLLEIPKGEMVTILAQSRADVYRDILACGRGDSFFIRSHFECEKETPQSLAFTRGEVFRVVDTLYDGKLGNWLAVRIGNELEKGLIPNKSRAEQMASVQNAQRDNAGDRADFWRMRGQRSGVKKNLRKSREDLTAVVSVSTKFPAYERVLLREAGFKRPVVLFGPIADIAMEKLANELPDWFQTAKTEPKDAGSEKSTGVVRLNTVRQIIEQDKHALLDVTPKAVDLLNYTQWFPIVIFFNPDSRQGVKTMRQRLNPTSNKSSRKLFDQANKLKKTCAHLFTATINLNSANDSWFGSLKDTIQHQQGEAVWVSEGKMEGMDDDPEDRMSYLTAMGADYLSCDSRLISDFEDTDGEGGAYTDNELDEPAEEPLVSSITRSSEPVQHEEIEIAQKHPDIYAVPIKTHKPDPGTPQHTR

SEQ ID NO: 9861 - protein, 1596 aa, Homo sapiens
MESRETLSSSRQRGGESDFLPVSSAKPPAAPGCAGEPLLSTPGPGKGIPVGGERMEPEEEDELGSGRDVDSNSNADSEKWVAGDGLEEQEFSIKEANFTEGSLKLKIQTTKRAKKPPKNLENYICPPEIKITIKQSGDQKVSRAGKNSKATKEEERSHSKKKLLTASDLAASDLKGFQPQAYERPQKHSTLHYDTGLPQDFTGDTLKPKHQQKSSSQNHMDWSTNSDSGPVTQNCFISPESGRETASTSKIPALEPVASFAKAQGKKGSAGNTWSQLSNNNKDLLLGGVAPSPSSHSSPAPPSSSAECNGLQPLVDQDGGGTKEPPEPPTVGSKKKSSKKDVISQTIPNPDLDWVKNAQKAFDNTEGKREGYSADSAQEASPARQNVSSASNPENDSSHVRITIPIKAPSLDPTNHKRKKRQSIKAVVEKIMPEKALASGITMSSEVVNRILSNSEGNKKDPRVPKLSKMIENESPSVGLETGGNAEKVIPGGVSKPRKPPMVMTPPTCTDHSPSRKLPEIQHPKFAAKRRWTCSKPKPSTMLREAVMATSDKLMLEPPSAYPITPSSPLYTNTDSLTVITPVKKKRGRPKKQPLLTVETIHEGTSTSPVSPISREFPGTKKRKRRRNLAKLAQLVPGEDKPMSEMKFHKKVGKLGVLDKKTIKTINKMKTLKRKNILNQILSCSSSVALKAKAPPETSPGAAAIESKLGKQINVSKRGTIYIGKKRGRKPRAELPPPSEEPKTAIKHPRPVSSQPDVPAVPSNFQSLVASSPAAMHPLSTQLGGSNGNLSPASTETNFSELKTMPNLQPISALPTKTQKGIHSGTWKLSPPRLMANSPSHLCEIGSLKEITLSPVSESHSEETIPSDSGIGTDNNSTSDQAEKSSESRRRYSFDFCSLDNPEAIPSDTSTKNRHGHRQKHLIVDNFLAHESLKKPKHKRKRKSLQNRDDLQFLADLEELITKFQVFRISHRSYTFYHENPYPSIFRINFDHYYPVPYIQYDPLLYLRRTSDLKSKKKRGRPAKTNDTMTKVPFLQGFSYPIPSGSYYAPYGMPYTSMPMMNLGYYGQYPAPLYLSHTLGAASPFMRPTVPPPQFHTNSHVKMSGAAKHKAKHGVHLQGPVSMGLGDMQPSLNPPKVGSASLSSGRLHKRKHKHKHKHKEDRILGTHDNLSGLFAGKATGFSSHILSERLSSADKELPLVSEKNKHKEKQKHQHSEAGHKASKNNFEVDTLSTLSLSDAQHWTQAKEKGDLSSEPVDSCTKRYSGSGGDGGSTRSENLDVFSEMNPSNDKWDSDVSGSKRRSYEGFGTYREKDIQAFKMNRKERSSYDSSMSPGMPSPHLKVDQTAVHSKNEGSVPTMMTRKKPAAVDSVTIPPAPVLSLLAASAATSDAVGSSLKKRFKRREIEAIQCEVRKMCNYTKILSTKKNLDHVNKILKAKRLQRQSKTGNNFVKKRRGRPRKQPTQFDEDSRDQMPVLEKCIDLPSKRGQKPSLSPLVLEPAASQDTIMATIEAVIHMAREAPPLPPPPPPPLPPPPPPPLPPPPPLPKTPRGGKRKHKPQAPAQPPQQSPPQQPLPQEEEVKAKRQRKSRGSESEVLP

SEQ ID NO: 9862 - protein, 88 aa, Homo sapiens
VVDYFLRRLDLPIERQPRKMLMKWKEMADRYDRLLETCSIALVGKYTKFSDSYASVIKALEHSALAINHKLEIKNAQPGVTSLLFSPV

SEQ ID NO: 9863 - protein, 1099 aa, Homo sapiens
MPVRGDRGFPPRRELSGWLRAPGMEELIWEQYTVTLQKDSKRGFGIAVSGGRDNPHFENGETSIVISDVLPGGPADGLLQENDRVVMVNGTPMEDVLHSFAVQQLRKSGKVAAIVVKRPRKVQVAALQASPPLDQDDRAFEVMDEFDGRSFRSGYSERSRLNSHGGRSRSWEDSPERGRPHERARSRERDLSRDRSRGRSLERGLDQDHARTRDRSRGRSLERGLDHDFGPSRDRDRDRSRGRSIDQDYERAYHRAYDPDYERAYSPEYRRGARHDARSRGPRSRSREHPHSRSPSPEPRGRPGPIGVLLMKSRANEEYGLRLGSQIFVKEMTRTGLATKDGNLHEGDIILKINGTVTENMSLTDARKLIEKSRGKLQLVVLRDSQQTLINIPSLNDSDSEIEDISEIESNRSFSPEERRHQYSDYDYHSSSEKLKERPSSREDTPSRLSRMGATPTPFKSTGDIAGTVVPETNKEPRYQEDPPAPQPKAAPRTFLRPSPEDEAIYGPNTKMVRFKKGDSVGLRLAGGNDVGIFVAGIQEGTSAEQEGLQEGDQILKVNTQDFRGLVREDAVLYLLEIPKGEMVTILAQSRADVYRDILACGRGDSFFIRSHFECEKETPQSLAFTRGEVFRVVDTLYDGKLGNWLAVRIGNELEKGLIPNKSRAEQMASVQNAQRDNAGDRADFWRMRGQRSGVKKNLRKSREDLTAVVSVSTKFPAYERVLLREAGFKRPVVLFGPIADIAMEKLANELPDWFQTAKTEPKDAGSEKSTGVVRLNTVRQIIEQDKHALLDVTPKAVDLLNYTQWFPIVIFFNPDSRQGVKTMRQRLNPTSNKSSRKLFDQANKLKKTCAHLFTATINLNSANDSWFGSLKDTIQHQQGEAVWVSEGKMEGMDDDPEDRMSYLTAMGADYLSCDSRLISDFEDTDGEGGAYTDNELDEPAEEPLVSSITRSSEPVQHEEAKTQNKEESYDFSKSYEYKSNPSAVAGNETPGASTKGYPPPVAAKPTFGRSILKPSTPIPPQEGEEVGESSEEQDNAPKSVLGKVKIFEKMDHKARLQRMQELQEAQNARIEIAQKHPDIYAVPIKTHKPDPGTPQHTR

SEQ ID NO: 9864 - protein, 232 aa, Homo sapiens
MSTELFSSTREEGSSGSGPSFRSNQRKMLNLLLERDTSFTVCPDVPRTPVGKFLGDSANLSILSGGTPKRCLDLSNLSSGEITATQLTTSADLDETGHLDSSGLQEVHLAGMNHDQHLMKCSPAQLLCSTPNGLDRGHRKRDAMCSSSANKENDNGNLVDSEMKYLGSPITTVPKLDKNPNLGEDQAEEISDELMEFSLKDQEAKRWGLDVLPKLVWNSCAPAILLPLLRDL

SEQ ID NO: 9865 - protein, 122 aa, Homo sapiens
MCTGRPGWLTVSLRVGKYKKTHKNIMINLMDILEVDTKKQIVRVEPLVTMGQVTALLTSIGWTLPVLPELDDLTVGGLIMGTGIESSSHKYGLFQHICTAYELVLADGSFVRCTPSENSDLF

SEQ ID NO: 9866 - protein, 904 aa, Homo sapiens
MSSPASTPSRRGSRRGRATPAQTPRSEDARSSPSQRRRGEDSTSTGELQPMPTSPGVDLQSPAAQDVLFSSPPQMHSSAIPLDFDVSSPLTYGTPSSRVEGTPRSGVRGTPVRQRPDLGSAQKGLQVDLQSDGAAAEDIVASEQSLGQKLVIWGTDVNVAACKENFQRFLQRFIDPLAKEEENVGIDITEPLYMQRLGEINVIGEPFLNVNCEHIKSFDKNLYRQLISYPQEVIPTFDMAVNEIFFDRYPDSILEHQIQVRPFNALKTKNMRNLNPEDIDQLITISGMVIRTSQLIPEMQEAFFQCQVCAHTTRVEMDRGRIAEPSVCGRCHTTHSMALIHNRSLFSDKQMIKLQESPEDMPAGQTPHTVILFAHNDLVDKVQPGDRVNVTDGVLLSSPRLESNGTILAHRNLRLPGSSHSPASASRVAGITGIYRAVPIRVNPRVSNVKSVYKTHIDVIHYRKTDAKRLHGLDEEAEQKLFSEKRVELLKELSRKPDIYERLASALAPSIYEHEDIKKGILLQLFGGTRKDFSHTGRGKFRAEINILLCGDPGTSKSQLLQYVYNLVPRGQYTSGKGSSAVGLTAYVMKDPETRQLVLQTGALVLSDNGICCIDEFDKMNESTRSVLHEVMEQQTLSIAKAGIICQLNARTSVLAAANPIESQWNPKKTTIENIQLPHTLLSRFDLIFLLLDPQDEAYDRRLAHHLVALYYQSEEQAEEELLDMAVLKDYIAYAHSTIMPRLSEEASQALIEAYVDMRKIGSSRGMVSAYPRQLESLIRLAEAHAKVRLSNKVEAIDVEEAKRLHREALKQSATDPRTGIVDISILTTGMSATSRKRKEELAEALKKLILSKGKTPALKYQQLFEDIRGQSDIAITKDMFEEALRALADDDFLTVTGKTVRLL

SEQ ID NO: 9867 - protein, 129 aa, Homo sapiens
ANERLMTLKIAEMKEAMRTLIFPPSMHFFQAKHLIERSQVFNILRMMPKGAALHLHDIGIVTMDWLVRNVTYRPHCHICFTPRGIMQFRFAHPTPRPSEKCSKWILLEDYRKRVQNVTEFDDRVNPVSC

SEQ ID NO: 9868 - protein, 26 aa, Homo sapiens
MTLEEFSAGEQKTERIHIHLNGRILP

SEQ ID NO: 9869 - protein, 435 aa, Homo sapiens
MPFIEAFRQFQFKVKRENFCNIHVSLVPQPSSTGEQKTKPTQNSVRELRGLGLSPDLVVCRCSNPLDTSVKEKISMFCHVEPEQVICVHDVSSIYRVPLLLEEQGVVDYFLRRLDLPIERQPRKMLMKWKEMADRYDRLLETCSIALVGKYTKFSDSYASVIKALEHSALAINHKLEIKYIDSADLEPITSQEEPVRYHEAWQKLCSAHGVLVPGGFGVRGTEGKIQAIAWARNQKKPFLGVCLGMQLAVVEFSRNVLGWQDANSTEFDPTTSHPVVVDMPEHNPGQMGGTMRLGKRRTLFQTKNSVMRKLYGDADYLEERHRHRFEVNPVWKKCLEEQGLKFVGQDVEGERMEIVELEDHPFFVGVQYHPEFLSRPIKPSPPYFGLLLASVGRLSHYLQKGCRLSPRDTYSDRSGSSSPDSEITELKFPSINHD

SEQ ID NO: 9870 - protein, 176 aa, Homo sapiens
MSRESDVEAQQSHGSSACSQPHGSVTQSQGSSSQSQGISSSSTSTMPNSSQSSHSSSGTLSSLETVSTQELYSIPEDQEPEDQEPEEPTPAPWARLWALQDGFANLECVNDNYWFGRDKSCEYCFDEPLLKRTDKYRTYSKKHFRIFREVGPKNSYIAYIEDHSGNGTFVNTELVG

SEQ ID NO: 9871 - protein, 335 aa, Homo sapiens
MKYILVTGGVISGIGKGIIASSVGTILKSCGLHVTSIKIDPYINIDAGTFSPYEHGEVFVLDDGGEVDLDLGNYERFLDIRLTKDNNLTTGKIYQYVINKERKGDYLGKTVQVVPHITDAIQEWVMRQALIPVDEDGLEPQVCVIELGGTVGDIESMPFIEAFRQFQFKVKRENFCNIHVSLVPQPSSTGEQKTKPTQNSVRELRGLGLSPDLVVCRCSNPLDTSVKEKISMFCHVEPEQVICVHDVSSIYRVPLLLEEQGVVDYFLRRLDLPIERQPRKMLMKWKEMADRYDRLLETCSIALVGKYTKFSDSYASVIKALEHSALAINHKLEIK

SEQ ID NO: 9872 - protein, 461 aa, Homo sapiens
MKYILVTGGVISGIGKGIIASSVGTILKSCGLHVTSIKIDPYINIDAGTFSPYEHGEVFVLDDGGEVDLDLGNYERFLDIRLTKDNNLTTGKIYQYVINKERKGDYLGKTVQVVPHITDAIQEWVMRQALIPVDEDGLEPQVCVIELGGTVGDIESMPFIEAFRQFQFKVKRENFCNIHVSLVPQPSSTGEQKTKPTQNSVRELRGLGLSPDLVVCRCSNPLDTSVKEKISMFCHVEPEQVICVHDVSSIYRVPLLLEEQGVVDYFLRRLDLPIERQPRKMLMKWKEMADRYDRLLETCSIALVGKYTKFSDSYASVIKALEHSALAINHKLEIKYIDSADLEPITSQEEPVRYHEAWQKLCSAHGVLVPGGFGVRGTEGKIQAIAWARNQKKPFLGVCLGMQLAVVEFSRNVLGWQGWAAGLQNDRPVMQALIRPADVPLAKTSHVAKPRAGRGGEHTWV

SEQ ID NO: 9873 - protein, 620 aa, Homo sapiens
SIDQDYERAYHRAYDPDYERAYSPEYRRGARHDARSRGPRSRSREHPHSRSPSPEPRGRPGPIGVLLMKSRANEEYGLRLGSQIFVKEMTRTGLATKDGNLHEGDIILKINGTVTENMSLTDARKLIEKSRGKLQLVVLRDSQQTLINIPSLNDSDSEIEDISEIESNRSFSPEERRHQYSDYDYHSSSEKLKERPSSREDTPSRLSRMGATPTPFKSTGDIAGTVVPETNKEPRYQEDPPAPQPKAAPRTFLRPSPEDEAIYGPNTKMVRFKKGDSVGLRLAGGNDVGIFVAGIQEGTSAEQEGLQEGDQILKVNTQDFRGLVREDAVLYLLEIPKGEMVTILAQSRADVYRDILACGRGDSFFIRSHFECEKETPQSLAFTRGEVFRVVDTLYDGKLGNWLAVRIGNELEKGLIPNKSRAEQMASVQNAQRDNAGDRADFWRMRGQRSGVKKNLRKSREDLTAVVSVSTKFPAYERVLLREAGFKRPVVLFGPIADIAMEKLANELPDWFQTAKTEPKDAGSEKSTGVVRLNTVRQIIEQDKHALLDVTPKAVDLLNYTQWFPIVIFFNPDSRQGVKTMRQRLNPTSNKSSRKLFDQANKLKKTCAHLFTDRNCPEAS

SEQ ID NO: 9874 - protein, 86 aa, Homo sapiens
MALPPAAAPPAGAREPPGSRAAAAAAAPEPPLGLQQLSALQPEPGGVPLHSSWTFWLDRSLPGATAAECASNLKKIYTVQTVQMMK

SEQ ID NO: 9875 - protein, 1191 aa, Homo sapiens
AQALHRMWIQAVKKLRRWKGRAPGMEELIWEQYTVTLQKDSKRGFGIAVSGGRDNPHFENGETSIVISDVLPGGPADGLLQENDRVVMVNGTPMEDVLHSFAVQQLRKSGKVAAIVVKRPRKVQVAALQASPPLDQDDRAFEVMDEFDGRSFRSGYSERSRLNSHGGRSRSWEDSPERGRPHERARSRERDLSRDRSRGRSLERGLDQDHARTRDRSRGRSLERGLDHDFGPSRDRDRDRSRGRSIDQDYERAYHRAYDPDYERAYSPEYRRGARHDARSRGPRSRSREHPHSRSPSPEPRGRPGPIGVLLMKSRANEEYGLRLGSQIFVKEMTRTGLATKDGNLHEGDIILKINGTVTENMSLTDARKLIEKSRGKLQLVVLRDSQQTLINIPSLNDSDSEIEDISEIESNRSFSPEERRHQYSDYDYHSSSEKLKERPSSREDTPSRLSRMGATPTPFKSTGDIAGTVVPETNKEPRYQEDPPAPQPKAAPRTFLRPSPEDEAIYGPNTKMVRFKKGDSVGLRLAGGNDVGIFVAGIQEGTSAEQEGLQEGDQILKVNTQDFRGLVREDAVLYLLEIPKGEMVTILAQSRADVYRDILACGRGDSFFIRSHFECEKETPQSLAFTRGEVFRVVDTLYDGKLGNWLAVRIGNELEKGLIPNKSRAEQMASVQNAQRDNAGDRADFWRMRGQRSGVKKNLRKSREDLTAVVSVSTKFPAYERVLLREAGFKRPVVLFGPIADIAMEKLANELPDWFQTAKTEPKDAGSEKSTGVVRLNTVRQIIEQDKHALLDVTPKAVDLLNYTQWFPIVIFFNPDSRQGVKTMRQRLNPTSNKSSRKLFDQANKLKKTCAHLFTATINLNSANDSWFGSLKDTIQHQQGEAVWVSEGKMEGMDDDPEDRMSYLTAMGADYLSCDSRLISDFEDTDGEGGAYTDNELDEPAEEPLVSSITRSSEPVQHEESIRKPSPEPRAQMRRAASSDQLRDNSPPPAFKPEPPKAKTQNKEESYDFSKSYEYKSNPSAVAGNETPGASTKGYPPPVAAKPTFGRSILKPSTPIPPQEGEEVGESSEEQDNAPKSVLGKVKIFEKMDHKARLQRMQELQEAQNARIEIAQKHPDIYAVPIKTHKPDPGTPQHTSSRPPEPQKAPSRPYQDTRGSYGSDAEEEEYRQQLSEHSKRGYYGQSARYRDTEL

SEQ ID NO: 9876 - protein, 195 aa, Homo sapiens
EIMLQYCFPRLDINVSKGINHLLKSPFSVHPKTGRISVPIDLQKVDQFDPFTVPTISFICRELDAISTNEEEKEENEAESDVKHRTRDYKKTSLAPYVKVFEHFLENLDKSRKGELLKKSGFLLQQAWVTLSLGLSAAILVPRSLHKMPGEATETVPATEQELPQPQAETGSGTESDSDESVPELEEQDSTQATT

SEQ ID NO: 9877 - protein, 742 aa, Homo sapiens
MSSPASTPSRRGSRRGRATPAQTPRSEDARSSPSQRRRGEDSTSTGELQPMPTSPGVDLQSPAAQDVLFSSPPQMHSSAIPLDFDVSSPLTYGTPSSRVEGTPRSGVRGTPVRQRPDLGSAQKGLQVDLQSDGAAAEDIVASEQSLGQKLVIWGTDVNVAACKENFQRFLQRFIDPLAKEEENVGIDITEPLYMQRLGEINVIGEPFLNVNCEHIKSFDKNLYRQLISYPQEVIPTFDMAVNEIFFDRYPDSILEHQIQVRPFNALKTKNMRNLNPEDIDQLITISGMVIRTSQLIPEMQEAFFQCQVCAHTTRVEMDRGRIAEPSVCGRCHTTHSMALIHNRSLFSDKQMIKLQESPEDMPAGQTPHTVILFAHNDLVDKVQPGDRVNVTGIYRAVPIRVNPRVSNVKSVYKTHIDVIHYRKTDAKRLHGLDEEAEQKLFSEKRVELLKELSRKPDIYERLASALAPSIYEHEDIKKGILLQLFGGTRKDFSHTGRGKFRAEINILLCGDPGTSKSQLLQYVYNLVPRGQYTSGKGSSAVGLTAYVMKDPETRQLVLQTGALVLSDNGICCIDEFDKMNESTRSVLHEVMEQQTLSIAKAGIICQLNARTSVLAAANPIESQWNPKKTTIENIQLPHTLLSRFDLIFLLLDPQDEAYDRRLAHHLVALYYQSEEQAEEELLDMAVLKDYIAYAHSTIMPRLSEEASQALIEAITKDMFEEALRALADDDFLTVTGKTVRLL

SEQ ID NO: 9878 - protein, 202 aa, Homo sapiens
MTLSTLARKRKAPLACTCSLGGPDMIPYFSANAVISQNAINQLISESFLTVKGAALFLPRGNGSSTPRISHRRNKHAGDLQQHLQAMFILLRPEDNIRLAVRLESTYQNRTRYMVVVSTNGRQDTEESIVLGMDFSSNDSSTCTMGLVLPLWSDTLIHLDGDGGFSVSTDNRVHIFKPVSVQAMWVDRDSRNKHCDVLLVEE

SEQ ID NO: 9879 - protein, 111 aa, Homo sapiens
MKYILVTGGVISGIGKGIIASSVGTILKSCGLHVTSIKIDPYINIDAGTFSPYEHGEVFVLDDGGEVDLDLGNYERFLDIRLTKDNNLTTGKIYQYVINKERKGDYLGKTV

SEQ ID NO: 9880 - protein, 162 aa, Homo sapiens
MRSSPGNMERIVICLMVIFLGTLVHKSSSQGQDRHMIRMRQLIDIVDQLKNYVNDLVPEFLPAPEDVETNCEWSAFSCFQKAQLKSANTGNNERIINVSIKKLKRKPPSTNAGRRQKHRLTCPSCDSYEKKPPKEFLERFKSLLQKMIHQHLSSRTHGSEDS

SEQ ID NO: 9881 - protein, 167 aa, Homo sapiens
MQLSGGADMAKSKNHTTHNQSRKWHRNGIKKPRSQRYESLKGVDPKFLRNMRFAKKHNKKGLKKMQANNAKAMSARAEAIKALVKPKEVKPKIPKGVSRKLDRLAYIAHPKLGKRARARIAKGLRLCRPKAKAKAKAKDQTKAQAAAPASVPAQAPKRTQAPTKASE

SEQ ID NO: 9882 - protein, 113 aa, Homo sapiens
MNKIFHPNIDEASGTVCLDVINQTWTALYDLTNIFESFLPQLLAYPNPIDPLNGDAAAMYLHRPEEYKQKIKEYIQKYATEEALKEQEEGTGDSSSESSMSDFSEDEAQDMEL

SEQ ID NO: 9883 - protein, 135 aa, Homo sapiens [sequence omitted]

SEQ ID NO: 9884 - protein, 167 aa, Homo sapiens
MGAGEQNRQSAHCVQGICGYLEGDEEGEEGEVRSTQVREWKEQGSKTFMCTGRPGWLTVSLRVGKYKKTHKNIMINLMDILEVDTKKQIVRVEPLVTMGQVTALLTSIGWTLPVLPELDDLTVGGLIMGTGIESSSHKYGLFQHICTAYELVLADGSFVRCTPSENS

SEQ ID NO: 9885 - protein, 293 aa, Homo sapiens
SYMEDHLKNKNRLEKEWEALCAYQAEPNSSFVAQREENVPKNRSLAVLTYDHSRVLLKAENSHSHSDYINASPIMDHDPRNPAYIATQGPLPATVADFWQMVWESGCVVIVMLTPLAENGVRQCYHYWPDEGSNLYHIYEVNLVSEHIWCEDFLVRSFYLKNLQTNETRTVTQFHFLSWYDRGVPSSSRSLLDFRRKVNKCYRGRSCPIIVHCSDGAGRSGTYVLIDMVLNKMAKGAKEIDIAATLEHLRDQRPGMVQTKEQFEFALTAVAEEVNAILKALPHTRSPSWLKLC

SEQ ID NO: 9886 - protein, 1047 aa, Homo sapiens
MKTAQALHRMWIQAVKKLRRWKGRAPGMEELIWEQYTVTLQKDSKRGFGIAVSGGRDNPHFENGETSIVISDVLPGGPADGLLQENDRVVMVNGTPMEDVLHSFAVQQLRKSGKVAAIVVKRPRKVQVAALQASPPLDQDDRAFEVMDEFDGRSFRSGYSERSRLNSHGGRSRSWEDSPERGRPHERARSRERDLSRDRSRGRSLERGLDQDHARTRDRSRGRSLERGLDHDFGPSRDRDRDRSRGRSIDQDYERAYHRAYDPDYERAYSPEYRRGARHDARSRGPRSRSREHPHSRSPSPEPRGRPGPIGVLLMKSRANEEYGLRLGSQIFVKEMTRTGLATKDGNLHEGDIILKINGTVTENMSLTDARKLIEKSRGKLQLVVLRDSQQTLINIPSLNDSDSEIEDISEIESNRSFSPEERRHQYSDYDYHSSSEKLKERPSSREDTPSRLSRMGATPTPFKSTGDIAGTVVPETNKEPRYQEDPPAPQPKAAPRTFLRPSPEDEAIYGPNTKMVRFKKGDSVGLRLAGGNDVGIFVAGIQEGTSAEQEGLQEGDQILKVNTQDFRGLVREDAVLYLLEIPKGEMVTILAQSRADVYRDILACGRGDSFFIRSHFECEKETPQSLAFTRGEVFRVVDTLYDGKLGNWLAVRIGNELEKGLIPNKSRAEQMASVQNAQRDNAGDRADFWRMRGQRSGVKKNLRKSREDLTAVVSVSTKFPAYERVLLREAGFKRPVVLFGPIADIAMEKLANELPDWFQTAKTEPKDAGSEKSTGVVRLNTVRQIIEQDKHALLDVTPKAVDLLNYTQWFPIVIFFNPDSRQGVKTMRQRLNPTSNKSSRKLFDQANKLKKTCAHLFTATINLNSANDSWFGSLKDTIQHQQGEAVWVSEGKMEGMDDDPEDRMSYLTAMGADYLSCDSRLISDFEDTDGEGGAYTDNELDEPAEEPLVSSITRSSEPVQHEEIEIAQKHPDIYAVPIKTHKPDPGTPQHTSSRPPEPQKAPSRPYQDTRGSYGSDAEEEEYRQQLSEHSKRGYYGQSARYRDTEL

SEQ ID NO: 9887 - protein, 810 aa, Homo sapiens
AGWDKRYCEAGFSSVVTQAGELVLGAPGGYYFLGLLAQAPVADIFSSYRPGILLWHVSSQSLSFDSSNPEYFDGYWGYSVAVGEFDGDLNTTEYVVGAPTWSWTLGAVEILDSYYQRLHRLRGEQMASYFGHSVAVTDVNGDGRHDLLVGAPLYMESRADRKLAEVGRVYLFLQPRGPHALGAPSLLLTGTQLYGRFGSAIAPLGDLDRDGYNDIAVAAPYGGPSGRGQVLVFLGQSEGLRSRPSQVLDSPFPTGSAFGFSLRGAVDIDDNGYPDLIVGAYGANQVAVYRAQPVVKASVQLLVQDSLNPAVKSCVLPQTKTPVSCFNIQMCVGATGHNIPQKLSLNAELQLDRQKPRQGRRVLLLGSQQAGTTLNLDLGGKHSPICHTTMAFLRDEADFRDKLSPIVLSLNVSLPPTEAGMAPAVVLHGDTHVQEQTRIVLDCGEDDVCVPQLQLTASVTGSPLLVGADNVLELQMDAANEGEGAYEAELAVHLPQGAHYMRALSNVEGFERLICNQKKENETRVVLCELGNPMKKNAQIGIAMLVSVGNLEEAGESVSFQLQIRSKNSQNPNSKIVLLDVPVRAEAQVELRGNSFPASLVVAAEEGEREQNSLDSWGPKVEHTYELHNNGPGTVNGLHLSIHLPGQSQPSDLLYILDIQPQGGLQCFPQPPVNPLKVDWGLPIPSPSPIHPAHHKRDRRQIFLPEPEQPSRLQDPVLVSCDSAPCTVVQCDLQEMARGQRAMVTVLAFLWLPSLYQRPLDQFVLQSHAWFNVSSLPYAVPPLSLPRGEAQVGFFKRNRPPLEEDDEEGE

SEQ ID NO: 9888 - protein, 273 aa, Homo sapiens
MVLNALWSASRTSLGTGIIWGSCYGIAGSTNVTGDQVKKLDVLSNDLVMNMLKSSFATCVLVSEEDKHAIIVEPEKRKSTDEPSEKDALQPGRNLVAAGYALYGSATMLVLAMDCGVNCFMLDPAIGEFILVDKDVKIKKKGKIYSLNEGYARDFDPAVTEYIQRKKFPPDNSAPYGARYVGSMVADVHRTLVYGGIFLYPANKKSPNGKLRLLYECNPMAYVMEKAGGMATTGKEAVLDVIPTDIHQRAPVILGSPDDVLEFLKVYEKHSAQ

SEQ ID NO: 9889 - protein, 11 aa, Homo sapiens
MIGFLTEDKKK

SEQ ID NO: 9890 - protein, 557 aa, Homo sapiens
MAGGAREVLTLQLGHFAGFVGAHWWNQQDAALGRATDSKEPPGELCPDVLYRTGRTLHGQETYTPRLILMDLKGSLSSLKEEGGLYRDKQLDAAIAWQGKLTTHKEELYPKNPYLQDFLSAEGVLSSDGVWRVKSIPNGKGSSPLPTATTPKPLIPTEASIRVWSDFLRVHLHPRSICMIQKYNHDGEAGRLEAFGQGESVLKEPKYQEELEDRLHFYVEECDYLQGFQILCDLHDGFSGVGAKAAELLQDEYSGRGIITWGLLPGPYHRGEAQRNIYRLLNTAFGLVHLTAHSSLVCPLSLGGSLGLRPEPPVSFPYLHYDATLPFHCSAILATALDTVTVPYRLCSSPVSMVHLADMLSFCGKKVVTAGAIIPFPLAPGQSLPDSLMQFGGATPWTPLSACGEPSGTRCFAQSVVLRGIDRACHTSHRLMVVLALFWQPAHPRDTSTLCPSCMYHWGRNLGSVFTTAAAWSHEFFPSAADSLQGGSSLPPPLLKLQSTGYGSGWFPQGSSGEHPSVWGTVFLFVPAPDPGSLGQRPHQTRLAALGQLHGCWSGAR

SEQ ID NO: 9891 - protein, 813 aa, Homo sapiens
MPTSPGVDLQSPAAQDVLFSSPPQMHSSAIPLDFDVSSPLTYGTPSSRVEGTPRSGVRGTPVRQRPDLGSAQKGLQVDLQSDGAAAEDIVASEQSLGQKLVIWGTDVNVAACKENFQRFLQRFIDPLAKEEENVGIDITEPLYMQRLGEINVIGEPFLNVNCEHIKSFDKNLYRQLISYPQEVIPTFDMAVNEIFFDRYPDSILEHQIQVRPFNALKTKNMRNLNPEDIDQLITISGMVIRTSQLIPEMQEAFFQCQVCAHTTRVEMDRGRIAEPSVCGRCHTTHSMALIHNRSLFSDKQMIKLQESPEDMPAGQTPHTVILFAHNDLVDKVQPGDRVNVTGIYRAVPIRVNPRVSNVKSVYKTHIDVIHYRKTDAKRLHGLDEEAEQKLFSEKRVELLKELSRKPDIYERLASALAPSIYEHEDIKKGILLQLFGGTRKDFSHTGRGKFRAEINILLCGDPGTSKSQLLQYVYNLVPRGQYTSGKGSSAVGLTAYVMKDPETRQLVLQTGALVLSDNGICCIDEFDKMNESTRSVLHEVMEQQTLSIAKAGIICQLNARTSVLAAANPIESQWNPKKTTIENIQLPHTLLSRFDLIFLLLDPQDEAYDRRLAHHLVALYYQSEEQAEEELLDMAVLKDYIAYAHSTIMPRLSEEASQALIEAYVDMRKIGSSRGMVSAYPRQLESLIRLAEAHAKVRLSNKVEAIDVEEAKRLHREALKQSATDPRTGIVDISILTTGMSATSRKRKEELAEALKKLILSKGKTPALKYQQLFEDIRGQSDIAITKDMFEEALRALADDDFLTVTGKTVRLL

SEQ ID NO: 9892 - protein, 236 aa, Homo sapiens
MRIPALNAYMKSLLSLPVWVLMDEDVRIFFYQSPYDSEQVPQALRRLRPRTRKVKSVSPQGNSVDRMAAPRAEALFDFTGNSKLELNFKAGDVIFLLSRINKDWLEGTVRGATGIFPLSFVKILKDFPEEDDPTNWLRCYYYEDTISTIKDIAVEEDLSSTPLLKDLLELTRREFQREDIALNYRDAEGDLVRLLSDEDVALMVRQARGLPSQKRLFPWKLHITQKDNYRVYNTMP

SEQ ID NO: 9893 - protein, 834 aa, Homo sapiens
MSLQVLNDKNVSNEKNTENCDFLFSPPEVTGRSSVLRVSQKENVPPKNLAKAMKVTFQTPLRDPQTHRILSPSMASKLEAPFTQDDTLGLENSHPVWTQKENQQLIKEVDAKTTHGILQKPVEADTDLLGDASPAFGSGSSSESGPGALADLDCSSSSQSPGSSENQMVSPGKVSGSPEQAVEENLSSYSLDRRVTPASETLEDPCRTESQHKAETPHGAEEECKAETPHGAEEECRHGGVCAPAAVATSPPGAIPKEACGGAPLQGLPGEALGCPAGVGTPVPADGTQTLTCAHTSAPESTAPTNHLVAGRAMTLSPQEEVAAGQMASSSRSGPVKLEFDVSDGATSKRAPPPRRLGERSGLKPPLRKAAVRQQKAPQEVEEDDGRSGAGEDPPMPASRGSYHLDWDKMDDPNFIPFGGDTKSGCSEAQPPESPETRLGQPAAEQLHAGPATEEPGPCLSQQLHSASAEDTPVVQLAAETPTAESKERALNSASTSLPTSCPGSEPVPTHQQGQPALELKEESFRDPAEGTGAEVDYLEQFGTSSESALRKQSLYLKFDPLLRDSPGRPVPVATETSSMHGANETPSGRPREAKLVEFDFLGALDIPVPGPPPGVPAPGGPPLSTGPIVDLLQYSQKDLDAVVKATQEENRELRSRCEELHGKNLELGKIMDRFEEVVYQAMEEVQKQKELSKAEIQKVLKEKDQLTTDLNSMEKSFSDLFKRFEKQKEVIEGYRKNEESLKKCVEDYLARITQEGQRYQALKAHAEEKLQLANEEIAQVRSKAQAEALALQASLRKEQMRIQSLEKTVEQKTKENEELTRICDDLISKMEKI

SEQ ID NO: 9894 - protein, 154 aa, Homo sapiens
MPNPRPGKPSAPSLALGPSPGASPSWRAAPKASDLLGARGPGGTFQGRDLRGGAHASSSSLNPMPPSQLQVHPLESPAMISLTPPTTATGVFSLKARPGLPPGINVASLEWVSREPALLCTFPNPSAPRKDSTLSAVPQSSYPLLANGVCKWPG

SEQ ID NO: 9895 - protein, 597 aa, Homo sapiens
RVDENTEENHCGETSSQIPDDTLNKKTSPGVKSCESSVCGEVFVGHSSLNRHIRADTAHKPSEYQEYGQEPYKCQQRKKAFRCHPSFQMQEKAHTGEKLYDCKECGKTFISHSSIQRHMIMHNGDGTYKCKFCGKACPCLSIYLIHERVHTGEKPYKCKQCGKAFSYSTSLQIHERTHTGEKPYECKECGKAFGSPNSLYEHRRTHTGEKPYECKQCGKAFRWFHSFQIHERTHSEEKAYECTKCGKAFKCPSYLCRHEVTHSGKKPCECKQCGKALSYLNFQRHMKMHTRMRPYKCKTVEKPLILPVRFEDMKELTLERNLMNASTVVKPSIVPVPFTIMKGLTLERNPMNVSSVVKPSFLPLPFDIMKGLTLERNRMSVSNVGKPSDLPHTFKCMEGLTLKRNPMNVSSVVKPSFFPLPFDIMKGLTLERNPMSVSNVGKPSHLPHTFKCMKGLTLESNCMNLNNVKKPLDLSETFKFMKRHTLERNPIRNMEKHSTISLPFKYMQQCTEDRMPMNVKSVTKHSYLPRSFEYMQEHTLERNPMNVRNAEKRSIIFLLCVYTKGCTLERNHINVRIVGKHSVCLVPFVDIKGLTLE

SEQ ID NO: 9896 - protein, 662 aa, Homo sapiens
MQTQEILRILRLPELGDLGQFFRSLSATTLDSGGARRSVIGSGPQLLTHYYDDARTMYQVFRRGLSISGNGPCLGFRKPKQPYQWLSYQEVADRAEFLGSGLLQHNCKACTDQFIGVFAQNRPEWIIVELACYTYSMVVVPLYDTLGPGAIRYIINTADISTVIVDKPQKAVLLLEHVERKETPGLKLIILMDPFEEALKERGQKCGVVIKSMQAVEDCGQENHQAPVPPQPDDLSIVCFTSGTTGNPKGAMLTHGNVVADFSGFLKVTESQWAPTCADVHISYLPLAHMFERMVQSVVYCHGGRVGFFQGDIRLLSDDMKALCPTIFPVVPRLLNRMYDKIFSQANTPLKRWLLEFAAKRKQAEVRSGIIRNDSIWDELFFNKIQASLGGCVRMIVTGAAPASPTVLGFLRAALGCQVYEGYGQTECTAGCTFTTPGDWTSGHVGAPLPCNHIKLVDVEELNYWACKGEGEICVRGPNVFKGYLKDPDRTKEALDSDGWLHTGDIGKWLPAGTLKIIDRKKHIFKLAQGEYVAPEKIENIYIRSQPVAQIYVHGDSLKAFLVGIVVPDPEVMPSWAQKRGIEGTYADLCTNKDLKKAILEDMVRLGKESGLHSFEQVKAIHIHSDMFSVQNGLLTPTLKAKRPELREYFKKQIEELYSISM

SEQ ID NO: 9897 - protein, 325 aa, Homo sapiens
MAALMTPGTGAPPAPGDFSGEGSQGLPDPSPEPKQLPELIRMKRDGGRLSEADIRGFVAAVVNGSAQGAQIGAMLMAIRLRGMDLEETSVLTQALAQSGQQLEWPEAWRQQLVDKHSTGGVGDKVSLVLAPALAACGCKVPMISGRGLGHTGGTLDKLESIPGFNVIQSPEQMQVLLDQAGCCIVGQSEQLVPADGILYAARDVTATVDSLPLITGWRGSQPRASGRGSADRHGQAPGSLRGPRPGGGGGAALHGRRRPARLKGPGHHARGRPALAQRTRGDSGPGRCPGGRGAGRRLGPWPLRADAGGAGRGSRSGPSPVLGKS

SEQ ID NO: 9898 - protein, 241 aa, Homo sapiens
GPGAIRYIINTADISTVIVDKPQKAVLLLEHVERKETPGLKLIILMDPFEEALKERGQKCGVVIKSMQAVEDCGQENHQAPVPPQPDDLSIVCFTSGTTGNPKGAMLTHGNVVADFSGFLKVTEKVIFPRQDDVLISFLPLAHMFERVIQSVVYCHGGRVGFFQGDIRLLSDDMKALCPTIFPVVPRLLNRMYDKIFSQANTPLKRWLLEFAAKRKQAEVRSGIIRNDSIWDELFFNKIQP

SEQ ID NO: 9899 - protein, 634 aa, Homo sapiens
MQETLRNLASIGEKWKDQNIEDQYKNPRNNLRSLLGERVDENTEENHCGETSSQIPDDTLNKKTSPGVKSCESSVCGEVFVGHSSLNRHIRADTAHKPSEYQEYGQEPYKCQQRKKAFRCHPSFQMQEKAHTGEKLYDCKECGKTFISHSSIQRHMIMHNGDGTYKCKFCGKACPCLSIYLIHERVHTGEKPYKCKQCGKAFSYSTSLQIHERTHTGEKPYECKECGKAFGSPNSLYEHRRTHTGEKPYECKQCGKAFRWFHSFQIHERTHSEEKAYECTKCGKAFKCPSYLCRHEVTHSGKKPCECKQCGKALSYLNFQRHMKMHTRMRPYKCKTVEKPLILPVRFEDMKELTLERNLMNASTVVKPSIVPVPFTIMKGLTLERNPMNVSSVVKPSFLPLPFDIMKGLTLERNRMSVSNVGKPSDLPHTFKCMEGLTLKRNPMNVSSVVKPSFFPLPFDIMKGLTLERNPMSVSNVGKPSHLPHTFKCMKGLTLESNCMNLNNVKKPLDLSETFKFMKRHTLERNPIRNMEKHSTISLPFKYMQQCTEDRMPMNVKSVTKHSYLPRSFEYMQEHTLERNPMNVRNAEKRSIIFLLCVYTKGCTLERNHINVRIVGKHSVCLVPFVDIKGLTLE

SEQ ID NO: 9900 - protein, 578 aa, Homo sapiens
MCSEARLARRAVEELLRCGADPNLVLEDGAAAVHLAAGARHPRGLRCLGALLRQGGDPNARSVEALTPLHVAAAWGCRRGLELLLSQGADPALRDQDGLRPLDLALQQGHLECARVLQDLDTRTRTRTRIGAETQEPEPAPGTPGLSGPTDETLDSIALQKQPCRGDNRDIGLEADPGPPSLPVPLETVDKHGSSASPPGHWDYSSDASFVTAVEVSGAEDPASDTPPWAGSLPPTRQGLLHVVHANQRVPRSQGTEAELNARLQALTLTPPNAAGFQSSPSSMPLLDRSPAHSPPRTPTPGASDCHCLWEHQTSIDSDMATLWLTEDEASSTGGREPVGPCRHLPVSTVSDLELLKGLRALGPEFSGHSLELAAALRTGCIPDVQADEDALAQQFEQPDPARRWREGVVKSSFTYLLLDPRETQDLPARAFSLTPAERLQTFIRAIFYVGKGTRARPYVHLWEALGHHGRSRKQPHQACPKVRQILDIWASGCGVVSLHCFQHVVAVEAYTREACIVEALGIQTLTNQKQGHCYGVVAGWPPARRRRLGVHLLHRALLVFLAEGERQLHPQDIQARG

SEQ ID NO: 9901 - protein, 79 aa, Homo sapiens
ARALCSGSPAERRQLLPRAREQEELLAPADGTPWLRVHRDGPALSGPQSRALQEALVLSDRAPFAAPSPFAELVLPPQQ

SEQ ID NO: 9902 - protein, 335 aa, Homo sapiens
MPNPRPGKPSAPSLALGPSPGASPSWRAAPKASDLLGARGPGGTFQGRDLRGGAHASSSSLNPMPPSQLQLPTLPLVMVAPSGARLGPLPHLQALLQDRPHFMHQLSTVDAHARTPVLQVHPLESPAMISLTPPTTATGVFSLKARPGLPPGINVASLEWVSREPALLCTFPNPSAPRKDSTLSAVPQSSYPLLANGVCKWPGCEKVFEEPEDFLKHCQADHLLDEKGRAQCLLQREMVQSLEQQLVLEKEKLSAMQAHLAGKMALTKASSVASSDKGSCCIVAAGSQGPVVPAWSGPREAPDSLFAVRRHLWGSHGNSTFPGHPGGSREAADTQ

SEQ ID NO: 9903 - protein, 107 aa, Homo sapiens
LEETSVLTQALAQSGQQLEWPEAWRQQLVDKHSTGGVGDKVSLVLAPALAACGCKEAPWISWSLFLDSMSSRAQSRCKCCWTRRAAVSWVRVSSWFLRTESYMQPEM

SEQ ID NO: 9904 - protein, 288 aa, Homo sapiens
CIVGQSEQLVPADGILYAARDVTATVDSLPLITAPGSPLSPTSSASPKASILSKKLVEGLSALVVDVKFGGAAVFPNQEQARELAKTLVGVGASLGLRVAAALTAMDKPLGRCVGHALEVEEALLCMDGAGPPDLRDLVTTLGGALLWLSGHAGTQAQGAARVAAALDDGSALGRFERMLAAQGVDPGLARALCSGSPAERRQLLPRAREQEELLAPADGTVELVRALPLALVLHELGAGRSRAGEPLRLGVGAELLVDVGQRLRRGTPWLRVHRDGPALSGPQSRAL

SEQ ID NO: 9905 - protein, 374 aa, Homo sapiens
MDRAPQRQHRASRELLAAKKTHTSQIEVIPCKICGDKSSGIHYGVITCEGCKGFFRRSQRCNAAYSCTRQQNCPIDRTSRNRCQHCRLQKCLALGMSRDAVKFGRMSKKQRDSLHAEVQKQLQQRQQQQQEPVVKTPPAGAQGADTLTYTLGLPDGQLPLGSSPDLPEASACPPGLLKASGSGPSYSNNLAKAGLNGASCHLEYSPERGKAEGRESFYSTGSQLTPDRCGLRFEEHRHPGLGELGQGPDSYGSPSFRSTPEAPYASLTEIEHLVQSVCKSYRETCQLRLEDLLRQRSNIFSREEVTGYQRKFIRWGSRAQEDHRATQSATAGPSSLPAVHVGDVGTVCPPPHRGHSVRGGVRQEALRLYGALPE

SEQ ID NO: 9906 - protein, 643 aa, Homo sapiens
MFESCSGFSGFCASPIEESHGALISSCNSRTMTDGLVTFRDVAIDFSQEEWECLDPAQRDLYVDVMLENYSNLVSLDLESKTYETKKIFSENDIFEINFSQWEMKDKSKTLGLEASIFRNNWKCKSIFEGLKGHQEGYFSQMIISYEKIPSYRKSKSLTPHQRIHNTEKSYVCKECGKACSHGSKLVQHERTHTAEKHFECKECGKNYLSAYQLNVHQRFHTGEKPYECKECGKTFSWGSSLVKHERIHTGEKPYECKECGKAFSRGYHLTQHQKIHTGVKSYKCKECGKAFFWGSSLAKHEIIHTGEKPYKCKECGKAFSRGYQLTQHQKIHTGKKPYECKICGKAFCWGYQLTRHQIFHTGEKPYECKECGKAFNCGSSLIQHERIHTGEKPYECKECGKAFSRGYHLSQHQKIHTGEKPFECKECGKAFSWGSSLVKHERVHTGEKSHECKECGKTFCSGYQLTRHQVFHTGEKPYECKECGKAFNCGSSLVQHERIHTGEKPYECKECGKAFSRGYHLTQHQKIHTGEKPFKCKECGKAFSWGSSLVKHERVHTNEKSYECKDCGKAFGSGYQLSVHQRFHTGEKLYQRKEFGKTFTCGSKLVHERTHSNDKPYKYNECGEAFLWTTYSNEKIDTDETL

SEQ ID NO: 9907 - protein, 36 aa, Homo sapiens
ELIGKKKTICESSGIWSNPSPICQSKKSKRSMNDPY

SEQ ID NO: 9908 - protein, 156 aa, Homo sapiens
MAAQGVGPGPGSAAPPGLEAARQKLALRRKKVLSTEEMELYELAQAAGGAIDPDVILVDLLKLNVAPLAVFQMLKSMCAGQRLASEPQDPAAVSLPTSSVPETRGRNKGSAALGGALALAERSSREGSSQRMPRQPSATRLPKGGGPGKSPTRGST

SEQ ID NO: 9909 - protein, 55 aa, Homo sapiens
MERAGATSRGGQAPGFLLRLHTEGRAEAARVQEQDLRQWGLTDYCSLHLFGRKIK

SEQ ID NO: 9910 - protein, 324 aa, Homo sapiens
LEFDVSDGATSKRAPPPRRLGERSGLKPPLRKAAVRQQKAPQEVEEDDGRSGAGEDPPMPASRGSYHLDWDKMDDPNFIPFGGDTKSGCSEAQPPESPETRLGQPAAEQLHAGPATEEPGPCLSQQLHSASAEDTPVVQLAAETPTAESKERALNSASTSLPTSCPGSEPVPTHQQGQPALELKEESFRDPAEVLGTGAEVDYLEQFGTSSFKESALRKQSLYLKFDPLLRDSPGRPVPVATETSSMHGANETPSGRPREAKLVEFDFLGALDIPVPGPPPGVPAPGGPPLSTGPIVDLLQYSQKDLDAVWPQVSSPQRPVMWP

SEQ ID NO: 9911 - protein, 431 aa, Homo sapiens
TNILREPVCLGGCEHIFCSNCVSDCIGTGCPVCYTPAWIQDLKINRQLDSMIQLCSKLRNLLHDNELSDLKEDKPRKSLFNDAGNKKNSIKMWFSPRSKKVRYVVSKASVQTQPAIKKDASAQQDSYEFVSPSPPADVSERAKKASARSGKKQKKKTLAEINQKWNLEAEKEDGEFDSKEESKQKLVSFCSQPSVISSPQINGEIDLLASGSLTESECFGSLTEVSLPLAEQIESPDTKSRNEVVTPEKVCKNYLTSKKSLPLENNGKRGHHNRLSSPISKRCRTSILSTSGDFVKQTVPSENIPLPECSSPPSCKRKVGGTSGRKNSNMSDEFISLSPGTPPSTLSSSSYRRVMSSPSAMKLLPNMAVKRNHRGETLLHIASIKENKKEEWEGRLPETSSPELLCHSLPSLEAGSRGKLFFLSYFKTALK

SEQ ID NO: 9912 - protein, 601 aa, Homo sapiens
MLKLLNQKKGPSQCPLCKNDITKRSLQESTRFSQLVEELLKIICAFQLDTGLEYANSYNFAKKENNSPEHLKDEVSIIQSMGYRNRAKRLLQSEPENPSLQETSLSVQLSNLGTVRTLRTKQRIQPQKTSVYIELGSDSSEDTVNKATYCSVGDQELLQITPQGTRDEISLDSAKKAACEFSETDVTNTEHHQPSNNDLNTTEKRAAERHPEKYQGSSVSNLHVEPCGTNTHASSLQHENSSLLLTKDRMNVEKAEFCNKSKQPGLARSQHNRWAGSKETCNDRRTPSTEKKVDLNADPLCERKEWNKQKLPCSENPRDTEDVPWITLNSSIQKVNEWFSRSDELLGSDDSHDGESESNAKVADVLDVLNEVDEYSGSSEKIDLLASDPHEALICKSERVHSKSVESNIEDKIFGKTYRKKASLPNLSHVTENLIIGAFVTEPQIIQERPLTNKLKRKRRPTSGLHPEDFIKKADLAVQKTPEMINQGTNQTEQNGQVMNITNSGHENKTKGDSIQNEKNPNPIESLEKESAFKTKAEPISSSISNMELELNIHNSKAPKKNRLRRKSSTRHIHALELVVSRNLSPPNCTELQIDSCSSSE

SEQ ID NO: 9913 - protein, 127 aa, Homo sapiens
MAGGKAGKDSGKAKTKAVSRSQRAGLQFPVGRIHRHLKSRTTSHGRVGATAAVYSAAILEYLTAEVLELAGNASKDLKVKRITPRHLQLAIRGDEELDSLIKATIAGGVIPHIHKSLIGKKGQQKTV

SEQ ID NO: 9914 - protein, 502 aa, Homo sapiens
MVKEKVAHPQDPHHPSEKPVIHCHKCGEPCKGEVLRVQTKHFHIKCFTCKVCGCDLAQGGFFIKNGEYLCTLDYQRMYGTRCHGCGEFVEGEVVTALGKTYHPNCFACTICKRPFPPGDRVTFNGRDCLCQLCAQPMSSSPKETTFSSNCAGCGRDIKNGQALLALDKQWHLGCFKCKSCGKVLTGEYISKDGAPYCEKDYQGLFGVKCEACHQFITGKVLEAGDKHYHPSCARCSRCNQMFTEGEEMYLQGSTVWHPDCKQSTKTEEKLRPTRTSSESIYSRPGSSIPGSPGHTIYAKVDNEILDYKDLAAIPKVKAIYDIERPDLITYEPFYTSGYDDKQERQSLGESPRTLSPTPSAEGYQDVRDRMIHRSTSQGSINSPVYSRHSYTPTTSRSPQHFHRPGNEPSSGRNSPLPYRPDSRPLTPTYAQAPKHFHVPDQGINIYRKPPIYKQHGPDMKRRSSGREEDDEELLRRRQLQEEQLMKLNSGLGQLILKEEMEK

SEQ ID NO: 9915 - protein, 137 aa, Homo sapiens
MAALMTPGTGAPPAPGDFSGEGSQGLPDPSPEPKQLPELIRMKRDGGRLSEADIRGFVAAVVNGSAQGAQIGAMLMAIRLRGMDLEETSVLTQALAQSGQQLEWPEAWRQQLVDKHSTGGVGDKVSLVLAPALAACG

SEQ ID NO: 9916 - protein, 169 aa, Homo sapiens
MQVLLDQAGCCIVGQSEQLVPADGILYAARDVTATVDSLPLITASILSKKLVEGLSALVVDVKFGGAAVFPNQEQARELAKTLVGVGASLGLRVAAALTAMDKPLGRCVGHALEVEEALLCMDGAGPPDLRDLVTTLGGALLWLSGHAGTQAQGAARVAAALDDGSALG

SEQ ID NO: 9917 - protein, 587 aa, Homo sapiens
MGGSTCCGCGCGRCNGCANNRSRNIDSRHRRPDSWNRHENPRNRYYDRDLESRAQPPEDNRRKPVLGKLGTLFTAGRRRNSRNGLESPTRSNAKPLSPKDVVASPKLPERESERSRSQSSQLKQTDTSEEGSPRENPREAEGELPESGGPAAPPDAELSPRWSSSAAAVAVQQCHENDSPQLEPLEAEGEPFPDATTTAKQLHSSPGNSSRQENAETPARSPGEDASPGAGHEQEAFLGVRGAPGSPTQERPAGGLGEAPNGAPSVCAEEGSLGPRNARSQPPKGASDLPGEPPAEGAAHTASSAQADCTARPKGHAHPAKVLTLDIYLSKTEGAQVDEPVVITPRAEDCGDWDDMEKRSSGRRSGRRRGSQKSTDSPGADAELPESAARDDAVFDDEVAPNAASDNASAEKKVKSPRAALDGGVASAASPESKPSPGTKGQLRGESDRSKQPPPASSPTKRKGRSRALEAVPAPPASGPRAPAKESPPKRVPDPSPVTKGTAAESGEEAARAIPRELPVKSSSLLPEIKPEHKRGPLPNHFNGRAEGGRSRELGRAAGAPGASDADGLKPRNHFGVGRSTVTTKVT

SEQ ID NO: 9918 - protein, 92 aa, Homo sapiens
MLALLGLSQALNILLGLKGLAPAEISAVCEKGNFNVAHGLAWSYYIGYLRLILPAWSTVVTRSQLTATSASQSSRPGFELTISITTTCYGVQ

SEQ ID NO: 9919 - protein, 53 aa, Homo sapiens
MGDVKESKMQITPETPGRIPVLNPFESPSDYSNLHEQTLASPSVFKSTKLPNR

SEQ ID NO: 9920 - protein, 426 aa, Homo sapiens
MYGTRCHGCGEFVEGEVVTALGKTYHPNCFACTICKRPFPPGDRVTFNGRDCLCQLCAQPMSSSPKETTFSSNCAGCGRDIKNGQALLALDKQWHLGCFKCKSCGKVLTGEYISKDGAPYCEKDYQGLFGVKCEACHQFITGKVLEAGDKHYHPSCARCSRCNQMFTEGEEMYLQGSTVWHPDCKQSTKTEEKLRPTRTSSESIYSRPGSSIPGSPGHTIYAKVDNEILDYKDLAAIPKVKAIYDIERPDLITYEPFYTSGYDDKQERQSLGESPRTLSPTPSAEGYQDVRDRMIHRSTSQGSINSPVYSRHSYTPTTSRSPQHFHRPGNEPSSGRNSPLPYRPDSRPLTPTYAQAPKHFHVPDQGINIYRKPPIYKQHGPDMKRRSSGREEDDEELLRRRQLQEEQLMKLNSGLGQLILKEEMEK

SEQ ID NO: 9921 - protein, 339 aa, Homo sapiens
MVTELLGGDMVNQSFICDPDDETFIKNIIIQDCMWSGFSAAAKLVSEKLASYQAARKDSGSPNPARGHSVCSTSSLYLQDLSAAASECIDPSVVFPYPLNDSSSPKSCASQDSSAFSPSSDSLLSSTESSPQGSPEPLVLHEETPPTTSSDSEEEQEDEEEIDVVSVEKRQAPGKRSESGSPSAGGHSKPPHSPLVLKRCHVSTHQHNYAAPPSTRKDYPAAKRVKLDSVRVLRQISNNRKCTSPRSSDTEENVKRRTHNVLERQRRNELKRSFFALRDQIPELENNEKAPKVVILKKATAYILSVQAEEQKLISEEDLLRKRREQLKHKLEQLRNSCA

SEQ ID NO: 9922 - protein, 2720 aa, Homo sapiens
MEPALGPGVQKDLGYLQQWLKAFVGAFKKSISLSSLEPRRPEEAGAEVPLLPLDELHVLAEQLHQADLEQALLLLKLFIILCRNLENIEAGRGQVLVPRVLALLTKLVAELKGCPPPQGRGTQLENVALHALLLCEGLFDPYQTWRRQRSGEVISSKEKSKYKFPPAALPQEFSAFFQESLQNADHLPPILLLRLIHLFCAVLAGGKENGQMAVSDGSVKGLLSVVRGWSRGPAPDPCLVPLALEALVGAVHVLHASRAPPRGPELRALLESYFHVLNADWPAGLSSGPEEALVTLRVSMLDAIPMMLACEDRPVLQATFLSNNCFEHLTRLIQNSKVLDQDTDAIAVHVVRVLTCIMSDSPSAKEVFKERIGYPHLQEVLQSHGPPTHRLLQELLNMAVEGDHSMCPPPPIRNEQPVLVLAQWLPSLPTAELRLFLAQRLRWLCDSCPASRATCVQAGLVGCLLETLSTGLALEARCQEQLLALLQALGRVSIRPMELRHLLRPRPGLDSEPGGAEAGKARHAGAVIRTLSGMARHQGPARALRYFDLTPSMAGIMVPPVQRWPGPGFTFHAWLCLHPMDTAPTPAPTRPLQRKQLYSFFTSSGSGFEAFFTAAGTLVVAVCTRKEYLTMSLPEVSFADSAWHCVAIVHVPGRRPFSQNLVHVYKDGHLVKTAPLRCPSLSEPFSSCCIGSAGYRTTTTTTGLPTPPVPATLAYTHPALTRSQSVPASTGLGWGSGLVAPLQEGSIDSTLAGTQDTRWGSPTSLEGELGAVAIFHEALQATALRTLCTLGPNETAPFKPEGELHELSTRLLLHYSPQACKNNICLDLSPSHGLDGRLTGHRVETWDVKDVVNCVGGMGALLPLLERVAAQPKEAEAGPAETHDLVGPELTSGHNTQGLVLPLGKSSEERMERNAVAAFLLMLRNFLQGHMVNQESLVQCQGPAIIGALLRKVPSWAMDMNVLMSAQLLMEQVAAEGSGPLLYLLYQHLLFNFHLWTLSDFAVRLGHIQYMSSIVREHRQKLRKKYGVQFILDALRTHYSPQRERPLAADDLRTVQTSLLGLAREFLVRSLSADDVQVTQTMLSFLAATGDDGQAVGALDLLLALLHGSLVQESLAVFLLEPGNLEVLLALLVRPGSLPLLPDRVCKILRRLQQNERLPERSRQRLRLRECGLQGLVACLPEGTVSPQLCQGLYKLFLGADCLNLSDLLAVVQLSLQADLSVRLDICRQLFHLIYGQPDVVRLLARQAGWQDVLTRLYVLEAATAGSPPPSSPESPTSPKPAPPKPPTESPAEPSDVFLPSEAPCPDPDGFYHALSPFCTPFDLGLERSSVGSGNTAGGGGSSGTLTPASQPGTPSPLDGPRPFPAAPGRHSSSLSNVLEDGSLPEPTISGDDTSNTSNPQQTSEEELCNLLTNVLFSVTWRGVEGSDEAAWRERGQVFSVLTQLGASATLVRPPDCIKRSLLEMMLESALTDIKEAPVGVLASLTQQALWLLRLLQDFLCAEGHGNQELWSEKLFEGVCSLLDRLGAWPHLANGTADLREMAQIGLRLVLGYILLEDPQLHAQAYVRLHMLLQTAVPARREEACYVLSKLEAALGRVLNTSSLESATDEAGSPLAAAAAAAAAERCSWLVPLVRTLLDRAYEPLGLQWGLPSLPPTNGSPTFFEDFQAFCATPEWRHFIDKQVQPTMSQFEMDTYAKSHDLMSGFWNACYDMLMSSGQRRQWERAQSRRAFQELVLEPAQRRARLEGLRYTAVLKQQATQHSMALLHWGALWRQLASPCGAWALRDTPIPRWKLSSAETYSRMRLKLVPNHHFDPHLEASALRDNLGEVPLTPTEEASLPLAVTKEAKVSTPPELLQEDQLGEDELAELETPMEAAELDEQREKLVLSAECQLVTVVAVVPGLLEVTTQNVYFYDGSTERVETEEGIGYDFRRPLAQLREVHLRRFNLRRSALELFFIDQANYFLNFPCKVGTTPVSSPSQTPRPQPGPIPPHTQVRNQVYSWLLRLRPPSQGYLSSRSPQEMLRASGLTQKWVQREISNFEYLMQLNTIAGRTYNDLSQYPVFPWVLQDYVSPTLDLSNPAVFRDLSKPIGVVNPKHAQLVREKYESFEDPAGTIDKFHYGTHYSNAAGVMHYLIRVEPFTSLHVQLQSGRFDCSDRQFHSVAAAWQARLESPADVKELIPEFFYFPDFLENQNGFDLGCLQLTNEKVGDVVLPPWASSPEDFIQQHRQALESEYVSAHLHEWIDLIFGYKQRGPAAEEALNVFYYCTYEGAVDLDHVTDERERKALEGIISNFGQTPCQLLKEPHPTRLSAEEAAHRLARLDTNSPSIFQHLDELKAFFAEVVSDGVPLVLALVPHRQPHSFITQGSPDLLVTVSASGLLGTHSWLPYDRNISNYFSFSKDPTMGSHKTQRLLSGPWVPGSGVSGQALAVAPDGKLLFSGGHWDGSLRVTALPRGKLLSQLSCHLDVVTCLALDTCGIYLISGSRDTTCMVWRLLHQGGLSVGLAPKPVQVLYGHGAAVSCVAISTELDMAVSGSEDGTVIIHTVRRGQFVAALRPLGATFPGPIFHLALGSEGQIVVQSSAWERPGAQVTYSLHLYSVNGKLRASLPLAEQPTALTVTEDFVLLGTAQCALHILQLNTLLPAAPPLPMKVAIRSVAVTKERSHVLVGLEDGKLIVVVAGQPSEVRSSQFARKLWRSSRRISQVSSGETEYNPTEAR

SEQ ID NO: 9923 - protein, 69 aa, Homo sapiens
TVRAMTHVINQGMAMYWGTSRWSSMEIMVRWPRSMCVSRHRLPAPAAYGDPKALAGSVPLVPTAPMPGC

SEQ ID NO: 9924 - protein, 175 aa, Homo sapiens
RQTLVSDNIEWPNGITLDLLSQRLYWVDSKLHQLSSIDFSGGNRKTLISSTDFLSHPFGIAVFEDKVFWTDLENEAIFSANRLNGLEISILAENLNNPHDIVIFHELKQPRAPDACELSVQPNGGCEYLCLPAPQISSHSPKYTCACPDTMWLGPDMKRCYRVSGSFWNALKTSS

SEQ ID NO: 9925 - protein, 1294 aa, Homo sapiens
MEDGKPVWAPHPTDGFQMGNIVDIGPDSLTIEPLNQKGKTFLALINQVFPAEEDSKKDVEDNCSLMYLNEATLLHNIKVRYSKDRIYTYVANILIAVNPYFDIPKIYSSEAIKSYQGKSLGTRPPHVFAIADKAFRDMKVLKMSQSIIVSGESGAGKTENTKFVLRYLTESYGTGQDIDDRIVEANPLLEAFGNAKTVRNNNSSRFGKFVEIHFNEKSSVVGGFVSHYLLEKSRICVQGKEERNYHIFYRLCAGASEDIREKLHLSSPDNFRYLNRGCTRYFANKETDKQILQNRKSPEYLKAGSMKDPLLDDHGDFIRMCTAMKKIGLDDEEKLDLFRVVAGVLHLGNIDFEEAGSTSGGCNLKNKSAQSLEYCAELLGLDQDDLRVSLTTRVMLTTAGGTKGTVIKVPLKVEQANNARDALAKTVYSHLFDHVVNRVNQCFPFETSSYFIGVLDIAGFEYFEHNSFEQFCINYCNEKLQQFFNERILKEEQELYQKEGLGVNEVHYVDNQDCIDLIEAKLVGILDILDEENRLPQPSDQHFTSAVHQKHKDHFRLTIPRKSKLAVHRNIRDDEGFIIRHFAGAVCYETTQFVEKNNDALHMSLESLICESRDKFIRELFESSTNNNKDTKQKAGKLSFISVGNKFKTQLNLLLDKLRSTGASFIRCIKPNLKMTSHHFEGAQILSQLQCSGMVSVLDLMQGGYPSRASFHELYNMYKKYMPDKLARLDPRLFCKALFKALGLNENDYKFGLTKVFFRPGKFAEFDQIMKSDPDHLAELVKRVNHWLTCSRWKKVQWCSLSVIKLKNKIKYRAEACIKMQKTIRMWLCKRRHKPRIDGLVKVGTLKKRLDKFNEVVSVLKDGKPEMNKQIKNLEISIDTLMAKIKSTMMTQEQIQKEYDALVKSSEELLSALQKKKQQEEEAERLRRIQEEMEKERKRREEDEKRRRKEEEERRMKLEMEAKRKQEEEERKKREDDEKRIQAEVEAQLARQKEEESQQQAVLEQERRDRELALRIAQSEAELISDEAQADLALRSLDSYPVTSKNDGTRPKMTPEQMAKEMSEFLSRGPAVLATKAAAGTKKYDLSKWKYAELRDTINTSCDIELLAACREEFHRRLKVYHAWKSKNKKRNTETEQRAPKSVTDYDFAPFLNNSPQQNPAAQIPARQREIEMNRQQRFFRIPFIRPADQYKDPQSKKKGWWYAHFDGPWIARQMELHPDKPPILLVAGKDDMEMCELNLEETGLTRKRGAEILPRQFEEIWERCGGIQYLQNAIESRQARPTYATAMLQSLLK

SEQ ID NO: 9926 - protein, 226 aa, Homo sapiens
MRRSLAPSQLAKRKPEGRSCDDEDWQPGLVTPRKRKSSSETQIQECFLSPFRKPLSQLTNQPPCLDSSQHEAFIRSILSKPFKVPIPNYQGPLGSRALGLKRAGVRRALHDPLEKDALVLYEPPPLSAHDQLKLDKEKLPVHVVVDPILSKVLRPHQREGVKFLWECVTSRRIPGSHGCIMADEMGLGKTLQCITLMWTLLRQSPECKPEIDKAVVVSPSSLVKNW

SEQ ID NO: 9927 - protein, 57 aa, Homo sapiens
MSKLSFRARALDASKPLPVFRCEDLPDLHEYASINRAVPQMPTGMEKEEESILDSIT

SEQ ID NO: 9928 - protein, 926 aa, Homo sapiens
MEDGKPVWAPHPTDGFQMGNIVDIGPDSLTIEPLNQKGKTFLALINQVFPAEEDSKKDVEDNCSLMYLNEATLLHNIKVRYSKDRIYTYVANILIAVNPYFDIPKIYSSEAIKSYQGKSLGTRPPHVFAIADKAFRDMKVLKMSQSIIVSGESGAGKTENTKFVLRYLTESYGTGQDIDDRIVEANPLLEAFGNAKTVRNNNSSRFGKFVEIHFNEKSSVVGGFVSHYLLEKSRICVQGKEERNYHIFYRLCAGASEDIREKLHLSSPDNFRYLNRGCTRYFANKETDKQILQNRKSPEYLKAGSMKDPLLDDHGDFIRMCTAMKKIGLDDEEKLDLFRVVAGVLHLGNIDFEEAGSTSGGCNLKNKSAQSLEYCAELLGLDQDDLRVSLTTRVMLTTAGGTKGTVIKVPLKVEQANNARDALAKTVYSHLFDHVVNRVNQCFPFETSSYFIGVLDIAGFEYFEHNSFEQFCINYCNEKLQQFFNERILKEEQELYQKEGLGVNEVHYVDNQDCIDLIEAKLVGILDILDEENRLPQPSDQHFTSAVHQKHKDHFRLTIPRKSKLAVHRNIRDDEGFIIRHFAGAVCYETTQFVEKNNDALHMSLESLICESRDKFIRELFESSTNNNKDTKQKAGKLSFISVGNKFKTQLNLLLDKLRSTGASFIRCIKPNLKMTSHHFEGAQILSQLQCSGMVSVLDLMQGGYPSRASFHELYNMYKKYMPDKLARLDPRLFCKALFKALGLNENDYKFGLTKVFFRPGKFAEFDQIMKSDPDHLAELVKRVNHWLTCSRWKKVQWCSLSVIKLKNKIKYRAEACIKMQKTIRMWLCKRRHKPRIDGLVKVGTLKKRLDKFNEVVSVLKDGKPEMNKQIKNLEISIDTLMAKIKSTMMTQEQIQKEYDALVKSSEELLSALQKKKQQEEEAERL

SEQ ID NO: 9929 - protein, 336 aa, Homo sapiens
GVNKIISSLSSAFHVFEDGNKENYGLPQPKNKPTGARTFGERSVSRLPSKPKEEVPHAEEFLDDSTVWGIRCNKTLAPSPKSPGDFTSAAQLASTPFHKLPVESVHILEDKENVVAKQCTQATLDSCEENMVVPSRDGKFSPIQEKSPKQALSSHMYSASLLRLSQPAAGGVLTCEAELGVEACRLTDTDAAIAEDPPDAIAGLQAEWMQMSSLGTVDAPNFIVGNPWDDKLIFKLLSGLSKPVSSYPNTFEWQCKLPAIKPKTEFQLGSKLVYVHHLLGEGAFAQVYEATQGDLNDAKNKQKFVLKNTRLDMNFTYLICRSKSLPTPGNSTLGPS

SEQ ID NO: 9930 - protein, 201 aa, Homo sapiens
MANLLKTVVTGCSCPLLSNLGSCKGLRVKKDFLRTFYTHQELWCKAPVKPGIPYKQLTVGVPKEIFQNEKRVALSPAGVQNLVKQGFNVVVESGAGEASKFSDDHYRVAGAQIQGAKEVLASDLVVKVRAPMVNPTLGVHEADLLKTSGTLISFIYPAQNPELLNKLSQRKTTVLAMDQVPRVTIAQGYDALSSMANIAGF

SEQ ID NO: 9931 - protein, 44 aa, Homo sapiens
MAGLNSLEAVKRKIQALQQQADEAEDRAQGLQRELDGERERREK

SEQ ID NO: 9932 - protein, 5379 aa, Homo sapiens
MWPSYQDEHEFNAHLVCRMCCMDERDRVQKKTFTKWVNKHLMKVRKHINDLYEDLRDGHNLISLLEVLSGIKLPREKGRMRFHRLQNVQIALDFLKQRQVKLVNIRNDDITDGNPKLTLGLIWTIILHFQISDIYISGESGDMSAKEKLLLWTQKVTAGYTGIKCTNFSSCWSDGKMFNALIHRYRPDLVDMERVQIQSNRENLEQAFEVAERLGVTRLLDAEDVDVPSPDEKSVITYVSSIYDAFPKVPEGGEGISATEVDSRWQEYQSRVDSLIPWIKQHTILMSDKTFPQNPVELKALYNQYIHFKETEILAKEREKGRIEELYKLLEVWIEFGRIKLPQGYHPNDVEEEWGKLIIEMLEREKSLRPAVERLELLLQIANKIQNGALNCEEKLTLAKNTLQADAAHLESGQPVQCESDVIMYIQECEGLIRQLQVDLQILRDENYYQLEELAFRVMRLQDELVTLRLECTNLYRKGHFTSLELVPPSTLTTTHLKAEPLTKATHSSSTSWFRKPMTRAELVAISSSEDEGNLRFVYELLSWVEEMQMKLERAEWGNDLPSVELQLETQQHIHTSVEELGSSVKEARLYEGKMSQNFHTSYAETLGKLETQYCKLKETSSFRMRHLQSLHKFVSRATAELIWLNEKEEEELAYDWSDNNSNISAKRNYFSELTMELEEKQDVFRSLQDTAELLSLENHPAKQTVEAYSAAVQSQLQWMKQLCLCVEQHVKENTAYFQFFSDARELESFLRNLQDSIKRKYSCDHNTSLSRLEDLLQDSMDEKEQLIQSKSSVASLVGRSKTIVQLKPRSPDHVLKNTISVKAVCDYRQIEITICKNDECVLEDNSQRTKWKVISPTGNEAMVPSVCFLIPPPNKDAIEMASRVEQSYQKVMALWHQLHVNTKSLISWNYLRKDLDLVQTWNLEKLRSSAPGECHQIMKNLQAHYEDFLQDSRDSVLFSVADRLRLEEEVEACKARFQHLMKSMENEDKEETVAKMYISELKNIRLRLEEYEQRVVKRIQSLASSRTDRDAWQDNALRIAEQEHTQEDLQQLRSDLDAVSMKCDSFLHQSPSSSSVPTLRSELNLLVEKMDHVYGLSTVYLNKLKTVDVIVRSIQDAELLVKGYEIKLSQEEVVLADLSALEAHWSTLRHWLSDVKDKNSVFSVLDEEIAKAKVVAEQMSRLTPERNLDLERYQEKGSQLQERWHRVIAQLEIRQSELESIQEVLGDYRACHGTLIKWIEETTAQQEMMKPGQAEDSRVLSEQLSQQTALFAEIERNQTKLDQCQKFSQQYSTIVKDYELQLMTYKAFVESQQKSPGKRRRMLSSSDAITQEFMDLRTRYTALVTLTTQHVKYISDALRRLEEEEKVVEEEKQEHVEKVKELLGWVSTLARNTQGKATSSETKESTDIEKAILEQQVLSEELTTKKEQVSEAIKTSQIFLAKHGHKLSEKEKKQISEQLNALNKAYHDLCDGSANQLQQLQSQLAHQTEQKTLQKQQNTCHQQLEDLCSWVGQAERALAGHQGRTTQQDLSALQKNQSDLKDLQDDIQNRATSFATVVKDIEGFMEENQTKLSPRELTALREKLHQAKEQYEALQEETRVAQKELEEAVTSALQQETEKSKAAKELAENKKKIDALLDWVTSVGSSGGQLLTNLPGMEQLSGASLEKGALDTTDGYMGVNQAPEKLDKQCEMMKARHQELLSQQQNFILATQSAQAFLDQHGHNLTPEEQQMLQQKLGELKEQYSTSLAQSEAELKQVQTLQDELQKFLQDHKEFESWLERSEKELENMHKGGSSPETLPSLLKRQGSFSEDVISHKGDLRFVTISGQKVLDMENSFKEGKEPSEIGNLVKDKLKDATERYTALHSKCTRLGSHLNMLLGQYHQFQNSADSLQAWMQACEANVEKLLSDTVASDPGVLQEQLATTKQLQEELAEHQVPVEKLQKVARDIMEIEGEPAPDHRHVQETTDSILSHFQSLSYSLAERSSLLQKAIAQSQSVQESLESLLQSIGEVEQNLEGKQVSSLSSGVIQEALATNMKLKQDIARQKSSLEATREMVTRFMETADSTTAAVLQGKLAEVSQRFEQLCLQQQEKESSLKKLLPQAEMFEHLSGKLQQFMENKSRMLASGNQPDQDITHFFQQIQELNLEMEDQQENLDTLEHLVTELSSCGFALDLCQHQDRVQNLRKDFTELQKTVKEREKDASSCQEQLDEFRKLVRTFQKWLKETEGSIPPTETSMSAKELEKQIEHLKSLLDDWASKGTLVEEINCKGTSLENLIMEITAPDSQGKTGSILPSVGSSVGSVNGYHTCKDLTEIQCDMSDVNLKYEKLGGVLHERQESLQAILNRMEEVHKEANSVLQWLESKEEVLKSMDAMSSPTKTETVKAQAESNKAFLAELEQNSPKIQKVKEALAGLLVTYPNSQEAENWKKIQEELNSRWERATEVTVARQRQLEESASHLACFQAAESQLRPWLMEKELMMGVLGPLSIDPNMLNAQKQQVQFMLKEFEARRQQHEQLNEAAQGILTGPGDVSLSTSQVQKELQSINQKWVELTDKLNSRSSQIDQAIVKSTQYQELLQDLSEKVRAVGQRLSVQSAISTQPEAVKQQLEETSEIRSDLEQLDHEVKEAQTLCDELSVLIGEQYLKDELKKRLETVALPLQGLEDLAADRINRLQAALASTQQFQQMFDELRTWLDDKQSQQAKNCPISAKLERLQSQLQENEEFQKSLNQHSGSYEVIVAEGESLLLSVPPGEEKRTLQNQLVELKNHWEELSKKTADRQSRLKDCMQKAQKYQWHVEDLVPWIEDCKAKMSELRVTLDPVQLESSLLRSKAMLNEVEKRRSLLEILNSAADILINSSEADEDGIRDEKAGINQNMDAVTEELQAKTGSLEEMTQRLREFQESFKNIEKKVEGAKHQLEIFDALGSQACSNKNLEKLRAQQEVLQALEPQVDYLRNFTQGLVEDAPDGSDASQLLHQAEVAQQEFLEVKQRVNSGCVMMENKLEGIGQFHCRVREMFSQLADLDDELDGMGAIGRDTDSLQSQIEDVRLFLNKIHVLKLDIEASEAECRHMLEEEGTLDLLGLKRELEALNKQCGKLTERGKARQEQLELTLGRVEDFYRKLKGLNDATTAAEEAEALQWVVGTEVEIINQQLADFKMFQKEQVDPLQMKLQQVNGLGQGLIQSAGKDCDVQGLEHDMEEINARWNTLNKKVAQRIAQLQEALLHCGKFQDALEPLLSWLADTEELIANQKPPSAEYKVVKAQIQEQKLLQRLLDDRKATVDMLQAEGGRIAQSAELADREKITGQLESLESRWTELLSKAAARQKQLEDILVLAKQFHETAEPISDFLSVTEKKLANSEPVGTQTAKIQQQIIRHKALEEDIENHATDVHQAVKIGQSLSSLTSPAEQGVLSEKIDSLQARYSEIQDRCCRKAALLDQALSNARLFGEDEVEVLNWLAEVEDKLSSVFVKDFKQDVLHRQHADHLALNEEIVNRKKNVDQAIKNGQALLKQTTGEEVLLIQEKLDGIKTRYADITVTSSKALRTLEQARQLATKFQSTYEELTGWLREVEEELATSGGQSPTGEQIPQFQQRQKELKKEVMEHRLVLDTVNEVSRALLELVPWRAREGLDKLVSDANEQYKLVSDTIGQRVDEIDAAIQRSQQYEQAADAELAWVAETKRKLMALGPIRLEQDQTTAQLQVQKAFSIDIIRHKDSMDELFSHRSEIFGTCGEEQKTVLQEKTESLIQQYEAISLLNSERYARLERAQVLVNQFWETYEELSPWIEETRALIAQLPSPAIDHEQLRQQQEEMRQLRESIAEHKPHIDKLLKIGPQLKELNPEEGEMVEEKYQKAENMYAQIKEEVRQRALALDEAVSQSTQITEFHDKIEPMLETLENLSSRLRMPPLIPAEVDKIRECISDNKSATVELEKLQPSFEALKRRGEELIGRSQGADKDLAAKEIQDKLDQMVFFWEDIKARAEEREIKFLDVLELAEKFWYDMAALLTTIKDTQDIVHDLESPGIDPSIIKQQVEAAETIKEETDGLHEELEFIRILGADLIFACGETEKPEVRKSIDEMNNAWENLNKTWKERLEKLEDAMQAAVQYQDTLQAMFDWLDNTVIKLCTMPPVGTDLNTVKDQLNEMKEFKVEVYQQQIEMEKLNHQGELMLKKATDETDRDIIREPLTELKHLWENLGEKIAHRQHKLEGALLALGQFQHALEELMSWLTHTEELLDAQRPISGDPKVIEVELAKHHVLKNDVLAHQATVETVNKAGNELLESSAGDDASSLRSRLEAMNQCWESVLQKTEEREQQLQSTLQQAQGFHSEIEDFLLELTRMESQLSASKPTGGLPETAREQLDTHMELYSQLKAKEETYNQLLDKGRLMLLSRDDSGSGSKTEQSVALLEQKWHVVSSKMEERKSKLEEALNLATEFQNSLQEFINWLTLAEQSLNIASPPSLILNTVLSQIEEHKVFANEVNAHRDQIIELDQTGNQLKFLSQKQDVVLIKNLLVSVQSRWEKVVQRSIERGRSLDDARKRAKQFHEAWKKLIDWLEDAESHLDSELEISNDPDKIKLQLSKHKEFQKTLGGKQPVYDTTIRTGRALKEKTLLPEDSQKLDNFLGEVRDKWDTVCGKSVERQHKLEEALLFSGQFMDALQALVDWLYKVEPQLAEDQPVHGDLDLVMNLMDAHKVFQKELGKRTGTVQVLKRSGRELIENSRDDTTWVKGQLQELSTRWDTVCKLSVSKQSRLEQALKQAEVFRDTVHMLLEWLSEAEQTLRFRGALPDDTEALQSLIDTHKEFMKKVEEKRVDVNSAVAMGEVILAVCHPDCITTIKHWITIIRARFEEVLTWAKQHQQRLETALSELVANAELLEELLAWIQWAETTLIQRDQEPIPQNIDRVKALIAEHQTFMEEMTRKQPDVDRVTKTYKRKNIEPTHAPFIEKSRSGGRKSLSQPTPPPMPILSQSEAKNPRINQLSARWQQVWLLALERQRKLNDALDRLEELKEFANFDFDVWRKKYMRWMNHKKSRVMDFFRRIDKDQDGKITRQEFIDGILASKFPTTKLEMTAVADIFDRDGDGYIDYYEFVAALHPNKDAYRPTTDADKIEDEVTRQVAQCKCAKRFQVEQIGENKYRFGDSQQLRLVRILRSTVMVRVGGGWMALDEFLVKNDPCRARGRTNIELREKFILPEGASQGMTPFRSRGRRSKPSSRAASPTRSSSSASQSNHSCTSMPSSPATPASGTKVIPSSGSKLKRPTPTFHSSRTSLAGDTSNSSSPASTGAKTNRADPKKSASRPGSRAGSRAGSRASSRRGSDASDFDLLETQSACSDTSESSAAGGQGNSRRGLNKPSKIPTMSKKTTTASPRTPGPKR

SEQ ID NO: 9933 - protein, 57 aa, Homo sapiens
MANLLKTVVTGCSCPLLSNLGSCKGLRVKKDFLRTFYTHQELWCKAPVKPDVPDFQR

SEQ ID NO: 9934 - protein, 139 aa, Homo sapiens
MLRDLRDAFSRVKTFFQMKDQLDNLLLKESLLEDFKGYLGCQALSEMIQFYLEEVMPQAENQDPDIKAHVNSLGENLKTLRLRLRRCHRFLPCENKSKAVEQVKNAFNKLQEKGIYKAMSEFDIFINYIEAYMTMKIRN

SEQ ID NO: 9935 - protein, 56 aa, Homo sapiens
MANLLKTVVTGCSCPLLSNLGSCKGLRVKKDFLRTFYTHQELWCKAPVKPGASPYG

SEQ ID NO: 9936 - protein, 1086 aa, Homo sapiens
MVEKRCPLQRDGVYRWFSELPSPQRVEFLCGLLDLCIPLELRFLGSCLEDLARKDYHSLRDSEIKANNPADLGSLTNLTDEVVRSKLLVSLALLGSEQREAAGVLYRTLTHIDSIIHNYGLQLNEGRTGDEFLLLFTMASNHPAFSFHQKQVLRQELTQIQSSLNGGGGHGGKGAPGPGGALPTCPACHKITPRTEAPVSSVSNSLENALHTSAHSTEESLPKRPLGKHSKVSVEKIDLKGLSHTKNDRNVECSFEVLWSDSSITSVTKSSSEVTEFISKLCQLYPEENLEKLIPCLAGPDAFYVERNHVDLDSGLRYLASLPSHVLKNDHVRRFLSTSSPPQQLQSPSPGNPSLSKVGTVMGVSGRPVCGVAGIPSSQSGAQHHGQHPAGSAAPLPHCSHAGSAGSALAYRTQMDTSPAILMPSSLQTPQTQEQNGILDWLRKLRLHKYYPVFKQLSMEKFLSLTEEDLNKFESLTMGAKKKLKTQLELEKEKSERRCLNPSAPPLVTSSGVARVPPTSHVGPVQSGRGSHAAELRVEVEQPHHQLPREGSSSEYSSSSSSPMGVQAREESSDSAEENDRRVEIHLESSDKEKPVMLLNHFTSSSARPTAQVLPVQNEASSNPSGHHPLPPQMLSAASHITPIRMLNSVHKPERGSADMKLLSSSVHSLLSLEERNKGSGPRSSMKVDKSFGSAMMDVLPASAPHQPVQVLSGLSESSSMSPTVSFGPRTKVVHASTLDRVLKTAQQPALVVETSTAATGTPSTVLHAARPPIKLLLSSSVPADSAISGQTSCPNNVQISVPPAIINPRTALYTANTKVAFSAMSSMPVGPLQGGFCANSNTASPSSHPSTSFANMATLPSCPAPSSSPALSSVPESSFYSSSGGGGSTGNIPASNPNHHHHHHHQQPPAPPQPAPPPPGCIVCTSCGCSGSCGSSGLTVSYANYFQHPFSGPSVFTFPFLPFSPMCSSGYVSAQQYGGGSTFPVVHAPYSSSGTPDPVLSGQSTFAVPPMQNFMAGTAGVYQTQGLVGSSNGSSHKKSGNLSCYNCGATGHRAQDCKQPSMDFNRPGTFRLKYAPPAESLDSTD

SEQ ID NO: 9937 - protein, 664 aa, Homo sapiens
MEDGKPVWAPHPTDGFQMGNIVDIGPDSLTIEPLNQKGKTFLALINQVFPAEEDSKKDVEDNCSLMYLNEATLLHNIKVRYSKDRIYTYVANILIAVNPYFDIPKIYSSEAIKSYQGKSLGTRPPHVFAIADKAFRDMKVLKMSQSIIVSGESGAGKTENTKFVLRYLTESYGTGQDIDDRIVEANPLLEAFGNAKTVRNNNSSRFGKFVEIHFNEKSSVVGGFVSHYLLEKSRICVQGKEERNYHIFYRLCAGASEDIREKLHLSSPDNFRYLNRGCTRYFANKETDKQILQNRKSPEEDEYLKAGSMKDPLLDDHGDFIRMCTAMKKIGLDDEEKLDLFRVVAGVLHLGNIDFEEAGSTSGGCNLKNKSAQSLEYCAELLGLDQDDLRVSLTTRVMLTTAGGTKGTVIKVPLKVEQANNARDALAKTVYSHLFDHVVNRVNQCFPFETSSYFIGVLDIAGFEYFEHNSFEQFCINYCNEKLQQFFNERILKEEQELYQKEGLGVNEVHYVDNQDCIDLIEAKLVGILDILDEENRLPQPSDQHFTSAVHQKHKDHFRLTIPRKSKLAVHRNIRDDEGFIIRHFAGAVCYETTQFVEKNNDALHMSLESLICESRDKFIRELFESSTNNNKDTKQKAGKLSFISVGNKFKRFCFSWSSPARDG

SEQ ID NO: 9938 - protein, 345 aa, Homo sapiens
MQSPQKTTLILPTQQVRRSSRIKPPGPTAVPKRSSSVKNITPRKKGPNSGKKEKPLPVICSTSAASLKSLTRDRGMLYKDVASGPCKIVMSTVCVYVNKHGNFGPHLDPKRIQQLPDHFGPGPVNVVLRRIVQACVDCALETKTVFGYLKPDNRGGEVITASFDGETHSIQLPPVNSASFALRFLENFCHSLQCDNLLSSQPFSSSRGHTHSSAEHDKNQSAKEDVTERQSTKRSPQQTVPYVVPLSPKLPKTKEYASEGEPLFAGGSAIPKEENLSEDSKSSSLNSGNYLNPACRNPMYIHTSVSQDFSRSVPGTTSSPLVGDISPKSSPHEVKFQMQRKSEGN

SEQ ID NO: 9939 - protein, 1088 aa, Homo sapiens
TSVKRRLSCLRSRVTRQKEKGKSPAHLKDKGQDARERRECVNGHQLLQGTFSGPSSCPLCGKPFLSSASLKEHPRGTLLSDGSPALSRNVGMTVSQKGGPQPTPSPAGPGTQLGPITGEMDEADSAFLKFKQTADDSLSLTSPNTESIFVEDPYTASLRSEIESDGHEFEAESWSLAVDAAYAKKQKREVVKRQDVLYELMQTEVHHVRTLKIMLKVYSRALQEELQFSSKAIGRLFPCADDLLETHSHFLARLKERRQESLEEGSDRNYVIQKIGDLLVQQFSGENGERMKEKYGVFCSGHNEAVSHYKLLLQQNKKFQNLIKKIGNFSIVRRLGVQECILLVTQRITKYPVLVERIIQNTEAGTEDYEDLTQALNLIKDIISQVDAKVSECEKGQRLREIAGKMDLKSSSKLKNGLTFRKEDMLQRQLHLEGMLCWKTTSGRLKDILAILLTDVLLLLQEKDQKYVFASVDSKPPVISLQKLIVREVANEEKAMFLISASLQGPEMYEIYTSSKEDRNAWMAHIQRAVESCPDEEEGPFSLPEEERKVVEARATRLRDFQERLSMKDQLIAQSLLEKQQIYLEMAEMGGLEDLPQPRGLFRGGDPSETLQGELILKSAMSEIEGIQSLICRQLGSANGQAEDGGSSTGPPRRAETFAGYDCTNSPTKNGSFKKKVSSTDPRPRDWRGPPNSPDLKLSDSDIPGSSEESPQVVEAPGTESDPRLPTVLESELVQRIQTLSQLLLNLQAVIAHQDSYVETQRAAIQEREKQFRLQSTRGNLLLEQERQRNFEKQREERAALEKLQSQLRHEQQRWERERQWQHQELERAGARLQEREGEARQLRERLEQERAELERQRQAYQHDLERLREAQRAVERERERLELLRRLKKQNTAPGALPPDTLAEAQPPSHPPSFNGEGLEGPRVSMLPSGVGPEYAERPEVARRDSAPTENRLAKSDVPIQLLSATNQFQRQAAVQQQIPTKLAASTKGGKDKGGKSRGSQRWESSASFDLKQQLLLNKLMGKDESTSRNRRSLSPILPGRHSPAPPPDPGFPAPSPPPADSPSEGFSLKAGGTALLPGPPAPSPLP

SEQ ID NO: 9940 - protein, 512 aa, Homo sapiens
KAQVAGGQVQSPEADGLLTLERPGSGTPAQAGDDAAEATPGHPCPVLELPPAWPMGCGVDDVPAFCFVCFHREEEEELLEEVPLRREKMSVGCPEPEPPRSLTCCGPGTAPGPGAGVPLLTEDMQALTLRTLAASDVTKHYELVRELGKGTYGKVDLVVYKGTGTKMALKFVNKSKTKLKNFLREVSITNSLSSSPFIIKVFDVVFETEDCYVFAQEYAPAGDLFDIIPPQVGLPEDTVKRCVQQLGLALDFMHGRQLVHRDIKPENVLLFDRECRRVKLADFGMTRRVGCRVKRVSGTIPYTAPEVCQAGRADGLAVDTGVDVWAFGVLIFCVLTGNFPWEAASGADAFFEEFVRWQRGRLPGLPSQWRRFTEPALRMFQRLLALEPERRGPAKEVFRFLKHELTSELRRRPSHRARKPPGDRPPAAGPLRLEAPGPLKRTVLTESGSGSRPAPPAVGSVPLPVPVPVPVPVPVPVPEPGLAPQGPPGRTDGRADKSKGQVVLATAIEICV

SEQ ID NO: 9941 - protein, 878 aa, Homo sapiens
MEDGKPVWAPHPTDGFQMGNIVDIGPDSLTIEPLNQKGKTFLALINQVFPAEEDSKKDVEDNCSLMYLNEATLLHNIKVRYSKDRIYTYVANILIAVNPYFDIPKIYSSEAIKSYQGKSLGTRPPHVFAIADKAFRDMKVLKMSQSIIVSGESGAGKTENTKFVLRYLTESYGTGQDIDDRIVEANPLLEAFGNAKTVRNNNSSRFGKFVEIHFNEKSSVVGGFVSHYLLEKSRICVQGKEERNYHIFYRLCAGASEDIREKLHLSSPDNFRYLNRGCTRYFANKETDKQILQNRKSPEYLKAGSMKDPLLDDHGDFIRMCTAMKKIGLDDEEKLDLFRVVAGVLHLGNIDFEEAGSTSGGCNLKNKSAQSLEYCAELLGLDQDDLRVSLTTRVMLTTAGGTKGTVIKVPLKVEQANNARDALAKTVYSHLFDHVVNRVNQCFPFETSSYFIGVLDIAGFEYFEHNSFEQFCINYCNEKLQQFFNERILKEEQELYQKEGLGVNEVHYVDNQDCIDLIEAKLVGILDILDEENRLPQPSDQHFTSAVHQKHKDHFRLTIPRKSKLAVHRNIRDDEGFIIRHFAGAVCYETTQFVEKNNDALHMSLESLICESRDKFIRELFESSTNNNKDTKQKAGKLSFISVGNKFKTQLNLLLDKLRSTGASFIRCIKPNLKMTSHHFEGAQILSQLQCSGMVSVLDLMQGGYPSRASFHELYNMYKKYMPDKLARLDPRLFCKALFKALGLNENDYKFGLTKVFFRPGKFAEFDQIMKSDPDHLAELVKRVNHWLTCSRWKKVQWCSLSVIKLKNKIKYRAEACIKMQKTIRMWLCKRRHKPRIDGLVKVGTLKKRLDKFNEVVSVLKDGKPEMNKQIKNLEISI

SEQ ID NO: 9942 - protein, 888 aa, Homo sapiens
MGLPEPGPLRLLALLLLLLLLLLLQLQHLAAAAADPLLGGQGPAKDCEKDQFQCRNERCIPSVWRCDEDDDCLDHSDEDDCPKKTCADSDFTCDNGHCIHERWKCDGEEECPDGSDESEATCTKQVCPAEKLSCGPTSHKCVPASWRCDGEKDCEGGADEAGCATLCAPHEFQCGNRSCLAAVFVCDGDDDCGDGSDERGCADPACGPREFRCGGDGGGACIPERWVCDRQFDCEDRSDEAAELCGRPGPGATSAPAACATASQFACRSGECVHLGWRCDGDRDCKDKSDEADCPLGTCRGDEFQCGDGTCVLAIKHCNQEQDCPDGSDEAGCLQGLNECLHNNGGCSHICTDLKIGFECTCPAGFQLLDQKTCGDIDECKDPDACSQICVNYKGYFKCECYPGYEMDLLTKNCKAAAGKSPSLIFTNRHEVRRIDLVKRNYSRLIPMLKNVVALDVEVATNRIYWCDLSYRKIYSAYMDKASDPKEQEVLIDEQLHSPEGLAVDWVHKHIYWTDSGNKTISVATVDGGRRRTLFSRNLSEPRAIAVDPLRGFMYWSDWGDQAKIEKSGLNGVDRQTLVSDNIEWPNGITLDLLSQRLYWVDSKLHQLSSIDFSGGNRKTLISSTDFLSHPFGIAVFEDKVFWTDLENEAIFSANRLNGLEISILAENLNNPHDIVIFHELKQPRAPDACELSVQPNGGCEYLCLPAPQISSHSPKYTCACPDTMWLGPDMKRCYRAPQSTSTTTLASTMTRTVPATTRAPGTTVHRSTYQNHSTETPSLTAAVPSSVSVPRAPSISPSTLSPATSNHSQHYANEDSKMGSTVTAAVIGIIVPIETRRSCTLAQAGVQWCDHSSLHPRTPGLKGFSCLSIPSSWDYRHAPPHLANFLN

SEQ ID NO: 9943 - protein, 434 aa, Homo sapiens
MLEAHMQSYKGNDPLGEWERYIQWVEENFPENKEYLITLLEHLMKEFLDKKKYHNDPRFISYCLKFAEYNSDLHQFFEFLYNHGIGTLSSPLYIAWAGHLEAQGELQHASAVLQRGIQNQAEPREFLQQQYRLFQTRLTETHLPAQARTSEPLHNVQVLNQMITSKSNPGNNMACISKNQGSELSGVISSACDKESNMERRVITISKSEYSVHSSLASKVDVEQVVMYCKEKLIRGESEFSFEELRAQKYNQRRKHEQWVNEDRHYMKRKEANAFEEQLLKQKMDELHKKLHQVVETSHEDLPASQERSEVNPARMGPSVGSQQELRAPCLPVTYQQTPVNMEKNPREAPPVVPPLANAISAALVSPATSQSIAPPVPLKAQTVTDSMFAVASKDAGCVNKSTHEFKPQSGAEIKEGCETHKVANTSSFHTTPN

SEQ ID NO: 9944 - protein, 634 aa, Homo sapiens
MEDGKPVWAPHPTDGFQMGNIVDIGPDSLTIEPLNQKGKTFLALINQVFPAEEDSKKDVEDNCSLMYLNEATLLHNIKVRYSKDRIYTYVANILIAVNPYFDIPKIYSSEAIKSYQGKSLGTRPPHVFAIADKAFRDMKVLKMSQSIIVSGESGAGKTENTKFVLRYLTESYGTGQDIDDRIVEANPLLEAFGNAKTVRNNNSSRFGKFVEIHFNEKSSVVGGFVSHYLLEKSRICVQGKEERNYHIFYRLCAGASEDIREKLHLSSPDNFRYLKAGSMKDPLLDDHGDFIRMCTAMKKIGLDDEEKLDLFRVVAGVLHLGNIDFEEAGSTSGGCNLKNKSAQSLEYCAELLGLDQDDLRVSLTTRVMLTTAGGTKGTVIKVPLKVEQANNARDALAKTVYSHLFDHVVNRVNQCFPFETSSYFIGVLDIAGFEYFEHNSFEQFCINYCNEKLQQFFNERILKEEQELYQKEGLGVNEVHYVDNQDCIDLIEAKLVGILDILDEENRLPQPSDQHFTSAVHQKHKDHFRLTIPRKSKLAVHRNIRDDEGFIIRHFAGAVCYETTQFVEKNNDALHMSLESLICESRDKFIRELFESSTNNNKDTKQKAGKLSFISVGNKFKRFCFSWSSPARDG

SEQ ID NO: 9945 - protein, 690 aa, Homo sapiens
MEDGKPVWAPHPTDGFQMGNIVDIGPDSLTIEPLNQKGKTFLALINQVFPAEEDSKKDVEDNCSLMYLNEATLLHNIKVRYSKDRIYTYVANILIAVNPYFDIPKIYSSEAIKSYQGKSLGTRPPHVFAIADKAFRDMKVLKMSQSIIVSGESGAGKTENTKFVLRYLTESYGTGQDIDDRIVEANPLLEAFGNAKTVRNNNSSRFGKFVEIHFNEKSSVVGGFVSHYLLEKSRICVQGKEERNYHIFYRLCAGASEDIREKLHLSSPDNFRYLNRGCTRYFANKETDKQILQNRKSPEYLKAGSMKDPLLDDHGDFIRMCTAMKKIGLDDEEKLDLFRVVAGVLHLGNIDFEEAGSTSGGCNLKNKSAQSLEYCAELLGLDQDDLRVSLTTRVMLTTAGGTKGTVIKVPLKVEQANNARDALAKTVYSHLFDHVVNRVNQCFPFETSSYFIGVLDIAGFEYFEHNSFEQFCINYCNEKLQQFFNERILKEEQELYQKEGLGVNEVHYVDNQDCIDLIEAKLVGILDILDEENRLPQPSDQHFTSAVHQKHKDHFRLTIPRKSKLAVHRNIRDDEGFIIRHFAGAVCYETTQFVEKNNDALHMSLESLICESRDKFIRELFESSTNNNKDTKQKAGKLSFISVGNKFKTQLNLLLDKLRSTAGVQWCNHNSLQPPPLWLKWSSHLSLPTS

SEQ ID NO: 9946 - protein, 56 aa, Homo sapiens
MAGLNSLEAVKRKIQALQQQADEAEDRAQGLQRELDGERERREKRNEGDRKPGHEG

SEQ ID NO: 9947 - protein, 924 aa, Homo sapiens
MEDGKPVWAPHPTDGFQMGNIVDIGPDSLTIEPLNQKGKTFLALINQVFPAEEDSKKDVEDNCSLMYLNEATLLHNIKVRYSKDRIYTYVANILIAVNPYFDIPKIYSSEAIKSYQGKSLGTRPPHVFAIADKAFRDMKVLKMSQSIIVSGESGAGKTENTKFVLRYLTESYGTGQDIDDRIVEANPLLEAFGNAKTVRNNNSSRFGKFVEIHFNEKSSVVGGFVSHYLLEKSRICVQGKEERNYHIFYRLCAGASEDIREKLHLSSPDNFRYLNRGCTRYFANKETDKQILQNRKSPEYLKAGSMKDPLLDDHGDFIRMCTAMKKIGLDDEEKLDLFRVVAGVLHLGNIDFEEAGSTSGGCNLKNKSAQSLEYCAELLGLDQDDLRVSLTTRVMLTTAGGTKGTVIKVPLKVEQANNARDALAKTVYSHLFDHVVNRVNQCFPFETSSYFIGVLDIAGFEYFEHNSFEQFCINYCNEKLQQFFNERILKEEQELYQKEGLGVNEVHYVDNQDCIDLIEAKLVGILDILDEENRLPQPSDQHFTSAVHQKHKDHFRLTIPRKSKLAVHRNIRDDEGFIIRHFAGAVCYETTQFVEKNNDALHMSLESLICESRDKFIRELFESSTNNNKDTKQKAGKLSFISVGNKFKTQLNLLLDKLRSTGASFIRCIKPNLKMTSHHFEGAQILSQLQCSGMVSVLDLMQGGYPSRASFHELYNMYKKYMPDKLARLDPRLFCKALFKALGLNENDYKFGLTKVFFRPGKFAEFDQIMKSDPDHLAELVKRVNHWLTCSRWKKVQWCSLSVIKLKNKIKYRAEACIKMQKTIRMWLCKRRHKPRIDGLVKVGTLKKRLDKFNEVVSVLKDGKPEMNKQIKNLEISIDTLMAKIKSTMMTQEQIQKEYDALVKSSEELLSALQKKKQQEEEAE

SEQ ID NO: 9948 - protein, 233 aa, Homo sapiens
LTKNCKAAAGKSPSLIFTNRHEVRRIDLVKRNYSRLIPMLKNVVALDVEVATNRIYWCDLSYRKIYSAYMDKASDPKEQEVLIDEQLHSPEGLAVDWVHKHIYWTDSGNKTISVATVDGGRRRTLFSRNLSEPRAIAVDPLRGFMYWSDWGDQAKIEKSGLNGVDRQTLVSDNIEWPNGITLDLLSQRLYWVDSKLHQLSSIDFSGGNRKTLISSTDFLSHPFGIAVFEHPAL

SEQ ID NO: 9949 - protein, 212 aa, Homo sapiens
MANLLKTVVTGCSCPLLSNLGSCKGLRVKKDFLRTFYTHQELWCKAPVKPGIPYKQLTVGVPKEIFQNEKRVALSPAGVQNLVKQGFNVVVESGAGEASKFSDDHYRVAGAQIQGAKEVLASDLVVKVRAPMVNPTLGVHEADLLKTSGTLISFIYPAQNPELLNKLSQRKTTVLAMDQVPRVTIAQGYDALSSMANIAGSQLLEKFLQLRF

SEQ ID NO: 9950 - protein, 2146 aa, Homo sapiens
MNAYKYQKFLEGLNNLRDERDRVQKKTFTKWVNKHLMKVRKHINDLYEDLRDGHNLISLLEVLSGIKLPREKGRMRFHRLQNVQIALDFLKQRQVKLVNIRNDDITDGNPKLTLGLIWTIILHFQISDIYISGESGDMSAKEKLLLWTQKVTAGYTGIKCTNFSSCWSDGKMFNALIHRYRPDLVDMERVQIQSNRENLEQAFEVAERLGVTRLLDAEDVDVPSPDEKSVITYVSSIYDAFPKVPEGGEGISATEVDSRWQEYQSRVDSLIPWIKQHTILMSDKTFPQNPVELKALYNQYIHFKETEILAKEREKGRIEELYKLLEVWIEFGRIKLPQGYHPNDVEEEWGKLIIEMLEREKSLRPAVERLELLLQIANKIQNGALNCEEKLTLAKNTLQADAAHLESGQPVQCESDVIMYIQECEGLIRQLQVDLQILRDENYYQLEELAFRVMRLQDELVTLRLECTNLYRKGHFTSLELVPPSTLTTTHLKAEPLTKATHSSSTSWFRKPMTRAELVAISSSEDEGNLRFVYELLSWVEEMQMKLERAEWGNDLPSVELQLETQQHIHTSVEELGSSVKEARLYEGKMSQNFHTSYAETLGKLETQYCKLKETSSFRMRHLQSLHKFVSRATAELIWLNEKEEEELAYDWSDNNSNISAKRNYFSELTMELEEKQDVFRSLQDTAELLSLENHPAKQTVEAYSAAVQSQLQWMKQLCLCVEQHVKENTAYFQFFSDARELESFLRNLQDSIKRKYSCDHNTSLSRLEDLLQDSMDEKEQLIQSKSSVASLVGRSKTIVQLKPRSPDHVLKNTISVKAVCDYRQIEITICKNDECVLEDNSQRTKWKVISPTGNEAMVPSVCFLIPPPNKDAIEMASRVEQSYQKVMALWHQLHVNTKSLISWNYLRKDLDLVQTWNLEKLRSSAPGECHQIMKNLQAHYEDFLQDSRDSVLFSVADRLRLEEEVEACKARFQHLMKSMENEDKEETVAKMYISELKNIRLRLEEYEQRVVKRIQSLASSRTDRDAWQDNALRIAEQEHTQEDLQQLRSDLDAVSMKCDSFLHQSPSSSSVPTLRSELNLLVEKMDHVYGLSTVYLNKLKTVDVIVRSIQDAELLVKGYEIKLSQEEVVLADLSALEAHWSTLRHWLSDVKDKNSVFSVLDEEIAKAKVVAEQMSRLTPERNLDLERYQEKGSQLQERWHRVIAQLEIRQSELESIQEVLGDYRACHGTLIKWIEETTAQQEMMKPGQAEDSRVLSEQLSQQTALFAEIERNQTKLDQCQKFSQQYSTIVKDYELQLMTYKAFVESQQKSPGKRRRMLSSSDAITQEFMDLRTRYTALVTLTTQHVKYISDALRRLEEEEKVVEEEKQEHVEKVKELLGWVSTLARNTQGKATSSETKESTDIEKAILEQQVLSEELTTKKEQVSEAIKTSQIFLAKHGHKLSEKEKKQISEQLNALNKAYHDLCDGSANQLQQLQSQLAHQTEQKECRAVAGVIDLGTVEIFPIFKAMQKGLLDQDTGLVLLESQVIMSGLIAPETGENLSLEEGIARNLINPQMYQQLRELQDALALISRLTESRGPLSVVEAIEKRIISETVGLKILEAHLATGGFSLSPSENCINLEEAFHQGLISAWLHSVLESYLRTSKNLIDPNTAEKIGLLDLMQRCIVHQESGFKLLPVKQLAGGMVSLKSGRKVSIFRAVQEGLIDRQVTVRLLEAQLFAGGIVDPRTGHRLTVEEAVRHNLIDQDMACAILIRQLQTGGIIDTVTGQRLTIDEAVSNDLVAAKIALVILESLWSFMGLLWPESGEILPITDALEQGIVSTELAHKILSNRQHIKALFLPATTEILSWKKAIESGILDRDLANNLKSICIPDVMPHMQLADSAEQNINPGAAVLPCSKSHPKATASQSENLLFQLMTHSYINVQNGQRLLLLDKELMETLTSRDEYQTSPPKVVEIGHQRQKTPEGLQESANVKISGTFSSGWTVRLPEFQFSSQNKEYPDREDCTTEKGKKTTVETEDSSVENPEQDLFVEQKERNPNIDALKVINKVKLEVQRQLIGTQREDQTAVSVRENASRGHLLTIPPAEAEGVPLVVDKDVFSVETPKKEHQPLRNTSFTCQNEQAHTLETEYIHDETGGSHIKPQSK

SEQ ID NO: 9951 - protein, 270 aa, Homo sapiens
QQVMTAAQKDVQIIVFPEDGIHGFNFTRTSIYPFLDFMPSPQVVRWNPCLEPHRFNDTEVLQRLSCMAIRGDMFLVANLGTKEPCHSSDPRCPKDGRYQFNTNVVFSNNGTLVDRYRKHNLYFEAAFDVPLKVDLITFDTPFAGRFGIFTCFDILFFDPAIRVLRDYKVKHVVYPTAWMNQLPLLAAIEIQKAFAVAFGINVLAANVHHPVLGMTGSGIHTPLESFWYHDMENPKSHLIIAQVAKNPVGLIGAENATGETDPSHSKLRGS

SEQ ID NO: 9952 - protein, 106 aa, Homo sapiens
KIRELENSLHEAKESAMHKESKIIKMQKELEVTNDIIAKLQAKVHESNKCLEKTKETIQVLQDKVALGAKPYKEEIEDLKMKLVKIDLEKMKNAKEFEKEYVFVLI

SEQ ID NO: 9953 - protein, 371 aa, Homo sapiens
MFVSDFRKEFYEVVQSQRVLLFVASDVDALCACKILQALFQCDHVQYTLVPVSGWQELETAFLEHKEQIKLLIKQDDDLEVPAYEDIFRDEEEDEEHSGNDSDGSEPSEKRTRLEEEIVEQTMRRRQRREWEARRRDILFDYEQYEYHGTSSAMVMFELAWMLSKDLNDMLWWAIVGLTDQWVQDKITQMKYVTDVGVLQRHVSRHNHRNEDEENTLSVDCTRISFEYDLRLVLYQHWSLHDSLCNTSYTAARFKLWSVHGQKRLQEFLADMGLPLKQVKQKFQAMDISLKENLREMIEESANKFGMKDMRVQTFSIHFGFKHKFLASDVVFATMSLMESPEKDGSGTDHFIQALDSLSRQRTGAANCCPW

SEQ ID NO: 9954 - protein, 152 aa, Homo sapiens
TAFTCVFRCFPCDPSCGSASWAAPEFTPHSAAPMVKMTRSKTFQAYLPSCHRTYSCIHCRAHLANHDELISKSFQGSQGRAYLFNSVVNVGCGPAEERVLLTGLHAVADIYCENCKTTLGWKYEHAFESSQKYKEGKYIIELAHMIKDNGWD

SEQ ID NO: 9955 - protein, 74 aa, Homo sapiens
TAAQKDVQIIVFPEDGIHGFNFTRTSIYPFLDFMPSPQVVRWNPCLEPHRFNDTELLFLRPKFTFCTASAPPDL

SEQ ID NO: 9956 - protein, 648 aa, Homo sapiens
MSWLFGVNKGPKGEGAGPPPPLPPAQPGAEGGGDRGLGDRPAPKDKWSNFDPTGLERAAKAARELEHSRYAKEALNLAQMQEQTLQLEQQSKLKEYEAAVEQLKSEQIRAQAEERRKTLSEETRQHQARAQYQDKLARQRYEDQLKQQQLLNEENLRKQEESVQKQEAMRRATVEREMELRHKNEMLRVETEARARAKAERENADIIREQIRLKASEHRQTVLESIRTAGTLFGEGFRAFVTDRDKVTATVAGLTLLAVGVYSAKNATAVTGRFIEARLGKPSLVRETSRITVLEALRHPIQVSRRLLSRPQDVLEGVVLSPSLEARVRDIAIATRNTKKNRGLYRHILLYGPPGTGKTLFAKKLALHSGMDYAIMTGGDVAPMGREGVTAMHKLFDWANTSRRGLLLFMDEADAFLRKRATEEISKDLRATLNAFLYHMGQHSNKFMLVLASNLPEQFDCAINSRIDVMVHFDLPQQEERERLVRLHFDNCVLKPATEGKRRLKLAQFDYGRKCSEVARLTEGMSGREIAQLAVSWQATAYASKDGVLTEAMMDACVQDAVQQYRQKMRWLKAEGPGRGVEHPLSGVQGETLTSWSLATDPSYPCLAGPCTFRICSWMGTGLCPGPLSPRMSCGGGRPFCPPGHPLL

SEQ ID NO: 9957 - protein, 542 aa, Homo sapiens
ALFKQKHQSMVKKTGDWKKHVETNSRLMKKFEESRAELEKVLRIAQEGLEEKGDPEELLRRHTEFFSQLDQRVLNAFLKACDELTDILPEQEQQGLQEAVRKLHKQWKDLQGEAPYHLLHLKIDVEKNRFLASVEECRTELDRETKLMPQEGSEKIIKEHRVFFSDKGPHHLCEKRLQLIEELCVKLPVRDPVRDTPGTCHVTLKELRAAIDSTYRKLMEDPDKWKDYTSRFSEFSSWISTNETQLKGIKGEAIDTANHGEVKRAVEEIRNGVTKRGETLSWLKSRLKVLTEVSSENEAQKQGDELAKLSSSFKALVTLLSEVEKMLSNFGDCVQYKEIVKNSLEELISGSKEVQEQAEKILDTENLFEAQQLLLHHQQKTKRISAKKRDVQQQIAQAQQGEGGLPDRGHEELRKLESTLDGLERSRERQERRIQVTLRKWERFETNKETVVRYLFQTGSSHERFLSFSSLESLSSELEQTKEFSKRTESIAVQAENLVKEASEIPLGPQNKQLLQQQAKSIKEQVKKLEDTLEEEYVIDKS

SEQ ID NO: 9958 - protein, 444 aa, Homo sapiens
MADSVLNHSWPAFSKLWLKRWAFKRGSEPKSCVQPFDSGAVASATKSSSGSWKPENPDFFSAMGDDQEDDFPRRLSESMEDLSLDLGALQGSEYLQDLGLGAPSHSQPGETPDSRPTGEEPGRDSLFSSLAGSQDLSRRRSWERSRSCSESWRRLSLDASAVDEEPCLPRTLASLALNLPGGGLKTWTQGCLSGGGTPAESPGKECDSPKKRGRSRSVPVSFYEIRSPEISPGLEVPTPPVQGLEPPVLECMEKDHVEPDHVLIVQQVLQELRQYHGARQRACMSASPGGAHSNLTWFEFLSESEDGAGKNEKSDKSTSVKRRLSCLRSRVTRQKEKGKSPAHLKDKGQDARERRECVNGHQLLQGTFSGPSSCPLCGKPFLSSGKSGGPIHPPGGQPLSLLHVLSIILLGSLLMCASSFCFALSSAAPWREPGISPWAQGPLG

SEQ ID NO: 9959 - protein, 162 aa, Homo sapiens
MAPSVPAAEPEYPKGIRAVLLGPPGAGKGTQAPRLAENFCVCHLATGDMLRAMVASGSELGKKLKATMDAGKLVSDEMVVELIEKNLETPLCKNGFLLDGFPRTVRQAEMLDDLMEKRKEKLDSVIEFSIPDSLLIRRITGRSMTEAFNCKWTLHSLLYCGL

SEQ ID NO: 9960 - protein, 1424 aa, Homo sapiens
MIKTIYKTPGMIKDEQEIVQKRTFTKWINSHLAKRKPPMVVDDLFEDMKDGVKLLALLEVLSGQKLPCEQGRRMKRIHAVANIGTALKFLEGRKSMHRGSPIKLVNINSTDIADGRPSIVLGLMWTIILYFQIEELTSNLPQLQSLSSSASSVDSIVSSETPSPPSKRKVTTKIQGNAKKALLKWVQYTAGKQTGIEVKDFGKSWRSGVAFHSVIHAIRPELVDLETVKGRSNRENLEDAFTIAETELGIPRLLDPEDVDVDKPDEKSIMTYVAQFLKHYPDIHNASTDGQEDDREDRVIFKEMKVWIEQFERDLTRAQMVESNLQDKYQSFKHFRVQYEMKRKQIEHLIQPLHRDGKLSLDQALVKQSWDRVTSRLFDWHIQLDKSLPAPLGTIGAWLYRAEVALREEITVQQVHEETANTIQRKLEQHKDLLQNTDAHKRAFHEIYRTRSVNGIPVPPDQLEDMAERFHFVSSTSELHLMKMEFLELKYRLLSLLVLAESKLKSWIIKYGRRESVEQLLQNYVSFIENSKFFEQYEVTYQILKQTAEMYVKADGSVEEAENVMKFMNETTAQWRNLSVEVRSVRSMLEEVISNWDRYGNTVASLQAWLEDAEKMLNQSENAKKDFFRNLPHWIQQHTAMNDAGNFLIETCDEMVSRDLKQQLLLLNGRWRELFMEVKQYAQADEMDRMKKEYTDCVVTLSAFATEAHKKLSEPLEVSFMNVKLLIQDLEDIEQRVPVMDAQYKIITKTAHLITKESPQEEGKEMFATMSKLKEQLTKVKECYSPLLYESQQLLIPLEELEKQMTSFYDSLGKINEIITVLEREAQSSALFKQKHQELLACQENCKKTLTLIEKGSQSVQKFVTLSNVLKHFDQTRLQRQIADIHVAFQSMVKKTGDWKKHVETNSRLMKKFEESRAELEKVLRIAQEGLEEKGDPEELLRRHTEFFSQLDQRVLNAFLKACDELTDILPEQEQQGLQEAVRKLHKQWKDLQGEAPYHLLHLKIDVEKNRFLASVEECRTELDRETKLMPQEGSEKIIKEHRVFFSDKGPHHLCEKRLQLIEELCVKLPVRDPVRDTPGTCHVTLKELRAAIDSTYRKLMEDPDKWKDYTSRFSEFSSWISTNETQLKGIKGEAIDTANHGEVKRAVEEIRNGVTKRGETLSWLKSRLKVLTEVSSENEAQKQGDELAKLSSSFKALVTLLSEVEKMLSNFGDCVQYKEIVKNSLEELISGSKEVQEQAEKILDTENLFEAQQLLLHHQQKTKRISAKKRDVQQQIAQAQQGEGGLPDRGHEELRKLESTLDGLERSRERQERRIQVTLRKWERFETNKETVVRYLFQTGSSHERFLSFSSLESLSSELEQTKEFSKRTESIAVQAENLVKEASEIPLGPQNKQLLQQQAKSIKEQVKKLEDTLEEEYVIDKS

SEQ ID NO: 9961 - protein, 608 aa, Homo sapiens
MDSFDLALLQEWDLESLCVYEPDRNALRRKERERRNQETQQDDGTFNSSYSLFSEPYKTNKGDELSNRIQNTLGNYDEMKDFLTDRSNQSHLVGVPKPGVPQTPVNKIDEHFVADSRAQNQPSSICSTTTSTPAAVPVQQSKRGTMGWQKAGHPPSDGQQRATQQGSLRTLLGDGVGRQQPRAKQVCNVEVGLQTQERPPAMAAKHSSSGHCVQNFPPSLASKPSLVQQKPTAYVRPMDGQDQAPDESPKLKSSSETSVHCTSYRGVPASKPEPARAKAKLSKFSIPKQGEESRSGETNSCVEEIIREMTWLPPLSAIQAPGKVEPTKFPFPNKDSQLVSSGHNNPKKGDAEPESPDNGTSNTSMLEDDLKLSSDEEENEQQAAQRTALRALSDSAVVQQPNCRTSVPSSKGSSSSSSSGSSSSSSDSESSSGSDSETESSSSESEGSKPPHFSSPEAEPASSNKWQLDKWLNKVNPHKPPILIQNESHGSESNQYYNPVKEDVQDCGKVPDVCQPSLREKEIKSTCKEEQRPRTANKAPGSKGVKQKSPPAAVAVAVSAAAPPPAVPCAPAENAPAPARRSAGKKPTRRTERTSAGDGANCHRPEEP

SEQ ID NO: 9962 - protein, 841 aa, Homo sapiens
MFTTGSPPFGTMGACYHCSPRYGQSISVPRIWKCRHRRSVTPEEGISSEGFPWDGFNEQTPKDLPNRDGGAWVLGYRAGPACPFLLHEEREKSNRSELYLDLHPDHSLTEQDDRTPGRLQAVWPPPKTKDTEEKVGLKYTEAEYQAAILHLKREHKEEIENLQAQFELRAFHIRGEHAMITARLEETIENLKHELEHRWRGGCEERKDVCISTDDDCPPKTFRNVCVQTDRETFLKPCESESKTTRSNQLVPKKLNISSLSQLSPPNDHKDIHAALQPMEGMASNQQKALPPPPASIPPPPPLPSGLGSLSPAPPMPPVSAGPPLPPPPPPPPPLPPPSSAGPPPPPPPPPLPNSPAPPNPGGPPPAPPPPGLAPPPPPGLFFGLGSSSSQCPRKPAIEPSCPMKPLYWTRIQISDRSQNATPTLWDSLEEPDIRDPSEFEYLFSKDTTQQKKKPLSETYEKKNKVKKIIKLLDGKRSQTVGILISSLHLEMKDIQQAIFNVDDSVVDLETLAALYENRAQEDELVKIRKYYETSKEEELKLLDKPEQFLHELAQIPNFAERAQCIIFRSVFSEGITSLHRKVEIITRASKDLLHVKSVKDILALILAFGNYMNGGNRTRGQADGYSLEILPKLKDVKSRDNGINLVDYVVKYYLRYYDQEAGTEKSVFPLPEPQDFFLASQVKFEDLIKDLRKLKRQLEASEKQMVVVCKESPKEYLQPFKDKLEEFFQKAKKEHKMEESHLENAQKSFETTVRYFGMKPKSGEKEITPSYVFMVWYEFCSDFKTIWKRESKNISKERLKMAQESVSKLTSEKKVETKKINPTASLKERLRQKEASVTTN

SEQ ID NO: 9963 - protein, 431 aa, Homo sapiens
MSTLCPPPSPAVAKTEIALSGKSPLLAATFAYWDNILGPRVRHIWAPKTEQVLLSDGEITFLANHTLNGEILRNAESGAIDVKFFVLSEKGVIIVSLIFDGNWNGDRSTYGLSIILPQTELSFYLPLHRVCVDRLTHIIRKGRIWMHKERQENVQKIILEGTERMEDQGQSIIPMLTGEVIPVMELLSSMKSHSVPEEIDIADTVLNDDDIGDSCHEGFLLNAISSHLQTCGCSVVVGSSAEKVNKIVRTLCLFLTPAERKCSRLCEAESSFKYESGLFVQGLLKDSTGSFVLPFRQVMYAPYPTTHIDVDVNTVKQMPPCHEHIYNQRRYMRSELTAFWRATSEEDMAQDTIIYTDESFTPDLNIFQDVLHRDTLVKAFLDQVFQLKPGLSLRSTFLAQFLLVLHRKALTLIKYIEDDTREKSPLNLFGT

SEQ ID NO: 9964 - protein, 1285 aa, Homo sapiens
MEDGKPVWAPHPTDGFQMGNIVDIGPDSLTIEPLNQKGKTFLALINQVFPAEEDSKKDVEDNCSLMYLNEATLLHNIKVRYSKDRIYTYVANILIAVNPYFDIPKIYSSEAIKSYQGKSLGTRPPHVFAIADKAFRDMKVLKMSQSIIVSGESGAGKTENTKFVLRYLTESYGTGQDIDDRIVEANPLLEAFGNAKTVRNNNSSRFGKFVEIHFNEKSSVVGGFVSHYLLEKSRICVQGKEERNYHIFYRLCAGASEDIREKLHLSSPDNFRYLNRGCTRYFANKETDKQILQNRKSPEYLKAGSMKDPLLDDHGDFIRMCTAMKKIGLDDEEKLDLFRVVAGVLHLGNIDFEEAGSTSGGCNLKNKSAQSLEYCAELLGLDQDDLRVSLTTRVMLTTAGGTKGTVIKVPLKVEQANNARDALAKTVYSHLFDHVVNRVNQCFPFETSSYFIGVLDIAGFEYFEHNSFEQFCINYCNEKLQQFFNERILKEEQELYQKEGLGVNEVHYVDNQDCIDLIEAKLVGILDILDEENRLPQPSDQHFTSAVHQKHKDHFRLTIPRKSKLAVHRNIRDDEGFIIRHFAGAVCYETTQFVEKNNDALHMSLESLICESRDKFIRELFESSTNNNKDTKQKAGKLSFISVGNKFKTQLNLLLDKLRSTGASFIRCIKPNLKMTSHHFEGAQILSQLQCSGMVSVLDLMQGGYPSRASFHELYNMYKKYMPDKLARLDPRLFCKALFKALGLNENDYKFGLTKVFFRPGKFAEFDQIMKSDPDHLAELVKRVNHWLTCSRWKKVQWCSLSVIKLKNKIKYRAEACIKMQKTIRMWLCKRRHKPRIDGLVKVGTLKKRLDKFNEVVSVLKDGKPEMNKQIKNLEISIDTLMAKIKSTMMTQEQIQKEYDALVKSSEELLSALQKKKQQEEEAERLRRIQEEMEKERKRREEDEKRRRKEEEERRMKLEMEAKRKQEEEERKKREDDEKRIQAEVEAQLARQKEEESQQQAVLEQERRDRELALRIAQSEAELISDEAQADLALRSLDSYPVTSKNDGTRPKMTPEQMAKEMSEFLSRGPAVLATKAAAGTKKYDLSKWKYAELRDTINTSCDIELLAACREEFHRRLKVYHAWKSKNKKRNTETEQRAPKSVTDYAQQNPAAQIPARQREIEMNRQQRFFRIPFIRPADQYKDPQSKKKGWWYAHFDGPWIARQMELHPDKPPILLVAGKDDMEMCELNLEETGLTRKRGAEILPRQFEEIWERCGGIQYLQNAIESRQARPTYATAMLQSLLK

SEQ ID NO: 9965 - protein, 661 aa, Homo sapiens
MEDGKPVWAPHPTDGFQMGNIVDIGPDSLTIEPLNQKGKTFLALINQVFPAEEDSKKDVEDNCSLMYLNEATLLHNIKVRYSKDRIYTYVANILIAVNPYFDIPKIYSSEAIKSYQGKSLGTRPPHVFAIADKAFRDMKVLKMSQSIIVSGESGAGKTENTKFVLRYLTESYGTGQDIDDRIVEANPLLEAFGNAKTVRNNNSSRFGKFVEIHFNEKSSVVGGFVSHYLLEKSRICVQGKEERNYHIFYRLCAGASEDIREKLHLSSPDNFRYLNRGCTRYFANKETDKQILQNRKSPEYLKAGSMKDPLLDDHGDFIRMCTAMKKIGLDDEEKLDLFRVVAGVLHLGNIDFEEAGSTSGGCNLKNKSAQSLEYCAELLGLDQDDLRVSLTTRVMLTTAGGTKGTVIKVPLKVEQANNARDALAKTVYSHLFDHVVNRVNQCFPFETSSYFIGVLDIAGFEYFEHNSFEQFCINYCNEKLQQFFNERILKEEQELYQKEGLGVNEVHYVDNQDCIDLIEAKLVGILDILDEENRLPQPSDQHFTSAVHQKHKDHFRLTIPRKSKLAVHRNIRDDEGFIIRHFAGAVCYETTQFVEKNNDALHMSLESLICESRDKFIRELFESSTNNNKDTKQKAGKLSFISVGNKFKRFCFSWSSPARDG

SEQ ID NO: 9966 - protein, 326 aa, Homo sapiens
NHRNEDEENTLSVDCTRISFEYDLRLVLYQHWSLHDSLCNTSYTAARFKLWSVHGQKRLQEFLADMGLPLKQVKQKFQAMDISLKENLREMIEESANKFGMKDMRVQTFSIHFGFKHKFLASDVVFATMSLMESPEKDGSGTDHFIQALDSLSRSNLDKLYHGLELAKKQLRATQQTIASCLCTNLVISQGPFLYCSLMEGTPDVMLFSRPASLSLLSKHLLKSFVCSTKNRRCKLLPLVMAAPLSMEHGTVTVVGIPPETDSSDRKKPPGPRHVLCVSSFFGRAFEKAAESTSSRMLHNHFDLSVIELKAEDRSKFLDALISLLS

SEQ ID NO: 9967 - protein, 1528 aa, Homo sapiens
MIKTIYKTPGMIKDEQEIVQKRTFTKWINSHLAKRKPPMVVDDLFEDMKDGVKLLALLEVLSGQKLPCEQGRRMKRIHAVANIGTALKFLEGRKSMHRGSPIKLVNINSTDIADGRPSIVLGLMWTIILYFQIEELTSNLPQLQSLSSSASSVDSIVSSETPSPPSKRKVTTKIQGNAKKALLKWVQYTAGKQTGIEVKDFGKSWRSGVAFHSVIHAIRPELVDLETVKGRSNRENLEDAFTIAETELGIPRLLDPEDVDVDKPDEKSIMTYVAQFLKHYPDIHNASTDGQEDDEILPGFPSFANSVQNFKREDRVIFKEMKVWIEQFERDLTRAQMVESNLQDKYQSFKHFRVQYEMKRKQIEHLIQPLHRDGKLSLDQALVKQSWDRVTSRLFDWHIQLDKSLPAPLGTIGAWLYRAEVALREEITVQQVHEETANTIQRKLEQHKDLLQNTDAHKRAFHEIYRTRSVNGIPVPPDQLEDMAERFHFVSSTSELHLMKMEFLELKYRLLSLLVLAESKLKSWIIKYGRRESVEQLLQNYVSFIENSKFFEQYEVTYQILKQTAEMYVKADGSVEEAENVMKFMNETTAQWRNLSVEVRSVRSMLEEVISNWDRYGNTVASLQAWLEDAEKMLNQSENAKKDFFRNLPHWIQQHTAMNDAGNFLIETCDEMVSRDLKQQLLLLNGRWRELFMEVKQYAQADEMDRMKKEYTDCVVTLSAFATEAHKKLSEPLEVSFMNVKLLIQDLEDIEQRVPVMDAQYKIITKTAHLITKESPQEEGKEMFATMSKLKEQLTKVKECYSPLLYESQQLLIPLEELEKQMTSFYDSLGKINEIITVLEREAQSSALFKQKHQELLACQENCKKTLTLIEKGSQSVQKFVTLSNVLKHFDQTRLQRQIADIHVAFQSMVKKTGDWKKHVETNSRLMKKFEESRAELEKVLRIAQEGLEEKGDPEELLRRHTEFFSQLDQRVLNAFLKACDELTDILPEQEQQGLQEAVRKLHKQWKDLQGEAPYHLLHLKIDVEKNRFLASVEECRTELDRETKLMPQEGSEKIIKEHRVFFSDKGPHHLCEKRLQLIEELCVKLPVRDPVRDTPGTCHVTLKELRAAIDSTYRKLMEDPDKWKDYTSRFSEFSSWISTNETQLKGIKGEAIDTANHGEVKRAVEEIRNGVTKRGETLSWLKSRLKVLTEVSSENEAQKQGDELAKLSSSFKALVTLLSEVEKMLSNFGDCVQYKEIVKNSLEELISGSKEVQEQAEKILDTENLFEAQQLLLHHQQKTKRISAKKRDVQQQIAQAQQGEGGLPDRGHEELRKLESTLDGLERSRERQERRIQVTLRKWERFETNKETVVRYLFQTGSSHERFLSFSSLESLSSELEQTKEFSKRTESIAVQAENLVKEASEIPLGPQNKQLLQQQAKSIKEQVKKLEDTLEEDIKTMEMVKTKWDHFGSNFETLSVWITEKEKELNALETSSSAMDMQISQIKVTIQEIESKLSSIVGLEEEAQSFAQFVTTGESARIKAKLTQIR

SEQ ID NO: 9968 - protein, 501 aa, Homo sapiens
VAGSHARPPRRLGAICDSGGGGGGGGGSGNFAASSGRACLTAVWRRPRPRRQEPGGRRRNMSEREVSTAPAGTDMPAAKKQKLSSDENSNPDLSGDENDDAVSIESGTNTERPDTPTNTPNAPGRKSWGKGKWKSKKCKYSFKCVNSLKEDHNQPLFGVQFNWHSKEGDPLVFATVGSNRVTLYECHSQGEIRLLQSYVDADADENFYTCAWTYDSNTSHPLLAVAGSRGIIRIINPITMQCIKHYVGHGNAINELKFHPRDPNLLLSVSKDHALRLWNIQTDTLVAIFGGVEGHRDEVLSADYDLLGEKIMSCGMDHSLKLWRINSKRMMNAIKESYDYNPNKTNRPFISQKIHFPDFSTRDIHRNYVDCVRWLGDLILSKSCENAIVCWKPGKMEDDIDKIKPSESNVTILGRFDYSQCDIWYMRFSMDFWQKMLALGNQVGKLYVWDLEVEDPHKAKCTTLTHHKCGAAIRQTSFSRDSSILIAVCDDASIWRWDRLR

SEQ ID NO: 9969 - protein, 748 aa, Homo sapiens
MSQWYELQQLDSKFLEQVHQLYDDSFPMEIRQYLAQWLEKQDWEHAANDVSFATIRFHDLLSQLDDQYSRFSLENNFLLQHNIRKSKRNLQDNFQEDPIQMSMIIYSCLKEERKILENAQRFNQAQSGNIQSTVMLDKQKELDSKVRNVKDKVMCIEHEIKSLEDLQDEYDFKCKTLQNREHETNGVAKSDQKQEQLLLKKMYLMLDNKRKEVVHKIIELLNVTELTQNALINDELVEWKRRQQSACIGGPPNACLDQLQNWFTIVAESLQQVRQQLKKLEELEQKYTYEHDPITKNKQVLWDRTFSLFQQLIQSSFVVERQPCMPTHPQRPLVLKTGVQFTVKLRLLVKLQELNYNLKVKVLFDKDVNERNTVKGKFNILGTHTKVMNMEESTNGSLAAEFRHLQLKEQKNAGTRTNEGPLIVTEELHSLSFETQLCQPGLVIDLETTSLPVVVISNVSQLPSGWASILWYNMLVAEPRNLSFFLTPPCARWAQLSEVLSWQFSSVTKRGLNVDQLNMLGEKLLGPNASPDGLIPWTRFCKENINDKNFPFWLWIESILELIKKHLLPLWNDGCIMGFISKERERALLKDQQPGTFLLRFSESSREGAITFTWVERSQNGGEPDFHAVEPYTKKELSAVTFPDIIRNYKVMAAENIPENPLKYLYPNIDKDHAFGKYYSRPKEAPEPMELDGPKGTGYIKTELISVSEVHPSRLQTTDNLLPMSPEEFDEVSRIVGSVEFDSMMNTV

SEQ ID NO: 9970 - protein, 30 aa, Homo sapiens
MSESSSKSSQPLASKQEKDGTEKRGRGRPR

SEQ ID NO: 9971 - protein, 273 aa, Homo sapiens
MSQWYELQQLDSKFLEQVHQLYDDSFPMEIRQYLAQWLEKQDWEHAANDVSFATIRFHDLLSQLDDQYSRFSLENNFLLQHNIRKSKRNLQDNFQEDPIQMSMIIYSCLKEERKILENAQRFNQAQSGNIQSTVMLDKQKELDSKVRNVKDKVMCIEHEIKSLEDLQDEYDFKCKTLQNREHETNGVAKSDQKQEQLLLKKMYLMLDNKRKEVVHKIIELLNVTELTQNALINDELVEWKRRQQSACIGGPPNACLDQLQNCCGESAASSAAA

SEQ ID NO: 9972 - protein, 494 aa, Homo sapiens
DRINRLQAALASTQQFQQMFDELRTWLDDKQSQQAKNCPISAKLERLQSQLQENEEFQKSLNQHSGSYEVIVAEGESLLLSVPPGEEKRTLQNQLVELKNHWEELSKKTADRQSRLKDCMQKAQKYQWHVEDLVPWIEDCKAKMSELRVTLDPVQLESSLLRSKAMLNEVEKRRSLLEILNSAADILINSSEADEDGIRDEKAGINQNMDAVTEELQAKTGSLEEMTQRLREFQESFKNIEKKVEGAKHQLEIFDALGSQACSNKNLEKLRAQQEVLQALEPQVDYLRNFTQGLVEDAPDGSDASQLLHQAEVAQQEFLEVKQRVNSGCVMMENKLEGIGQFHCRVREMFSQLADLDDELDGMGAIGRDTDSLQSQIEDVRLFLNKIHVLKLDIEASEAECRHMLEEEGTLDLLGLKRELEALNKQCGKLTERGKARQEQLELTLGRVEDFYRKLKGLNDATTAAEEAEALQWVVGTEVEIINQQLADFKILWM

SEQ ID NO: 9973 - protein, 1344 aa, Homo sapiens
MMEIQMDEGGGVVVYQDDYCSGSVMSERVSGLAGSIYREFERLIHCYDEEVVKELMPLVVNVLENLDSVLSENQEHEVELELLREDNEQLLTQYEREKALRRQAEEKFIEFEDALEQEKKELQIQVEHYEFQTRQLELKAKNYADQISRLEERESEMKKEYNALHQRHTEMIQTYVEHIERSKMQQVGGNSQTESSLPGRSPRQSWRKRKERPTSLNVFPLADGTVRAQIGGKLVPAGDHWHLSDLGQLQSSSSYQCPQDEMSESGQSSAAATPSTTGTKSNTPTSSVPSAAVTPLNESLQPLGDYGVGSKNSKRAREKRDSRNMEVQVTQEMRNVSIGMGSSDEWSDVQDIIDSTPELDMCPETRLDRTGSSPTQGIVNKAFGINTDSLYHELSTAGSEVIGDVDEGADLLGEFSVRDDFFGMGKEVGNLLLENSQLLETKNALNVVKNDLIAKVDQLSGEQEVLRGELEAAKQAKVKLENRIKELEEELKRVKSEAIIARREPKEEAEDVSSYLCTESDKIPMAQRRRFTRVEMARVLMERNQYKERLMELQEAVRWTEMIRASREHPSVQEKKKSTIWQFFSRLFSSSSSPPPAKRPYPSVNIHYKSPTTAGFSQRRNHAMCPISAGSRPLEFFPDDDCTSSARREQKREQYRQVREHVRNDDGRLQACGWSLPAKYKQLSPNGGQEDTRMKNVPVPVYCRPLVEKDPTMKLWCAAGVNLSGWRPNEDDAGNGVKPAPGRDPLTCDREGDGEPKSAHTSPEKKKAKELPEMDATSSRVWILTSTLTTSKVVIIDANQPGTVVDQFTVCNAHVLCISSIPAASDSDYPPGEMFLDSDVNPEDPGADGVLAGITLVGCATRCNVPRSNCSSRGDTPVLDKGQGEVATIANGKVNPSQSTEEATEATEVPDPGPSEPETATLRPGPLTEHVFTDPAPTPSSGPQPGSENGPEPDSSSTRPEPEPSGDPTGAGSSAAPTMWLGAQNGWLYVHSAVANWKKCLHSIKLKDSVLSLVHVKGRVLVALADGTLAIFHRGEDGQWDLSNYHLMDLGHPHHSIRCMAVVYDRVWCGYKNKVHVIQPKTMQIEKSFDAHPRRESQVRQLAWIGDGVWVSIRLDSTLRLYHAHTHQHLQDVDIEPYVSKMLGTGKLGFSFVRITALLVAGSRLWVGTGNGVVISIPLTETVVLHRGQLLGLRANKTSPTSGEGARPGGIIHVYGDDSSDRAASSFIPYCSMAQAQLCFHGHRDAVKFFVSVPGNVLATLNGSVLDSPAEGPGPAAPASEVEGQKLRNVLVLSGGEGYIDFRIGDGEDDETEEGAGDMSQVKPVLSKAERSHIIVWQVSYTPE

SEQ ID NO: 9974 - protein, 791 aa, Homo sapiens
MSQWYELQQLDSKFLEQVHQLYDDSFPMEIRQYLAQWLEKQDWEHAANDVSFATIRFHDLLSQLDDQYSRFSLENNFLLQHNIRKSKRNLQDNFQEDPIQMSMIIYSCLKEERKILENAQRFNQAQSGNIQSTVMLDKQKELDSKVRNVKDKVMCIEHEIKSLEDLQDEYDFKCKTLQNREHETNGVAKSDQKQEQLLLKKMYLMLDNKRKEVVHKIIELLNVTELTQNALINDELVEWKRRQQSACIGGPPNACLDQLQNWFTIVAESLQQVRQQLKKLEELEQKYTYEHDPITKNKQVLWDRTFSLFQQLIQSSFVVERQPCMPTHPQRPLVLKTGVQFTVKLRLLVKLQELNYNLKVKVLFDKDVNERNTVKGFRKFNILGTHTKVMNMEESTNGSLAAEFRHLQLKEQKNAGTRTNEGPLIVTEELHSLSFETQLCQPGLVIDLETTSLPVVVISNVSQLPSGWASILWYNMLVAEPRNLSFFLTPPCARWAQLSEVLSWQFSSVTKRGLNVDQLNMLGEKLLGPNASPDGLIPWTRFCKENINDKNFPFWLWIESILELIKKHLLPLWNDGCIMGFISKERERALLKDQQPGTFLLRFSESSREGAITFTWVERSQNGGEPDFHAVEPYTKKELSAVTFPDIIRNYKVMAAENIPENPLKYLYPNIDKDHAFGKYYSRPKEAPEPMELDGPKGTGYIKTELISVSEVHPSRLQTTDNLLPMSPEEFDEVSRIVGSVEFDSMVSTTAGLCVALNKCVCSEAGSAPWQIPGLSAGGSPGGAKESAVLR

SEQ ID NO: 9975 - protein, 636 aa, Homo sapiens
MSQWYELQQLDSKFLEQVHQLYDDSFPMEIRQYLAQWLEKQDWEHAANDVSFATIRFHDLLSQLDDQYSRFSLENNFLLQHNIRKSKRNLQDNFQEDPIQMSMIIYSCLKEERKILENAQRFNQAQSGNIQSTVMLDKQKELDSKVRNVKDKVMCIEHEIKSLEDLQDEYDFKCKTLQNREHETNGVAKSDQKQEQLLLKKMYLMLDNKRKEVVHKIIELLNVTELTQNALINDELVEWKRRQQSACIGGPPNACLDQLQNWFTIVAESLQQVRQQLKKLEELEQKYTYEHDPITKNKQVLWDRTFSLFQQLIQSSFVVERQPCMPTHPQRPLVLKTGVQFTVKLRLLVKLQELNYNLKVKVLFDKDVNERNTVKGFRKFNILGTHTKVMNMEESTNGSLAAEFRHLQLKEQKNAGTRTNEGPLIVTEELHSLSFETQLCQPGLVIDLETTSLPVVVISNVSQLPSGWASILWYNMLVAEPRNLSFFLTPPCARWAQLSEVLSWQFSSVTKRGLNVDQLNMLGEKLLGPNASPDGLIPWTRFCKENINDKNFPFWLWIESILELIKKHLLPLWNDGCIMGFISKERERALLKDQQPGTFLLRFSESSREGAITFTWVERSQNGGGLLSADQGCESM

SEQ ID NO: 9976 - protein, 748 aa, Homo sapiens
MSQWYELQQLDSKFLEQVHQLYDDSFPMEIRQYLAQWLEKQDWEHAANDVSFATIRFHDLLSQLDDQYSRFSLENNFLLQHNIRKSKRNLQDNFQEDPIQMSMIIYSCLKEERKILENAQRFNQAQSGNIQSTVMLDKQKELDSKVRNVKDKVMCIEHEIKSLEDLQDEYDFKCKTLQNREHETNGVAKSDQKQEQLLLKKMYLMLDNKRKEVVHKIIELLNVTELTQNALINDELVEWKRRQQSACIGGPPNACLDQLQNWFTIVAESLQQVRQQLKKLEELEQKYTYEHDPITKNKQVLWDRTFSLFQQLIQSSFVVERQPCMPTHPQRPLVLKTGVQFTVKLRLLVKLQELNYNLKVKVLFDKDVNERNTVKGFRKFNILGTHTKVMNMEESTNGSLAAEFRHLQLKEQKNAGTRTNEGPLIVTEELHSLSFETQLCQPGLVIDLETTSLPVVVISNVSQLPSGWASILWYNMLVAEPRNLSFFLTPPCARWAQLSEVLSWQFSSVTKRGLNVDQLNMLGEKLLGPNASPDGLIPWTRFCKENINDKNFPFWLWIESILELIKKHLLPLWNDGCIMGFISKERERALLKDQQPGTFLLRFSESSREGAITFTWVERSQNGGEPDFHAVEPYTKKELSAVTFPDIIRNYKVMAAENIPENPLKYLYPNIDKDHAFGKYYSRPKEAPEPMELDGPKGTGYIKTELISVSEVHPSRLQTTDNLLPMSPEEFDEVSRIVGSVEFDSMSF

SEQ ID NO: 9977 - protein, 929 aa, Homo sapiens
SDVIMYIQECEGLIRQLQVDLQILRDENYYQLEELAFRVMRLQDELVTLRLECTNLYRKGHFTSLELVPPSTLTTTHLKAEPLTKATHSSSTSWFRKPMTRAELVAISSSEDEGNLRFVYELLSWVEEMQMKLERAEWGNDLPSVELQLETQQHIHTSVEELGSSVKEARLYEGKMSQNFHTSYAETLGKLETQYCKLKETSSFRMRHLQSLHKFVSRATAELIWLNEKEEEELAYDWSDNNSNISAKRNYFSELTMELEEKQDVFRSLQDTAELLSLENHPAKQTVEAYSAAVQSQLQWMKQLCLCVEQHVKENTAYFQFFSDARELESFLRNLQDSIKRKYSCDHNTSLSRLEDLLQDSMAQDEKEQLIQSKSSVASLVGRSKTIVQLKPRSPDHVLKNTISVKAVCDYRQIEITICKNDECVLEDNSQRTKWKVISPTGNEAMVPSVCFLIPPPNKDAIEMASRVEQSYQKVMALWHQLHVNTKSLISWNYLRKDLDLVQTWNLEKLRSSAPGECHQIMKNLQAHYEDFLQDSRDSVLFSVADRLRLEEEVEACKARFQHLMKSMENEDKEETVAKMYISELKNIRLRLEEYEQRVVKRIQSLASSRTDRDAWQDNALRIAEQEHTQEDLQQLRSDLDAVSMKCDSFLHQSPSSSSVPTLRSELNLLVEKMDHVYGLSTVYLNKLKTVDVIVRSIQDAELLVKGYEIKLSQEEVVLADLSALEAHWSTLRHWLSDVKDKNSVFSVLDEEIAKAKVVAEQMSRLTPERNLDLERYQEKGSQLQERWHRVIAQLEIRQSELESIQEVLGDYRACHGTLIKWIEETTAQQEMMKPGQAEDSRVLSEQLSQQTALFAEIERNQTKLDQCQKFSQQYSTIVKDYELQLMTYKAFVESQQKSPGKRRRMLSSSDAITQEFMDLRTRYTALVT

SEQ ID NO: 9978 - protein, 572 aa, Homo sapiens
MSQWYELQQLDSKFLEQVHQLYDDSFPMEIRQYLAQWLEKQDWEHAANDVSFATIRFHDLLSQLDDQYSRFSLENNFLLQHNIRKSKRNLQDNFQEDPIQMSMIIYSCLKEERKILENAQRFNQAQSGNIQSTVMLDKQKELDSKVRNVKDKVMCIEHEIKSLEDLQDEYDFKCKTLQNREHETNGVAKSDQKQEQLLLKKMYLMLDNKRKEVVHKIIELLNVTELTQNALINDELVEWKRRQQSACIGGPPNACLDQLQNWFTIVAESLQQVRQQLKKLEELEQKYTYEHDPITKNKQVLWDRTFSLFQQLIQSSFVVERQPCMPTHPQRPLVLKTGVQFTVKLRLLVKLQELNYNLKVKVLFDKDVNERNTVKGFRKFNILGTHTKVMNMEESTNGSLAAEFRHLQLKEQKNAGTRTNEGPLIVTEELHSLSFETQLCQPGLVIDLETTSLPVVVISNVSQLPSGWASILWYNMLVAEPRNLSFFLTPPCARWAQLSEVLSWQFSSVTKRGLNVDQLNMLGEKLLGPNASPDGLIPWTRFCKVHHGLHQQGARACPVEGPAAGDLPAAVQ

SEQ ID NO: 9979 - protein, 712 aa, Homo sapiens; identical to SEQ ID NO: 5844

SEQ ID NO: 9980 - protein, 645 aa, Homo sapiens
MNIVENSIFLSNLMKSANTFELKYDLSCELYRMSTYSTFPAGVPVSERSLARAGFYYTGVNDKVKCFCCGLMLDNWKRGDSPTEKHKKLYPSCRFVQSLNSVNNLEATSQPTFPSSVTNSTHSLLPGTENSGYFRGSYSNSPSNPVNSRANQDFSALMRSSYHCAMNNENARLLTFQTWPLTFLSPTDLAKAGFYYIGPGDRVACFACGGKLSNWEPKDNAMSEHLRHFPKCPFIENQLQDTSRYTVSNLSMQTHAARFKTFFNWPSSVLVNPEQLASAGFYYVGNSDDVKCFCCDGGLRCWESGDDPWVQHAKWFPRWSLALLPRLECDGVMSAHCNLRLLGSGNSHASSLASSWDYRCEYLIRIKGQEFIRQVQASYPHLLEQLLSTSDSPGDENAESSIIHFEPGEDHSEDAIMMNTPVINAAVEMGFSRSLVKQTVQRKILATGENYRLVNDLVLDLLNAEDEIREEERERATEEKESNDLLLIRKNRMALFQHLTCVIPILDSLLTAGIINEQEHDVIKQKTQTSLQARELIDTILVKGNIAATVFRNSLQEAEAVLYEHLFVQQDIKYIPTEDVSDLPVEEQLRRLQEERTCKVCMDKEVSIVFIPCGHLVVCKDCAPSLRKCPICRSTIKGTVRTFLS

SEQ ID NO: 9981 - protein, 779 aa, Homo sapiens
MSQWYELQQLDSKFLEQVHQLYDDSFPMEIRQYLAQWLEKQDWEHAANDVSFATIRFHDLLSQLDDQYSRFSLENNFLLQHNIRKSKRNLQDNFQEDPIQMSMIIYSCLKEERKILENAQRFNQAQSGNIQSTVMLDKQKELDSKVRNVKDKVMCIEHEIKSLEDLQDEYDFKCKTLQNREHETNGVAKSDQKQEQLLLKKMYLMLDNKRKEVVHKIIELLNVTELTQNALINDELVEWKRRQQSACIGGPPNACLDQLQNWFTIVAESLQQVRQQLKKLEELEQKYTYEHDPITKNKQVLWDRTFSLFQQLIQSSFVVERQPCMPTHPQRPLVLKTGVQFTVKLRLLVKLQELNYNLKVKVLFDKDVNERNTVKGFRKFNILGTHTKVMNMEESTNGSLAAEFRHLQLKEQKNAGTRTNEGPLIVTEELHSLSFETQLCQPGLVIDLETTSLPVVVISNVSQLPSGWASILWYNMLVAEPRNLSFFLTPPCARWAQLSEVLSWQFSSVTKRGLNVDQLNMLGEKLLGPNASPDGLIPWTRFCKENINDKNFPFWLWIESILELIKKHLLPLWNDGCIMGFISKERERALLKDQQPGTFLLRFSESSREGAITFTWVERSQNGGEPDFHAVEPYTKKELSAVTFPDIIRNYKVMAAENIPENPLKYLYPNIDKDHAFGKYYSRPKEAPEPMELDGPKGTGYIKTELISVSEVHPSRLQTTDNLLPMSPEEFDEVSRIVGSVEFDSMALALLPRLECRAAIMAHCSLDLPSSTDPPNSAS

SEQ ID NO: 9982 - protein, 26 aa, Homo sapiens
RQYLAQWLEKQDWSLSSFRRPLCPLW

SEQ ID NO: 9983 - protein, 716 aa, Homo sapiens
MSQWYELQQLDSKFLEQVHQLYDDSFPMEIRQYLAQWLEKQDWEHAANDVSFATIRFHDLLSQLDDQYSRFSLENNFLLQHNIRKSKRNLQDNFQEDPIQMSMIIYSCLKEERKILENAQRFNQAQSGNIQSTVMLDKQKELDSKVRNVKDKVMCIEHEIKSLEDLQDEYDFKCKTLQNREHETNGVAKSDQKQEQLLLKKMYLMLDNKRKEVVHKIIELLNVTELTQNALINDELVEWKRRQQSACIGGPPNACLDQLQNWFTIVAESLQQVRQQLKKLEELEQKYTYEHDPITKNKQVLWDRTFSLFQQLIQSSFVVERQPCMPTHPQRPLVLKTGVQFTVKLRLLVKLQELNYNLKVKVLFDKDVNERNTVKGFRKFNILGTHTKVMNMEESTNGSLAAEFRHLQLKEQKNAGTRTNEGPLIVTEELHSLSFETQLCQPGLVIDLETTSLPVVVISNVSQLPSGWASILWYNMLVAEPRNLSFFLTPPCARWAQLSEVLSWQFSSVTKRGLNVDQLNMLGEKLLGPNASPDGLIPWTRFCKENINDKNFPFWLWIESILELIKKHLLPLWNDGCIMGFISKERERALLKDQQPGTFLLRFSESSREGAITFTWVERSQNGGEPDFHAVEPYTKKELSAVTFPDIIRNYKVMAAENIPENPLKYLYPNIDKDHAFGKYYSRPKEAPEPMELDGPKGTGYIKTELISVSEVTVLG

SEQ ID NO: 9984 - protein, 1051 aa, Homo sapiens
MLYKDFFKGKTVFNHWLPGMCYSNITFQLVSEATFNKSTLVEYSGVSHEPKQHRTAPYPPQNISVRIVNLNKNNWEEQSGNFPEESFMRSQDTIGKEKLFHFTEETPEIPSGNISSGWPDFNSSDYETTSQPYWWDSASAAPESEDEFVSVLPMEYENNSTLSETEKSTSGSFSFFPVQMILTWLPPKPPTAFDGFHIHIEREENFTEYLMVDEEAHEFVAELKEPGKYKLSVTTFSSSGSCETRKSQSAKSLSFYISPSGEWIEELTEKPQHVSVHVLSSTTALMSWTSSQENYNSTIVSVVSLTCQKQKESQRLEKQYCTQVNSSKPIIENLVPGAQYQVVIYLRKGPLIGPPSDPVTFAIVPTGIKDLMLYPLGPTAVVLSWTRPYLGVFRKYVVEMFYFNPATMTSEWTTYYEIAATVSLTASVRIANLLPAWYYNFRVTMVTWGDPELSCCDSSTISFITAPVAPEITSVEYFNSLLYISWTYGDDTTDLSHSRMLHWMVVAEGKKKIKKSVTRNVMTAILSLPPGDIYNLSVTACTERGSNTSMLRLVKLEPAPPKSLFAVNKTQTSVTLLWVEEGVADFFEVFCQQVGSSQKTKLQEPVAVSSHVVTISSLLPATAYNCSVTSFSHDSPSVPTFIAVSTMVTEMNPNVVVISVLAILSTLLIGLLLVTLIILRKKHLQMARECGAGTFVNFASLERDGKLPYNWRRSIFAFLTLLPSCLWTDYLLAFYINPWSKNGLKKRKLTNPVQLDDFDAYIKDMAKDSDYKFSLQFEELKLIGLDIPHFAADLPLNRCKNRYTNILPYDFSRVRLVSMNEEEGADYINANYIPGYNSPQEYIATQGPLPETRNDFWKMVLQQKSQIIVMLTQCNEKRRVKCDHYWPFTEEPIAYGDITVEMISEEEQDDWACRHFRINYADEMQDVMHFNYTAWPDHGVPTANAAESILQFVHMVRQQATKSKGPMIIHCSAGVGRTGTFIALDRLLQHIRDHEFVDILGLVSEMRSYRMSMVQTEEQYIFIHQCVQLMWMKKKQQFCISDVIYENVSKS

SEQ ID NO: 9985 - protein, 244 aa, Homo sapiens
ALPSSEDDDDDDDSSSEEKETDNTKPNPVAPYWTSPEKMEKKLHAVPAAKTVKFKCPSSGTPNPTLRWLKNGKEFKPDHRIGGYKVRYATWSIIMDSVVPSDKGNYTCIVENEYGSINHTYQLDVVERSPHRPILQAGLPANKTVALGSNVEFMCKVYSDPQPHIQWLKHIEVNGSKIGPDNLPYVQILKHSGINSSDAEVLTLFNVTEAQSGEYVCKVSNYIGEANQSAWLTVTRPVAKDCWS

SEQ ID NO: 9986 - protein, 1214 aa, Homo sapiens
LADCAHFHYENVDFGHIQLLLSPDREGPSLSGENELVFGVQVTCQGRSWPVLRSYDDFRSLDAHLHRCIFDRRFSCLPELPPPPEGARAAQMLVPLLLQYLETLSGLVDSNLNCGPVLTWMELDNHGRRLLLSEEASLNIPAVAAAHVIKRYTAQAPDELSFEVGDIVSVIDMPPTEDRSWWRGKRGFQVGFFPSECVELFTERPGPGLKADADGPPCGIPAPQGISSLTSAVPRPRGKLAGLLRTFMRSRPSRQRLRQRGILRQRVFGCDLGEHLSNSGQDVPQVLRCCSEFIEAHGVVDGIYRLSGVSSNIQRLRHEFDSERIPELSGPAFLQDIHSVSSLCKLYFRELPNPLLTYQLYGKFSEAMSVPGEEERLVRVHDVIQQLPPPHYRTLEYLLRHLARMARHSANTSMHARNLAIVWAPNLLRSMELESVGMGGAAAFREVRVQSVVVEFLLTHVDVLFSDTFTSAGLDPAGRCLLPRPKSLAGSCPSTRLLTLEEAQARTQGRLGTPTEPTTPKAPASPAERRKGERGEKQRKPGGSSWKTFFALGRGPSVPRKKPLPWLGGTRAPPQPSGSRPDTVTLRSAKSEESLSSQASGAGLQRLHRLRRPHSSSDAFPVGPAPAGSCESLSSSSSSESSSSESSSSSSESSAAGLGALSGSPSHRTSAWLDDGDELDFSPPRCLEGLRGLDFDPLTFRCSSPTPGDPAPPASPAPPAPASAFPPRVTPQAISPRGPTSPASPAALDISEPLAVSVPPAVLELLGAGGAPASATPTPALSPGRSLRPHLIPLLLRGAEAPLTDACQQEMCSKLRGAQGPLGPDMESPLPPPPLSLLRPGGAPPPPPKNPARLMALALAERAQQVAEQQSQQECGGTPPASQSPFHRSLSLEVGGEPLGTSGSGPPPNSLAHPGAWVPGPPPYLPRQQSDGSLLRSQRPMGTSRRGLRGPAQVPTPGFFSPAPRECLPPFLGVPKPGLYPLGPPSFQPSSPAPVWRSSLGPPAPLDRGENLYYEIGASEGSPYSGPTRSWSPFRSMPPDRLNASYGMLGQSPPLHRSPDFLLSYPPAPSCFPPDHLGYSAPQHPARRPTPPEPLYVNLALGPRGPSPASSSSSSPPAHPRSRSDPGPPVPRLPQKQRAPWGPRTPHRVPGPWGPPEPLLLYRAAPPAYGRGGELHRGSLYRNGGQRGEGAGPPPPYPTPSWSLHSEGQTRSYC

SEQ ID NO: 9987 - protein, 150 aa, Homo sapiens
MRSCCVVQAGLQLLASSDPPSSASQSARITGVNHRTPPREIKSNKTVLHLAVQAANPTLVQLLLELPRGDLRTFVNMKAHGNTALHMAAALPPGPAQEAIVRHLLAAGADPTLRNLENEQPVHLLRPGPGPEGLRQLLKRSRVAPPGLSS

SEQ ID NO: 9988 - protein, 486 aa, Homo sapiens
LGGAITPSLKTRGYRTQDRGPGGGSAGETARLAQRRGRGPGGPQSTPRNPRVSRGERSHCPTQTVKKLLEEQRRRQQQQPDAGGVQGQFLPPPEQPLTPSVNEAVTGHPPFPAHSETVGSGPSSLGFPDWDPNTHAAYTDSPYSCPASAAENFLPPDFYPPSDPGQPCPFPQGMEAGPWRVSAPPSGPPQFPAVVPGPSLEVARAHMLALGPQQLLAQDEEGDTLLHLFAARGLRWAAYAAAEVLQVYRRLDIREHKGKTPLLVAAAANQPLIVEDLLNLGAEPNAADHQGRSVLHVAATYGLPGVLLAVLNSGVQVDLEARDFEGLTPLHTAILALNVAMRPSDLCPRVLSTQARDRLDCVHMLLQMGANHTSQEIKSNKTVLHLAVQAANPTLVQLLLELPRGDLRTFVNMKAHGNTALHMAAALPPGPAQEAIVRHLLAAGADPTLRNLENEQPVHLLRPGPGPEGLRQLLKRSRVAPPGLSS

SEQ ID NO: 9989 - protein, 204 aa, Homo sapiens
LSADSWLGGGCSHGCPPPVLRLLHLFAARGLRWAAYAAAEVLQVYRRLDIREHKGKTPLLVAAAANQPLIVEDLLNLGAEPNAADHQGRSVLHVAATYGLPGVLLVWPAGRQGFVWGVDWLPRFWLPGPGGQGIPLPSSLPSLPPRLCLTLGSRLTWKPETSRVSWVWAGLVWLVWLGEVGADAGPSLSPFCRPHPAPHGHPGP

SEQ ID NO: 9990 - protein, 234 aa, Homo sapiens
MEAGPWRVSAPPSGPPQFPAVVPGPSLEVARAHMLALGPQQLLAQDEEGDTLLHLFAARGLRWAAYAAAEVLQVYRRLDIREHKGKTPLLVAAAANQPLIVEDLLNLGAEPNAADHQGRSVLHVAATYGLPGVLLVWPAGRQGFVWGVDWLPRFWLPGPGGQGIPLPSSLPSLPPRLCLTLGSRLTWKPETSRVSWVWAGLVWLVWLGEVGADAGPSLSPFCRPHPAPHGHPGP

SEQ ID NO: 9991 - protein, 50 aa, Homo sapiens
LAGPWRVSAPPSGPPQFPAVVPGPSLEVARAHMLALGPQQLLAQDEEGDT

SEQ ID NO: 9992 - protein, 193 aa, Homo sapiens
LAQRRGRGPGGPQSTPRNPRVSRGERSHCPTQTVKKLLEEQRRRQQQQPDAGGVQGQFLPPPEQPLTPSVNEAVTGHPPFPAHSETVGSGPSSLGFPDWDPNTHAAYTDSPYSCPASAAENFLPPDFYPPSDPGQPCPFPQGMEAGPWRVSAPPSGPPQFPAVVPGPSLEVARAHMLALGPQQLLAQDEEGDT

SEQ ID NO: 9993 - protein, 119 aa, Homo sapiens
LAQRRGRGPGGPQSTPRNPRVSRGERSHCPTQTVKKLLEEQRRRQQQQPDAGGVQGQFLPPPEQPLTPSVNEAVTGWTLESFCTPFRTPTVPRCGPWTIAGGGPSSHAGFGATAAAGPG

SEQ ID NO: 9994 - protein, 147 aa, Homo sapiens
LAQRRGRGPGGPQSTPRNPRVSRGERSHCPTQTVKKLLEEQRRRQQQQPDAGGVQGQFLPPPEQPLTPSVNEAVTAHSETVGSGPSSLGFPDWDPNTHAAYTDSPYSCPASAAENFLPPDFYPPSDPGQPCPFPQGMEVRYRVGTGC

SEQ ID NO: 9995 - protein, 416 aa, Homo sapiens
VTMAAVGSGGYARNDAGEKLPSVMAGVPARRGQSSPPPAPPICLRRRTRLSTASEETVQNRVSLEKVLGITAQNSSGLTCDPGTGHVAYLAGCVVVILDPKENKQQHIFNTARKSLSALAFSPDGKYIVTGENGHRPAVRIWDVEEKNQVAEMLGHKYGVACVAFSPNMKHIVSMGYQHDMVLNVWDWKKDIVVASNKVSCRVIALSFSEDSSYFVTVGNRHVRFWFLEVSTETKVTSTVPLVGRSGILGELHNNIFCGVACGRGRMAGSTFCVSYSGLLCQFNEKRVLEKWINLKVSLSSCLCVSQELIFCGCTDGIVRIFQAHSLHYLANLPKPHYLGVDVAQGLEPSFLFHRKAEAVYPDTVALTFDPIHQWLSCVYKDHSIYIWDVKDINRVGKVWSELFHSSYVWNVEALS

SEQ ID NO: 9996 - protein, 485 aa, Homo sapiens
VTMAAVGSGGYARNDAGEKLPSVMAGVPARRGQSSPPPAPPICLRRRTRLSTASEETVQNRVSLEKVLGITAQNSSGLTCDPGTGHVAYLAGCVVVILDPKENKQQHIFNTARKSLSALAFSPDGKYIVTGENGHRPAVRIWDVEEKNQVAEMLGHKYGVACVAFSPNMKHIVSMGYQHDMVLNVWDWKKDIVVASNKVSCRVIALSFSEDSSYFVTVGNRHVRFWFLEVSTETKVTSTVPLVGRSGILGELHNNIFCGVACGRGRMAGSTFCVSYSGLLCQFNEKRVLEKWINLKVSLSSCLCVSQELIFCGCTDGIVRIFQAHSLHYLANLPKPHYLGVDVAQGLEPSFLFHRKAEAVYPDTVALTFDPIHQWLSCVYKDHSIYIWDVKDINRVGKVWSELFHSSYVWNVEVYPEFEDQRACLPSGSFLTCSSDNTIRFWNLDSSPDSHWQKNIFSNLAPALQMCGRGHSRQPNTPSPGEIAS

SEQ ID NO: 9997 - protein, 1525 aa, Homo sapiens
VTMAAVGSGGYARNDAGEKLPSVMAGVPARRGQSSPPPAPPICLRRRTRLSTASEETVQNRVSLEKVLGITAQNSSGLTCDPGTGHVAYLAGCVVVILDPKENKQQHIFNTARKSLSALAFSPDGKYIVTGENGHRPAVRIWDVEEKNQVAEMLGHKYGVACVAFSPNMKHIVSMGYQHDMVLNVWDWKKDIVVASNKVSCRVIALSFSEDSSYFVTVGNRHVRFWFLEVSTETKVTSTVPLVGRSGILGELHNNIFCGVACGRGRMAGSTFCVSYSGLLCQFNEKRVLEKWINLKVSLSSCLCVSQELIFCGCTDGIVRIFQAHSLHYLANLPKPHYLGVDVAQGLEPSFLFHRKAEAVYPDTVALTFDPIHQWLSCVYKDHSIYIWDVKDINRVGKVWSELFHSSYVWNVEVYPEFEDQRACLPSGSFLTCSSDNTIRFWNLDSSPDSHWQKNIFSNTLLKVVYVENDIQHLQDMSHFPDRGSENGTPMDVKAGVRVMQVSPDGQHLASGDRSGNLRIHELHFMDELVKVEAHDAEVLCLEYSKPETGLTLLASASRDRLIHVLNVEKNYNLEQTLDDHSSSITAIKFAGNRDIQMISCGADKSIYFRSAQQGSDGLHFVRTHHVAEKTTLYDMDIDITQKYVAVACQDRNVRVYNTVNGKQKKCYKGSQGDEGSLLKVHVDPSGTFLATSCSDKSISVIDFYSGECIAKMFGHSEIITSMKFTYDCHHLITVSGDSCVFIWHLGPEITNCMKQHLLEIDHRQQQQHTNDKKRSGHPRQDTYVSTPSEIHSLSPGEQTEDDLEEECEPEEMLKTPSKDSLDPDPRCLLTNGKLPLWAKRLLGDDDVADGLAFHAKRSYQPHGRWAERAGQEPLKTILDAQDLDCYFTPMKPESLENSILDSLEPQSLASLLSESESPQEAGRGHPSFLPQQKESSEASELILYSLEAEVTVTGTDSQYCRKEVEAGPGDQQGDSYLRVSSDSPKDQSPPEDSGESEADLECSFAAIHSPAPPPDPAPRFATSLPHFPGCAGPTEDELSLPEGPSVPSSSLPQTPEQEKFLRHHFETLTESPCRELFPAALGDVEASEAEDHFFNPRLSISTQFLSSLQKASRFTHTFPPRATQCLVKSPEVKLMDRGGSQPRAGTGYASPDRTHVLAAGKAEETLEAWRPPPPCLTSLASCVPASSVLPTDRNLPTPTSAPTPGLAQGVHAPSTCSYMEATASSRARISRSISLGDSEGPIVATLAQPLRRPSSVGELASLGQELQAITTATTPSLDSEGQEPALRSWGNHEARANLRLTLSSACDGLLQPPVDTQPGVTVPAVSFPAPSPVEESALRLHGSAFRPSLPAPESPGLPAHPSNPQLPEARPGIPGGTASLLEPTSGALGLLQGSPARWSEPWVPVEALPPSPLELSRVGNILHRLQTTFQEALDLYRVLVSSGQVDTGQQQARTELVSTFLWIHSQLEAECLVGTSVAPAQALPSPGPPSPPTLYPLASPDLQALLEHYSELLVQAVRRKARGH

SEQ ID NO: 9998 - protein, 101 aa, Homo sapiens
LHYLANLPKPHYLGVDVAQGLEPSFLFHRKAEAVYPDTVALTFDPIHQWLSCVYKDHSIYIWDVKDINRVGKVWSELFHSSYVWNVETEFHSCCPGWSAMV

SEQ ID NO: 9999 - protein, 562 aa, Homo sapiens
LLKVVYVENDIQHLQDMSHFPDRGSENGTPMDVKAGVRVMQVSPDGQHLASGDRSGNLRIHELHFMDELVKVEAHDAEVLCLEYSKPETGLTLLASASRDRLIHVLNVEKNYNLEQTLDDHSSSITAIKFAGNRDIQMISCGADKSIYFRSAQQGSDGLHFVRTHHVAEKTTLYDMDIDITQKYVAVACQDRNVRVYNTVNGKQKKCYKGSQGDEGSLLKVHVDPSGTFLATSCSDKSISVIDFYSGECIAKMFGHSEIITSMKFTYDCHHLITVSGDSCVFIWHLGPEITNCMKQHLLEIDHRQQQQHTNDKKRSGHPRQDTYVSTPSEIHSLSPGEQTEDDLEEECEPEEMLKTPSKDSLDPDPRCLLTNGKLPLWAKRLLGDDDVADGLAFHAKRSYQPHGRWAERAGQEPLKTILDAQDLDCYFTPMKPESLENSILDSLEPQSLASLLSESESPQEAGRGHPSFLPQQKESSEASELILYSLEAEVTVTGTDSQYCRKEVEAGPGDQQGDSYLRVSSDSPKDQSPPEGECRAGRDPVTVCAFSQAPFWAPMVTLTQY

SEQ ID NO: 10000 - protein, 61 aa, Homo sapiens
LKPGGRSGKSSPSPRRVNSRMRTGLQPSQAPWLLSWMLSVLRFTMRIVFPALAPDPYYSVN

SEQ ID NO: 10001 - protein, 47 aa, Homo sapiens
VFILERNPMNLLNVGELLLICCISSNVQVMLKRNPVLLRSIDKPLAR

SEQ ID NO: 10002 - protein, 28 aa, Homo sapiens
LNILSMITFPLKPYPLLCIWEIIHREAL

SEQ ID NO: 10003 - protein, 72 aa, Homo sapiens
VQSGKCESSVLGYSATCLPDMGRWRVSSVESWPFASTGGKLAIATAGTGTQAAPRPFLIRPPDSWALALALM

SEQ ID NO: 10004 - protein, 492 aa, Homo sapiens
LKKDMENLTKHSIECSSFRGDWECKNQFERKQGSQEGHFSEMIFTPEDMPTFSIQHQRIHTDEKLLECKECGKDFSFVSVLVRHQRIHTGEKPYECKECGKAFGSGANLAYHQRIHTGEKPFECKECGKAFGSGSNLTHHQRIHTGEKPYECKECGKAFSFGSGLIRHQIIHSGEKPYECKECGKSFSFESALIRHHRIHTGEKPYECIDCGKAFGSGSNLTQHRRIHTGEKPYECKACGMAFSSGSALTRHQRIHTGEKPYICNECGKAFSFGSALTRHQRIHTGEKPYVCKECGKAFNSGSDLTQHQRIHTGEKPYECKECEKAFRSGSKLIQHQRMHTGEKPYECKECGKTFSSGSDLTQHHRIHTGEKPYECKECGKAFGSGSKLIQHQLIHTGERPYECKECGKSFSSGSALNRHQRIHTGEKPYECKECGKAFYSGSSLTQHQRIHTGEKLYECKNCGKAYGRDSEFQQHKKSHNGKKLCELETIN

SEQ ID NO: 10005 - protein, 42 aa, Homo sapiens [sequence omitted]

SEQ ID NO: 10006 - protein, 753 aa, Homo sapiens
LNRNVPLQGSVSFRDVAIDFSREEWRHLDLSQRNLYRDVMLETYSHLLSVGYQVPKPEVVMLEQGKEPWALQGERPRHSCPGEKLWDHNQHRKIIGYKPASSQDQKIYSGEKSYECAEFGKSFTWKSQFKVHLKVPTGEKLYVCIECGRAFVQKPEFITHQKTHMREKPYKCNECGKSFFQVSSLFRHHRIHTGEKLYECSECGKGFPYNSDLSIHEKIHTGERHHECTDCGKAFTQKSTLKIHQKIHTGERSYICIECGQAFIQKTQLIAHRRIHSGEKPYECNNCGKSFISKSQLQVHQRVHTRVKPYICTEYGKVFSNNSNLITHEKIQSREKSSICTECGKAFTYRSELIIHQRIHTGEKPYECSDCGRAFTQKSALTVHQRIHTGEKSYICMKCGLAFIRKAHLITHQIIHTGEKPYKCGHCGKLFTSKSQLHVHKRIHTGEKPYVCNKCGKAFTNRSNLITHQKTHTGEKSYICSKCGKAFTQRSDLITHQRIHTGEKPYECNTCGKAFTQKSNLNIHQKIHTGERQYECHECGKAFNQKSILIVHQKIHTGEKPYVCTECGRAFIRKSNFITHQRIHTGEKPYECSDCGKSFTSKSQLLVHQPVHTGEKPYVCAECGKAFSGRSNLSKHQKTHTGEKPYICSECGKTFRQKSELITHHRIHTGEKPYECSDCGKSFTKKSQLQVHQRIHTGEKPYVCAECGKAFSNRSNLNKHQTTHTGDKPYKCGICGKGFVQKSVFSVHQSSHA

SEQ ID NO: 10007 - protein, 634 aa, Homo sapiens
LPCRISAVTPSNNARLSWYKLLKFQELVTFRDVAIDFSRQEWEYLDPNQRDLYRDVMLENYRNLVSLDLDLQCEIISYIEVPTYETDISSTQLQSIYKREKLYECKKCQKKFSSGYQLILHHRFHVIERPYECKECGKNFRSGYQLTLHQRFHTGEKPYECTECGKNFRSGYQLTVHQRFHTGEKTYECRQCGKAFIYASHIVQHERIHTGGKPYECQECGRAFSQGGHLRIHQRVHTGEKPYKCKECGKTFSRRSNLVEHGQFHTDEKPYICEKCGKAFRRGHQLTVHQRVHTGKKPYECKECGKGYTTASYFLLHQRIHKGGKPYECKECKKTFTLYRNLTRHQNIHTGEKLFECKQCGKTYTTGSKLFQHQKTHTGEKPYECKECGKAFSLYGYLKQHQKIHTGMKHFECKECKKTFTLYRNLTRHQNIHTGKKLFECQECGKAYSTGSNLIQHRKTHTGEKPYKCKECGKTFSLHGYLNQHQKIHTGMKPYECKVCRKTFTFYRNLTLHQSIHTDEKPFECKECGKTFRRSSHLTAHQSIHADKKPYECKECGKAFKMYGYLTQHQKIHTGGKPYECKECGKAFSRASNLVQHERIHTGEKPYVCKQCGKTFRYGSALKAHQRIHRSIKV

SEQ ID NO: 10008 - protein, 161 aa, Homo sapiens
LVLGVIYRLLYQRDVSPSAGAASLLRHFLACFPSLRALLICIPWAVLLLEYCTANAVTGPCRASFPRWYFDVERNSCNNFIYGGCRGNKNSYRSEEACMLRCFRQQENPPLPLGSKGKWPLTLLLPSACLLPSLTELSPAQLWFTLSFTVNIILAESHVSA

SEQ ID NO: 10009 - protein, 72 aa, Homo sapiens
LALRVLPVSPSPQDWEVQYQQDTPVAPRFDVNAPDLYIPGFTLPLPCTLLSLPGLYGAGVWVPGGPGQFFLW

SEQ ID NO: 10010 - protein, 105 aa, Homo sapiens
MDVVDPDIFNRDPRDHYDLLQRLGGGTYGEVFKARDKVSGDLVALKMVKMEPDDDVSTLQKEILILKTCRHANIVAYHGSYLWLQKLWICMEFCGAGSLQDIYQG

SEQ ID NO: 10011 - protein, 41 aa, Homo sapiens
LPGPLCPQDEYDDIVVHSSRSQTRLPPTPASKPLPDDPRPV

SEQ ID NO: 10012 - protein, 19 aa, Homo sapiens
MANRYTMDLTAIYEVTSCR

SEQ ID NO: 10013 - protein, 70 aa, Homo sapiens
LCVFLTAIRQSISKALVAYYQKYVDEASKKEIKDILIQYDRTLLVADPRRCESKKFGGPGARARYQKSYR

SEQ ID NO: 10014 - protein, 195 aa, Homo sapiens
LSPPLPAPGGSGGCCCHPPGLLSRLPSPPRGRPGQRQAVAFSAPPPPPCWPLAHPTGGPTAPQPPVGPAPALTRVSAAVAAEVQDARRRPPAGLPLQASLPCGPLSPPWPSHRAMVPSLASQGPRSTRRYCLMCGYCLGGCPWPSGMQPQPRCVSSLWTSSRPTSTSMRYTMRRRSGGPSRRHPRIRATRRRRRS

SEQ ID NO: 10015 - protein, 141 aa, Homo sapiens
VGRSELGLPEQFESPCPLLQVSAAVAAEVQDARRRPPAGLPLQASLPCGPLSPPWPSHRAMVPSLASQGPRSTRRYCLMCGYCLGGCPWPSGMQPQPRCVSSLWTSSRPTSTSMRYTMRRRSGGPSRRHPRIRATRRRRRS

SEQ ID NO: 10016 - protein, 22 aa, Homo sapiens
MILGTLLHHLSSSHRPPPKVKN

SEQ ID NO: 10017 - protein, 139 aa, Homo sapiens
MDGLVYAVEFSHRSGRDLINLAKKRTNIIPVIEDARHPHKYRMLIAMVDVIFADVAQPDQTRIVALNAHTFLRNGGHFVISIKANCIDSTASAEAVFASEVKKMQQENMKPQEQLTLEPYERDHAVVVGVYRPPPKVKN

SEQ ID NO: 10018 - protein, 197 aa, Homo sapiens
MREGDDKIEYRAWNPFRSKLAAAILGGVDQIHIKPGAKVLYLGAASGTTVSHVSDIVGPDGLVYAVEFSHRSGRDLINLAKKRTNIIPVIEDARHPHKYRMLIAMVDVIFADVAQPDQTRIVALNAHTFLRNGGHFVISIKANCIDSTASAEAVFASEVKKMQQENMKPQEQLTLEPYERDHAVVVGVYRPPPKVKN

SEQ ID NO: 10019 - protein, 186 aa, Homo sapiens
MKPGFSPRGGGFGGRGGFGDRGGRGGRGGFGGGRGRGGGFRGRGRGGGGGGGGGGGGGRGGGGFHSGGNRGRGRGGKRGNQSGKNVMVEPHRHEGVFICRGKEDALVTKNLVPGESVYGEKRVSISEGDDKIEYRAWNPFRSKLAAAILGGVDQIHIKPGAKVLYLGAASGTTVSHVSDIVGPVSE

SEQ ID NO: 10020 - protein, 2690 aa, Homo sapiens
VLARVEPWRNETFCPMECPQNSHYELCADTCSLGCSALSAPLQCPDGCAEGCQCDSGFLYNGQACVPIQQCGCYHNGAYYEPEQTVLIDNCRQQCTCHAGKVVVCQEHSCKPGQVCQPSGGILSCVTKDPCHGVTCRPQETCKEQGGQGVCLPNYEATCWLWGDPHYHSFDGRKFDFQGTCNYVLATTGCPGVSTQGLTPFTVTTKNQNRGNPAVSYVRVVTVAALGTNISIHKDEIGKVRVNGVLTALPVSVADGRISVTQGASKALLVADFGLQVSYDWNWRVDVTLPSSYHGAVCGLCGNMDRNPNNDQVFPNGTLAPSIPIWGGSWRAPGWDPLCWDECRGSCPTCPEDRLEQYEGPGFCGPLAPGTGGPFTTCHAHVPPESFFKGCVLDVCMGGGDRDILCKALASYVAACQAAGVVIEDWRAQVGCEITCPENSHYEVCGPPCPASCPSPAPLTTPAVCEGPCVEGCQCDAGFVLSADRCVPLNNGCGCWANGTYHEAGSEFWADGTCSQWCRCGPGGGSLVCTPASCGLGEVCGLLPSGQHGCQPVSTAECQAWGDPHYVTLDGHRFDFQGTCEYLLSAPCHGPPLGAENFTVTVANEHRGSQAVSYTRSVTLQIYNHSLTLSARWPRKLQVDGVFVTLPFQLDSLLHAHLSGADVVVTTTSGLSLAFDGDSFVRLRVPAAYAGSLCGLCGNYNQDPADDLKAVGGKPAGWQVGGAQGCGECVSKPCPSPCTPEQQESFGGPDACGVISATDGPLAPCHGLVPPAQYFQGCLLDACQVQGHPGGLCPAVATYVAACQAAGAQLREWRRPDFCPFQCPAHSHYELCGDSCPGSCPSLSAPEGCESACREGCVCDAGFVLSGDTCVPVGQCGCLHDDRYYPLGQTFYPGPGCDSLCRCREGGEVSCEPSSCGPHETCRPSGGSLGCVAVGSTTCQASGDPHYTTFDGHRFDFMGTCVYVLAQTCGTRPGLHRFAVLQENVAWGNGRVSVTRVITVQVANFTLRLEQRQWKVTVNGVDMKLPVVLANGQIRASQHGSDVVIETDFGLRVAYDLVYYVRVTVPGNYYQLMCGLCGNYNGDPKDDFQKPNGSQAGNANEFGNSWEEVVPDSPCLPPPTCPPGSAGCIPSDKCPPELEKKYQKEEFCGLLSSPTGPLSSCHKLVDPQGPLKDCIFDLCLGGGNLSILCSNIHAYVSACQAAGGHVEPWRNETFCPMECPQNSHYELCADTCSLGCSALSAPLQCPDGCAEGCQCDSGFLYNGQACVPIQQCGCYHNGVYYEPEQTVLIDNCRQQCTCHVGKVVVCQEHSCKPGQVCQPSGGILSCVTKDPCHGVTCRPQETCKEQGGQGVCLPNYEATCWLWGDPHYHSFDGRKFDFQGTCNYVLATTGCPGVSTQGLTPFTVTTKNQNRGNPAVSYVRVVTVAALGTNISIHKDEIGKVRVNGVLTALPVSVADGRISVAQGASKALLVADFGLQVSYDWNWRVDVTLPSSYHGAVCGLCGNMDRNPNNDQVFPNGTLAPSIPIWGGSWRAPGWDPLCWDECRGSCPTCPEDRLEQYEGPGFCGPLSSGTGGPFTTCHAHVPPESFFKGCVLDVCMGGGDRDILCKALASYVAACQAAGVVIEDWRAQVGCEITCPENSHYEVCGPPCPASCPSPAPLTTPAVCEGPCVEGCQCDAGFVLSADRCVPLNNGCGCWANGTYHEAGSEFWADGTCSQWCRCGPGGGSLVCTPASCGLGEVCGLLPSGQHGCQPVSTAECQAWGDPHYVTLDGHRFDFQGTCEYLLSAPCHGPPLGAENFTVTVANEHRGSQAVSYTRSVTLQIYNHSLTLSARWPRKLQVDGVFVALPFQLDSLLHAHLSGADVVVTTTSGLSLAFDGDSFVRLRVPAAYAASLCGLCGNYNQDPADDLKAVGGKPAGWQVGGAQGCGECVSKPCPSPCTPEQQESFGGPDACGVISATDGPLAPCHGLVPPAQYFQGCLLDACQVQGHPGGLCPAVATYVAACQAAGAQLGEWRRPDFCPLQCPAHSHYELCGDSCPVSCPSLSAPEGCESACREGCVCDAGFVLSGDTCVPVGQCGCLHDGRYYPLGEVFYPGPECERRCECGPGGHVTCQEGAACGPHEECRLEDGVQACHATGCGRCLANGGIHYITLDGRVYDLHGSCSYVLAQVCHPKPGDEDFSIVLEKNAAGDLQRLLVTVAGQVVSLAQGQQVTVDGEAVALPVAVGRVRVTAEGRNMVLQTTKGLRLLFDGDAHLLMSIPSPFRGRLCGLCGNFNGNWSDDFVLPNGSAASSVETFGAAWRAPGSSKGCGEGCGPQGCPVCLAEETAPYESNEACGQLRNPQGPFATCQAVLSPSEYFRQCVYDLCAQKGDKAFLCRSLAAYTAACQAAGVAVKPWRTDSFCPLHCPAHSHYSICTRTCQGSCAALSGLTGCTTRCFEGCECDDRFLLSQGVCIPVQDCGCTHNGRYLPVNSSLLTSDCSERCSCSSSSGLTCQAAGCPPGRVCEVKAEARNCWATRGLCVLSVGANLTTFDGARGATTSPGVYELSSRCPGLQNTIPWYRVVAEVQICHGKTEAVGQVHIFFQDGMVTLTPNKGVWVNGLRVDLPAEKLASVSVSRTPDGSLLVRQKAGVQVWLGANGKVAVIVSNDHAGKLCGACGNFDGDQTNDWHDSQEKPAMEKWRAQDFSPCYG

SEQ ID NO: 10021 - protein, 254 aa, Homo sapiens
LIGCGWLPLRSDWPLVSKMLSKGLKRKREEEEEKEPLAVDSWWLDPGHTAVAQAPPAVASSSLFDLSVLKLHHSLQQSEPDLRHLVLVVNTLRRIQASMAPAAALPPVPSPPAAPSVADNLLASSDAALSASMASLLEDLSHIEGLSQAPQPLADEGPPGRSIGGAAPSLGALDLLGPATGCLLDDGLEGLFEDIDTSMYDNELWAPASEGLKPGPEDGPGKEEAPELDEAELDYLMDVLVGTQALERPPGPGR

SEQ ID NO: 10022 - protein, 44 aa, Homo sapiens
LTLLSPLCIPHLASLLPTSDHPTSLLRRGRMSRARPSPVRVAAL

SEQ ID NO: 10023 - protein, 66 aa, Homo sapiens
MAVPETRPNHTIYINNLNEKIKKDVWPDPGYPGITEPEDEGPGLCHLQGGQQRHQRPALHAGFPFL

SEQ ID NO: 10024 - protein, 41 aa, Homo sapiens
LFTLPTLLQPLSFPDPHAVGCKFSQELFYCLLFRIKKKIKT

SEQ ID NO: 10025 - protein, 24 aa, Homo sapiens
MLKTGCMTGGQNKEVWFNFYLYTQ

SEQ ID NO: 10026 - protein, 71 aa, Homo sapiens [sequence omitted]

SEQ ID NO: 10027 - protein, 94 aa, Homo sapiens
MEDFARGAASPGPSRPGLVPVSIIGAEDEDFENELETNSEEQNSQFQSLEQVKRRPAHLMALLQHVALQFEPGPLVRAGLGGHREGWGWDRHSF

SEQ ID NO: 10028 - protein, 135 aa, Homo sapiens [sequence omitted]

SEQ ID NO: 10029 - protein, 284 aa, Homo sapiens
MLPSLPQRLKDYQRRLDLSHLRQSSDPMLSEFKNLDITKKKLVHEGPLTWRVTKDKAVEVHVLLLDDLLLLLQRQDERLLLKSHSRTLTPTPDGKTMLRPVLRLTSAMTREVATDHKAFYVLFTWDQEAQIYELVAQTVSERKNWCALITETAGSLKVPAPASRPKPRPSPSRPLCLPLSGPLCLPVSRPRPLSLSPDLPASPPPALCLPAPAAPQGQGCGVTQHFLPSAPENPSSAALRTAMVAERRLQLMPGPRESSVTSCPSADQAPRASSLPRPFGKCCP

SEQ ID NO: 10030 - protein, 19 aa, Homo sapiens
MAAQKDQQKDAEAEGLSGT

SEQ ID NO: 10031 - protein, 410 aa, Homo sapiens
LWCHLRKLRLKEVKEAGAQRESGFPQAHSKKQDIQQLLQLQQLVLVPGHHLQPPAQFLLPQAQQSQPGLLPTPNLFQLPQQTQGALLTSQPRAGLPTQAVTRPTLPDPHLSHPQPPKCLEPPSHPEEPSDLEELEQFARTFKQRRIKLGFTQGDVGLAMGKLYGNDFSQTTISRFEALNLSFKNMCKLKPLLEKWLNDAETMSVDSSLPSPNQLSSPSLGFDGLPGRRRKKRTSIETNVRFALEKSFLANQKPTSEEILLIAEQLHMEKEVIRVWFCNRRQKEKRINPCSAAPMLPSPGKPASYSPHMVTPQGGAGTLPLSQASSSLSTTVTTLSSAVGTLHPSRTAGGGGGGGGAAPPLNSIPSVTPPPPATTNSTNPSPQGSHSAIGLSGLNPSTGPGLWWNPAPYQP

SEQ ID NO: 10032 - protein, 187 aa, Homo sapiens [sequence omitted]

SEQ ID NO: 10033 - protein, 103 aa, Homo sapiens
MSGEENPASKPTPVQDVQGDGRWMSLHHRFVADSKDKEPEVVFIGDSLVQLMHQCEIWRELFSPLHALNFGIGGDGTQHVLWRLENGELEHIRPKVSGAWVGL

SEQ ID NO: 10034 - protein, 11 aa, Homo sapiens
LLRRQRHLDGS

SEQ ID NO: 10035 - protein, 98 aa, Homo sapiens
VGAMAEAVLRVARRQLSQRGGSGAPILLRQMFEPVSCTFTYLLGDRESREAVLIDPVLETAPRDAQLIKELGLRLLYAGVGDQGQPWPHPRLCHLRPE

SEQ ID NO: 10036 - protein, 106 aa, Homo sapiens
VGAMAEAVLRVARRQLSQRGGSGAPILLRQMFEPVSCTFTYLLGDRESREAVLIDPVLETAPRDAQLIKELGLRLLYAGQSGDQTHGSQRGWAAASVEWEAGAQNS

SEQ ID NO: 10037 - protein, 65 aa, Homo sapiens
LQPGRRGRFRSGECPFSLLPTFLAPRRHLQAGGLGQPPRPHPTPVTGERTPRPENQSAAALGNHV

SEQ ID NO: 10038 - protein, 680 aa, Homo sapiens
LMESRSVAQAGVQWCDLGSLQAPPPGFTLFSCLSLLSSWDYSSGFSGFCASPIEESHGALISSCNSRTMTDGLVTFRDVAIDFSQEEWECLDPAQRDLYVDVMLENYSNLVSLDLESKTYETKKIFSENDIFEINFSQWEMKDKSKTLGLEASIFRNNWKCKSIFEGLKGHQEGYFSQMIISYEKIPSYRKSKSLTPHQRIHNTEKSYVCKECGKACSHGSKLVQHERTHTAEKHFECKECGKNYLSAYQLNVHQRFHTGEKPYECKECGKTFSWGSSLVKHERIHTGEKPYECKECGKAFSRGYHLTQHQKIHTGVKSYKCKECGKAFFWGSSLAKHEIIHTGEKPYKCKECGKAFSRGYQLTQHQKIHTGKKPYECKICGKAFCWGYQLTRHQIFHTGEKPYECKECGKAFNCGSSLIQHERIHTGEKPYECKECGKAFSRGYHLSQHQKIHTGEKPFECKECGKAFSWGSSLVKHERVHTGEKSHECKECGKTFCSGYQLTRHQVFHTGEKPYECKECGKAFNCGSSLVQHERIHTGEKPYECKECGKAFSRGYHLTQHQKIHTGEKPFKCKECGKAFSWGSSLVKHERVHTNEKSYECKDCGKAFGSGYQLSVHQRFHTGEKLYQRKEFGKTFTCGSKLVHERTHSNDKPYKYNECGEAFLWTTYSNEKIDTDETL

SEQ ID NO: 10039 - protein, 502 aa, Homo sapiens
LLSLELCHSGLCKFPKVGGKMTMSKEAVTFKDVAVVFTEEELGLLDLAQRKLYRDVMLENFRNLLSVGHQPFHRDTFHFLREEKFWMMDIATQREGNSGGKIQPEMKTFPEAGPHEGWSCQQIWEEIASDLTRPQDSTIKSSQFFEQGDAHSQVEEGLSIMHTGQKPSNCGKCKQSFSDMSIFDLPQQIRSAEKSHSCDECGKSFCYISALHIHQRVHLGEKLFKCDVCGKEFSQSLHLQTHQRVHTGEKPFKCEQCGRGFRCRSALTVHCKLHMGEKHYNCEACGRAFIHDFQLQKHQRIHTGEKPFKCEICSVSFRLRSSLNRHCVVHTGKKPNSTGEYGKGFIRRLDLCKHQTIHTGEKPYNCKECGKSFRRSSYLLIHQRVHTGEKPYKCDKCGKSYITKSGLDLHHRAHTGERPYNCDDCGKSFRQASSILNHKRLHCRKKPFKCEDCGKKLVYRSYRKDQQKNHSGENPSKCEDCGKRYKRRLNLDIILSLFLNDT

SEQ ID NO: 10040 - protein, 740 aa, Homo sapiens [sequence omitted]

SEQ ID NO: 10041 - protein, 136 aa, Homo sapiens
LGKLGAQWSRCPGLADVPRFLPEDISVVFSRASWEGRADFSQADVHRQIAIVFKTPPYEDLEIVEPVTVNVFLQRLTDGVCSEPLPFTYLPRDHDSYGVDKKRKRGMPDVLGELNSSGVCPLPLSTPIPRFWGGDS

SEQ ID NO: 10042 - protein, 46 aa, Homo sapiens
LGGEGGGGAVQSQPGCLAPPSPWPFLMLLKWTYSALARSSVARVSP

SEQ ID NO: 10043 - protein, 37 aa, Homo sapiens
MSSTPIPLALPHASEVDIFSLGEKLRCTGFPLSPFYR

SEQ ID NO: 10044 - protein, 24 aa, Homo sapiens
LHIDPRLEARRLFDVLHEPFLKVP

SEQ ID NO: 10045 - protein, 133 aa, Homo sapiens
LIVVVLLGGYEISLIFFFPGRKFLERFFQIFLHFLLEDRLTFFGLLYYSPPPVGPAGRVEETVAEADSVQRDSAFCPWGSNPSLAPGSYGACTFKRYSGILWGPGHRRKTAQKLCHCWNGTLLLPRASPDSVL

SEQ ID NO: 10046 - protein, 291 aa, Homo sapiens
LKLILYSGTALSAPGGATPPSPLGPTEPALSRGTAASCGGLGTAGRLHRNFAIVGTGRCSFPELPRTAYFEDSLSSPGTPTAHPGLAPYFPNPAIALASRRPQRGHRGPPVPREMFQAFPGDYDSGSRCSSSPSAESQYLSSVDSFGSPPTAAASQECAGLGEMPGSFVPTVTAITTSQDLQWLVQPTLISSMAQSQGQPLASQPPVVDPYDMPGTSYSTPGMSGYSSGGASGSGGPSTSGTTSGPGPARPARARPRRPREETVSKGHQNLAWVGGSKRGRKFLMNGGGLH

SEQ ID NO: 10047 - protein, 405 aa, Homo sapiens
LKLILYSGTALSAPGGATPPSPLGPTEPALSRGTAASCGGLGTAGRLHRNFAIVGTGRCSFPELPRTAYFEDSLSSPGTPTAHPGLAPYFPNPAIALASRRPQRGHRGPPVPREMFQAFPGDYDSGSRCSSSPSAESQYLSSVDSFGSPPTAAASQECAGLGEMPGSFVPTVTAITTSQDLQWLVQPTLISSMAQSQGQPLASQPPVVDPYDMPGTSYSTPGMSGYSSGGASGSGGPSTSGTTSGPGPARPARARPRRPREETLTPEEEEKRRVRRERNKLAAAKCRNRRRELTDRLQAETDQLEEEKAELESEIAELQKEKERLEFVLVAHKPGCKIPYEEGPGPGPLAEEVQVLGDPFPVVNPSYTSSFVLTCPEVSAFAGAQRTSGSDQPSDPLNSPSLLAL

SEQ ID NO: 10048 - protein, 377 aa, Homo sapiens
LKLILYSGTALSAPGGATPPSPLGPTEPALSRGTAASCGGLGTAGRLHRNFAIVGTGRCSFPELPRTAYFEDSLSSPGTPTAHPGLAPYFPNPAIALASRRPQRGHRGPPVPREMFQAFPGDYDSGSRCSSSPSAESQYLSSVDSFGSPPTAAASQSQGQPLASQPPVVDPYDMPGTSYSTPGMSGYSSGGASGSGGPSTSGTTSGPGPARPARARPRRPREETETDQLEEEKAELESEIAELQKEKERLEFVLVAHKPGCKIPYEEGPGPGPLAEVRDLPGSAPAKEDGFSWLLPPPPPPPLPFQTSQDAPPNLTASLFTHSEVQVLGDPFPVVNPSYTSSFVLTCPEVSAFAGAQRTSGSDQPSDPLNSPSLLAL

SEQ ID NO: 10049 - protein, 416 aa, Homo sapiens
LKLILYSGTALSAPGGATPPSPLGPTEPALSRGTAASCGGLGTAGRLHRNFAIVGTGRCSFPELPRTAYFEDSLSSPGTPTAHPGLAPYFPNPAIALASRRPQRGHRGPPVPREMFQAFPGDYDSGSRCSSSPSAESQYLSSVDSFGSPPTAAASQECAGLGEMPGSFVPTVTAITTSQDLQWLVQPTLISSMAQSQGQPLASQPPVVDPYDMPGTSYSTPGMSGYSSGGASGSGGPSTSGTTSGPGPARPARARPRRPREETETDQLEEEKAELESEIAELQKEKERLEFVLVAHKPGCKIPYEEGPGPGPLAEVRDLPGSAPAKEDGFSWLLPPPPPPPLPFQTSQDAPPNLTASLFTHSEVQVLGDPFPVVNPSYTSSFVLTCPEVSAFAGAQRTSGSDQPSDPLNSPSLLAL

SEQ ID NO: 10050 - protein, 452 aa, Homo sapiens
LKLILYSGTALSAPGGATPPSPLGPTEPALSRGTAASCGGLGTAGRLHRNFAIVGTGRCSFPELPRTAYFEDSLSSPGTPTAHPGLAPYFPNPAIALASRRPQRGHRGPPVPREMFQAFPGDYDSGSRCSSSPSAESQYLSSVDSFGSPPTAAASQECAGLGEMPGSFVPTVTAITTSQDLQWLVQPTLISSMAQSQGQPLASQPPVVDPYDMPGTSYSTPGMSGYSSGGASGSGGPSTSGTTSGPGPARPARARPRRPREETLTPEEEEKRRVRRERNKLAAAKCRNRRRELTDRLQAETDQLEEEKAELESEIAELQKEKERLEFVLVAHKPGCKIPYEEGPGPGPLAEVRDLPGSAPAKEDGFSWLLPPPPPPPLPFQTSQDAPPNLTASLFTHSEVQVLGDPFPVVNPSYTSSFVLTCPEVSAFAGAQRTSGSDQPSDPLNSPSLLAL

SEQ ID NO: 10051 - protein, 413 aa, Homo sapiens
LKLILYSGTALSAPGGATPPSPLGPTEPALSRGTAASCGGLGTAGRLHRNFAIVGTGRCSFPELPRTAYFEDSLSSPGTPTAHPGLAPYFPNPAIALASRRPQRGHRGPPVPREMFQAFPGDYDSGSRCSSSPSAESQYLSSVDSFGSPPTAAASQSQGQPLASQPPVVDPYDMPGTSYSTPGMSGYSSGGASGSGGPSTSGTTSGPGPARPARARPRRPREETLTPEEEEKRRVRRERNKLAAAKCRNRRRELTDRLQAETDQLEEEKAELESEIAELQKEKERLEFVLVAHKPGCKIPYEEGPGPGPLAEVRDLPGSAPAKEDGFSWLLPPPPPPPLPFQTSQDAPPNLTASLFTHSEVQVLGDPFPVVNPSYTSSFVLTCPEVSAFAGAQRTSGSDQPSDPLNSPSLLAL

SEQ ID NO: 10052 - protein, 309 aa, Homo sapiens
LKLILYSGTALSAPGGATPPSPLGPTEPALSRGTAASCGGLGTAGRLHRNFAIVGTGRCSFPELPRTAYFEDSLSSPGTPTAHPGLAPYFPNPAIALASRRPQRGHRGPPVPREMFQAFPGDYDSGSRCSSSPSAESQYLSSVDSFGSPPTAAASQETDQLEEEKAELESEIAELQKEKERLEFVLVAHKPGCKIPYEEGPGPGPLAEVRDLPGSAPAKEDGFSWLLPPPPPPPLPFQTSQDAPPNLTASLFTHSEVQVLGDPFPVVNPSYTSSFVLTCPEVSAFAGAQRTSGSDQPSDPLNSPSLLAL

SEQ ID NO: 10053 - protein, 255 aa, Homo sapiens
LASRRPQRGHRGPPVPREMFQAFPGDYDSGSRCSSSPSAESQYLSSVDSFGSPPTAAASQECAGLGEMPGSFVPTVTAITTSQDLQWLVQPTLISSMAQSQGQPLASQPPVVDPYDMPGTSYSTPGMSGYSSGGASGSGGPSTSGTTSGPGPARPARARPRRPREETLTPEEEEKRRVRRERNKLAAAKCRNRRRELTDRLQAETDQLEEEKAELESEIAELQKEKERLEFVLVAHKPGCKIPYEEGPGPGPLAE

SEQ ID NO: 10054 - protein, 128 aa, Homo sapiens [sequence omitted]

SEQ ID NO: 10055 - protein, 218 aa, Homo sapiens
LGVLKEVEVRDGWRSAVSPNLMASISLTQLTPEEEEKRRVRRERNKLAAAKCRNRRRELTDRLQAETDQLEEEKAELESEIAELQKEKERLEFVLVAHKPGCKIPYEEGPGPGPLAEVRDLPGSAPAKEDGFSWLLPPPPPPPLPFQTSQDAPPNLTASLFTHSEVQVLGDPFPVVNPSYTSSFVLTCPEVSAFAGAQRTSGSDQPSDPLNSPSLLAL

SEQ ID NO: 10056 - protein, 134 aa, Homo sapiens
LRHHLSQGLPQSAAGRAPGGWSQPFPGLPGCGPHPDSGADGTFVPPDHLPRGLGGHAAAALLPGRRPRGFPQGVIGLFTIPLLYRQHQAQIDQYVGLVTNQLSHIKAKIRAKIPGTGALASAAAAVSGSKAKAE

SEQ ID NO: 10057 - protein, 35 aa, Homo sapiens
VSVEARTRGGAGTAAAAAAAGGTLIPVLRTPRASP

SEQ ID NO: 10058 - protein, 26 aa, Homo sapiens
VLLLNSVLGTSGPGKEPKRSQPASRR

SEQ ID NO: 10059 - protein, 154 aa, Homo sapiens
LVTATPGHQTTAFRTQGPASHPPGPKSLGPLFPEVRFPAPRFWHPSPQCPRPRQPGSPPPGSRRPGSAPPEPSLLQTSAIWGHSTSWSQGPHVPPRETLVFPAPRAKEPGRSELPAFGHLAHGAEQRSLSAQPGEFKHSSFQEPRNFSAVNSQL

SEQ ID NO: 10060 - protein, 63 aa, Homo sapiens
LSGTGAEAGRAGAMVEKEEAGGGISEEEAAQYDRQIRLWGLEAQKRSGPARLEAARVWRGRLF

SEQ ID NO: 10061 - protein, 46 aa, Homo sapiens
LSGTGAEAGRAGAMVEKEEAGGGISEEEAAQYDRQIRLWGLEAQKR

SEQ ID NO: 10062 - protein, 63 aa, Homo sapiens
LGLRPTSVDPALRRRRRGPRNKKRGWRRLAQEPLGLEVDQFLEDVRLQERTSGRSLALSPRLE

SEQ ID NO: 10063 - protein, 180 aa, Homo sapiens
LCEGLLEESDGEGEPGQGEGPEAGDAEVCPTPARLATTEKKTEQQRRREKAVHRLRVQQAALRAARLRHQELFRLRGIKAQVALRLAELARRQRRRQARREAEADKPRRLGRLKYQAPDIDVQLSSELTDSLRTLKVLTVSCRGAPCPVMTPSLLPVPPRGYGRHHGCPWAGPVGPMPRG

SEQ ID NO: 10064 - protein, 209 aa, Homo sapiens
MPGSCAEMRTCILAGHGGSLSNLMDFVKKTGICASKWEWGTTHNFLYKHGGIRDKIMSSRKHLHLVDAGLAINTPFPLVLPPTREVHLILSFDFSAGDPFETIRATTDYCRRHKIPFPQVEEAELDLWSKAPASCYILKGETGPVVMHFPLFNIDACGGDIEAWSDTYDTFKLADTYTLDVVVLLLALAKKNVRENKKKILRELMNVAG

SEQ ID NO: 10065 - protein, 94 aa, Homo sapiens
MHSLVQQLCPETWFEFTPHHAGFSALGAFVSITHFGSKFKKGRLVRTHPERDLTFLRGSLSNLMDFVKKTGICASKWEWGTTHNFLYKHVPRSS

SEQ ID NO: 10066 - protein, 132 aa, Homo sapiens
LTDFWAYMVISKQTRELPESHLSNMKKPVEEGTLPYPIFAAIDNDLQPSWQEARAPETWFEFTPHHAGFSALGAFVSITHFGSKFKKGRLVRTHPERDLTFLRGLWGSALGNTEVIREYIFGEYLGNRKVKP

SEQ ID NO: 10067 - protein, 129 aa, Homo sapiens
LHTSFPSLHRPHLKCPTHSLPLSSRAISSLYTNDGDMEALEADLKHRFTRQEWDLAKSLQKTIQAARSENYSLTDFWAYMVISKQTRELPESHLSNMKKPVEEGTLPYPIFAAIDNDLQPSWQEARAPG

SEQ ID NO: 10068 - protein, 199 aa, Homo sapiens
MGSSEVSIIPGLQKEEKAAVERRRLHVLKALKKLRIEADEAPVVAVLGSGGGLRAHIACLGVLSEMKEQGLLDAVTYLAGVSGSTWAISSLYTNDGDMEALEADLKHRFTRQEWDLAKSLQKTIQAARSENYSLTDFWAYMVISKQTRELPESHLSNMKKPVEEGTLPYPIFAAIDNDLQPSWQEARAPGKQTFRGRER

SEQ ID NO: 10069 - protein, 108 aa, Homo sapiens
LQALVLPSPRPYVRIDGAVIPDHWLDPSAVWEVKCADLSLSPIYPAARGLVDSDKGISLRFPRFIRVREDKQPEQATTSAQVACLYRKQSQIQNQQGEDSGSDPEDTY

SEQ ID NO: 10070 - protein, 951 aa, Homo sapiens
VCCPGSGARDQRKEQLTDEEKCWTGRENSDANMQRSIMSFFHPKKEGKAKKPEKEASNSSRETEPPPKAALKEWNGVVSESDSPVKRPGRKAARVLGSEGEEEDEALSPAKGQKPALDCSQVSPPRPATSPENNASLSDTSPMDSSPSGIPKRRTARKQLPKRTIQEVLEEQSEDEDREAKRKKEEEEEETPKESLTEAEVATEKEGEDGDQPTTPPKPLKTSKAETPTESVSEPEVATKQELQEEEEQTKPPRRAPKTLSSFFTPRKPAVKKEVKEEEPGAPGKEGAAEGPLDPSGYNPAKNNYHPVEDACWKPGQKVPYLAVARTFEKIEEVSARLRMVETLSNLLRSVVALSPPDLLPVLYLSLNHLGPPQQGLELGVGDGVLLKAVAQATGRQLESVRAEAAEKGDVGLVAENSRSTQRLMLPPPPLTASGVFSKFRDIARLTGSASTAKKIDIIKGLFVACRHSEARFIARSLSGRLRLGLAEQSVLAALSQAVSLTPPGQEFPPAMVDAGKGKTAEARKTWLEEQGMILKQTFCEVPDLDRIIPVLLEHGLERLPEHCKLSPGIPLKPMLAHPTRGISEVLKRFEEAAFTCEYKYDGQRAQIHALEGGEVKIFSRNQEDNTGKYPDIISRIPKIKLPSVTSFILDTEAVAWDREKKQIQPFQVLTTRKRKEVDASEIQVQVCLYAFDLIYLNGESLVREPLSRRRQLLRENFVETEGEFVFATSLDTKDIEQIAEFLEQSVKDSCEGLMVKTLDVDATYEIAKRSHNWLKLKKDYLDGVGDTLDLVVIGAYLGRGKRAGRYGGFLLASYDEDSEELQAICKLGTGFSDEELEEHHQSLKALVLPSPRPYVRIDGAVIPDHWLDPSAVWEVKCADLSLSPIYPAARGLVDSDKGISLRFPRFIRVREDKQPEQATTSAQVACLYRKQSQIQNQQGEDSGSDPEDTY

SEQ ID NO: 10071 - protein, 883 aa, Homo sapiens
VCCPGSGARDQRKEQLTDEEKCWTGRENSDANMQRSIMSFFHPKKEGKAKKPEKEASNSSRETEPPPKAALKEWNGVVSESDSPVKRPGRKAARVLGSEGEEEDEALSPAKGQKPALDCSQVSPPRPATSPENNASLSDTSPMDSSPSGIPKRRTEAETPTESVSEPEVATKQELQEEEEQTKPPRRAPKTLSSFFTPRKPAVKKEVKEEEPGAPGKEGAAEGPLDPSGYNPAKNNYHPVEDACWKPGQKVPYLAVARTFEKIEEVSARLRMVETLSNLLRSVVALSPPDLLPVLYLSLNHLGPPQQGLELGVGDGVLLKAVAQATGRQLESVRAEAAEKGDVGLVAENSRSTQRLMLPPPPLTASGVFSKFRDIARLTGSASTAKKIDIIKGLFVACRHSEARFIARSLSGRLRLGLAEQSVLAALSQAVSLTPPGQEFPPAMVDAGKGKTAEARKTWLEEQGMILKQTFCEVPDLDRIIPVLLEHGLERLPEHCKLSPGIPLKPMLAHPTRGISEVLKRFEEAAFTCEYKYDGQRAQIHALEGGEVKIFSRNQEDNTGKYPDIISRIPKIKLPSVTSFILDTEAVAWDREKKQIQPFQVLTTRKRKEVDASEIQVQVCLYAFDLIYLNGESLVREPLSRRRQLLRENFVETEGEFVFATSLDTKDIEQIAEFLEQSVKDSCEGLMVKTLDVDATYEIAKRSHNWLKLKKDYLDGVGDTLDLVVIGAYLGRGKRAGRYGGFLLASYDEDSEELQAICKLGTGFSDEELEEHHQSLKALVLPSPRPYVRIDGAVIPDHWLDPSAVWEVKCADLSLSPIYPAARGLVDSDKGISLRFPRFIRVREDKQPEQATTSAQVACLYRKQSQIQNQQGEDSGSDPEDTY

SEQ ID NO: 10072 - protein, 920 aa, Homo sapiens
VCCPGSGARDQRKEQLTDEEKCWTGRENSDANMQRSIMAALKEWNGVVSESDSPVKRPGRKAARVLGSEGEEEDEALSPAKGQKPALDCSQVSPPRPATSPENNASLSDTSPMDSSPSGIPKRRTARKQLPKRTIQEVLEEQSEDEDREAKRKKEEEEETPKESLTEAEVATEKEGEDGDQPTTPPKPLKTSKAETPTESVSEPEVATKQELQEEEEQTKPPRRAPKTLSSFFTPRKPAVKKEVKEEEPGAPGKEGAAEGPLDPSGYNPAKNNYHPVEDACWKPGQKVPYLAVARTFEKIEEVSARLRMVETLSNLLRSVVALSPPDLLPVLYLSLNHLGPPQQGLELGVGDGVLLKAVAQATGRQLESVRAEAAEKGDVGLVAENSRSTQRLMLPPPPLTASGVFSKFRDIARLTGSASTAKKIDIIKGLFVACRHSEARFIARSLSGRLRLGLAEQSVLAALSQAVSLTPPGQEFPPAMVDAGKGKTAEARKTWLEEQGMILKQTFCEVPDLDRIIPVLLEHGLERLPEHCKLSPGIPLKPMLAHPTRGISEVLKRFEEAAFTCEYKYDGQRAQIHALEGGEVKIFSRNQEDNTGKYPDIISRIPKIKLPSVTSFILDTEAVAWDREKKQIQPFQVLTTRKRKEVDASEIQVQVCLYAFDLIYLNGESLVREPLSRRRQLLRENFVETEGEFVFATSLDTKDIEQIAEFLEQSVKDSCEGLMVKTLDVDATYEIAKRSHNWLKLKKDYLDGVGDTLDLVVIGAYLGRGKRAGRYGGFLLASYDEDSEELQAICKLGTGFSDEELEEHHQSLKALVLPSPRPYVRIDGAVIPDHWLDPSAVWEVKCADLSLSPIYPAARGLVDSDKGISLRFPRFIRVREDKQPEQATTSAQVACLYRKQSQIQNQQGEDSGSDPEDTY

SEQ ID NO: 10073 - protein, 447 aa, Homo sapiens
VCCPGSGARDQRKEQLTDEEKCWTGRENSDANMQRSIMSFFHPKKEGKAKKPEKEASNSSRETEPPPKAALKEWNGVVSESDSPVKRPGRKAARVLGSEGEEEDEALSPAKGQKPALDCSQVSPPRPATSPENNASLSDTSPMDSSPSGIPKRRTEEETPKESLTEAEVATEKEGEDGDQPTTPPKPLKTSKAETPTESVSEPEVATKQELQEEEEQTKPPRRAPKTLSSFFTPRKPAVKKEVKEEEPGAPGKEGAAEGPLDPSGYNPAKNNYHPVEDACWKPGQKVPYLAVARTFEKIEEVSARLRMVETLSNLLRSVVALSPPDLLPVLYLSLNHLGPPQQGLELGVGDGVLLKAVAQATGRERRETRSHNCHPRHPHPRSPLKVGSWSPSGLRQPRKATWGWWPRTAAAPRGSCCHHLRSLPPGSSASSATSPGSLAVLPQPRR

SEQ ID NO: 10074 - protein, 88 aa, Homo sapiens
VVDGFGLSCVATGSLHPPGSGRPEAGRQIPVSPGSPSPSLGPRKGREVYRHFGKAPGTPHSHTKPYVRSKGRKFERARGRRASRGYKN

SEQ ID NO: 10075 - protein, 99 aa, Homo sapiens
LTRQPCPLHQVCALRVTSRARSRILRAGGKILTFDQLALDSPKGCGTVLLSGPRKGREVYRHFGKAPGTPHSHTKPYVRSKGRKFERARGRRASRGYKN

SEQ ID NO: 10076 - protein, 64 aa, Homo sapiens
VVDGFGLSCVATGSLHPPGSGRPEAGRQIPVSPGSPSPSLGPRKGREVYRHFGKAPGTPHSHTK

SEQ ID NO: 10077 - protein, 75 aa, Homo sapiens
LTRQPCPLHQVCALRVTSRARSRILRAGGKILTFDQLALDSPKGCGTVLLSGPRKGREVYRHFGKAPGTPHSHTK

SEQ ID NO: 10078 - protein, 53 aa, Homo sapiens
LTRQPCPLHQVCALRVTSRARSRILRAGGKILTFDQLALDSPKGCGTVLLSGE

SEQ ID NO: 10079 - protein, 146 aa, Homo sapiens
MGVDIRHNKDRKVRRKEPKSQDIYLRLLVKLYRFLARRTNSTFNQVVLKRLFMSRTNRPPLSLSRMIRKMKLPGRENKTAVVVGTITDDVRVQEVPKLKVSWRGLGRPIRPLLYCAVLCCAVLCCAGPSSVLPPLVRQASCLSEWL

SEQ ID NO: 10080 - protein, 117 aa, Homo sapiens
MLYRFLARRTNSTFNQVVLKRLFMSRTNRPPLSLSRMIRKMKLPGRENKTAVVVGTITDDVRVQEVPKLKVSWRGLGRPIRPLLYCAVLCCAVLCCAGPSSVLPPLVRQASCLSEWL

SEQ ID NO: 10081 - protein, 37 aa, Homo sapiens
LCSLLLSVPIPVVDLMQDAARPRARLSPRHLRQPEIL

SEQ ID NO: 10082 - protein, 695 aa, Homo sapiens
LADRTGAPAPGVTRSSQPPRHMAPGQAPHQATPWRDAHPFFLLSPVMGLLSRAWSRLRGLGPLEPWLVEAVKGAALVEAGLEGEARTPLAIPHTPWGRRPEEEAEDSGGPGEDRETLGLKTSSSLPEAWGLLDDDDGMYGEREATSVPRGQGSQFADGQRAPLSPSLLIRTLQGSDKNPGEEKAEEEGVAEEEGVNKFSYPPSHRECCPAVEEEDDEEAVKKEAHRTSTSALSPGSKPSTWVSCPGEEENQATEDKRTERSKGARKTSVSPRSSGSDPRSWEYRSGEASEEKEEKAHKETGKGEAAPGPQSSAPAQRPQLKSWWCQPSDEEEGEVKALGAAEKDGEAECPPCIPPPSAFLKAWVYWPGEDTEEEEDEEEDEDSDSGSDEEEGEAEASSSTPATGVFLKSWVYQPGEDTEEEEDEDSDTGSAEDEREAETSASTPPASAFLKAWVYRPGEDTEEEEDEDVDSEDKEDDSEAALGEAESDPHPSHPDQRAHFRGWGYRPGKETEEEEAAEDWGEAEPCPFRVAIYVPGEKPPPPWAPPRLPLRLQRRLKRPETPTHDPDPETPLKARKVRFSEKVTVHFLAVWAGPAQAARQGPWEQLARDRSRFARRITQAQEELSPCLTPAARARAWARLRNPPLAPIPALTQTLPSSSVPSSPVQTTPLSQAVATPSRSSAAAAAALDLSGRRG

SEQ ID NO: 10083 - protein, 12 aa, Homo sapiens
MDGSGEQPRGGG

SEQ ID NO: 10084 - protein, 54 aa, Homo sapiens
LVSIMATVTATTKVPEIRDVTRIERIGAHSHIRGLGLDDALEPRQLPDVVEMPW

SEQ ID NO: 10085 - protein, 259 aa, Homo sapiens
LVSIMATVTATTKVPEIRDVTRIERIGAHSHIRGLGLDDALEPRQASQGMVGQLAARRAAGVVLEMIREGKIAGRAVLIAGQPGTGKTAIAMGMAQALGPDTPFTAIAGSEIFSLEMSKTEALTQAFRRSIGVRIKEETEIIEGEVVEIQIDRPATGTGSKVGKLTLKTTEMETIYDLGTKMIESLTKDKVQAGDVITIDKATGKISKLGRSFTRARDYDAMGSQVRPGLPGSPRPQHWGVFISSITPLTHGVWIFLLP

SEQ ID NO: 10086 - protein, 263 aa, Homo sapiens
LVSIMATVTATTKVPEIRDVTRIERIGAHSHIRGLGLDDALEPRQASQGMVGQLAARRAAGVVLEMIREGKIAGRAVLIAGQPGTGKTAIAMGMAQALGPDTPFTAIAGSEIFSLEMSKTEALTQAFRRSIGVRIKEETEIIEGEVVEIQIDRPATGTGSKVGKLTLKTTEMETIYDLGTKMIESLTKDKGRDHHRQGDGQDLQAGPLLHTRPRLRRYGLPDQVRAVPRWGAPETQGGGAHRVPARDRRHQLSHPGLPGALLR

SEQ ID NO: 10087 - protein, 396 aa, Homo sapiens
LTATTKVPEIRDVTRIERIGAHSHIRGLGLDDALEPRQASQGMVGQLAARRAAGVVLEMIREGKIAGRAVLIAGQPGTGKTAIAMGMAQALGPDTPFTAIAGSEIFSLEMSKTEALTQAFRRSIGVRIKEETEIIEGEVVEIQIDRPATGTGSKVGKLTLKTTEMETIYDLGTKMIESLTKDKVQAGDVITIDKATGKISKLGRSFTRARDYDAMGSQTKFVQCPDGELQKRKEVVHTVSLHEIDVINSRTQGFLALFSGDTGEIKSEVREQINAKVAEWREEGKAEIIPGVLFIDEVHMLDIESFSFLNRALESDMAPVLIMATNRGITRIRGTSYQSPHGIPIDLLDRLLIVSTTPYSEKDTKQILRIRVQKCRWMTSSGSTHSSWTSPAPRST

SEQ ID NO: 10088 - protein, 467 aa, Homo sapiens
LVSIMATVTATTKVPEIRDVTRIERIGAHSHIRGLGLDDALEPRQASQGMVGQLAARRAAGVVLEMIREGKIAGRAVLIAGQPGTGKTAIAMGMAQALGPDTPFTAIAGSEIFSLEMSKTEALTQAFRRSIGVRIKEETEIIEGEVVEIQIDRPATGTGSKVGKLTLKTTEMETIYDLGTKMIESLTKDKVQAGDVITIDKATGKISKLGRSFTRARDYDAMGSQTKFVQCPDGELQKRKEVVHTVSLHEIDVINSRTQGFLALFSGDTGEIKSEVREQINAKVAEWREEGKAEIIPGVLFIDEVHMLDIESFSFLNRALESDMAPVLIMATNRGITRIRGTSYQSPHGIPIDLLDRLLIVSTTPYSEKDTKQILRIRCEEEDVEMSEDAYTVLTRIGLETSLRYAIQLITAASLVCRKRKGTEVQVDDIKRVYSLFLDESRSTQYMKEYQDAFLFNELKGETMDTS

SEQ ID NO: 10089 - protein, 429 aa, Homo sapiens
MCASHPQASQGMVGQLAARRAAGVVLEMIREGKIAGRAVLIAGQPGTGKTAIAMGMAQALGPDTPFTAIAGSEIFSLEMSKTEALTQAFRRSIGVRIKEETEIIEGEVVEIQIDRPATGTGSKVGKLTLKTTEMETIYDLGTKMIESLTKDKVQAGDVITIDKATGKISKLGRSFTRARDYDAMGSQTKFVQCPDGELQKRKEVVHTVSLHEIDVINSRTQGFLALFSGDTGEIKSEVREQINAKVAEWREEGKAEIIPGVLFIDEVHMLDIESFSFLNRALESDMAPVLIMATNRGITRIRGTSYQSPHGIPIDLLDRLLIVSTTPYSEKDTKQILRIRCEEEDVEMSEDAYTVLTRIGLETSLRYAIQLITAASLVCRKRKGTEVQVDDIKRVYSLFLDESRSTQYMKEYQDAFLFNELKGETMDTS

SEQ ID NO: 10090 - protein, 20 aa, Homo sapiens
LSPPLSAPLLCGEWTAYPTR

SEQ ID NO: 10091 - protein, 67 aa, Homo sapiens
LFNPQFAWSPPPSHSPGDPRGCVPLLLSPLPRDLGLSSTASCPHLSAYHHPQDYFSPKPQINPLRFW

SEQ ID NO: 10092 - protein, 71 aa, Homo sapiens
LPKMAEVQVLVLDGRGHLLGRLAAIVAKQVLLGRKVVVVRCEGINISGNFYRNKCKLGPGRSTGEGLPVGC

SEQ ID NO: 10093 - protein, 133 aa, Homo sapiens
LPKMAEVQVLVLDGRGHLLGRLAAIVAKQVLLGRKVVVVRCEGINISGNFYRNKLKYLAFLRKRMNTNPSRGPYHFRAPSRIFWRTVRGMLPHKTKRGQAALDRLKVFDGIPPPYDKVSYAKPHRQRPYLWRP

SEQ ID NO: 10094 - protein, 206 aa, Homo sapiens
LPKMAEVQVLVLDGRGHLLGRLAAIVAKQVLLGRKVVVVRCEGINISGNFYRNKLKYLAFLRKRMNTNPSRGPYHFRAPSRIFWRTVRGMLPHKTKRGQAALDRLKVFDGIPPPYDKKKRMVVPAALKVVRLKPTRKFAYLGRLAHEVGWKYQAVTATLEEKRKEKAKIHYRKKKQLMRLRKQAEKNVEKKIDKYTEVLKTHGLLV

SEQ ID NO: 10095 - protein, 152 aa, Homo sapiens
VKYLAFLRKRMNTNPSRGPYHFRAPSRIFWRTVRGMLPHKTKRGQAALDRLKVFDGIPPPYDKKKRMVVPAALKVVRLKPTRKFAYLGRLAHEVGWKYQAVTATLEEKRKEKAKIHYRKKKQLMRLRKQAEKNVEKKIDKYTEVLKTHGLLV

SEQ ID NO: 10096 - protein, 65 aa, Homo sapiens
VKYLAFLRKRMNTNPSRGPYHFRAPSRIFWRTVRGEQSVGTAGGDGQAAGDENFSHSHSSFPTMR

SEQ ID NO: 10097 - protein, 97 aa, Homo sapiens
LLPLSFFQAAGKMADIQTERAYQKQPTIFQNKKRVLLGETGKEKLPRYYKNIGLGFKTPKEVRGTSEERRGTWRSCTCAHDELPCLHLSGFWGCWEL

SEQ ID NO: 10098 - protein, 117 aa, Homo sapiens
LLPLSFFQAAGKMADIQTERAYQKQPTIFQNKKRVLLGETGKEKLPRYYKNIGLGFKTPKEAIEGTYIDKKCPFTGNVSIRGRILSGKCGSYWCLGPEILKEGSWGPDSWVLGERGG

SEQ ID NO: 10099 - protein, 170 aa, Homo sapiens
LLPLSFFQAAGKMADIQTERAYQKQPTIFQNKKRVLLGETGKEKLPRYYKNIGLGFKTPKEAIEGTYIDKKCPFTGNVSIRGRILSGVVTKMKMQRTIVIRRDYLHYIRKYNRFEKRHKNMSVHLSPCFRDVQIGDIVTVGECRPLSKTVRFNVLKVTKAAGTKKQFQKF

SEQ ID NO: 10100 - protein, 157 aa, Homo sapiens
LDARTERAYQKQPTIFQNKKRVLLGETGKEKLPRYYKNIGLGFKTPKEAIEGTYIDKKCPFTGNVSIRGRILSGVVTKMKMQRTIVIRRDYLHYIRKYNRFEKRHKNMSVHLSPCFRDVQIGDIVTVGECRPLSKTVRFNVLKVTKAAGTKKQFQKF

SEQ ID NO: 10101 - protein, 150 aa, Homo sapiens
LADDVCFHDGLQMPTWALLRKPLGKTDAGNGAFWDPCSAASESQHALGYLWPSFPWDLTYDRPPLLGVVTKMKMQRTIVIRRDYLHYIRKYNRFEKRHKNMSVHLSPCFRDVQIGDIVTVGECRPLSKTVRFNVLKVTKAAGTKKQFQKF

SEQ ID NO: 10102 - protein, 141 aa, Homo sapiens
LFLSAESHLSLLYHLTAVSSPAPGTPAFWVSGWLGPQQYLSYNSLRGEAEPCGAWVWENQVSWYWEKETTDLRIKEKLFLEAFKALGGKGEIPVWRGKGPGPCSGAPLTCVWAPQVPTLCRACWAVNWALTTPRCPPPSSP

SEQ ID NO: 10103 - protein, 176 aa, Homo sapiens
LYHLTAVSSPAPGTPAFWVSGWLGPQQYLSYNSLRGEAEPCGAWVWENQVSWYWEKETTDLRIKEKLFLEAFKALGGKGPYTLQGLLGCELGPDNTSVPTAKFALNGEEFMNFDLKQGTWGGDWPEALAISQRWQQQDKAANKELTFLLFSCPHRLREHLERGRGNLEWKGTCTVA

SEQ ID NO: 10104 - protein, 274 aa, Homo sapiens
LEGQGAGSMLRGPAYLCLGAPGPYTLQGLLGCELGPDNTSVPTAKFALNGEEFMNFDLKQGTWGGDWPEALAISQRWQQQDKAANKELTFLLFSCPHRLREHLERGRGNLEWKEPPSMRLKARPSSPGFSVLTCSAFSFYPPELQLRFLRNGLAAGTGQGDFGPNSDGSFHASSSLTVKSGDEHHYCCIVQHAGLAQPLRVELGEVPPGGDAPGFPLPCLTAAPVLPESDLPPHCCHLLESDCLEPHACQCPQNLMACPSQGQLPSVSCCFWPH

SEQ ID NO: 10105 - protein, 241 aa, Homo sapiens
LGWGLARGPGYQSAVAAAGQGGQQGAHLPAILLPAPPAGAPGEGPRKPGVEGLLDKDRYQLGMCTDIHSKCHKGEVETQPEPPSMRLKARPSSPGFSVLTCSAFSFYPPELQLRFLRNGLAAGTGQGDFGPNSDGSFHASSSLTVKSGDEHHYCCIVQHAGLAQPLRVELGEVPPGGDAPGFPLPCLTAAPVLPESDLPPHCCHLLESDCLEPHACQCPQNLMACPSQGQLPSVSCCFWPH

SEQ ID NO: 10106 - protein, 228 aa, Homo sapiens
LKGTWAVMPSPRQLLKSLPFIFFFELGSCSVAQTGVECSGTVIAPCSLGLPSSRDPPASALQVAGTIEPPSMRLKARPSSPGFSVLTCSAFSFYPPELQLRFLRNGLAAGTGQGDFGPNSDGSFHASSSLTVKSGDEHHYCCIVQHAGLAQPLRVELGEVPPGGDAPGFPLPCLTAAPVLPESDLPPHCCHLLESDCLEPHACQCPQNLMACPSQGQLPSVSCCFWPH

SEQ ID NO: 10107 - protein, 109 aa, Homo sapiens
LLSHGYLYEREAILEYILHQKKEIARQMKVAPPVPMSSTQPGGHVGGPHEHPSLSLLPPHSAGWPRVVWNCSTAQATAVRQAGLSSGHGFTSPVLTHCPSIDMGSSAFP

SEQ ID NO: 10108 - protein, 49 aa, Homo sapiens [sequence omitted]

SEQ ID NO: 10109 - protein, 128 aa, Homo sapiens
VRRRGKVELIKFVRVQWRRPQVEWRRRRWGPGPGASMAGSEELGLREDTLRVLAAFLRRGEAAGSPVPTPPRPSYSRLLCFGGPAAGTAGPRAAEISAQPRITGSPIDREGSHTAEAGGPAGGGGRSH

SEQ ID NO: 10110 - protein, 347 aa, Homo sapiens
LTRQREVSCGQAESSEKPNAEDMTSKDYYFDSYAHFGIHEEMLKDEVRTLTYRNSMFHNRHLFKDKVVLDVGSGTGILCMFAAKAGARKVIGIECSSISDYAVKIVKANKLDHVVTIIKGKVEEVELPVEKVDIIISEWMGYCLFYESMLNTVLYARDKWLAPDGLIFPDRATLYVTAIEDRQYKDYKIHWWENVYGFDMSCIKDVAIKEPLVDVVDPKQLVTNACLIKEVDIYTVKVEDLTFTSPFCLQVKRNDYVHALVAYFNIEFTRCHKRTGFSTSPESPYTHWKQTVFYMEDYLTVKTGEEIFGTIGMRPNAKNNRDLDFTIDLDFKGQLCELSCSTDYRMR

SEQ ID NO: 10111 - protein, 357 aa, Homo sapiens
VRVKMAAAEAANCIMEVSCGQAESSEKPNAEDMTSKDYYFDSYAHFGIHEEMLKDEVRTLTYRNSMFHNRHLFKDKVVLDVGSGTGILCMFAAKAGARKVIGIECSSISDYAVKIVKANKLDHVVTIIKGKVEEVELPVEKVDIIISEWMGYCLFYESMLNTVLYARDKWLAPDGLIFPDRATLYVTAIEDRQYKDYKIHWWENVYGFDMSCIKDVAIKEPLVDVVDPKQLVTNACLIKEVDIYTVKVEDLTFTSPFCLQVKRNDYVHALVAYFNIEFTRCHKRTGFSTSPESPYTHWKQTVFYMEDYLTVKTGEEIFGTIGMRPNAKNNRDLDFTIDLDFKGQLCELSCSTDYRMR

SEQ ID NO: 10112 - protein, 289 aa, Homo sapiens
VRVKMAAAEAANCIMEVSCGQAESSEKPNAEDMTSKDYYFDSYAHFGIHEEMLKDEVRTLTYRNSMFHNRHLFKDKVVLDVGSGTGILCMFAAKAGARKVIGIECSSISDYAVKIVKANKLDHVVTIIKGKVEEVELPVEKVDIIISEWMGYCLFYESMLNTVLYARDKWLEVDIYTVKVEDLTFTSPFCLQVKRNDYVHALVAYFNIEFTRCHKRTGFSTSPESPYTHWKQTVFYMEDYLTVKTGEEIFGTIGMRPNAKNNRDLDFTIDLDFKGQLCELSCSTDYRMR

SEQ ID NO: 10113 - protein, 373 aa, Homo sapiens
VKMAAAEAANCIMENFVATLANGMSLQPPLEEVSCGQAESSEKPNAEDMTSKDYYFDSYAHFGIHEEMLKDEVRTLTYRNSMFHNRHLFKDKVVLDVGSGTGILCMFAAKAGARKVIGIECSSISDYAVKIVKANKLDHVVTIIKGKVEEVELPVEKVDIIISEWMGYCLFYESMLNTVLYARDKWLAPDGLIFPDRATLYVTAIEDRQYKDYKIHWWENVYGFDMSCIKDVAIKEPLVDVVDPKQLVTNACLIKEVDIYTVKVEDLTFTSPFCLQVKRNDYVHALVAYFNIEFTRCHKRTGFSTSPESPYTHWKQTVFYMEDYLTVKTGEEIFGTIGMRPNAKNNRDLDFTIDLDFKGQLCELSCSTDYRMR

SEQ ID NO: 10114 - protein, 136 aa, Homo sapiens
MCEPGEAGWLTGGSCRGGEVDIYTVKVEDLTFTSPFCLQVKRNDYVHALVAYFNIEFTRCHKRTGFSTSPESPYTHWKQTVFYMEDYLTVKTGEEIFGTIGMRPNAKNNRDLDFTIDLDFKGQLCELSCSTDYRMR

SEQ ID NO: 10115 - protein, 59 aa, Homo sapiens
VVRAVRSRSWPASPRGPQPPRIRARSAPPMLRRYFGLHTLLRTQKMHMLFRNRKVYLGL

SEQ ID NO: 10116 - protein, 179 aa, Homo sapiens
LGKAEWAPCHPPDSQDSGSLCFCFRWLLIWFKREFPFPDVLRLWEVLWTGLPGPNLHLLVACAILDMERDTLMLSGFGSNEILKHINELTMKLSVEDVLTRAEALHRQLTACPELPHNVQEILGLAPPAEPHSPSPTASPLPLSPTRAPPTPPPSTDTAPQPDSSLEILPEEEDEGADS

SEQ ID NO: 10117 - protein, 108 aa, Homo sapiens
LSADWRLTHPLPQHINELTMKLSVEDVLTRAEALHRQLTACPELPHNVQEILGLAPPAEPHSPSPTASPLPLSPTRAPPTPPPSTDTAPQPDSSLEILPEEEDEGADS

SEQ ID NO: 10118 - protein, 576 aa, Homo sapiens
MQHHLPPRVMAPLALHLLVLVPILLSLVASQDWKAERSQDPFEKCMQDPDYEQLLKVVTWGLNRTLKPQRVIVVGAGVAGLVAAKVLSDAGHKVTILEADNRIGGRIFTYRDQNTGWIGELGAMRMPSSHRILHKLCQGLGLNLTKFTQYDKNTWTEVHEVKLRNYVVEKVPEKLGYALRPQEKGHSPEDIYQMALNQALKDLKALGCRKAMKKFERHTLLEYLLGEGNLSRPAVQLLGDVMSEDGFFYLSFAEALRAHSCLSDRLQYSRIVGGWDLLPRALLSSLSGLVLLNAPVVAMTQGPHDVHVQIETSPPARNLKVLKADVVLLTASGPAVKRITFSPPLPRHMQEALRRLHYVPATKVFLSFRRPFWREEHIEGGHSNTDRPSRMIFYPPPREGALLLASYTWSDAAAAFAGLSREEALRLALDDVAALHGPVVRQLWDGTGVVKRWAEDQHSQGGFVVQPPALWQTEKDDWTVPYGRIYFAGEHTAYPHGWVETAVKSALRAAIKINSRKGPASDTASPEGHASDMEGQGHVHGVASSPSHDLAKEEGSHPPVQGQLSLQNTTHTRTSH

SEQ ID NO: 10119 - protein, 29 aa, Homo sapiens
LKKEGGSGERRREIFPRLQTPTDLLWEPE

SEQ ID NO: 10120 - protein, 139 aa, Homo sapiens
VLRHPVYICPQSPGPPHSLSSDHSLFSLQCRRLCLRSPGHGSVASTPLCPRPVSALTTPALSAPTFFLQPRPPPPLLAAAMESSTFALVPVFAHLSILQSLVPAAGAASPVAISAQHLCYSHVTPGDPGAGAGQGPAPS

SEQ ID NO: 10121 - protein, 43 aa, Homo sapiens
LGLQGNRSSSLRERPSTRPPRAAMSPAPRCCLERGGTWREAAP

SEQ ID NO: 10122 - protein, 61 aa, Homo sapiens
LSSGGVSGAKEEDEEKQSKGTQGNRSSSLRERPSTRPPRAAMSPAPRCCLERGGTWREAAP

SEQ ID NO: 10123 - protein, 75 aa, Homo sapiens
LPVTPGVGVAAAMARKALPPTHLGQSWFCSCCRDTELAISALRARTATGSPGSCRCTAGPLPCASALESCCCRVT

SEQ ID NO: 10124 - protein, 83 aa, Homo sapiens
MPIQHPSRHSAVSCLGVAAAMARKALPPTHLGQSWFCSCCRDTELAISALRARTATGSPGSCRCTAGPLPCASALESCCCRVT

SEQ ID NO: 10125 - protein, 25 aa, Homo sapiens
LPVTPGVGEKADVDSIPPDTLLFPA

SEQ ID NO: 10126 - protein, 66 aa, Homo sapiens
MACGLADCFLPHSHCVFLCYRCSFKLRTTHHAYPGAEGPDHHSLRTEEAACYSWCCIPPDTLLFPA

SEQ ID NO: 10127 - protein, 86 aa, Homo sapiens
VCIGRLGRSAGWRRGPALRAARTIKWRVLQPAPASEREMLGCSFKLRTTHHAYPGAEGPDHHSLRTEEAACYSWCCIPPDTLLFPA

SEQ ID NO: 10128 - protein, 38 aa, Homo sapiens
MLGCSFKLRTTHHAYPGAEGPDHHSLRTEEAACYSWCW

SEQ ID NO: 10129 - protein, 29 aa, Homo sapiens
MLPLLLPLPLLWAGPSLRMQDSGWRCQSP

SEQ ID NO: 10130 - protein, 64 aa, Homo sapiens
LCLLHLQGHQHQFQTGIVSDHPAEAGPISEDEQELHYAVLHFHKVQPQEPKVTDTEYSEIKIHK

SEQ ID NO: 10131 - protein, 60 aa, Homo sapiens
LCIGHQHQFQTGIVSDHPAEAGPISEDEQELHYAVLHFHKVQPQEPKVTDTEYSEIKIHK

SEQ ID NO: 10132 - protein, 390 aa, Homo sapiens
LLCAEGVELRGLVASQFLFCEQPRSRAPPQPPVPPRSPSPPLPSPSLLMQGAQEASASEMLPLLLPLLWAGALAQERRFQLEGPESLTVQEGLCVLVPCRLPTTLPASYYGYGYWFLEGADVPVATNDPDEEVQEETRGRFHLLWDPRRKNCSLSIRDARRRDNAAYFFRLKSKWMKYGYTSSKLSVRVMGTLESGHPSNLTCSVPWVCEQGTPPIFSWMSAAPTSLGPRTTQSSVLTITPRPQDHSTNLTCQVTFPGAGVTMERTIQLNVSYAPQKVAISIFQGNSAAFKILQNTSSLPVLEGQALRLLCDADGNPPAHLSWFQGFPALNATPISNTGVLELPQVGSAEEGDFTCRAQHPLGSLQISLSLFVHWSSAPVPDRHSFRPPC

SEQ ID NO: 10133 - protein, 415 aa, Homo sapiens
LLFFGQVSGSQSFRLLCAEGVELRGLVASQFLFCEQPRSRAPPQPPVPPRSPSPPLPSPSLLMQGAQEASASEMLPLLLPLLWAGALAQERRFQLEGPESLTVQEGLCVLVPCRLPTTLPASYYGYGYWFLEGADVPVATNDPDEEVQEETRGRFHLLWDPRRKNCSLSIRDARRRDNAAYFFRLKSKWMKYGYTSSKLSVRVMALTHRPNISIPGTLESGHPSNLTCSVPWVCEQGTPPIFSWMSAAPTSLGPRTTQSSVLTITPRPQDHSTNLTCQVTFPGAGVTMERTIQLNVSYAPQKVAISIFQGNSAAFKILQNTSSLPVLEGQALRLLCDADGNPPAHLSWFQGFPALNATPISNTGVLELPQVGSAEEGDFTCRAQHPLGSLQISLSLFVHWSSAPVPDRHSFRPPC

SEQ ID NO: 10134 - protein, 375 aa, Homo sapiens
LLCAEGVELRGLVASQFLFCEQPRSRAPPQPPVPPRSPSPPLPSPSLLMQGAQEASASEMLPLLLPLLWAASYYGYGYWFLEGADVPVATNDPDEEVQEETRGRFHLLWDPRRKNCSLSIRDARRRDNAAYFFRLKSKWMKYGYTSSKLSVRVMALTHRPNISIPGTLESGHPSNLTCSVPWVCEQGTPPIFSWMSAAPTSLGPRTTQSSVLTITPRPQDHSTNLTCQVTFPGAGVTMERTIQLNVSYAPQKVAISIFQGNSAAFKILQNTSSLPVLEGQALRLLCDADGNPPAHLSWFQGFPALNATPISNTGVLELPQVGSAEEGDFTCRAQHPLGSLQISLSLFVHCECGGRCARVWAAGRELHSIQRRGPC

SEQ ID NO: 10135 - protein, 411 aa, Homo sapiens
LLCAEGVELRGLVASQFLFCEQPRSRAPPQPPVPPRSPSPPLPSPSLLMQGAQEASASEMLPLLLPLLWAGALAQERRFQLEGPESLTVQEGLCVLVPCRLPTTLPASYYGYGYWFLEGADVPVATNDPDEEVQEETRGRFHLLWDPRRKNCSLSIRDARRRDNAAYFFRLKSKWMKYGYTSSKLSVRVMALTHRPNISIPGTLESGHPSNLTCSVPWVCEQGTPPIFSWMSAAPTSLGPRTTQSSVLTITPRPQDHSTNLTCQVTFPGAGVTMERTIQLNVSYAPQKVAISIFQGNSAAFKILQNTSSLPVLEGQALRLLCDADGNPPAHLSWFQGFPALNATPISNTGVLELPQVGSAEEGDFTCRAQHPLGSLQISLSLFVHCECGGRCARVWAAGRELHSIQRRGPC

SEQ ID NO: 10136 - protein, 41 aa, Homo sapiens
LSLPVVSGEVRARSSGPGSQKQNNSSEAMKEEEGGCWPWIS

SEQ ID NO: 10137 - protein, 663 aa, Homo sapiens
LCFSLLNSCDYRHGPPYLANFYISSKCMMKEVLSTGQGNTEVIHTGTLQRHESHHIGDFCFQEIEKEIHDIEFQCQEDERNGLEAPMTKIKKLTGSTDQHDHRHAGNKPIKDQLGSSFYSHLPELHIFQIKGEIGNQLEKSTNDAPSVSTFQRISCRPQTQISNNYGNNPLNSSLLPQKQEVHMREKSFQCNKSGKAFNCSSLLRKHQIPHLGDKQYKCDVCGKLFNHEQYLACHDRCHTVEKPYKCKECGKTFSQESSLTCHRRLHTGVKRYNCNECGKIFGQNSALLIDKAIDTGENPYKCNECDKAFNQQSQLSHHRIHTGEKPYKCEECDKVFSRKSTIETHKRIHTGEKPYRCKVCDTAFTWHSQLARHRRIHTAKKTYKCNECGKTFSHKSSLVCHHRLHGGEKSYKCKVCDKAFVWSSQLAKHTRIDCGEKPYKCNECGKTFGQNSDLLIHKSIHTGEQPYKCDECEKVFSRKSSLETHKIGHTGEKPYKCKVCDKAFACHSYLAKHTRIHSGEKPYKCNECSKTFSHRSYLVCHHRVHSGEKPYKCNECSKTFSRRSSLHCHRRLHSGEKPYKCNECGNTFRHCSSLIYHRRLHTGEKSYKCTICDKAFVRNSLLSRHTRIHTAEKPYKCNECGKAFNQQSHLSRHHRIHTGEKP

SEQ ID NO: 10138 - protein, 737 aa, Homo sapiens
LENFIYACGLELLFSLLSFLFFFSLRQIFGLSPRLKCSGVTSAHCNLHFPGSSNSPASAFQVAGTTDISSKCMMKTFFSTGQGNTEAFHTGTLQRQASHHIGDFCFQKIEKDIHGFQFQWKEDETNDHAAPMTEIKELTGSTGQHDQRHAGNKHIKDQLGLSFHSHLPELHIFQPEGKIGNQVEKSINNASSVSTSQRICCRPKTHISNKYGNNSLHSSLLTQKRNVHMREKSFQCIESGKSFNCSSLLKKHQITHLEEKQCKCDVYGKVFNQKRYLACHRRSHIDEKPYKCNECGKIFGHNTSLFLHKALHTADKPYECEECDKVFSRKSHLETHKIIYTGGKPYKCKVCDKAFTCNSYLAKHTIIHTGEKPYKCNECGKVFNRLSTLARHRRLHTGEKPYECEECEKVFSRKSHLERHKRIHTGEKPYKCKVCDKAFAYNSYLAKHSIIHTGEKPYKCNECGKVFNQQSTLARHHRLHTAEKPYKCEECDKVFRCKSHLERHRRIHTGEKPYKCKVCDKAFRSDSCLTEHQRVHTGEKPYMCNECGKVFSTKANLACHHKLHTAEKPYKCEECEKVFSRKSHMERHRRIHTGEKPYKCKVCDKAFRRDSHLAQHQRVHTGEKPYKCNECGKTFRQTSSLIIHRRLHTGEKPYKCNECGKTFSQMSSLVYHHRLHSGEKPYKCNECGKVFNQQAHLAQHQRVHTGEKPYKCNECGKTFSQMSNLVYHHRLHSGEKP

SEQ ID NO: 10139 - protein, 511 aa, Homo sapiens
LSSRLKYSGVISAHCNLHFPGSSNSPASAFQVPGTTDISSKCMLKTLSSTGQGNTEVIHTGTLHRQASHHIGEFCFHEIEKDIHGFEFQWKEDETNGHAAPMTEIKELAGSTGQHDQRHAGNKRIKDQLGSSFHLHLPEPHIFQSEGKIGNQVEKSINNASSVSTSQRICCRPKTHISNKYGNNSLHSSLLTQKWEVHMREKSFECIQSFKSFNCSSLLKKHQIIHLEEKQCKCDVCGKVFNQKRYLACHRRCHTGEKPYKCNECGKTFGHNSSLFIHKALHTGEKPYECEECDKVFSRKSHLERHKRIHTGEKPYKCKVCDEAFAYNSYLAKHTILHTGEKPYTCNECGKVFNRLSTLARHHRLHTGEKPYKCEECDKVFSRKSHLERHRRIHSGEKPYKCEECCKVFSRKSNLERHRRIHTGEKPYKCKVCDKAFQRDSHLAQHQRVHTGEKPYKCNECGKTFGQTSSLIIHRRLHTGEKPYKCNECGKTFSQMSSLVYHHRLHSGEKP

SEQ ID NO: 10140 - protein, 64 aa, Homo sapiens
LRRQAGWDCSAASCPASSSGPGLKRWGAAAVGLGLTLFTCGPHTLHSLVTILGTWALIQAQPCW

SEQ ID NO: 10141 - protein, 167 aa, Homo sapiens
LLRRRRGSGANMPVARSWVCRKTYVTPRRPFEKSRLDQELKLIGEYGLRNKREVWRVKFTLAKIRKAARELLTLDEKDPRRLFEGNALLRRLVRIGVLDEGKMKLDYILGLKIEDFLERRLQTQVFKLGLAKSIHHARVLIRQRHIRYHLGWAPESSSTCPSDGCPH

SEQ ID NO: 10142 - protein, 150 aa, Homo sapiens
LLRRRRGSGANMPVARSWVCRKTYVTPRRPFEKSRLDQELKLIGEYGLRNKREVWRVKFTLAKIRKAARELLTLDEKDPRRLFEGNALLRRLVRIGVLDEGKMKLDYILGLKIEDFLERRLQTQVFKLGLAKSIHHARVLIRQRHISPRR

SEQ ID NO: 10143 - protein, 90 aa, Homo sapiens
LLRRRRGSGANMPVARSWVCRKTYVTPRRPFEKSRLDQELKLIGEYGLRNKREVWRVKFTLAKIRKAARELLTLDEKDPRRLFEGSASRW

SEQ ID NO: 10144 - protein, 205 aa, Homo sapiens
LLRRRRGSGANMPVARSWVCRKTYVTPRRPFEKSRLDQELKLIGEYGLRNKREVWRVKFTLAKIRKAARELLTLDEKDPRRLFEGNALLRRLVRIGVLDEGKMKLDYILGLKIEDFLERRLQTQVFKLGLAKSIHHARVLIRQRHIRVRKQVVNIPSFIVRLDSQKHIDFSLRSPYGGGRPGRVKRKNAKKGQGGAGAGDDEEED

SEQ ID NO: 10145 - protein, 88 aa, Homo sapiens
LLRRRRGSGANMPVARSWVCRKTYVTPRRPFEKSRLDQELKLIGEYGLRNKREVWRVKFTLAKIRKAARELLTLDEKDPRRLFEGGSL

SEQ ID NO: 10146 - protein, 166 aa, Homo sapiens
VRRRRGSGANMPVARSWVCRKTYVTPRRPFEKSRLDQELKLIGEYGLRNKREVWRVKFTLAKIRKAARELLTLDEKDPRRLFEGNALLRRLVRIGVLDEGKMKLDYILGLKIEDFLERRLQTQVFKLGLAKSIHHARVLIRQRHIRYHLGWAPESSSTCPSDGCPH

SEQ ID NO: 10147 - protein, 149 aa, Homo sapiens
VRRRRGSGANMPVARSWVCRKTYVTPRRPFEKSRLDQELKLIGEYGLRNKREVWRVKFTLAKIRKAARELLTLDEKDPRRLFEGNALLRRLVRIGVLDEGKMKLDYILGLKIEDFLERRLQTQVFKLGLAKSIHHARVLIRQRHISPRR

SEQ ID NO: 10148 - protein, 159 aa, Homo sapiens
LDGGPGLPSFHERRRGSGANMPVARSWVCRKTYVTPRRPFEKSRLDQELKLIGEYGLRNKREVWRVKFTLAKIRKAARELLTLDEKDPRRLFEGNALLRRLVRIGVLDEGKMKLDYILGLKIEDFLERRLQTQVFKLGLAKSIHHARVLIRQRHISPRR

SEQ ID NO: 10149 - protein, 214 aa, Homo sapiens
LDGGPGLPSFHERRRGSGANMPVARSWVCRKTYVTPRRPFEKSRLDQELKLIGEYGLRNKREVWRVKFTLAKIRKAARELLTLDEKDPRRLFEGNALLRRLVRIGVLDEGKMKLDYILGLKIEDFLERRLQTQVFKLGLAKSIHHARVLIRQRHIRVRKQVVNIPSFIVRLDSQKHIDFSLRSPYGGGRPGRVKRKNAKKGQGGAGAGDDEEED

SEQ ID NO: 10150 - protein, 88 aa, Homo sapiens [sequence omitted]

SEQ ID NO: 10151 - protein, 139 aa, Homo sapiens
LNLPPPAPLMVALTKPAVPISYAALGGDGCELTQRVQIHPCTQLTRELGQPLAPIAQRKGHCGSSRTPCEGLCQACGQLDRVRKQVVNIPSFIVRLDSQKHIDFSLRSPYGGGRPGRVKRKNAKKGQGGAGAGDDEEED

SEQ ID NO: 10152 - protein, 104 aa, Homo sapiens [sequence omitted]

SEQ ID NO: 10153 - protein, 90 aa, Homo sapiens
LPLRFTFIFPLRPDLAVDVLERTADKATVNGLPEKDRETDTSALAAGSSQEVTYAQLDHWALTQRTARAVSPQSTKPMAESITYAAVARH

SEQ ID NO: 10154 - protein, 149 aa, Homo sapiens
LLQSSVLALVRLRPGCTAGTWAMSPHPTALLGLVLCLAQTIHTQEEDLPRPSISAEPGTVIPLGSHVTFVCRGPVGVQTFRLERDSRSTYNDTEDVSQASPSESEARFRIDSKALEARTPRTQSPAPQLDPRRGRRTTVTMSMHLLPKA

SEQ ID NO: 10155 - protein, 109 aa, Homo sapiens
LGLLFQCSAWPRPSTRRRWTLRSCSASLLEDLPRPSISAEPGTVIPLGSHVTFVCRGPVGVQTFRLERDSRSTYNDTEDVSQASPSESEARFRIDSVRKEMPGLSLHLL

SEQ ID NO: 10156 - protein, 127 aa, Homo sapiens
LCLLQSSVLALVRLRPGCTAGTWAMSPHPTALLGLVLCLAQTIHTQEEDLPRPSISAEPGTVIPLGSHVTFVCRGPVGVQTFRLERDSRSTYNDTEDVSQASPSESEARFRIDSVRKEMPGLSLHLL

SEQ ID NO: 10157 - protein, 126 aa, Homo sapiens
LCLLQSSVLALVRLRPGCTAGTWAMSPHPTALLGLVLCLAQTIHTQEDLPRPSISAEPGTVIPLGSHVTFVCRGPVGVQTFRLERDSRSTYNDTEDVSQASPSESEARFRIDSVRKEMPGLSLHLL

SEQ ID NO: 10158 - protein, 164 aa, Homo sapiens
LVNPGRERRTRLKYCSEDLVSPQRRLEVAARGKPSSSTIGAQARLPRLIFRTKPGTGRESYEDDHRPEVFLPGLHPRQKMEREMEDLPRPSISAEPGTVIPLGSHVTFVCRGPVGVQTFRLERDSRSTYNDTEDVSQASPSESEARFRIDSVRKEMPGLSLHLL

SEQ ID NO: 10159 - protein, 185 aa, Homo sapiens
LCEAVAVEAPRAGGPRPAHPVCLCLLQSSGTGAMSPHLTALLGLVLCLAQTIHTQEGALPRPSISAEPGTVISPGSHVTFMCRGPVGVQTFRLEREDRAKYKDSYNVFRLGPSESEARFHIDSVSEGNAGLYRCLYYKPPGWSEHSDFLELLVKESSGGPDSPDTEPGSSAGTVPGTEASGFDAP

SEQ ID NO: 10160 - protein, 225 aa, Homo sapiens
LSLLSGLFTKPSISAHPSSLVHAGARVSLRCHSELAFDEFILYKEGHIQHSQQLDQGMEAGIHYVEAVFSMGPVTPAHAGAYRCCGCFSHSRYEWSAPSDPLDIVITGKYKKPSLSTQVDPMMRLGEKLTLFCSSEISFDQYHLFRHGVAHGQWLSGGQRHREAFQANFSVGRATPVPGGTYRCYGSFNDSPYKPPVTRCNFTPQETLRVLLCHSQNPPLNLVSK

SEQ ID NO: 10161 - protein, 198 aa, Homo sapiens
LSEFSAEAAEHHRAASEVGTDNSCRARPERKRKCVYGIKGVASPLAFLFPSQVAAAKGAAAMSAHLQWMVVRNCSSFLIKRNKQTYSTEPNNLKARNSFRYNGLIHRKTVGVEPAADGKGVVVVIKRRSGQRKPATSYVRTTINKNARATLSSIRHMIRKNKYRPDLRMAAIRRASAILRSQKPVMVKRKRTRPTKSS

SEQ ID NO: 10162 - protein, 42 aa, Homo sapiens
VYGLSLALLPRPQAAIRRASAILRSQKPVMVKRKRTRPTKSS

SEQ ID NO: 10163 - protein, 51 aa, Homo sapiens
VSLRFVIHGDRDPRRFLTHRPLPLQIQKLIKEPAPDSGLLGLFQGQNSLLH

SEQ ID NO: 10164 - protein, 210 aa, Homo sapiens
LRGCCTGPQPALRMLVLPSPCPQPLAFSSVETMEGPPRRTCRSPEPGPSSSIGSPQASSPPRPNHYLLIDTQGVPYTVLVDEESQREPGASGAPGQKKCYSCPVCSRVFEYMSYLQRHSITHSEVKPFECDICGKAFKRASHLARHHSIHLAGGGRPHGCPLCPRRFRDAGELAQHSRVHSGERPFQCPHCPRRFMEQNTLQKHTRWKHP

SEQ ID NO: 10165 - protein, 572 aa, Homo sapiens
LDGRASKKTPGSWLDYNDGMISAHCNLRLLGSSNSRASASRAAGITDSGSKCETKKLPPNQCNKSGQSICQKLVSAQQKAPTRKSGCNKNSVLVKPKKGHSGKKPLKCNDCGKTFSRSFSLKLHQNIHTGEKPFECSNCRKAFRQISSILLHQRIHSGKKSHECNKCGESFNQRTTLILHMRIHDGKEILDCGKALSQCQSFNIHQKIHVVGNVCQCRKCGKAFNQMSSLLLHKKIHNGKKTHKYNKCGRGFKKKSVFVVHKRIHAGEKIPENAKALSQSLQQRSHHLENPFKCRKCGKLFNRISPLMLHQRIHTSEKPYKCDKCDKFFRRLSTLILHLRIHNGEKLYRCNKCEKVCNRHSSLIQHQKVHTKKKKLFECKECGKMFSGTANLKIHQNIHSEEKPFKCNKCSKVFGRQSFLIEHQRIHTGEKPYQCEECGKAFSHRISLTRHKRIHTEDRPYECDQCGKAFSQSAHLAQHERIHTGEKPYTCKTCGKAFSQRTSLILHERSHTGEKPYECNECGKAFSSGSDLIRHQRSHSSEKPYECSKCGKAYSRSSSLIRHQNTHSEEKA

SEQ ID NO: 10166 - protein, 641 aa, Homo sapiens
LEGESQLICLSALPYQLSAHLSVWTLKGEERMPSARGKSKSKAPITFGDLAIYFSQEEWEWLSPIQKDLYEDVMLENYRNLVSLGLSFRRPNVITLLEKGKAPWMVEPVRRRRAPDSGSKCETKKLPPNQCNKSGQSICQKLVSAQQKAPTRKSGCNKNSVLVKPKKGHSGKKPLKCNDCGKTFSRSFSLKLHQNIHTGEKPFECSNCRKAFRQISSILLHQRIHSGKKSHECNKCGESFNQRTTLILHMRIHDGKEILDCGKALSQCQSFNIHQKIHVVGNVCQCRKCGKAFNQMSSLLLHKKIHNGKKTHKYNKCGRGFKKKSVFVVHKRIHAGEKIPENAKALSQSLQQRSHHLENPFKCRKCGKLFNRISPLMLHQRIHTSEKPYKCDKCDKFFRRLSTLILHLRIHNGEKLYRCNKCEKVCNRHSSLIQHQKVHTKKKKLFECKECGKMFSGTANLKIHQNIHSEEKPFKCNKCSKVFGRQSFLIEHQRIHTGEKPYQCEECGKAFSHRISLTRHKRIHTEDRPYECDQCGKAFSQSAHLAQHERIHTGEKPYTCKTCGKAFSQRTSLILHERSHTGEKPYECNECGKAFSSGSDLIRHQRSHSSEKPYECSKCGKAYSRSSSLIRHQNTHSEEKA

SEQ ID NO: 10167 - protein, 145 aa, Homo sapiens
LRSLLPRPSAPRSPGAAPWVWNAVATEEAAALRLERRCHRGGGGPERAWKPRATGQGRAQVGSVRPPGAPLSQLCGPGGDVMAAAVLTDRAQVSVTFDDVAVTFTKEEWGQLDLAQRTLYQEVMLENCGLLVSLGKAFLPPPPCR

SEQ ID NO: 10168 - protein, 165 aa, Homo sapiens
LRSLLPRPSAPRSPGAAPWVWNAVATEEAAALRLERRCHRGGGGPERAWKPRATGQGRAQVGSVRPPGAPLSQLCGPGGDVMAAAVLTDRAQVSVTFDDVAVTFTKEEWGQLDLAQRTLYQEVMLENCGLLVSLAPLQTHPGSIRCILQSNQVDTLIKIPEHTEH

SEQ ID NO: 10169 - protein, 708 aa, Homo sapiens
LRSLLPRPSAPRSPGAAPWVWNAVATEEAAALRLERRCHRGGGGPERAWKPRATGQGRAQVGSVRPPGAPLSQLCGPGGDVMAAAVLTDRAQVSVTFDDVAVTFTKEEWGQLDLAQRTLYQEVMLENCGLLVSLGCPVPKAELICHLEHGQEPWTRKEDLSQDTCPGDKGKPKTTEPTTCEPALSEGISLQGQVTQGNSVDSQLGQAEDQDGLSEMQEGHFRPGIDPQEKSPGKMSPECDGLGTADGVCSRIGQEQVSPGDRVRSHNSCESGKDPMIQEEENNFKCSECGKVFNKKHLLAGHEKIHSGVKPYECTECGKTFIKSTHLLQHHMIHTGERPYECMECGKAFNRKSYLTQHQRIHSGEKPYKCNECGKAFTHRSNFVLHNRRHTGEKSFVCTECGQVFRHRPGFLRHYVVHSGENPYECLECGKVFKHRSYLMWHQQTHTGEKPYECSECGKVFLESAALIHHYVIHTGEKPFECLECGKAFNHRSYLKRHQRIHTGEKPFVCSECGKAFTHCSTFILHKRAHTGEKPFECKECGKAFSNRKDLIRHFSIHTGEKPYECVECGKAFTRMSGLTRHKRIHSGEKPYECVECGKSFCWSTNLIRHAIIHTGEKPYKCSECGKAFSRSSSLTQHQRMHTGKNPISVTDVGRPFTSGQTSVTLRELLLGKDFLNVTTEANILPEETSSSASDQPYQRETPQVSSL

SEQ ID NO: 10170 - protein, 741 aa, Homo sapiens
LLTHGPPGEPVTFKDVAVDFTQEEWGQLDLVQRTLYRDVMLETYGHLLSVGNQIAKPEVISLLEQGEEPWSVEQACPQRTCPEWVRNLESKALIPAQSIFEEEQSHGMKLERYIWDDPWFSRLEVLGCKDQLEMYHMNQSTAMRQMVFMQKQVLSQRSSEFCGLGAEFSQNLNFVPSQRVSQIEHFYKPDTHAQSWRCDSAIMYADKVTCENNDYDKTVYQSIQPIYPARIQTGDNLFKCTDAVKSFNHIIHFGDHKGIHTGEKLYEYKECHQIFNQSPSFNEHPRLHVGENQYNYKEYENIFYFSSFMEHQKIGTVEKAYKYNEWEKVFGYDSFLTQHTSTYTAEKPYDYNECGTSFIWSSYLIQHKKTHTGEKPYECDKCGKVFRNRSALTKHERTHTGIKPYECNKCGKAFSWNSHLIVHKRIHTGEKPYVCNECGKSFNWNSHLIGHQRTHTGEKPFECTECGKSFSWSSHLIAHMRMHTGEKPFKCDECEKAFRDYSALSKHERTHSGAKPYKCTECGKSFSWSSHLIAHQRTHTGEKPYNCQECGKAFRERSALTKHEIIHSGIKPYECNKCGKSCSQMAHLVRHQRTHTGEKPYECNKCGKSFSQSCHLVAHRRIHTGEKPYKCNQCERSFNCSSHLIAHRRTHTGEKPYRCNECGKAFNESSSLIVHLRNHTGEKPYKCNHCEKAFCKNSSLIIHQRMHSGEKRFICSECGKAFSGHSALLQHQRNHSEEKLN

SEQ ID NO: 10171 - protein, 55 aa, Homo sapiens
MEVLDVPVDNLKEHGTWDMTAPSIPSGGRQSLSVRQHPAFMRTVCCLLTEPPVVY

SEQ ID NO: 10172 - protein, 218 aa, Homo sapiens
LSSDVFFLSSPCPRMTEWETAAPAVAETPDIKLFGKWSTDDVQINDISLQDYIAVKEKYAKYLPHSAGRYAAKRFRKAQCPIVERLTNSMMMHGRNNGKKLMTVRIVKHAFEIIHLLTGENPLQVLVNAIINSGPREDSTRIGRAGTVRRQAVDVSPLRRVNQAIWLLCTGAREAAFRNIKTIAECLADELINAAKGSSNSYAIKKKDELERVAKSNR

SEQ ID NO: 10173 - protein, 201 aa, Homo sapiens [sequence omitted]

SEQ ID NO: 10174 - protein, 95 aa, Homo sapiens
MMMHGRNNGKKLMTVRIVKHAFEIIHLLTGEVGLCGLVRAGCALSTPESPTECMSGLSPVWCGHSCFRYEERGGMHGAGCQAHIPLLSRTLCRSW

SEQ ID NO: 10175 - protein, 40 aa, Homo sapiens
LLCTGAREAAFRNIKTIAECLADELINAAKVGEGTPVGGS

SEQ ID NO: 10176 - protein, 28 aa, Homo sapiens
LCVSLQGSSNSYAIKKKDELERVAKSNR

SEQ ID NO: 10177 - protein, 20 aa, Homo sapiens
LRKKRGRRLREASRQQLAVP

SEQ ID NO: 10178 - protein, 29 aa, Homo sapiens
MRIYSKGCGQMNECTFFSGQKDVRIHELE

SEQ ID NO: 10179 - protein, 22 aa, Homo sapiens
LFPPLAFGRRILTCSREIWVSS

SEQ ID NO: 10180 - protein, 368 aa, Homo sapiens
LLQASATMWVLTPAAFAGKLLSVFRQPLSSLWRSLVPLFCWLRATFWLLATKRRKQQLVLRGPDETKEEEEDPPLPTTPTSVNYHFTRQCNYKCGFCFHTAKTSFVLPLEEAKRGLLLLKEAGMEKINFSGGEPFLQDRGEYLGKLVRFCKVELRLPSVSIVSNGSLIRERWFQNYGEYLDILAISCDSFDEEVNVLIGRGQGKKNHVENLQKLRRWCRDYRVAFKINSVINRFNVEEDMTEQIKALNPVRWKVFQCLLIEGENCGEDALREAERFVIGDEEFERFLERHKEVSCLVPESNQKMKDSYLILDEYMRFLNCRKGRKDPSKSILDVGVEEAIKFSGFDEKMFLKRGGKYIWSKADLKLDW

SEQ ID NO: 10181 - protein, 16 aa, Homo sapiens
VEWTSGIQAQQFLYFS

SEQ ID NO: 10182 - protein, 119 aa, Homo sapiens
LSVYKHSRTPGPGLKTFPLLPSGFLREVLFDPCRTWCPASTCQAVCQLQDVGLQTPQPVQCKACRMEFCSTCKASWHPGQGCPETMPITFLPGETRYPLYTSCHQRHGCGPGEAGMLSS

SEQ ID NO: 10183 - protein, 36 aa, Homo sapiens
LPGRQRPRHSHADPEVRNPGMGPRLRGDLLWIKQWW

SEQ ID NO: 10184 - protein, 260 aa, Homo sapiens
LSGRAGWMRGAPGNCVGAEQALARRKRAQTVAIRGHPRPPGPPGDTRAESPPDPLQSAGDDEDDEEEDEEEEIDVVTVEKRRSSSNTKAVTTFTITVRPKNAALGPGRAQSSELILKRCLPIHQQHNYAAPSPYVESEDAPPQKKIKSEASPRPLKSVIPPKAKSLSPRNSDSEDSERRRNHNILERQRRNDLRSSFLTLRDHVPELVKNEKAAKVVILKKATEYVHSLQAEEHQLLLEKEKLQARQQQLLKKIEHARTC

SEQ ID NO: 10185 - protein, 18 aa, Homo sapiens
LELLSCMLSEARRDPGES

SEQ ID NO: 10186 - protein, 92 aa, Homo sapiens
LRVPECLLWEEVPGRPASGGQSFPFCARLLYKDLTATLPTDVTVTCQGVEVLSTSWEEQRASHETLFCTKPLHQVFASFTRKGEKLDMSLVS

SEQ ID NO: 10187 - protein, 78 aa, Homo sapiens [sequence omitted]

SEQ ID NO: 10188 - protein, 51 aa, Homo sapiens
MAGYEYVSPEQLAGFDKYKPPKGWSSFCCVNRLHFSEVSTRLSCIQLRRRR

SEQ ID NO: 10189 - protein, 185 aa, Homo sapiens
LPSTGSCEARGTAFSGLPRSQPFAPGPGSPSRSRGTGRQHPLRRVMGPRRRSRKPEAPRRRSPSPTPTPGPSRRGPSLGASSHQHSRRRQGWLKEIRKLQKSTHLLIRKLPFSRLAREICVKFTRGVDFNWQAQALLALQEAAEAFLVHLFEDAYLLTLHAGRVTLFPKDVQLARRIRGLEEGLG

SEQ ID NO: 10190 - protein, 113 aa, Homo sapiens
LPSTGSCASSHQHSRRRQGWLKEIRKLQKSTHLLIRKLPFSRLAREICVKFTRGVDFNWQAQALLALQEAAEAFLVHLFEDAYLLTLHAGRVTLFPKDVQLARRIRGLEEGLG

SEQ ID NO: 10191 - protein, 90 aa, Homo sapiens
LRRVMGPRRRSRKPEAPRRRSPSPTPTPGPSRRGPSLGASSHQHSRRRQGWLKEIRKLQKSTHLLIRKLPFSRLIPFPILGDCLSSPNYW

SEQ ID NO: 10192 - protein, 118 aa, Homo sapiens
LRRVMGPRRRSRKPEAPRRRSPSPTPTPGPSRRGPSLGASSHQHSRRRQGWLKEIRKLQKSTHLLIRKLPFSRLAAEAFLVHLFEDAYLLTLHAGRVTLFPKDVQLARRIRGLEEGLG

SEQ ID NO: 10193 - protein, 116 aa, Homo sapiens
LGPKIKSQEKIMERKIHWNSWRASLSLESLFCYSLLLLLPFPTPSQAREICVKFTRGVDFNWQAQALLALQEAAEAFLVHLFEDAYLLTLHAGRVTLFPKDVQLARRIRGLEEGLG

SEQ ID NO: 10194 - protein, 56 aa, Homo sapiens
LLAGLVMAFWIGIGSIVTSMGSSMPPSPSNGSSFSLPTNLTVATVTTLMPLTTFSK

SEQ ID NO: 10195 - protein, 18 aa, Homo sapiens
VRAEKGAMLISGSTKGPS

SEQ ID NO: 10196 - protein, 16 aa, Homo sapiens
LELKRRLRGAESGVQA

SEQ ID NO: 10197 - protein, 7 aa, Homo sapiens
MHEELGM

SEQ ID NO: 10198 - protein, 152 aa, Homo sapiens
VHVEIPRRVGSGAGHAQWAGPVRVARPQLNAQLEGWLSQVQSTKRPARAIIAPHAGYTYCGSCAAHAYKQVDPSITRRIFILGPSHHVPLSRCALSSVDIYRTPLYDLRIDQKIYGELWKTGMFERMSLQTDEDEHSIEMHLPYTAKAMERV

SEQ ID NO: 10199 - protein, 559 aa, Homo sapiens
VRELRRQLWIWKFRGSRACASVRVAGEEGSLTTRKFEYHSSMECDLMETDILESLEDLGYKGPLLEDGALSQAVSAGASSPEFTKLCAWLVSELRVLCKLEENVQATNSPSEAEEFQLEVSGLLGEMNCPYLSLTSGDVTKRLLIQKNCLLLLTYLISELEAARMLCVNAPPKKAQEGGGSEVFQELKGICIALGMSKPPANITMFQFFSGIEKKLKETLAKVPPNHVGKPLLKKPMGPAHWEKIEAINQAIANEYEVRRKLLIKRLDVTVQSFGWSDRAKSQTEKLAKVYQPKRSVLSPKTTISVAHLLAARQDLSKILRTSSGSIREKTACAINKVLMGRVPDRGGRPNEIEPPPPEMPPWQKRQDGPQQQTGGRGGGRGGYEHSSYGGRGGHEQGGGRGGRGGYDHGGRGGGRGNKHQGGWTDGGSGGGGGYQDGGYRDSGFQPGGYHGGHSSGGYQGGGYGGFQTSSSYTGSGYQGGGYQQDNRYQDGGHHGDRGGGRGGRGGRGGRGGRAGQGGGWGGRGSQNYHQGGQFEQHFQHGGYQYNHSGFGQGRHYTS

SEQ ID NO: 10200 - protein, 323 aa, Homo sapiens
LTTRKFEYHSSMECDLMETDILESLEDLGYKGPLLEDGALSQAVSAGASSPEFTKLCAWLVSELRVLCKLEENVQATNSPSEAEEFQLEVSGLLGEMNCPYLSLTSGDVTKRLLIQKNCLLLLTYLISELEAARMLCVNAPPKKAQEGGGSEVFQELKGICIALGMSKPPANITMFQFFSGIEKKLKETLAKVPPNHVGKPLLKKPMGPAHWEKIEAINQAIANEYEVRRKLLIKRLDVTVQSFGWSDRAKSQTEKLAKVYQPKRSVLSPKTTISVAHLLAARQDLSKILRTSSGSIREKTACAINKVIRVPLIFSKCIYFCS

SEQ ID NO: 10201 - protein, 133 aa, Homo sapiens
LTTRKFEYHSSMECDLMETDILESLEDLGYKGPLLEDGALSQAVSAGASSPEFTKLCAWLVSELRVLCKLEENVQATNSPSEAEEFQLEVSGLLGEMNCPYLSLTSGDVTKRLLIQKNCLLLLIKGNISKSST

SEQ ID NO: 10202 - protein, 169 aa, Homo sapiens
LRTLRTCAVRELRRQLWIWKFRGSRACASVRVAGEEGSLTTRKFEYHSSMECDLMETDILESLEDLGYKGPLLEDGALSQAVSAGASSPEFTKLCAWLVSELRVLCKLEENVQATNSPSEAEEFQLEVSGLLGEMNCPYLSLTSGDVTKRLLIQKNCLLLLSKFMATRI

SEQ ID NO: 10203 - protein, 52 aa, Homo sapiens
MGCTHLPTSLNEMNQVPQLEMQKSPVFCVNHAENCRPELFLFGHLGTGLSLF

SEQ ID NO: 10204 - protein, 16 aa, Homo sapiens
MGIDATHRPPVSISTL

SEQ ID NO: 10205 - protein, 17 aa, Homo sapiens
VKVCVSFCVTRALGAAC

SEQ ID NO: 10206 - protein, 27 aa, Homo sapiens
MLVSGGLRSTILPQSMVAEYPELRGVF

SEQ ID NO: 10207 - protein, 755 aa, Homo sapiens
MQQLERQVIDAERQAEKAFQQVQVMEDKLKAANIQTSESETRLYNKCQDLESLIQEKDDVIQNLELQLEEQKQIRIQEAKIIEEKAAKIKEWVTVKLNELELENQNLRLINQNQTEEIRTMQSKLQEVQGKKSSTVSTLKLSEGQRLSSLTFGCFLSRARSPPQVVKSEEMSKISSKEPEFTEGKDMEEMEIPEKSVDNQVLENNRGQRTLHQTPCGSEQNRKTRTSFATDGGISQNSGAPVSDWSSDEEDGSKGRSKSRCTSTLSSHTSEEGVQCSRMGSEMYLTASDDSSSIFEEETFGIKRPEHKKLYSWQQEAQWKALNSPLGKGNSELSKKEQDSSSDELNKKFQSQRLDYSSSSSEANTPSPILTPALMPKHPNSLSGKGTQLVPSSHLPPPKLRIPNVFSISVALAKRHLSQPQLSSDRMFGTNRNAISMIRPLRPQETDLDLVDGDSTEVLENMDTSCDDGLFSYDSLDSPNSDDQEHCDSAKKVAYSKPPTPPLHRFPSWESRIYAVAKSGIRMSEAFNMESVNKNSAATLSYTTSGLYTSLIYKNMTTPVYTTLKGKATQISSSPFLDDSSGSEEEDSSRSSSRTSESDSRSRSGPGSPRAMKRGVSLSSVASESDYAIPPDAYSTDTEYSQPEQKLPKTCSSSSDNGKNEPLEKSGYLLKMSGKVKSWKRRWFVLKGGELLYYKSPSDVIRKPQGHIELSASCSILRGDNKQTVQVLNFFFFFFFFVSCQTQFSIIQPNGKEIG

SEQ ID NO: 10208 - protein, 19 aa, Homo sapiens
LTEDHLGNETKLGFDLDLV

SEQ ID NO: 10209 - protein, 38 aa, Homo sapiens
LEPEGRVYVIIDLSGSSGEVKIPNSAFCERERVEMRHS

SEQ ID NO: 10210 - protein, 20 aa, Homo sapiens
LEPEGRVYVIIDLSGSSGEE

SEQ ID NO: 10211 - protein, 20 aa, Homo sapiens
LASPRPPVCPQSAFSVVHSV

SEQ ID NO: 10212 - protein, 103 aa, Homo sapiens
LHSRLCPASTEDCSETNQGPKLMQTEISVADQEGKMSVWLNLPGMSHVLVNEYIWGWKRDTVLPVFQVEKYCFTGYLSNCCTDHAMHVSSGLQAEQMLSRVIS

SEQ ID NO: 10213 - protein, 125 aa, Homo sapiens
MMAGQPPFEADNEDDLFESILHDDVLYPVWLSKEAVSILKAFMTKNPHKRLGCVASQNGEDAIKQHPFFKEIDWVLLEQKKIKPPFKPRIVSWSPCTFSTMGRAQVLAGQAACTQEELVRGCVLQ

SEQ ID NO: 10214 - protein, 36 aa, Homo sapiens
LIPLASFPSCTAACHPCPSVLEKRLVLLRTHEGGRP

SEQ ID NO: 10215 - protein, 28 aa, Homo sapiens
LREGDQRCRDWPAGLVCSGMANSCLLWF

SEQ ID NO: 10216 - protein, 11 aa, Homo sapiens
MATHVDTIEGM

SEQ ID NO: 10217 - protein, 10 aa, Homo sapiens
VPAALPPQRS

SEQ ID NO: 10218 - protein, 48 aa, Homo sapiens
MVSSARPPTPSDSQHSSHFFFSLKTQKSDSFSREKGTWVPFSPSSFRV

SEQ ID NO: 10219 - protein, 136 aa, Homo sapiens
MTADKEKKRSSSERRKEKSRDAARCRRSKETEVFYELAHELPLPHSVSSHLDKASIMRLAISFLRTHKLLSSAVTFTVNPAVRGGQGQDQGRTWAPRGCGEHGLGEPRTAFADFSICCHLAIRPILHTRLSPQEAF

SEQ ID NO: 10220 - protein, 371 aa, Homo sapiens
VFVRSYQPPCLFAGAVSPQTDFNELDLETLAPYIPMDGEDFQLSPICPEERLLAENPQSTPQHCFSAMTNIFQPLAPVAPHSPFLLDKFQQQLESKKTEPEHRPMSSIFFDAGSKASLPPCCGQASTPLSSMGGRSNTQWPPDPPLHFGPTKWAVGDQRTEFLGAAPLGPPVSPPHVSTFKTRSAKGFGARGPDVLSPAMVALSNKLKLKRQLEYEEQAFQDLSGGDPPGGSTSHLMWKRMKNLRGGSCPLMPDKPLSANVPNDKFTQNPMRGLGHPLRHLPLPQPPSAISPGENSKSRFPPQCYATQYQDYSLSSAHKVSGMASRLLGPSFESYLLPELTRYDCEVNVPVLGSSTLLQGGDLLRALDQAT

SEQ ID NO: 10221 - protein, 124 aa, Homo sapiens
MVALSNKLKLKRQLEYEEQAFQDLSGGDPPGGSTSHLMWKRMKNLRGGSCPLMPDKPLSANVPNDKFTQNPMRGLGHPLRHLPLPQPPSAISPGENSKSRFPPQCYATQYQDYSLSSAHKVSGL

SEQ ID NO: 10222 - protein, 37 aa, Homo sapiens
LSILTSLVHVCSSVGRSFSFILLKRFLVIVVAKEKQK

SEQ ID NO: 10223 - protein, 59 aa, Homo sapiens
VTPSTSSKLTTLEPRGAGLRRRLHSGRAAGPDQPCSPHSAGSQMAPQGLQGWPLATGPG

SEQ ID NO: 10224 - protein, 24 aa, Homo sapiens
LPKTKNSFQKKFKFYEKFLSHGVA

SEQ ID NO: 10225 - protein, 108 aa, Homo sapiens
LDHESRWRPLVPGAQPRHASEATHARIRLRAQNQVLKKGVVDEQANSAALKEQLKMKDQSLRKLQQEMDSLTFRNLQLAKRVELLQDELALSEPRGKKNKDCLRMVNT

SEQ ID NO: 10226 - protein, 192 aa, Homo sapiens
LGQRSREKMWVFGYGSLIWKVDFPYQDKLVGYITNYSRRFWQGSTDHRGVPGKPGRVVTLVEDPAGCVWGVAYRLPVGKEEEVKAYLDFREKGGYRTTTVIFYPKDPTTKPFSVLLYIGTCDNPDYLGPAPLEDIAEQIFNAAGPSGRNTEYLFELANSIRNLVPEEADEHLFALEKLVKERLEGKQNLNCI

SEQ ID NO: 10227 - protein, 2371 aa, Homo sapiens
LRQFKMTTTVATDYDNIEIQQQYSDVNNRWDVDDWDNENSSARLFERSRIKALADEREAVQKKTFTKWVNSHLARVSCRITDLYTDLRDGRMLIKLLEVLSGERLPKPTKGRMRIHCLENVDKALQFLKEQRVHLENMGSHDIVDGNHRLTLGLIWTIILRFQIQDISVETEDNKEKKSAKDALLLWCQMKTAGYPNVNIHNFTTSWRDGMAFNALIHKHRPDLIDFDKLKKSNAHYNLQNAFNLAEQHLGLTKLLDPEDISVDHPDEKSIITYVVTYYHYFSKMKALAVEGKRIGKVLDNAIETEKMIEKYESLASDLLEWIEQTIIILNNRKFANSLVGVQQQLQAFNTYRTVEKPPKFTEKGNLEVLLFTIQSKMRANNQKVYMPREGKLISDINKAWERLEKAEHERELALRNELIRQEKLEQLARRFDRKAAMRETWLSENQRLVSQDNFGFDLPAVEAATKKHEAIETDIAAYEERVQAVVAVARELEAENYHDIKRITARKDNVIRLWEYLLELLRARRQRLEMNLGLQKIFQEMLYIMDWMDEMKVLVLSQDYGKHLLGVEDLLQKHTLVEADIGIQAERVRGVNASAQKFATDGEGYKPCDPQVIRDRVAHMEFCYQELCQLAAERRARLEESRRLWKFFWEMAEEEGWIREKEKILSSDDYGKDLTSVMRLLSKHRAFEDEMSGRSGHFEQAIKEGEDMIAEEHFGSEKIRERIIYIREQWANLEQLSAIRKKRLEEASLLHQFQADADDIDAWMLDILKIVSSSDVGHDEYSTQSLVKKHKDVAEEIANYRPTLDTLHEQASALPQEHAESPDVRGRLSGIEERYKEVAELTRLRKQALQDTLALYKMFSEADACELWIDEKEQWLNNMQIPEKLEDLEVIQHRFESLEPEMNNQASRVAVVNQIARQLMHSGHPSEKEIKAQQDKLNTRWSQFRELVDRKKDALLSALSIQNYHLECNETKSWIREKTKVIESTQDLGNDLAGVMALQRKLTGMERDLVAIEAKLSDLQKEAEKLESEHPDQAQAILSRLAEISDVWEEMKTTLKNREASLGEASKLQQFLRDLDDFQSWLSRTQTAIASEDMPNTLTEAEKLLTQHENIKNEIDNYEEDYQKMRDMGEMVTQGQTDAQYMFLRQRLQALDTGWNELHKMWENRQNLLSQSHAYQQFLRDTKQAEAFLNNQEYVLAHTEMPTTLEGAEAAIKKQEDFMTTMDANEEKINAVVETGRRLVSDGNINSDRIQEKVDSIDDRHRKNRETASELLMRLKDNRDLQKFLQDCQELSLWINEKMLTAQDMSYDEARNLHSKWLKHQAFMAELASNKEWLDKIEKEGMQLISEKPETEAVVKEKLTGLHKMWEVLESTTQTKAQRLFDANKAELFTQSCADLDKWLHGLESQIQSDDYGKDLTSVNILLKKQQATMLENQMEVRKKEIEELQSQAQALSQEGKSTDEVDSKRLTVQTKFMELLEPLNERKHNLLASKEIHQFNRDVEDEILWVGERMPLATSTDHGHNLQTVQLLIKKNQTLQKEIQGHQPRIDDIFERSQNIVTDSSSLSAEAIRQRLADLKQLWGLLIEETEKRHRRLEEAHRAQQYYFDAAEAEAWMSEQELYMMSEEKAKDEQSAVSMLKKHQILEQAVEDYAETVHQLSKTSRALVADSHPESERISMRQSKVDKLYAGLKDLAEERRGKLDERHRLFQLNREVDDLEQWIAEREVVAGSHELGQDYEHFTMLQERFREFARDTGNIGQERVDTVNHLADELINSGHSDAATIAEWKDGLNEAWADLLELIDTRTQILAASYELHKFYHDAKEIFGRIQDKHKKLPEELGRDQNTVETLQRMHTTFEHDIQALGTQVRQLQEDAARLQAAYAGDKADDIQKRENEVLEAWKSLLDACESRRVRLVDTGDKFRFFSMVRDLMLWMEDVIRQIEAQEKPRDVSSVELLMNNHQGIKAEIDARNDSFTTCIELGKSLLARKHYASEEIKEKLLQLTEKRKEMIDKWEDRWEWLRLILEVHQFSRDASVAEAWLLGQEPYLSSREIGQSVDEVEKLIKRHEAFEKSAATWDERFSALERLTTLELLEVRRQQEEEERKRRPPSPEPSTKVSEEAESQQQWDTSKGEQVSQNGLPAEQGSPRMAETVDTSEMVNGATEQRTSSKESSPIPSPTSDRKAKTALPAQSAATLPARTQETPSAQMEGFLNRKHEWEAHNKKASSRSWHNVYCVINNQEMGFYKDAKTAASGIPYHSEVPVSLKEAVCEVALDYKKKKHVFKLRLNDGNEYLFQAKDDEEMNTWIQAISSAISSDKHEVSASTQSTPASSRAQTLPTSVVTITSESSPGKREKDKEKDKEKRFSLFGKKK

SEQ ID NO: 10228 - protein, 2180 aa, Homo sapiens
VLDGSGRGLERDFQGAVLRGVTPGIMELQRTSSISGPLSPAYTGQVPYNYNQLEGRFKQLQDEREAVQKKTFTKWVNSHLARVSCRITDLYTDLRDGRMLIKLLEVLSGERLPKPTKGRMRIHCLENVDKALQFLKEQRVHLENMGSHDIVDGNHRLTLGLIWTIILRFQIQDISVETEDNKEKKSAKDALLLWCQMKTAGYPNVNIHNFTTSWRDGMAFNALIHKHRPDLIDFDKLKKSNAHYNLQNAFNLAEQHLGLTKLLDPEDISVDHPDEKSIITYVVTYYHYFSKMKALAVEGKRIGKVLDNAIETEKMIEKYESLASDLLEWIEQTIIILNNRKFANSLVGVQQQLQAFNTYRTVEKPPKFTEKGNLEVLLFTIQSKMRANNQKVYMPREGKLISDINKAWERLEKAEHERELALRNELIRQEKLEQLARRFDRKAAMRETWLSENQRLVSQDNFGFDLPAVEAATKKHEAIETDIAAYEERVQAVVAVARELEAENYHDIKRITARKDNVIRLWEYLLELLRARRQRLEMNLGLQKIFQEMLYIMDWMDEMKVLVLSQDYGKHLLGVEDLLQKHTLVEADIGIQAERVRGVNASAQKFATDGEGYKPCDPQVIRDRVAHMEFCYQELCQLAAERRARLEESRRLWKFFWEMAEEEGWIREKEKILSSDDYGKDLTSVMRLLSKHRAFEDEMSGRSGHFEQAIKEGEDMIAEEHFGSEKIRERIIYIREQWANLEQLSAIRKKRLEEASLLHQFQADADDIDAWMLDILKIVSSSDVGHDEYSTQSLVKKHKDVAEEIANYRPTLDTLHEQASALPQEHAESPDVRGRLSGIEERYKEVAELTRLRKQALQDTLALYKMFSEADACELWIDEKEQWLNNMQIPEKLEDLEVIQHRFESLEPEMNNQASRVAVVNQIARQLMHSGHPSEKEIKAQQDKLNTRWSQFRELVDRKKDALLSALSIQNYHLECNETKSWIREKTKVIESTQDLGNDLAGVMALQRKLTGMERDLVAIEAKLSDLQKEAEKLESEHPDQAQAILSRLAEISDVWEEMKTTLKNREASLGEASKLQQFLRDLDDFQSWLSRTQTAIASEDMPNTLTEAEKLLTQHENIKNEIDNYEEDYQKMRDMGEMVTQGQTDAQYMFLRQRLQALDTGWNELHKMWENRQNLLSQSHAYQQFLRDTKQAEAFLNNQEYVLAHTEMPTTLEGAEAAIKKQEDFMTTMDANEEKINAVVETGRRLVSDGNINSDRIQEKVDSIDDRHRKNRETASELLMRLKDNRDLQKFLQDCQELSLWINEKMLTAQDMSYDEARNLHSKWLKHQAFMAELASNKEWLDKIEKEGMQLISEKPETEAVVKEKLTGLHKMWEVLESTTQTKAQRLFDANKAELFTQSCADLDKWLHGLESQIQSDDYGKDLTSVNILLKKQQMLENQMEVRKKEIEELQSQAQALSQEGKSTDEVDSKRLTVQTKFMELLEPLNERKHNLLASKEIHQFNRDVEDEILWVGERMPLATSTDHGHNLQTVQLLIKKNQTLQKEIQGHQPRIDDIFERSQNIVTDSSSLSAEAIRQRLADLKQLWGLLIEETEKRHRRLEEAHRAQQYYFDAAEAEAWMSEQELYMMSEEKAKDEQSAVSMLKKHQILEQAVEDYAETVHQLSKTSRALVADSHPESERISMRQSKVDKLYAGLKDLAEERRGKLDERHRLFQLNREVDDLEQWIAEREVVAGSHELGQDYEHVTMLQERFREFARDTGNIGQERVDTVNHLADELINSGHSDAATIAEWKDGLNEAWADLLELIDTRTQILAASYELHKFYHDAKEIFGRIQDKHKKLPEELGRDQNTVETLQRMHTTFEHDIQALGTQVRQLQEDAARLQAAYAGDKADDIQKRENEVLEAWKSLLDACESRRVRLVDTGDKFRFFSMVRDLMLWMEDVIRQIEAQEKPRDVSSVELLMNNHQGIKAEIDARNDSFTTCIELGKSLLARKHYASEEIKEKLLQLTEKRKEMIDKWEDRWEWLRLILEVHQFSRDASVAEAWLLGQEPYLSSREIGQSVDEVEKLIKRHEAFEKSAATWDERFSALERLTTLELLEVRRQQEEEERKRRPPSPEPSTKVSEEAESQQQWDTSKGEQVSQNGLPAEQGSPRVSYRSQTYQNYKNFNSRRTASDQPWSGL

SEQ ID NO: 10229 - protein, 42 aa, Homo sapiens
MVPSLVIPDLTCLFLFLNLRWSRHQNADFRENPYGEDHHPRG

SEQ ID NO: 10230 - protein, 87 aa, Homo sapiens
MQIFVKTLTGKTITLEVEPSDTIENVKAKIQDKEGIPPDQQRLIFAGKQLEDGRTLSDYNIQKVCLGEEQPLLKKKCYFGNFLFYFF

SEQ ID NO: 10231 - protein, 30 aa, Homo sapiens
LTLLDFRFLFCKMRSLEDPENEAHRKQVTC

SEQ ID NO: 10232 - protein, 28 aa, Homo sapiens
VISARAQNPGARGCRDPENEAHRKQVTC

SEQ ID NO: 10233 - protein, 75 aa, Homo sapiens
VPGVMAACRYCCSCLRLRPLSDGPFLLPRRDRALTQLQVRALWSSAGSRAVAVDLGNRLTTDKKLLQQVEFPQTI

SEQ ID NO: 10234 - protein, 746 aa, Homo sapiens
LRCKLGQSDSRVCTLNHSTILAFYKFQKMSRGYSENNNFLNNNNQMVLDMILYPLIGIPQTINWETIARLVPGLTPKECAKRFDELKSSGSSPVDNQYNSLMAAGESPVETLATYIKSSLLDIHGEFQETPVGHDAVSKTGRHSIASTRNCSSESENCTTHNGGEMTEESEGPNMVIHVCDEAKNLKEDFTCPRDLLISEMKYFAEYLSMDAQRWEEVDISVHCDVHIFNWLIKYIKRNTKENKDCEMPTLEPGNVISILISSEFLKMDSLVEQCIQYCHKNMNAIVATPCNMNCINANLLTRIADLFSHNEVDDLKDKKDKFKSKLFCKKIERLFDPEYLNPDSRSNAATLYRCCLCKKLLTKETERRIPCIPGKINVDRRGNIVYIHIRDKTWDVHEYLNSLFEELKSWRDVYWRLWGTINWLTCSRCYQAFLCIEFSHCQYHSETVVYPTAASSLNTVGTGIYPCCNQKVLRFDPTQLTKGCKVRDHMVTLRDQGEGGDLPSCPTARMLDDLHKYRDVIVVPFSKDTVSDVGVGLCDEKGIECDVLLEPNTPWGPKTGELNAFLSLKNWTLQLKQQSLFSEEEEYTTGSEVTEDEVGDEEEVSKKQRKKEKPKKFTRQPKKQVSSPCAQRKEKALEKSASRDVSPFVMSMQKNKWDATRSLRFNQDAQREDDQRRMTEITGHLIKMRLGDLDRVKSKEAKEFAGGIYSRLEAQIKASVPVSARQSSSEKNTRSKSRFGQGRPA

SEQ ID NO: 10235 - protein, 735 aa, Homo sapiens
LRCKLGQSDSRVCTLNHSTILAFYKFQKMSRGYSENNNFLNNNNQMVLDMILYPLIGIPQTINWETIARLVPGLTPKECAKRFDELKSSGSSPVDNQYNSLMAAGESPVETLATYIKSSLLDIHGEFQETPVGHDAVSKTGRHSIASTRNCSSESENCTTHNGGEMTEESEGPNMVIHVCDEAKNLKEDFTCPRDLLISEMKYFAEYLSMDAQRWEEVDISVHCDVHIFNWLIKYIKRNTKENKDCEMPTLEPGNVISILISSEFLKMDSLVEQCIQYCHKNMNAIVATPCNMNCINANLLTRIADLFSHNEVDDLKDKKDKFKSKLFCKKIERLFDPEYLNPDSRSNAATLYRCCLCKKLLTKETERRIPCIPGKINVDRRGNIVYIHIRDKTWDVHEYLNSLFEELKSWRDVYWRLWGTINWLTCSRCYQAFLCIEFSHCQYHSETVVYPTAASSLNTVGTGIYPCCNQKVLRFDPTQLTKGCKVRDHMVTLRDQGEGGDLPSCPTARMLDDLHKYRDVIVVPFSKDTVSDVGVGLCDEKGIECDVLLEPNTPWGPKTGELNAFLSLKNWTLQLKQQSLFSEEEEYTTGSEVTEDEVGDEEEVSKKQRKKEKPKKFTRQPKKQVSSPCAQRKEKALEKSASRDVSPFVMSMQKNKWDATRSLRFNQDAQREDDQRRMTEITGHLIKMRLGDLDRVKSKEAKETDKLRPRDGTVSKSNRKSGLSSVLLMTVLLC

SEQ ID NO: 10236 - protein, 385 aa, Homo sapiens
LNKFQKMSRGYSENNNFLNNNNQMVLDMILYPLIGIPQTINWETIARLVPGLTPKECAKRFDELKSSGSSPVDNQYNSLMAAGESPVETLATYIKSSLLDIHGEFQETPVGHDAVSKTGRHSIASTRNCSSESENCTTHNGGEMTEESEGPNMVIHVCDEAKNLKEDFTCPRDLLISEMKYFAEYLSMDAQRWEEVDISVHCDVHIFNWLIKYIKRNTKENKDCEMPTLEPGNVISILISSEFLKMDSLVEQCIQYCHKNMNAIVATPCNMNCINANLLTRIADLFSHNEVDDLKDKKDKFKSKLFCKKIERLFDPEYLNPDSRSNAATLYRCCLCKKLLTKETERRIPCIPGKINVDRRGNIVYIHIRCREDKIHTCIFVYIYI

SEQ ID NO: 10237 - protein, 7 aa, Homo sapiens
LNKYSLK

SEQ ID NO: 10238 - protein, 17 aa, Homo sapiens
LTNRLRDRQENSSPEFG

SEQ ID NO: 10239 - protein, 11 aa, Homo sapiens
MAAAVGAGCGL

SEQ ID NO: 10240 - protein, 275 aa, Homo sapiens
LRLASAWCSCARVSAGSALRFPGMESEMETQSARAEEGFTQVTRKGGRRAKKRQAEQLSAAGEGGDAGRMDTEEARPAKRPVFPPLCGDGLLSGKEETRKIPVPANRYTPLKENWMKIFTPIVEHLGLQIRFNLKSRNVEIRTCKETKDVSALTKAADFVKAFILGFQVEDALALIRLDDLFLESFEITDVKPLKGDHLSRAIGRIAGKGGKTKFTIENVTRTRIVLADVKVHILGSFQNIKMARTAICNLILGNPPSKVYGNIRAVASRSADRF

SEQ ID NO: 10241 - protein, 100 aa, Homo sapiens
LLNFFVEMASHYAVQACLRLLATNDLPALAFQSAGITGVSHCIPATNLSHFISFRKVHILGSFQNIKMARTAICNLILGNPPSKVYGNIRAVASRSADRF

SEQ ID NO: 10242 - protein, 362 aa, Homo sapiens
LRVTFASACPASMEPKRIREGYLVKKGSVFNTWKPMWVVLLEDGIEFYKKKSDNSPKGMIPLKGSTLTSPCQDFGKRMFVFKITTTKQQDHFFQAAFLEERDAWVRDIKKAIKCIEGGQKFARKSTRRSIRLPETIDLGALYLSMKDTEKGIKELNLEKDKKIFNHCFTGNCVIDWLVSNQSVRNRQEGLMIASSLLNEGYLQPAGDMSKSAVDGTAENPFLDNPDAFYYFPDSGFFCEENSSDDDVILKEEFRGVIIKQGCLLKQGHRRKNWKVRKFILREDPAYLHYYDPAGAEDPLGAIHLRGCVVTSVESNSNGRKSEEENLFEIITADEVHYFLQAATPKERTEWIRAIQMASRTGK

SEQ ID NO: 10243 - protein, 134 aa, Homo sapiens
MAMATKGGTVKAASGFNAMEDAQTLRKAMKGLGTDEDAIISVLAYRNTAQRQEIRTAYKSTIGRDLIDDLKSELSGNFEQVIVGMMTPTVLYDVQELRRAMKGAGTDEGCLIEILASRTPEEIRRISQTYQQRT

SEQ ID NO: 10244 - protein, 746 aa, Homo sapiens
LDRAGPASRVPGANCKPTGKMSEETVPEAASPPPPQGQPYFDRFSEDDPEYMRLRNRAADLRQDFNLMEQKKRVTMILQSPSFREELEGLIQEQMKKGNNSSNIWALRQIADFMASTSHAVFPTSSMNVSMMTPINDLHTADSLNLAKGERLMRCKISSVYRLLDLYGWAQLSDTYVTLRVSKEQDHFLISPKGVSCSEVTASSLIKVNILGEVVEKGSSCFPVDTTGFCLHSAIYAARPDVRCIIHLHTPATAAVSAMKWGLLPVSHNALLVGDMAYYDFNGEMEQEADRINLQKCLGPTCKILVLRNHGVVALGDTVEEAFYKIFHLQAACEIQVSALSSAGGVENLILLEQEKHRPHEVGSVQWAGSTFGPMQKSRLGEHEFEALMRMLDNLGYRTGYTYRHPFVQEKTKHKSEVEIPATVTAFVFEEDGAPVPALRQHAQKQQKEKTRWLNTPNTYLRVNVADEVQRSMGSPRPKTTWMKADEVEKSSSGMPIRIENPNQFVPLYTDPQEVLEMRNKIREQNRQDVKSAGPQSQLLASVIAEKSRSPSTESQLMSKGDEDTKDDSEETVPNPFSQLTDQELEEYKKEVERKKLELDGEKETAPEEPGSPAKSAPASPVQSPAKEAETKSPLVSPSKSLEEGTKKTETSKAATTEPETTQPEGVVVNGREEEQTAEEILSKGLSQMTTSADTDVDTSKDKTESVTSGPMSPEGSPSKSPSKKKKKFRTPSFLKKSKKKEKVES

SEQ ID NO: 10245 - protein, 663 aa, Homo sapiens
LDRAGPASRVPGANCKPTGKMSEETVPEAASPPPPQGQPYFDRFSEDDPEYMRLRNRAADLRQDFNLMEQKKRVTMILQSPSFREELEGLIQEQMKKGNNSSNIWALRQIADFMASTSHAVFPTSSMNVSMMTPINDLHTADSLNLAKGERLMRCKISSVYRLLDLYGWAQLSDTYVTLRVSKEQDHFLISPKGVSCSEVTASSLIKVNILGEVVEKGSSCFPVDTTGFCLHSAIYAARPDVRCIIHLHTPATAAVSAMKWGLLPVSHNALLVGDMAYYDFNGEMEQEADRINLQKCLGPTCKILVLRNHGVVALGDTVEEAFYKIFHLQAACEIQVSALSSAGGVENLILLEQEKHRPHEVGSVQWAGSTFGPMQKSRLGEHEFEALMRMLDNLGYRTGYTYRHPFVQEKTKHKSEVEIPATVTAFVFEEDGAPVPALRQHAQKQQKEKTRWLNTPNTYLRVNVADEVQRSMGSPRPKTTWMKADEVEKSSSGMPIRIENPNQFVPLYTDPQEVLEMRNKIREQNRQDVKSAGPQSQLLASVIAEKSRSPSTESQLMSKGDEDTKDDSEETVPNPFSQLTDQELEEYKKEVERKKLELDETGQEREPGSGPAVCEFFSVALHIWSNILERKKLPQKSLAHLQSLHLLLQCRAQRRRQRQRAL

SEQ ID NO: 10246 - protein, 579 aa, Homo sapiens
LDRAGPASRVPGANCKPTGKMSEETVPEAASPPPPQGQPYFDRFSEDDPEYMRLRNRAADLRQDFNLMEQKKRVTMILQSPSFREELEGLIQEQMKKGNNSSNIWALRQIADFMASTSHAVFPTSSMNVSMMTPINDLHTADSLNLAKGERLMRCKISSVYRLLDLYGWAQLSDTYVTLRVSKEQDHFLISPKGVSCSEVTASSLIKVNILGEVVEKGSSCFPVDTTGFCLHSAIYAARPDVRCIIHLHTPATAAVSAMKWGLLPVSHNALLVGDMAYYDFNGEMEQEADRINLQKCLGPTCKILVLRNHGVVALGDTVEEAFYKIFHLQAACEIQVSALSSAGGVENLILLEQEKHRPHEVGSVQWAGSTFGPMQKSRLGEHEFEALMRMLDNLGYRTGYTYRHPFVQEKTKHKSEVEIPATVTAFVFEEDGAPVPALRQHAQKQQKEKTRWLNTPNTYLRVNVADEVQRSMGSPRPKTTWMKADEVEKSSSGMPIRIENPNQFVPLYTDPQEVLEMRNKIREQNRQDVKSAGPQSQLLASVIAEKSRSPVEQRLPLTGGETCLPSGSSVPGAGLQDP

SEQ ID NO: 10247 - protein, 69 aa, Homo sapiens
MMPTPVILLKEGTDSSQGIPQLVSNISACQVIAEAVRTTLGPRGMDKLIVDGRGKSTEFLRPVCRKGGS

SEQ ID NO: 10248 - protein, 607 aa, Homo sapiens
LCPCLGIYVTAAGPGPPKMAVARGVGSPEPAPPQLYKWGGCGLGEPGSALERRGAAARGRCGRARAPRLPDSFPRGECPKPGARAPRSVRCGEPLPPASPPPARPQAQRARPRAPHSRRRAMLHLSEFSEPDALLVKSTEGCCAEPSAELPRLPARDAPAATGYPGAGDFLSWALNSCGASGDLADSCFLEGPAPTPPPGLSYSGSFFIQAVPEHPHDPEALFNLMSGILGLAPFPGPEAAASRSPLDAPFPAGSDALLPGPPDLYSPDLGAAPFPEAFWEASPCAGAPSQCLYEPQLSPPDVKPGLRAPPASPALDAVSAFKGPYAPWELLSVGAPGNCGSQGDYQAAPEARFPVIGTKIEDLLSISCPAELPAVPANRLYPSGAYDAFPLAPGDLGEGAEGLPGLLTPPSGEGGSSGDGGEFLASTQPQLSPLGLRSAAAADFPKPLVADIPGSSGVAAPPVPPPPPTPFPQAKARRKGRRGGKCSTRCFCPRPHAKAFACPVESCVRSFARSDELNRHLRIHTGHKPFQCRICLRNFSRSDHLTTHVRTHTGEKPFACDVCGRRFARSDEKKRHSKVHLKQKARAEERLKGLGFYSLGLSFASL

SEQ ID NO: 10249 - protein, 35 aa, Homo sapiens
LRGTPTASLPATRAPPSPAGEAPGAPQPAPRHAPP

SEQ ID NO: 10250 - protein, 149 aa, Homo sapiens
LGHLHGLLIPQSPSDITHGCAGEGSGACLAGGMAGGPAQWPSSGATASSSALTFLSVLWQLPLHHRMFATQTEGELRVTQILKEKFPRATAIKVTDISGGCGAMYEIKIESEEFKEKRTVQQHQMVNQALKEEIKEMHGLRIFTSVPKR

SEQ ID NO: 10251 - protein, 118 aa, Homo sapiens
VTSGGGSRRPGMAAWSPAAAAPLLRGIRGLPLHHRMFATQTEGELRVTQILKEKFPRATAIKVTDISGGCGAMYEIKIESEEFKEKRTVQQHQMVNQALKEEIKEMHGLRIFTSVPKR

SEQ ID NO: 10252 - protein, 111 aa, Homo sapiens
MAATSLMSALAARLLQPAHSCSLRLRPFHLAAVRNEAVVISGRKLAQQIKQEVRQEVEEWVASGNKRPHLSVILVGENPASHSYVLNKTRAAAVVGMCPSETSTAVQLRFI

SEQ ID NO: 10253 - protein, 281 aa, Homo sapiens
LLWLPGCCSPRTAAPFAFALSTSRQFGINSETIMKPASISEEELLNLINKLNNDDNVDGLLVQLPLPEHIDERRICNAVSPDKDVDGFHVINVGRMCLDQYSMLPATPWGVWEIIKRTGIPTLGKNVVVAGRSKNVGMPIAMLLHTDGAHERPGGDATVTISHRYTPKEQLKKHTILADIVISAAGIPNLITADMIKEGAAVIDVGINRVHDPVTAKPKLVGDVDFEGVRQKAGYITPVPGGVGPMTVAMLMKNTIIAAKKVLRLEEREVLKSKELGVATN

SEQ ID NO: 10254 - protein, 240 aa, Homo sapiens
LLWLPGCCSPRTAAPFAFALSTSRQFEHIDERRICNAVSPDKDVDGFHVINVGRMCLDQYSMLPATPWGVWEIIKRTGIPTLGKNVVVAGRSKNVGMPIAMLLHTDGAHERPGGDATVTISHRYTPKEQLKKHTILADIVISAAGIPNLITADMIKEGAAVIDVGINRVHDPVTAKPKLVGDVDFEGVRQKAGYITPVPGGVGPMTVAMLMKNTIIAAKKVLRLEEREVLKSKELGVATN

SEQ ID NO: 10255 - protein, 74 aa, Homo sapiens
MAACIAAGHWAAMGLGRSFQAARTLLPPPASIACRVHAGPVRQQSTGPSEPGAFQPPPKPVIVDKHRPVEPERR

SEQ ID NO: 10256 - protein, 52 aa, Homo sapiens
MPHLGQMWLKSATRDEVEEIILILVKIKALNQAESFIGEHHLDHLKSLIKED

SEQ ID NO: 10257 - protein, 106 aa, Homo sapiens
VIPIDPCSLRGSQSPELKSHPRSEDSMYTAIPQSGSPFPGSVQDPGLHVWRVEKLKPVPVAQENQGVFFSGDSYLVLHNGPEEVSHLHLWIGQQSSRDEQGACAGQ

SEQ ID NO: 10258 - protein, 94 aa, Homo sapiens
LRISQPLPPRRCSFVRPLPHTDTNMNGQLNGFHEAFIEEGTFLFTSESVGEGHPDKICDQISDAVLDAHLQQDPDAKVACGRFRMCLSTGGKIA

SEQ ID NO: 10259 - protein, 124 aa, Homo sapiens
LRISQPLPPRRCSFVRPLPHTDTNMNGQLNGFHEAFIEEGTFLFTSESVGEGHPDKICDQISDAVLDAHLQQDPDAKVACETVAKTGMILLAGEITSRAAVDYQKVVREAVKHIGYDDSSKGVF

SEQ ID NO: 10260 - protein, 419 aa, Homo sapiens
LRISQPLPPRRCSFVRPLPHTDTNMNGQLNGFHEAFIEEGTFLFTSESVGEGHPDKICDQISDAVLDAHLQQDPDAKVACETVAKTGMILLAGEITSRAAVDYQKVVREAVKHIGYDDSSKGFDYKTCNVLVALEQQSPDIAQGVHLDRNEEDIGAGDQGLMFGYATDETEECMPLTIVLAHKLNAKLAELRRNGTLPWLRPDSKTQVTVQYMQDRGAVLPIRVHTIVISVQHDEEVCLDEMRDALKEKVIKAVVPAKYLDEDTIYHLQPSGRFVIGGPQGDAGLTGRKIIVDTYGGWGAHGGGAFSGKDYTKVDRSAAYAARWVAKSLVKGGLCRRVLVQVSYAIGVSHPLSISIFHYGTSQKSERELLEIVKKNFDLRPGVIVRDLDLKKPIYQRTAAYGHFGRDSFPWEVPKKLKY

SEQ ID NO: 10261 - protein, 122 aa, Homo sapiens [sequence omitted]

SEQ ID NO: 10262 - protein, 30 aa, Homo sapiens
MGPEIKVCHGCDEPPCMPCGELVLQRVLPS

SEQ ID NO: 10263 - protein, 94 aa, Homo sapiens
VRRRRGAPGRPGQLMVVAETSQGSWSAPTSPSTSCPPPNTTTTLAPLPHDRLDPPACQPVSVLHHWHMDCVCHGCDEPPCMPCGELVLQRVLPS

SEQ ID NO: 10264 - protein, 23 aa, Homo sapiens
MGPEIKVCHGCDEPPCMPCGELV

SEQ ID NO: 10265 - protein, 87 aa, Homo sapiens
VRRRRGAPGRPGQLMVVAETSQGSWSAPTSPSTSCPPPNTTTTLAPLPHDRLDPPACQPVSVLHHWHMDCVCHGCDEPPCMPCGELV

SEQ ID NO: 10266 - protein, 103 aa, Homo sapiens
LAGAGCKMCAVAERRSSSHVHGDNPRPGQLMVVAETSQGSWSAPTSPSTSCPPPNTTTTLAPLPHDRLDPPACQPVSVLHHWHMDCVCHGCDEPPCMPCGELV

SEQ ID NO: 10267 - protein, 274 aa, Homo sapiens
LHPLSLRRRRGHSQKRAQKYAQQVLQKECRPKFAKTSMALLFEHRYSVDLLPFVQKAPKDSEAESKYDPPFGFRKFSSKVQTLLELLPEHDLPEHLKAKTCRRCVVIGSGGILHGLELGHTLNQFDVVIRLNSAPVEGYSEHVGNKTTIRMTYPEGAPLSDLEYYSNDLFVAVLFKSVDFNWLQAMVKKETLNVPTIGVIAVVLATHLCDEVSLAGFGYDLNQPRTPLHYFDSQCMAAMNFQTMHNVTTETKFLLKLVKEGVVKDLSGGIDREF

SEQ ID NO: 10268 - protein, 327 aa, Homo sapiens
LHPLSLRRRRGHSQKRAQKYAQQVLQKECRPKFAKTSMALLFEHRYSVDLLPFVQKAPKDSEAESKYDPPFGFRKFSSKVQTLLELLPEHDLPEHLKAKTCRRCVVIGSGGILHGLELGHTLNQFDVVIRLNSAPVEGYSEHVGNKTTIRMTYPEGAPLSDLEYYSNDLFVAVLFKSVDFNWLQAMVKKETLPFWVRLFFWKQVAEKIPLQPKHFRILNPVIIKETAFDILQYSEPQSRFWGRDKNVPTIGVIAVVLATHLCDEVSLAGFGYDLNQPRTPLHYFDSQCMAAMNFQTMHNVTTETKFLLKLVKEGVVKDLSGGIDREF

SEQ ID NO: 10269 - protein, 341 aa, Homo sapiens
LPVPDWKMEAGFVTWGFQSSEFWVELSQTRAQKYAQQVLQKECRPKFAKTSMALLFEHRYSVDLLPFVQKAPKDSEAESKYDPPFGFRKFSSKVQTLLELLPEHDLPEHLKAKTCRRCVVIGSGGILHGLELGHTLNQFDVVIRLNSAPVEGYSEHVGNKTTIRMTYPEGAPLSDLEYYSNDLFVAVLFKSVDFNWLQAMVKKETLPFWVRLFFWKQVAEKIPLQPKHFRILNPVIIKETAFDILQYSEPQSRFWGRDKNVPTIGVIAVVLATHLCDEVSLAGFGYDLNQPRTPLHYFDSQCMAAMNFQTMHNVTTETKFLLKLVKEGVVKDLSGGIDREF

SEQ ID NO: 10270 - protein, 340 aa, Homo sapiens
LLEAFPAMVHPSSKQDEKAQLVIKRHPQRAQKYAQQVLQKECRPKFAKTSMALLFEHRYSVDLLPFVQKAPKDSEAESKYDPPFGFRKFSSKVQTLLELLPEHDLPEHLKAKTCRRCVVIGSGGILHGLELGHTLNQFDVVIRLNSAPVEGYSEHVGNKTTIRMTYPEGAPLSDLEYYSNDLFVAVLFKSVDFNWLQAMVKKETLPFWVRLFFWKQVAEKIPLQPKHFRILNPVIIKETAFDILQYSEPQSRFWGRDKNVPTIGVIAVVLATHLCDEVSLAGFGYDLNQPRTPLHYFDSQCMAAMNFQTMHNVTTETKFLLKLVKEGVVKDLSGGIDREF

SEQ ID NO: 10271 - protein, 141 aa, Homo sapiens
LHPLSLRRRRGHSQKRAQKYAQQVLQKECRPKFAKTSMALLFEHRYSVDLLPFVQKAPKDSEAESKYDPPFGFRKFSSKVQTLLELLPEHDLPEHLKAKTCRRCVVIGSGGILHGLELGHTLNQFDVVIRTSPQSVSLPLS

SEQ ID NO: 10272 - protein, 24 aa, Homo sapiens
LCIHSHDYYFSGGGVGKITFSLCV

SEQ ID NO: 10273 - protein, 54 aa, Homo sapiens
LLRGAVQFPEGISVSEGFLWGRELAGLRIGVHFIFSAPISTLKFLSSHFYSPMA

SEQ ID NO: 10274 - protein, 7 aa, Homo sapiens
MLIQRAS

SEQ ID NO: 10275 - protein, 674 aa, Homo sapiens
MVLTTMTSVRRCSYLKSCLKAPLLLGNVLRGRTLQLNCPSLWGCPGSLAACVLRVGQVGTSLWLSPEQGLPLVLLSTHKTLLDGILLPFMLLSQGLGVLRVAWDSRACSPALRALLRKLGGLFLPPEASLSLDSSEGLLARAVVQAVIEQLLVSGQPLLIFLEEPPGALGPRLSALGQAWVGFVVQAVQVGIVPDALLVPVAVTYDLVPDAPCDIDHASAPLGLWTGALAVLRSLWSRWGCSHRICSRVHLAQPFSLQEYIVSARSCWGGRQTLEQLLQPIVLGQCTAVPDTEKEQEWTPITGPLLALKEEDQLLVRRLSCHVLSASVGSSAVMSTAIMATLLLFKHQKGVFLSQLLGEFSWLTEEILLRGFDVGFSGQLRSLLQHSLSLLRAHVALLRIRQGDLLVVPQPGPGLTHLAQLSAELLPVFLSEAVGACAVRGLLAGRVPPQGPWELQGILLLSQNELYRQILLLMHLLPQDLLLLKPCQSSYCYCQEVLDRLIQCGLLVAEETPGSRPACDTGRQRLSRKLLWKPSGDFTDSDSDDFGEADGRYFRLSQQSHCPDFFLFLCRLLSPLLKAFAQAAAFLRQGQLPDTELGYTEQLFQFLQATAQEEGIFECADPKLAISAVWTFRDLGVLQQTPSPAGPRLHLSPTFASLDNQEKLEQFIRQFICS

SEQ ID NO: 10276 - protein, 12 aa, Homo sapiens
LALENYLCSADI

SEQ ID NO: 10277 - protein, 102 aa, Homo sapiens
LPACPTVLAGADCGLVGSPLGQHSPLTSGRAATSSEFQKPPHGGSRNAGMLVFPTWCSSAGGLRLALIRGREPRVCLLFPSPSSGRNQLDAIPWTLPGPPPC

SEQ ID NO: 10278 - protein, 200 aa, Homo sapiens [sequence omitted]

SEQ ID NO: 10279 - protein, 430 aa, Homo sapiens
MGPPGPERVFPMPLPRKAPLNIPGTPVLEDFPQNDDEKERLQRRRSRVFDLQFSTDSPRLLASPSSRSIDISATIPKFTNTQITEHYSTCIKLSTENKITTKNAFGLHLIDFMSEILKQKDTEPTNFKVAAGTLDASTKIYAVRVDAVHADVYRVLGGLGKDAPSLEEVEGHVADGSATEMGTTKKAVKPKKKHLHRTIEQNINNLNVSEADRKCEIDPMFQKTAASFDECSTAGVFLSTLHCQDYRSELLFPSDVQTLSTGEPLELPELGCVEMTDLKAPLQQCAEDRQICPSLAGFQFTQWDSETHNESVSALVDKFKKNDQVFDINAEVDESDCGDFPDGSLGDDFDANDEPDHTAVGDHEEFRSWKEPCQVQSCQEEMISLGDGDIRTMCPLLSMKPGEYSYFSPRTMSMWAGPDHWRFRPRRKRM

SEQ ID NO: 10280 - protein, 742 aa, Homo sapiens
LSKNFVPALPATMNNSSSETRGHPHSASSPSERVFPMPLPRKAPLNIPGTPVLEDFPQNDDEKERLQRRRSRVFDLQFSTDSPRLLASPSSRSIDISATIPKFTNTQITEHYSTCIKLSTENKITTKNAFGLHLIDFMSEILKQKDTEPTNFKVAAGTLDASTKIYAVRVDAVHADVYRVLGGLGKDAPSLEEVEGHVADGSATEMGTTKKAVKPKKKHLHRTIEQNINNLNVSEADRKCEIDPMFQKTAASFDECSTAGVFLSTLHCQDYRSELLFPSDVQTLSTGEPLELPELGCVEMTDLKAPLQQCAEDRQICPSLAGFQFTQWDSETHNESVSALVDKFKKNDQVFDINAEVDESDCGDFPDGSLGDDFDANDEPDHTAVGDHEEFRSWKEPCQVQSCQEEMISLGDGDIRTMCPLLSMKPGEYSYFSPRTMSMWAGPDHWRFRPRRKQDAPSQSENKKKSTKKDFEIDFEDDIDFDVYFRKTKAATILTKSTLENQNWRATTLPTDFNYNVDTLVQLHLKPGTRLLKMAQGHRVETEHYEEIEDYDYNNPNDTSNFCPGLQAADSDDEDLDDLFVGPVGNSDLSPYPCHPPKTAQQNGDTPEAQGLDITTYGESNLVAEPQKVNKIEIHYAKTAKKMDMKKLKQSMWSLLTALSGKEADAEANHREAGKEAALAEVADEKMLSGLTKDLQRSLPPVMAQNLSIPLAFACLLHLANEKNLKLEGTEDLSDVLVRQGD

SEQ ID NO: 10281 - protein, 607 aa, Homo sapiens
LHIPGVSLQRCPCLWTEEEPGSPVLPLRPCLPAFPAGTLLLKAAFQPSPSVLPAPCWENCLGQQSMALGERIGWPLLEPQSSCQTAVLRVPARAAGAARTPPPGGARRPRPHEVPLQVTGRRLWKNVYDELGGSPGSTSAATCTRRHYERLVLPYVRHLKGEDDKPLPTSKPRKQYKMAKENRGDDGATERPKKAKEERRMDQMMPGKTKADAADPAPLPSQEPPRNSTEQQGLASGSSVSFVGASGCPEAYKRLLSSFYCKGTHGIMSPLAKKKLLAQVSKVEALQCQEEGCRHGAEPQASPAVHLPESPQSPKGLTENSRHRLTPQEGLQAPGGSLREEAQAGPCPAAPIFKGCFYTHPTEVLKPVSQHPRDFFSRLKDGVLLGPPGKEGLSVKEPQLVWGGDANRPSAFHKGGSRKGILYPKPKACWVSPMAKVPAESPTLPPTFPSSPGLGSKRSLEEEGAAHSGKRLRAVSPFLKEADAKKCGAKPAGSGLVSCLLGPALGPVPPEAYRGTMLHCPLNFTGTPGPLKGQAALPFSPLVIPAFPAHFLATAGPSPMAAGLMHFPPTSFDSALRHRLCPASSAWHAPPVTTYAAPHFFHLNTKL

SEQ ID NO: 10282 - protein, 105 aa, Homo sapiens
MNYSITVSIVMGIPTVKREVKSYLIETLHSLIDNLYPEEKLDCVIVVFIGETDIDYVHGVVANLEKEFSKEISSGLVEVISPPESYYPDLTNLKETFGDSKERVR

SEQ ID NO: 10283 - protein, 57 aa, Homo sapiens
MLRSNTLAICMLHAICWQFLSDIKMKQYSWTEDTEFLIPVGLVLFSVSYNCTWRNRY

SEQ ID NO: 10284 - protein, 56 aa, Homo sapiens
MRREYSLKLFCIFFQEEKDHIIPEGKRPRHQRVKTAKTIPSTVVNSIAARLLLQII

SEQ ID NO: 10285 - protein, 36 aa, Homo sapiens
LESEGKRPRHQRVKTAKTIPSTVVNSIAARLLLQII

SEQ ID NO: 10286 - protein, 51 aa, Homo sapiens
LERFHCLHSALENRSRHNEGKRPRHQRVKTAKTIPSTVVNSIAARLLLQII

SEQ ID NO: 10287 - protein, 147 aa, Homo sapiens
VPSKPSDCNFISNFYSHSRLHHISMWKCELTEFVNTLQRQSNGIFPGREKLKKMKTGRSALVVTDTGDMSVLNSPRHQSCIMHVDMDCFFVSVGIRNRPDLKGKPVAVTSNRGTGRAPLRPGANPQLEWQYYQNKILKGKADLGPGL

SEQ ID NO: 10288 - protein, 1075 aa, Homo sapiens
LAAAGQRPLAMDTPENVLQYIQWVEENFPENKEYLITLLEHLMKEFLDKKKYHNDPRFISYCLKFAEYNSDLHQFFEFLYNHGIGTLSSPLYIAWAGHLEAQGELQHASAVLQRGIQNQAEPREFLQQQYRLFQTRLTETHLPAQARTSEPLHNVQVLNQMITSKSNPGNNMACISKNQGSELSGVISSACDKESNMERRVITISKSEYSVHSSLASKVDVEQVVMYCKEKLIRGESEFSFEELRAQKYNQRRKHEQWVNEDRHYMKRKEANAFEEQLLKQKMDELHKKLHQVVETSHEDLPASQERSEVNPARMGPSVGSQQELRAPCLPVTYQQTPVNMEKNPREAPPVVPPLANAISAALVSPATSQSIAPPVPLKAQTVTDSMFAVASKDAGCVNKSTHEFKPQSGAEIKEGCETHKVANTSSFHTTPNTSLGMVQATPSKVQPSPTVHTKEALGFIMNMFQAPTLPDISDDKDEWQSLDQNEDAFEAQFQKNVRSSGAWGVNKIISSLSSAFHVFEDGNKENYGLPQPKNKPTGARTFGERSVSRLPSKPKEEVPHAEEFLDDSTVWGIRCNKTLAPSPKSPGDFTSAAQLASTPFHKLPVESVHILEDKENVVAKQCTQATLDSCEENMVVPSRDGKFSPIQEKSPKQALSSHMYSASLLRLSQPAAGGVLTCEAELGVEACRLTDTDAAIAEDPPDAIAGLQAEWMQMSSLGTVDAPNFIVGNPWDDKLIFKLLSGLSKPVSSYPNTFEWQCKLPAIKPKTEFQLGSKLVYVHHLLGEGAFAQVYEATQGDLNDAKNKQKFVLKVQKPANPWEFYIGTQLMERLKPSMQHMFMKFYSAHLFQNGSVLVGELYSYGTLLNAINLYKNTPEKVMPQGLVISFAMRMLYMIEQVHDCEIIHGDIKPDNFILGNGFLEQDDEDDLSAGLALIDLGQSIDMKLFPKGTIFTAKCETSGFQCVEMLSNKPWNYQIDYFGVAATVYCMLFGTYMKVKNEGGECKPEGLFRRLPHLDMWNEFFHVMLNIPDCHHLPSLDLLRQKLKKVFQQHYTNKIRALRNRLIVLLLECKRSRK

SEQ ID NO: 10289 - protein, 1038 aa, Homo sapiens
LAAAGQRPLAMDTPENVLQMLEAHMQSYKGNDPLGEWERYIQWVEENFPENKEYLITLLEHLMKEFLDKKKYHNDPRFISYCLKFAEYNSDLHQFFEFLYNHGIGTLSSPLYIAWAGHLEAQGELQHASAVLQRGIQNQAEPREFLQQQYRLFQTRLTETHLPAQARTSEPLHNVQVLNQMITSKSNPGNNMACISKNQGSELSGVISSACDKESNMERRVITISKSEYSVHSSLASKVDVEQVVMYCKEKLIRGESEFSFEELRAQKYNQRRKHEQWVNEDRHYMKRKEANAFEEQLLKQKMDELHKKLHQVVETSHEDLPASQERSEVNPARMGPSVGSQQELRAPCLPVTYQQTPVNMEKNPREAPPVVPPLANAISAALVSPATSQSIAPPVPLKAQTVTDSMFAVASKDAGCVNKSTHEFKPQSGAEIKEGCETHKVANTSSFHTTPNTSLGMVQATPSKVQPSPTVHTKEALGFIMNMFQAPTLPDISDDKDEWQSLDQNEDAFEAQFQKNVRSSGAWGVNKIISSLSSAFHVFEDGNKENYGLPQPKNKPTGARTFGERSVSRLPSKPKEEVPHAEEFLDDSTVWGIRCNKTLAPSPKSPGDFTSAAQLASTPFHKLPVESVHILEDKENVVAKQCTQATLDSCEENMVVPSRDGKFSPIQEKSPKQALSSHMYSASLLRLSQPAAGGVLTCEAELGVEACRLTDTDAAIAEDPPDAIAGLQAEWMQMSSLGTVDAPNFIVGNPWDDKLIFKLLSGLSKPVSSYPNTFEWQCKLPAIKPKTEFQLGSKLVYVHHLLGEGAFAQVYEATQGDLNDAKNKQKFVLKVQKPANPWEFYIGTQLMERLKPSMQHMFMKFYSAHLFQNGSVLVGELYSYGTLLDDEDDLSAGLALIDLGQSIDMKLFPKGTIFTAKCETSGFQCVEMLSNKPWNYQIDYFGVAATVYCMLFGTYMKVKNEGGECKPEGLFRRLPHLDMWNEFFHVMLNIPDCHHLPSLDLLRQKLKKVFQQHYTNKIRALRNRLIVLLLECKRSRK

SEQ ID NO: 10290 - protein, 1095 aa, Homo sapiens
LAAAGQRPLAMDTPENVLQMLEAHMQSYKGNDPLGEWERYIQWVEENFPENKEYLITLLEHLMKEFLDKKKYHNDPRFISYCLKFAEYNSDLHQFFEFLYNHGIGTLSSPLYIAWAGHLEAQGELQHASAVLQRGIQNQAEPREFLQQQYRLFQTRLTETHLPAQARTSEPLHNVQVLNQMITSKSNPGNNMACISKNQGSELSGVISSACDKESNMERRVITISKSEYSVHSSLASKVDVEQVVMYCKEKLIRGESEFSFEELRAQKYNQRRKHEQWVNEDRHYMKRKEANAFEEQLLKQKMDELHKKLHQVVETSHEDLPASQERSEVNPARMGPSVGSQQELRAPCLPVTYQQTPVNMEKNPREAPPVVPPLANAISAALVSPATSQSIAPPVPLKAQTVTDSMFAVASKDAGCVNKSTHEFKPQSGAEIKEGCETHKVANTSSFHTTPNTSLGMVQATPSKVQPSPTVHTKEALGFIMNMFQAPTLPDISDDKDEWQSLDQNEDAFEAQFQKNVRSSGAWGVNKIISSLSSAFHVFEDGNKENYGLPQPKNKPTGARTFGERSVSRLPSKPKEEVPHAEEFLDDSTVWGIRCNKTLAPSPKSPGDFTSAAQLASTPFHKLPVESVHILEDKENVVAKQCTQATLDSCEENMVVPSRDGKFSPIQEKSPKQALSSHMYSASLLRLSQPAAGGVLTCEAELGVEACRLTDTDAAIAEDPPDAIAGLQAEWMQMSSLGTVDAPNFIVGNPWDDKLIFKLLSGLSKPVSSYPNTFEWQCKLPAIKPKTEFQLGSKLVYVHHLLGEGAFAQVYEATQGDLNDAKNKQKFVLKVQKPANPWEFYIGTQLMERLKPSMQHMFMKFYSAHLFQNGSVLVGELYSYGTLLNAINLYKNTPEKVMPQGLVISFAMRMLYMIEQVHDCEIIHGDIKPDNFILGNGFLEQDDEDDLSAGLALIDLGQSIDMKLFPKGTIFTAKCETSGFQCVEMLSNKPWNYQIDYFGVAATVYCMLFGTYMKVKNEGGECKPEGLFRRLPHLDMWNEFFHVMLNIPDCHHLPSLDLLRQKLKKVFQQHYTNKIRALRNRLIVLLLECKRSRK

SEQ ID NO: 10291 - protein, 123 aa, Homo sapiens
LSQPAAGGVLTCEAELGVEACRLTDTDAAIAEDPPDAIAGLQAEWMQMSSLGTVDAPNFIVGNPWDDKLIFKLLSGLSKPVSSYPNTFEWQCKLPAIKPKTEFQLGKNYLDNITLNSCFSMRS

SEQ ID NO: 10292 - protein, 416 aa, Homo sapiens
LAAAGQRPLAMDTPENVLQMLEAHMQSYKGNDPLGEWERYIQWVEENFPENKEYLITLLEHLMKEFLDKKKYHNDPRFISYCLKFAEYNSDLHQFFEFLYNHGIGTLSSPLYIAWAGHLEAQGELQHASAVLQRGIQNQAEPREFLQQQYRLFQTRLTETHLPAQARTSEPLHNVQVLNQMITSKSNPGNNMACISKNQGSELSGVISSACDKESNMERRVITISKSEYSVHSSLASKVDVEQVVMYCKEKLIRGESEFSFEELRAQKYNQRRKHEQWVNEDRHYMKRKEANAFEEQLLKQKMDELHKKLHQVVETSHEDLPASQERSEVNPARMGPSVGSQQELRAPCLPVTYQQTPVNMEKNPREAPPVVPPLANAISAALVSPATSQSIAPPVPLKAQTVTDSMFAVASKDAG

SEQ ID NO: 10293 - protein, 46 aa, Homo sapiens
MKRKEANAFEEQLLKQKMDELHKKLHQVVETSHEDLPASQERSENA

SEQ ID NO: 10294 - protein, 166 aa, Homo sapiens
VISSACDKESNMERRVITISKSEYSVHSSLASKVDVEQVVMYCKEKLIRGESEFSFEELRAQKYNQRRKHEQWVNEDRHYMKRKEANAFEEQLLKQKMDELHKKLHQVVETSHEDLPASQERSEVCCAPHDTSCAQQQEWQFDLFLSMCCFRVNSDVNLASNFLKV

SEQ ID NO: 10295 - protein, 26 aa, Homo sapiens
LAAAGQRPLAMDTPENVLHCVILHVP

SEQ ID NO: 10296 - protein, 621 aa, Homo sapiens
LLGAGGGAERSRPCQPRGEAEAGERDAAGAGSGARGLLPAPLPGRRLLEPQERAARTPRRRPLFRQRYDLSLDEMRALTVQRVKFAMDLPLLKRAGQDLAEKTKNFVSRSLVIGEVLSMADMATGVKCGIIYWLFGGAIRNLGSPEHVTKWFQPLQEQKYTGMFAMTERGHGSNARGIQTEATFDLSAQEFVIDTPCENAEKMYIGNAMYGNYAAVFAQLIIDGRSQGPHCFIVPVRDENGSLYPGVTAIDMMYKEGLHGVDNGILIFDKVRIPRENLLDKFGSVAPDGQYHSPIRNKSARFNAMLAALTPSRLAVAFQAMGAMKLGLTIAIRYSHSRRQFGPKTKEEVKIIEHQTQTLRLMPHLATALALTFVSRYAGALLDEDVFQGKELVNSRSLQALVAGLKAYSTWENIRCLQDCRECTGGMGYMMENRISGLKCDTDVFATFEGDDVVMLQVVGRELLAQYTKQYEEKPLFGLLQNWAESVGDKLRTSFLAFNMDTVDDLAFLLKAVKFRERVLQRGLVARIYYKVKTKKEDFFHAWNSCLHHVASLSLAHTHRVTLEQFSLAVKSCPDQEDQTLLMKFCLLYGTKLVFQERAWYLEHKYLTPMASTRIRNQERC

SEQ ID NO: 10297 - protein, 35 aa, Homo sapiens
VQWVFLNNYQAAEDHPRMVILRLLRYIVRLVWRMH

SEQ ID NO: 10298 - protein, 103 aa, Homo sapiens
LSPRLECTGAILAHCNLQLPSSSGSPASASQVAGITASMRQAEPADMRPEIWIAQELRRIGDEFNAYYARRVFLNNYQAAEDHPRMVILRLLRYIVRLVWRMH

SEQ ID NO: 10299 - protein, 41 aa, Homo sapiens
LKEEVREAQVFLNNYQAAEDHPRMVILRLLRYIVRLVWRMH

SEQ ID NO: 10300 - protein, 52 aa, Homo sapiens
LQTAGLRKTVKAWLLMIRLWVFLNNYQAAEDHPRMVILRLLRYIVRLVWRMH

SEQ ID NO: 10301 - protein, 101 aa, Homo sapiens
LRPLLPACTERLASGVYRETGVRCAGGHMDPGSRWRNLPSGPSLKHLTDPSYGIPREQQKAALQELTRAHVESFNYAVHEGLGLAVQRRGLPMWPSLVSNS

SEQ ID NO: 10302 - protein, 133 aa, Homo sapiens
LRPLLPACTERLASGVYRETGVRCAGGHMDPGSRWRNLPSGPSLKHLTDPSYGIPREQQKAALQELTRAHVESFNYAVHEGLGLAVQGSLPLMELPTDHTVSATLSCWTVSWLAGWIRILLQASQILFVILRC

SEQ ID NO: 10303 - protein, 105 aa, Homo sapiens
VYRETGVRCAGGHMDPGSRWRNLPSGPSLKHLTDPSYGIPREQQKAALQELTRAHVESFNYAVHEGLGLAVQSTYSSKRDHLQRGQCLSSRMPGPKEYLPWEVDS

SEQ ID NO: 10304 - protein, 68 aa, Homo sapiens
LPYPHSPIIRQIRQACAQPFEAFEECLRQNEAAVGNCAEHMRRFLQCAEQVQPPRSPATVEAQPLPAS

SEQ ID NO: 10305 - protein, 106 aa, Homo sapiens
LPRPVATPVPLPGDAAGDLAPWGSGSSSVMHLGENRLKSHGNQLVSPVMAQSCKDGCGSLISPWLTCVCNAAAVARGKDTASDSNSDSLLQCVTLSQSQISAFSQL

SEQ ID NO: 10306 - protein, 334 aa, Homo sapiens
MQKAQTLDSKLKKAVPQNHFLNKTAPKTQADVTTVNGTQTNPNIKKKATAEDRRKQLEEWQKSKGKTYKRPPMELKTKRKVIKEMNISFWKSIEKEEEEKKAQLELSSKINNTLTECLNLIEGGVPSNEILNILSSIPEAEKFAKFWICKAKLLASKGTFDVIGLYEEAIKNGATPIQELRKVVLNILQDSNRTTEGITSDSLVAETSITSVEELAKKMESVKSCLSPKEREQVTATPRIAKAEQHNYPGIKLQIGPIPRINGMPEVQDMKFITPVRRSSRIERAVSRYPEMLQEHDLVVASLDELLEVEETKCFIFRRNEALPVTLGFQTPES

SEQ ID NO: 10307 - protein, 165 aa, Homo sapiens
MELKTKRKVIKEMNISFWKSIEKEEEEKKAQLELSSKINNTLTECLNLIEGGVPSNEILNILSSIPEAEKFAKFWICKAKLLASKGTFDVIGLYEEAIKNGATPIQELRKVVLNILQDSNRTTEGTIIFEFKFIFSSCTSKNHPGHIGKRRKESSPEMLLTSWFP

SEQ ID NO: 10308 - protein, 56 aa, Homo sapiens
MVGPGPTAAAAVEERQRKLQEYLAAKGKLKSQNTKPYLKSKNNCQNQPPSKSVHQH

SEQ ID NO: 10309 - protein, 192 aa, Homo sapiens
LMATDICNSLTLSQGPFTYIVTREPIFFDTWDNEAYVHDAPVRSLNCTLRDSQQKSLVMSGPYELKALHLQGQDMEQQVVFSMSFVQGEESNDKIPVALGLKEKNLYLSCVLKDDKPTLQLESVDPKNYPKKKMEKRFVFNKIEINNKLEFESAQFPNWYISTSQAENMPVFLGGTKGGQDITDFTMQFVSS

SEQ ID NO: 10310 - protein, 313 aa, Homo sapiens
LLLKAIKTAREKLADTKPLRGTRHNRLLWDSLQPIFIAQVSEAAMAEVPELASEMMAYYSGNEDDLFFEADGPKQMKCSFQDLDLCPLDGGIQLRISDHHYSKGFRQAASVVVAMDKLRKMLVPCPQTFQENDLSTFFPFIFEEEPIFFDTWDNEAYVHDAPVRSLNCTLRDSQQKSLVMSGPYELKALHLQGQDMEQQVVFSMSFVQGEESNDKIPVALGLKEKNLYLSCVLKDDKPTLQLESVDPKNYPKKKMEKRFVFNKIEINNKLEFESAQFPNWYISTSQAENMPVFLGGTKGGQDITDFTMQFVSS

SEQ ID NO: 10311 - protein, 203 aa, Homo sapiens
LDLCPLDGGIQLRISDHHYSKGFRQAASVVVAMDKLRKMLVPCPQTFQENDLSTFFPFIFEEEPIFFDTWDNEAYVHDAPVRSLNCTLRDSQQKSLVMSGPYELKALHLQGQDMEQQVVFSMSFVQGEESNDKIPVALGLKEKNLYLSCVLKDDKPTLQLEVSECYGMKPFSASCYHLFPDNHLLPAPIPRKSWEQVYLTILH

SEQ ID NO: 10312 - protein, 136 aa, Homo sapiens [sequence omitted]

SEQ ID NO: 10313 - protein, 120 aa, Homo sapiens
LLWDSLQPIFIAQVSEAAMAEVPELASEMMAYYSGNEDDLFFEADGPKQMKCSFQDLDLCPLDGGIQLRISDHHYSKGFRQAASVVVAMDKLRKMLVPCPQTFQENDLSTFFPFIFEEGS

SEQ ID NO: 10314 - protein, 56 aa, Homo sapiens
LLWDSLQPIFIAQVSEAAMAEVPELASEMMAYYSGNEDDLFFEADGPKQMKVRLWV

SEQ ID NO: 10315 - protein, 20 aa, Homo sapiens
LDTSGVSCFMAKGQGPTPSA

SEQ ID NO: 10316 - protein, 89 aa, Homo sapiens
LDTSGVSCFMAKDGVLLLLPKLECNGAIFAYCNLCFLGSSDSPASASRVAGITDGASLCHPGWSAVAQSRVTATSAPQLQAILLSQPPE

SEQ ID NO: 10317 - protein, 141 aa, Homo sapiens
LDTSGVSCFMAKDGVLLLLPKLECNGAIFAYCNLCFLGSSDSPASASRVAGITDTYTHRNELFKEDGPDSTVQKKKRFALLLKESGYECRGLPVGSHIRSSTSTLNAERTSVYQHSKYSKCQAGFPPITRTSRLLLLSRTF

SEQ ID NO: 10318 - protein, 29 aa, Homo sapiens
MAKAKMERPGRRVCARLSHRRERGDPGAA

SEQ ID NO: 10319 - protein, 109 aa, Homo sapiens
MAKDTYTHRNELFKEDGPDSTVQKKKRFALLLKESGYECRGLPVGSHIRSSTSTLNASDASPSVNVALGMANPHPALWPSEAQGEKPPRSNLPEPSPSSHRPPQPLSSL

SEQ ID NO: 10320 - protein, 57 aa, Homo sapiens
LPGRLRALYLPPRGRSGTKHWEYNLEQDKNPGLQGTSNLLGDMIRHIRNHHVNGYLS

SEQ ID NO: 10321 - protein, 84 aa, Homo sapiens [sequence omitted]

SEQ ID NO: 10322 - protein, 70 aa, Homo sapiens [sequence omitted]

SEQ ID NO: 10323 - protein, 92 aa, Homo sapiens
VAGACTLSFAGLLSQSELPAGPPLQPLSFLELCADWCVSTPGPLPMLLMVSFLCTLVVATVNADKIADADCLPSCECWHGTSSPDGHWKWLG

SEQ ID NO: 10324 - protein, 112 aa, Homo sapiens
LKDISPDTYTHRNELFKEDGPDSTVQKKKRFALLLKESGYECRGLPVGSHIRSSTSTLNASDASPSVNVALGMANPHPALWPSEAQGEKPPRSNLPEPSPSSHRPPQPLSSL

SEQ ID NO: 10325 - protein, 111 aa, Homo sapiens
VLGETHTYTHRNELFKEDGPDSTVQKKKRFALLLKESGYECRGLPVGSHIRSSTSTLNASDASPSVNVALGMANPHPALWPSEAQGEKPPRSNLPEPSPSSHRPPQPLSSL

SEQ ID NO: 10326 - protein, 49 aa, Homo sapiens
MLKEHQCISTANIPNARLDSLQLPGPPGFSSFQELSDPGSSLNVGYKLT

SEQ ID NO: 10327 - protein, 21 aa, Homo sapiens
LTRKYYDNGTLGMCSGDSTPW

SEQ ID NO: 10328 - protein, 20 aa, Homo sapiens
VSASLGAGSKPKMIWPHGAD

SEQ ID NO: 10329 - protein, 58 aa, Homo sapiens
LGIEALPMVDQEVCEAERKTKEITTSVGSWDGNLRGDRVFKGNLKEGIMFWVCSRDAE

SEQ ID NO: 10330 - protein, 70 aa, Homo sapiens
VRGRSCRVGAGVRRREERGGGGRGGAGRGLPACLGCGSDSRRPSLLLSCYCFGFPATPRTVKAAQLWMVR

SEQ ID NO: 10331 - protein, 46 aa, Homo sapiens
LLDHMQNTPGFMYKNLQCLVIDEADRILDVGFEEELKQIIKLLPSK

SEQ ID NO: 10332 - protein, 953 aa, Homo sapiens
LRAGASRLFFSSREDAAVIYEDFVWTVMTSRFRLPAGRTYNVRASELARDRQHTEVVCNILLLDNTVQAFKVNKHDQGQVLLDVVFKHLDLTEQDYFGLQLADDSTDNPRWLDPNKPIRKQLKRGSPYSLNFRVKFFVSDPNKLQEEYTRYQYFLQIKQDILTGRLPCPSNTAALLASFAVQSELGDYDQSENLSGYLSDYSFIPNQPQDFEKEIAKLHQQHIGLSPAEAEFNYLNTARTLELYGVEFHYARDQSNNEIMIGVMSGGILIYKNRVRMNTFPWLKIVKISFKCKQFFIQLRKELHESRETLLGFNMVNYRACKNLWKACVEHHTFFRLDRPLPPQKNFFAHYFTLGSKFRYCGRTEVQSVQYGKEKANKDRVFARSPSKPLARKLMDWEVVSRNSISDDRLETQSLPSRSPPGTPNHRNSTFTQEGTRLRPSSVGHLVDHMVHTSPSEVFVNQRSPSSTQANSIVLESSPSQETPGDGKPPALPPKQSKKNSWNQIHYSHSQQDLESHINETFDIPSSPEKPTPNGGIPHDNLVLIRMKPDENGRFGFNVKGGYDQKMPVIVSRVAPGTPADLCVPRLNEGDQVVLINGRDIAEHTHDQVVLFIKASCERHSGELMLLVRPNAVYDVVEEKLENEPDFQYIPEKAPLDSVHQDDHSLRESMIQLAEGLITGTVLTQFDQLYRKKPGMTMSCAKLPQNISKNRYRDISPYDATRVILKGNEDYINANYINMEIPSSSIINQYIACQGPLPHTCTDFWQMTWEQGSSMVVMLTTQVERGRVKCHQYWPEPTGSSSYGCYQVTCHSEEGNTAYIFRKMTLFNQEKNESRPLTQIQYIAWPDHGVPDDSSDFLDFVCHVRNKRAGKEEPVVVHCSAGIGRTGVLITMETAMCLIECNQPVYPLDIVRTMRDQRAMMIQTPSQYRFVCEAILKVYEEGFVKPLTTSTNK

SEQ ID NO: 10333 - protein, 67 aa, Homo sapiens
LPLTPLSPTSYLNWTFNILPAALQTHMVHCCHSPDCIFETQALSNLQRTKRQPPRYVCWEGVIVTAL

SEQ ID NO: 10334 - protein, 199 aa, Homo sapiens
LSCDPAHCLSTPASPPPPCSLLVACYQPTESPAGSLPSGEPSAAEGTFAVSWPSQTAEPGPAQPAEASEVAGGTQPAAGAQEPGETAASEAASSSLPAVVVETFPATVNGTVEGGSGAGRLDLPPGFMFKVQAQHDYTATDTDELQLKAGDVVLVIPFQNPEEQDEGWLMGVKESDWNQHKELEKCRGVFPENFTERVP

SEQ ID NO: 10335 - protein, 49 aa, Homo sapiens
LAPAVLLGSRTPARMPARPPACRVRPFPPGLPGQRIRLCRYRFLTLRTR

SEQ ID NO: 10336 - protein, 37 aa, Homo sapiens
MTVITVRLGIPHIWEQMGCAKGAAAEDRAVAGEPAAS

SEQ ID NO: 10337 - protein, 1027 aa, Homo sapiens
LGRAPALERCPAYGTSQRDEIYCQICKQLSENFKTSSLARGWILLSLCLGCFPPSERFMKYLLNFIGQGPATYGPFCAERLRRTYANGVRAEPPTWLELQAVKSKKHIPIQVILATGESLTVPVDSASTSREMCMHIAHKQGLSDHLGFSLQVAVYDKFWSLGSGRDHMMDAIARCEQMAQERGESQRQSPWRIYFRKEFFTPWHDSREDPVSTELIYRQVLRGVWSGEYSFEKEEELVELLARHCYVQLGASAESKAVQELLPSCIPHKLYRTKPPDRWASLVTAACAKAPYTQKQVTPLAVREQVVDAARLQWPLLFSRLFEVITLSGPRLPKTQLILAVNWKGLCFLDQQEKMLLELSFPEVMGLATNREAQGGQRLLLSTMHEEYEFVSPSSVAIAELVALFLEGLKERSIFAMALQDRKATDDTTLLAFKKGDLLVLTKKQGLLASENWTLGQNDRTGKTGLVPMACLYTIPTVTKPSAQLLSLLAMSPEKRKLAAQEGQFTEPRPEEPPKEKLHTLEEFSYEFFRAPEKDMVSMAVLPLARARGHLWAYSCEPLRQPLLKRVHANVDLWDIACQIFVAILRYMGDYPSRQAWPTLELTDQIFTLALQHPALQDEVYCQILKQLTHNSNRHSEERGWQLLWLCTGLFPPSKGLLPHAQKFIDTRRGKLLAPDCSRRIQKVLRTGPRKQPPHQVEVEAAEQNVSRICHKIYFPNDTSEMLEVVANTRVRDVCDSIATRLQLASWEGCSLFIKISDKVISQKEGDFFFDSLREVSDWVKKNKPQKEGAPVTLPYQVYFMRKLWLNISPGKDVNADTILHYHQELPKYLRGFHKCSREDAIHLAGLIYKAQFNNDRSQLASVPKILRELVPENLTRLMSSEEWKKSILLAYDKHKDKTVEEAKVAFLKWICRWPTFGSAFFEVKQTSEPSYPDVILIAINRHGVLLIHPKTKDLLTTYPFTKISSWSSGSTYFHMALGSLGRGSRLLCETSLGYKMDDLLTSYVQQLLSAMNKQRGSKAPALAST

SEQ ID NO: 10338 - protein, 408 aa, Homo sapiens
LYLPLPQVISQKEGDFFFDSLREVSDWVKKNKPQKEGAPVTLPYQVYFMRKLWLNISPGKDVNADTILHYHQELPKYLRGFHKCSREDAIHLAGLIYKAQFNNDRSQLASVPKILRELVPENLTRLMSSEEWKKSILLAYDKHKDKTVEEAKVAFLKWICRWPTFGSAFFEVKQTSEPSYPDVILIAINRHGVLLIHPKTKDLLTTYPFTKISSWSSGSTYFHMALGSLGRGSRLLCETSLVSSGSFSHPRCIGQSCWRLGSPPSPLSSGSLRGLSHRAQAGPADLERAWVHPQDQQPRWQGQAGPPAPLAHSKEGGRPSSSRASRNDGPNGRSPPSLSPCPALLVAEEEKVVPESRTPTCPLHPQPLTPPSPVQGYKMDDLLTSYVQQLLSAMNKQRGSKAPALAST

SEQ ID NO: 10339 - protein, 274 aa, Homo sapiens
LYLPLPQVISQKEGDFFFDSLREVSDWVKKNKPQKEGAPVTLPYQVYFMRKLWLNISPGKDVNADTILHYHQELPKYLRGFHKCSREDAIHLAGLIYKAQFNNDRSQLASVPKILRELVPENLTRLMSSEEWKKSILLAYDKHKDKTVEEAKVAFLKWICRWPTFGSAFFEVKQTSEPSYPDVILIAINRHGVLLIHPKTKDLLTTYPFTKISSWSSGSTYFHMALGSLGRGSRLLCETSLGYKMDDLLTSYVQQLLSAMNKQRGSKAPALAST

SEQ ID NO: 10340 - protein, 218 aa, Homo sapiens
VGRSWRPSMPSVSITQELPKYLRGFHKCSREDAIHLAGLIYKAQFNNDRSQLASVPKILRELVPENLTRLMSSEEWKKSILLAYDKHKDKTVEEAKVAFLKWICRWPTFGSAFFEVKQTSEPSYPDVILIAINRHGVLLIHPKTKDLLTTYPFTKISSWSSGSTYFHMALGSLGRGSRLLCETSLGYKMDDLLTSYVQQLLSAMNKQRGSKAPALAST

SEQ ID NO: 10341 - protein, 179 aa, Homo sapiens
VVGAAARGRGGAERTFPRAAGMAAQGVGPGPGSAAPPGLEAARQKLALRRKKVLSTEEMELYELAQAAGGAIDPDVFKILVDLLKLNVAPLAVFQMLKSMCAGQRLASEPQDPAAVSLPTSSVPETRGRNKGSAALGGALALAERSSREGSSQRMPRQPSATRLPKGGGPGKSPTRGST

SEQ ID NO: 10342 - protein, 125 aa, Homo sapiens
LSGLQGGGRAGRRGLTGPASVPARILVDLLKLNVAPLAVFQMLKSMCAGQRLASEPQDPAAVSLPTSSVPETRGRNKGSAALGGALALAERSSREGSSQRMPRQPSATRLPKGGGPGKSPTRGST

SEQ ID NO: 10343 - protein, 82 aa, Homo sapiens
VEAALKMLRREARLRREYLYRKAREEAQRSAQERKERLRRALEENRLIPTELRREALALQGSLEFDDAGGEGNYTRCDQPRG

SEQ ID NO: 10344 - protein, 114 aa, Homo sapiens
VEAALKMLRREARLRREYLYRKAREEAQRSAQERKERLRRALEENRLIPTELRREALALQGSLEFDDAGGEGVTSHVDDEYRWAGVEDPKVMITTSRDPSSRLKMFAKVLVSRE

SEQ ID NO: 10345 - protein, 171 aa, Homo sapiens
VEAALKMLRREARLRREYLYRKAREEAQRSAQERKERLRRALEENRLIPTELRREALALQGSLEFDDAGGEGVTSHVDDEYRWAGVEDPKVMITTSRDPSSRLKMFAKELKLVFPGAQRMNRGRHEVGALVRACKANGVTDLLVVHEHRGTPGKAGGRESGWEPSEGRRGL

SEQ ID NO: 10346 - protein, 76 aa, Homo sapiens
LGLLFPQLRREARLRREYLYRKAREEAQRSAQERKERLRRALEENRLIPTELRREALALQGSLEFDDAGGEGNYTR

SEQ ID NO: 10347 - protein, 154 aa, Homo sapiens
LGLLFPQLRREARLRREYLYRKAREEAQRSAQERKERLRRALEENRLIPTELRREALALQGSLEFDDAGGEGVTSHVDDEYRWAGVEDPKVMITTSRDPSSRLKMFAKELKLVFPGAQRMNRGRHEVGALVRACKANGVTDLLVVHEHRGTPGL

SEQ ID NO: 10348 - protein, 37 aa, Homo sapiens
VYMIRLGTLEQEATADVEWRWHPYTNTARKRVFLSTE

SEQ ID NO: 10349 - protein, 153 aa, Homo sapiens
MAAQGVGPGPGSAAPPGLEAARQKLALRRKKVLSTEEMELYELAQAAGGGIDPDVFKILVDLLKLNVAPLAVFQMLKSMCAGQRLASEPQDPAAVSLPTSSVPETRGLSDNLRTRRRLNKISHSSYGGQRSSTAWCGRRRRTCTSNWLKLQRH

SEQ ID NO: 10350 - protein, 91 aa, Homo sapiens
LHAFLKQMLKSMCAGQRLASEPQDPAAVSLPTSSVPETRGRDKGSAALGGVLALAERSNHEGSSQRMPRQPSATRLPKGGGPGKSPTQGST

SEQ ID NO: 10351 - protein, 46 aa, Homo sapiens
MCAGQRLASEPQDPAAVSLPTSSVPETREGTGSLLRGGEEAQMAAN

SEQ ID NO: 10352 - protein, 135 aa, Homo sapiens
MAAQGVGPGPGSAAPPGLEAARQKLALRRKKVLSTEEMELYELAQAAGGGIDPDVFKILVDLLKLNVAPLAVFQMLKSMCAGQRLASEPQDPAAVSLPTSSVPETRGQSWARCPCPSGGGGGRGGGRRGTAAAWP

SEQ ID NO: 10353 - protein, 10 aa, Homo sapiens
MEQKSQLGRS

SEQ ID NO: 10354 - protein, 293 aa, Homo sapiens
LPPDTLGEVFVQFAPGAVSSLPPFSPPHFAASSCFFFSPFLAKTTNKTSQIEPACCRSRAPSPCELPSDPLLSMKQPIMADGPRCKRRKQANPRRKNVVNYDNVVDTGSETDEEDKLHIAEDDGIANPLDQETSPASVPNHESSPHVSQALLPREEEEDEIREGGVEHPWHNNEILQASVDGPDLPPGTPDAFAQLLTCPYCDRGYKRLTSLKEHIKYRHEKNEENFSCPLCSYTFAYRTQLERHMVTHKPGTDQHQMLTQGAGNRKFKCTECGKAFKYKHHLKEHLRIHSGT

SEQ ID NO: 10355 - protein, 1275 aa, Homo sapiens
LPPDTLGEVFVQFAPGAVSSLPPFSPPHFAASSCFFFSPFLAKTTNKTSQIEPACCRSRAPSPCELPSDPLLSMKQPIMADGPRCKRRKQANPRRKNVVNYDNVVDTGSETDEEDKLHIAEDDGIANPLDQETSPASVPNHESSPHVSQALLPREEEEDEIREGGVEHPWHNNEILQASVDGPEEMKEDYDTMGPEATIQTAINNGTVKNANCTSDFEEYFAKRKLEERDGHAVSIEEYLQRSDTAIIYPEAPEELSRLGTPEANGQEENDLPPGTPDAFAQLLTCPYCDRGYKRLTSLKEHIKYRHEKNEENFSCPLCSYTFAYRTQLERHMVTHKPGTDQHQMLTQGAGNRKFKCTECGKAFKYKHHLKEHLRIHSGEKPYECPNCKKRFSHSGSYSSHISSKKCIGLISVNGRMRNNIKTGSSPNSVSSSPTNSAITQLRNKLENGKPLSMSEQTGLLKIKTEPLDFNDYKVLMATHGFSGTSPFMNGGLGATSPLGVHPSAQSPMQHLGVGMEAPLLGFPTMNSNLSEVQKVLQIVDNTVSRQKMDCKAEEISKLKGYHMKDPCSQPEEQGVTSPNIPPVGLPVVSHNGATKSIIDYTLEKVNEAKACLQSLTTDSRRQISNIKKEKLRTLIDLVTDDKMIENHNISTPFSCQFCKESFPGPIPLHQHERYLCKMNEEIKAVLQPHENIVPNKAGVFVDNKALLLSSVLSEKGMTSPINPYKDHMSVLKAYYAMNMEPNSDELLKISIAVGLPQEFVKEWFEQRKVYQYSNSRSPSLERSSKPLAPNSNPPTKDSLLPRSPVKPMDSITSPSIAELHNSVTNCDPPLRLTKPSHFTNIKPVEKLDHSRSNTPSPLNLSSTSSKNSHSSSYTPNSFSSEELQAEPLDLSLPKQMKEPKSIIATKNKTKASSISLDHNSVSSSSENSDEPLNLTFIKKEFSNSNNLDNKSTNPVFSMNPFSAKPLYTALPPQSAFPPATFMPPVQTSIPGLRPYPGLDQMSFLPHMAYTYPTGAATFADMQQRRKYQRKQGFQGELLDGAQDYMSGLDDMTDSDSCLSRKKIKKTESGMYACDLCDKTFQKSSSLLRHKYEHTGKRPHQCQICKKAFKHKHHLIEHSRLHSGEKPYQCDKCGKRFSHSGSYSQHMNHRALPLRGTLTRRRGRVCRGMARARRSTRKKARMATGSWADRMATRSSRRKRKKVKIKVWIRIPKRYEMKKRLEITPWTIVRRMGKWKPNQTTRKTIWKMACNKLLHFKLPIFFSSSIVTCLKTLLC

SEQ ID NO: 10356 - protein, 1198 aa, Homo sapiens
LQKQPAGSLVNYDNVVDTGSETDEEDKLHIAEDDGIANPLDQETSPASVPNHESSPHVSQALLPREEEEDEIREGGVEHPWHNNEILQASVDGPEEMKEDYDTMGPEATIQTAINNGTVKNANCTSDFEEYFAKRKLEERDGHAVSIEEYLQRSDTAIIYPEAPEELSRLGTPEANGQEENDLPPGTPDAFAQLLTCPYCDRGYKRLTSLKEHIKYRHEKNEENFSCPLCSYTFAYRTQLERHMVTHKPGTDQHQMLTQGAGNRKFKCTECGKAFKYKHHLKEHLRIHSGEKPYECPNCKKRFSHSGSYSSHISSKKCIGLISVNGRMRNNIKTGSSPNSVSSSPTNSAITQLRNKLENGKPLSMSEQTGLLKIKTEPLDFNDYKVLMATHGFSGTSPFMNGGLGATSPLGVHPSAQSPMQHLGVGMEAPLLGFPTMNSNLSEVQKVLQIVDNTVSRQKMDCKAEEISKLKGYHMKDPCSQPEEQGVTSPNIPPVGLPVVSHNGATKSIIDYTLEKVNEAKACLQSLTTDSRRQISNIKKEKLRTLIDLVTDDKMIENHNISTPFSCQFCKESFPGPIPLHQHERYLCKMNEEIKAVLQPHENIVPNKAGVFVDNKALLLSSVLSEKGMTSPINPYKDHMSVLKAYYAMNMEPNSDELLKISIAVGLPQEFVKEWFEQRKVYQYSNSRSPSLERSSKPLAPNSNPPTKDSLLPRSPVKPMDSITSPSIAELHNSVTNCDPPLRLTKPSHFTNIKPVEKLDHSRSNTPSPLNLSSTSSKNSHSSSYTPNSFSSEELQAEPLDLSLPKQMKEPKSIIATKNKTKASSISLDHNSVSSSSENSDEPLNLTFIKKEFSNSNNLDNKSTNPVFSMNPFSAKPLYTALPPQSAFPPATFMPPVQTSIPGLRPYPGLDQMSFLPHMAYTYPTGAATFADMQQRRKYQRKQGFQGELLDGAQDYMSGLDDMTDSDSCLSRKKIKKTESGMYACDLCDKTFQKSSSLLRHKYEHTGKRPHQCQICKKAFKHKHHLIEHSRLHSGEKPYQCDKCGKRFSHSGSYSQHMNHRYSYCKREAEEREAAEREAREKGHLEPTELLMNRAYLQSITPQGYSDSEERESMPRDGESEKEHEKEGEDGYGKLGRQDGDEEFEEEEEESENKSMDTDPETIRDEEETGDHSMDDSSEDGKMETKSDHEEDNMEDGM

SEQ ID NO: 10357 - protein, 1195 aa, Homo sapiens
VCVTAVVNYDNVVDTGSETDEEDKLHIAEDDGIANPLDQETSPASVPNHESSPHVSQALLPREEEEDEIREGGVEHPWHNNEILQASVDGPEEMKEDYDTMGPEATIQTAINNGTVKNANCTSDFEEYFAKRKLEERDGHAVSIEEYLQRSDTAIIYPEAPEELSRLGTPEANGQEENDLPPGTPDAFAQLLTCPYCDRGYKRLTSLKEHIKYRHEKNEENFSCPLCSYTFAYRTQLERHMVTHKPGTDQHQMLTQGAGNRKFKCTECGKAFKYKHHLKEHLRIHSGEKPYECPNCKKRFSHSGSYSSHISSKKCIGLISVNGRMRNNIKTGSSPNSVSSSPTNSAITQLRNKLENGKPLSMSEQTGLLKIKTEPLDFNDYKVLMATHGFSGTSPFMNGGLGATSPLGVHPSAQSPMQHLGVGMEAPLLGFPTMNSNLSEVQKVLQIVDNTVSRQKMDCKAEEISKLKGYHMKDPCSQPEEQGVTSPNIPPVGLPVVSHNGATKSIIDYTLEKVNEAKACLQSLTTDSRRQISNIKKEKLRTLIDLVTDDKMIENHNISTPFSCQFCKESFPGPIPLHQHERYLCKMNEEIKAVLQPHENIVPNKAGVFVDNKALLLSSVLSEKGMTSPINPYKDHMSVLKAYYAMNMEPNSDELLKISIAVGLPQEFVKEWFEQRKVYQYSNSRSPSLERSSKPLAPNSNPPTKDSLLPRSPVKPMDSITSPSIAELHNSVTNCDPPLRLTKPSHFTNIKPVEKLDHSRSNTPSPLNLSSTSSKNSHSSSYTPNSFSSEELQAEPLDLSLPKQMKEPKSIIATKNKTKASSISLDHNSVSSSSENSDEPLNLTFIKKEFSNSNNLDNKSTNPVFSMNPFSAKPLYTALPPQSAFPPATFMPPVQTSIPGLRPYPGLDQMSFLPHMAYTYPTGAATFADMQQRRKYQRKQGFQGELLDGAQDYMSGLDDMTDSDSCLSRKKIKKTESGMYACDLCDKTFQKSSSLLRHKYEHTGKRPHQCQICKKAFKHKHHLIEHSRLHSGEKPYQCDKCGKRFSHSGSYSQHMNHRYSYCKREAEEREAAEREAREKGHLEPTELLMNRAYLQSITPQGYSDSEERESMPRDGESEKEHEKEGEDGYGKLGRQDGDEEFEEEEEESENKSMDTDPETIRDEEETGDHSMDDSSEDGKMETKSDHEEDNMEDGM

SEQ ID NO: 10358 - protein, 1200 aa, Homo sapiens
LEQLSSREDNLVNYDNVVDTGSETDEEDKLHIAEDDGIANPLDQETSPASVPNHESSPHVSQALLPREEEEDEIREGGVEHPWHNNEILQASVDGPEEMKEDYDTMGPEATIQTAINNGTVKNANCTSDFEEYFAKRKLEERDGHAVSIEEYLQRSDTAIIYPEAPEELSRLGTPEANGQEENDLPPGTPDAFAQLLTCPYCDRGYKRLTSLKEHIKYRHEKNEENFSCPLCSYTFAYRTQLERHMVTHKPGTDQHQMLTQGAGNRKFKCTECGKAFKYKHHLKEHLRIHSGEKPYECPNCKKRFSHSGSYSSHISSKKCIGLISVNGRMRNNIKTGSSPNSVSSSPTNSAITQLRNKLENGKPLSMSEQTGLLKIKTEPLDFNDYKVLMATHGFSGTSPFMNGGLGATSPLGVHPSAQSPMQHLGVGMEAPLLGFPTMNSNLSEVQKVLQIVDNTVSRQKMDCKAEEISKLKGYHMKDPCSQPEEQGVTSPNIPPVGLPVVSHNGATKSIIDYTLEKVNEAKACLQSLTTDSRRQISNIKKEKLRTLIDLVTDDKMIENHNISTPFSCQFCKESFPGPIPLHQHERYLCKMNEEIKAVLQPHENIVPNKAGVFVDNKALLLSSVLSEKGMTSPINPYKDHMSVLKAYYAMNMEPNSDELLKISIAVGLPQEFVKEWFEQRKVYQYSNSRSPSLERSSKPLAPNSNPPTKDSLLPRSPVKPMDSITSPSIAELHNSVTNCDPPLRLTKPSHFTNIKPVEKLDHSRSNTPSPLNLSSTSSKNSHSSSYTPNSFSSEELQAEPLDLSLPKQMKEPKSIIATKNKTKASSISLDHNSVSSSSENSDEPLNLTFIKKEFSNSNNLDNKSTNPVFSMNPFSAKPLYTALPPQSAFPPATFMPPVQTSIPGLRPYPGLDQMSFLPHMAYTYPTGAATFADMQQRRKYQRKQGFQGELLDGAQDYMSGLDDMTDSDSCLSRKKIKKTESGMYACDLCDKTFQKSSSLLRHKYEHTGKRPHQCQICKKAFKHKHHLIEHSRLHSGEKPYQCDKCGKRFSHSGSYSQHMNHRYSYCKREAEEREAAEREAREKGHLEPTELLMNRAYLQSITPQGYSDSEERESMPRDGESEKEHEKEGEDGYGKLGRQDGDEEFEEEEEESENKSMDTDPETIRDEEETGDHSMDDSSEDGKMETKSDHEEDNMEDGM

SEQ ID NO: 10359 - protein, 1246 aa, Homo sapiens
LAKTTNKTSQIEPACCRSRAPSPCELPSDPLLSMKQPIMADGPRCKRRKQANPRRKNVVNYDNVVDTGSETDEEDKLHIAEDDGIANPLDQETSPASVPNHESSPHVSQALLPREEEEDEIREGGVEHPWHNNEILQASVDGPEMKEDYDTMGPEATIQTAINNGTVKNANCTSDFEEYFAKRKLEERDGHAVSIEEYLQRSDTAIIYPEAPEELSRLGTPEANGQEENDLPPGTPDAFAQLLTCPYCDRGYKRLTSLKEHIKYRHEKNEENFSCPLCSYTFAYRTQLERHMVTHKPGTDQHQMLTQGAGNRKFKCTECGKAFKYKHHLKEHLRIHSGEKPYECPNCKKRFSHSGSYSSHISSKKCIGLISVNGRMRNNIKTGSSPNSVSSSPTNSAITQLRNKLENGKPLSMSEQTGLLKIKTEPLDFNDYKVLMATHGFSGTSPFMNGGLGATSPLGVHPSAQSPMQHLGVGMEAPLLGFPTMNSNLSEVQKVLQIVDNTVSRQKMDCKAEEISKLKGYHMKDPCSQPEEQGVTSPNIPPVGLPVVSHNGATKSIIDYTLEKVNEAKACLQSLTTDSRRQISNIKKEKLRTLIDLVTDDKMIENHNISTPFSCQFCKESFPGPIPLHQHERYLCKMNEEIKAVLQPHENIVPNKAGVFVDNKALLLSSVLSEKGMTSPINPYKDHMSVLKAYYAMNMEPNSDELLKISIAVGLPQEFVKEWFEQRKVYQYSNSRSPSLERSSKPLAPNSNPPTKDSLLPRSPVKPMDSITSPSIAELHNSVTNCDPPLRLTKPSHFTNIKPVEKLDHSRSNTPSPLNLSSTSSKNSHSSSYTPNSFSSEELQAEPLDLSLPKQMKEPKSIIATKNKTKASSISLDHNSVSSSSENSDEPLNLTFIKKEFSNSNNLDNKSTNPVFSMNPFSAKPLYTALPPQSAFPPATFMPPVQTSIPGLRPYPGLDQMSFLPHMAYTYPTGAATFADMQQRRKYQRKQGFQGELLDGAQDYMSGLDDMTDSDSCLSRKKIKKTESGMYACDLCDKTFQKSSSLLRHKYEHTGKRPHQCQICKKAFKHKHHLIEHSRLHSGEKPYQCDKCGKRFSHSGSYSQHMNHRYSYCKREAEEREAAEREAREKGHLEPTELLMNRAYLQSITPQGYSDSEERESMPRDGESEKEHEKEGEDGYGKLGRQDGDEEFEEEEEESENKSMDTDPETIRDEEETGDHSMDDSSEDGKMETKSDHEEDNMEDGM

SEQ ID NO: 10360 - protein, 1312 aa, Homo sapiens
LPPDTLGEVFVQFAPGAVSSLPPFSPPHFAASSCFFFSPFLAKTTNKTSQIEPACCRSRAPSPCELPSDPLLSMKQPIMADGPRCKRRKQANPRRKNVVNYDNVVDTGSETDEEDKLHIAEDDGIANPLDQETSPASVPNHESSPHVSQALLPREEEEDEIREGGVEHPWHNNEILQASVDGPEEMKEDYDTMGPEATIQTAINNGTVKNANCTSDFEEYFAKRKLEERDGHAVSIEEYLQRSDTAIIYPEAPEELSRLGTPEANGQEENDLPPGTPDAFAQLLTCPYCDRGYKRLTSLKEHIKYRHEKNEENFSCPLCSYTFAYRTQLERHMVTHKPGTDQHQMLTQGAGNRKFKCTECGKAFKYKHHLKEHLRIHSDSSLGRQLQLLSNQGNVTVILIIILGEKPYECPNCKKRFSHSGSYSSHISSKKCIGLISVNGRMRNNIKTGSSPNSVSSSPTNSAITQLRNKLENGKPLSMSEQTGLLKIKTEPLDFNDYKVLMATHGFSGTSPFMNGGLGATSPLGVHPSAQSPMQHLGVGMEAPLLGFPTMNSNLSEVQKVLQIVDNTVSRQKMDCKAEEISKLKGYHMKDPCSQPEEQGVTSPNIPPVGLPVVSHNGATKSIIDYTLEKVNEAKACLQSLTTDSRRQISNIKKEKLRTLIDLVTDDKMIENHNISTPFSCQFCKESFPGPIPLHQHERYLCKMNEEIKAVLQPHENIVPNKAGVFVDNKALLLSSVLSEKGMTSPINPYKDHMSVLKAYYAMNMEPNSDELLKISIAVGLPQEFVKEWFEQRKVYQYSNSRSPSLERSSKPLAPNSNPPTKDSLLPRSPVKPMDSITSPSIAELHNSVTNCDPPLRLTKPSHFTNIKPVEKLDHSRSNTPSPLNLSSTSSKNSHSSSYTPNSFSSEELQAEPLDLSLPKQMKEPKSIIATKNKTKASSISLDHNSVSSSSENSDEPLNLTFIKKEFSNSNNLDNKSTNPVFSMNPFSAKPLYTALPPQSAFPPATFMPPVQTSIPGLRPYPGLDQMSFLPHMAYTYPTGAATFADMQQRRKYQRKQGFQGELLDGAQDYMSGLDDMTDSDSCLSRKKIKKTESGMYACDLCDKTFQKSSSLLRHKYEHTGKRPHQCQICKKAFKHKHHLIEHSRLHSGEKPYQCDKCGKRFSHSGSYSQHMNHRYSYCKREAEEREAAEREAREKGHLEPTELLMNRAYLQSITPQGYSDSEERESMPRDGESEKEHEKEGEDGYGKLGRQDGDEEFEEEEEESENKSMDTDPETIRDEEETGDHSMDDSSEDGKMETKSDHEEDNMEDGM

SEQ ID NO: 10361 - protein, 1287 aa, Homo sapiens
LPPDTLGEVFVQFAPGAVSSLPPFSPPHFAASSCFFFSPFLAKTTNKTSQIEPACCRSRAPSPCELPSDPLLSMKQPIMADGPRCKRRKQANPRRKNVVNYDNVVDTGSETDEEDKLHIAEDDGIANPLDQETSPASVPNHESSPHVSQALLPREEEEDEIREGGVEHPWHNNEILQASVDGPEEMKEDYDTMGPEATIQTAINNGTVKNANCTSDFEEYFAKRKLEERDGHAVSIEEYLQRSDTAIIYPEAPEELSRLGTPEANGQEENDLPPGTPDAFAQLLTCPYCDRGYKRLTSLKEHIKYRHEKNEENFSCPLCSYTFAYRTQLERHMVTHKPGTDQHQMLTQGAGNRKFKCTECGKAFKYKHHLKEHLRIHSGEKPYECPNCKKRFSHSGSYSSHISSKKCIGLISVNGRMRNNIKTGSSPNSVSSSPTNSAITQLRNKLENGKPLSMSEQTGLLKIKTEPLDFNDYKVLMATHGFSGTSPFMNGGLGATSPLGVHPSAQSPMQHLGVGMEAPLLGFPTMNSNLSEVQKVLQIVDNTVSRQKMDCKAEEISKLKGYHMKDPCSQPEEQGVTSPNIPPVGLPVVSHNGATKSIIDYTLEKVNEAKACLQSLTTDSRRQISNIKKEKLRTLIDLVTDDKMIENHNISTPFSCQFCKESFPGPIPLHQHERYLCKMNEEIKAVLQPHENIVPNKAGVFVDNKALLLSSVLSEKGMTSPINPYKDHMSVLKAYYAMNMEPNSDELLKISIAVGLPQEFVKEWFEQRKVYQYSNSRSPSLERSSKPLAPNSNPPTKDSLLPRSPVKPMDSITSPSIAELHNSVTNCDPPLRLTKPSHFTNIKPVEKLDHSRSNTPSPLNLSSTSSKNSHSSSYTPNSFSSEELQAEPLDLSLPKQMKEPKSIIATKNKTKASSISLDHNSVSSSSENSDEPLNLTFIKKEFSNSNNLDNKSTNPVFSMNPFSAKPLYTALPPQSAFPPATFMPPVQTSIPGLRPYPGLDQMSFLPHMAYTYPTGAATFADMQQRRKYQRKQGFQGELLDGAQDYMSGLDDMTDSDSCLSRKKIKKTESGMYACDLCDKTFQKSSSLLRHKYEHTGKRPHQCQICKKAFKHKHHLIEHSRLHSGEKPYQCDKCGKRFSHSGSYSQHMNHRYSYCKREAEEREAAEREAREKGHLEPTELLMNRAYLQSITPQGYSDSEERESMPRDGESEKEHEKEGEDGYGKLGRQDGDEEFEEEEEESENKSMDTDPETIRDEEETGDHSMDDSSEDGKMETKSDHEEDNMEDGM

SEQ ID NO: 10362 - protein, 1263 aa, Homo sapiens
LPPDTLGEVFVQFAPGAVSSLPPFSPPHFAASSCFFFSPFLAKTTNKTSQIEPACCRSRAPSPCELPSDPLLSMKQPIMADGPRCKRRKQANPRRKNVVNYDNVVDTGSETDEEDKLHIAEDDGIANPLDQETSPASVPNHESSPHVSQALLPREEEEDEIREGGVEHPWHNNEILQASVDGPVKNANCTSDFEEYFAKRKLEERDGHAVSIEEYLQRSDTAIIYPEAPEELSRLGTPEANGQEENDLPPGTPDAFAQLLTCPYCDRGYKRLTSLKEHIKYRHEKNEENFSCPLCSYTFAYRTQLERHMVTHKPGTDQHQMLTQGAGNRKFKCTECGKAFKYKHHLKEHLRIHSGEKPYECPNCKKRFSHSGSYSSHISSKKCIGLISVNGRMRNNIKTGSSPNSVSSSPTNSAITQLRNKLENGKPLSMSEQTGLLKIKTEPLDFNDYKVLMATHGFSGTSPFMNGGLGATSPLGVHPSAQSPMQHLGVGMEAPLLGFPTMNSNLSEVQKVLQIVDNTVSRQKMDCKAEEISKLKGYHMKDPCSQPEEQGVTSPNIPPVGLPVVSHNGATKSIIDYTLEKVNEAKACLQSLTTDSRRQISNIKKEKLRTLIDLVTDDKMIENHNISTPFSCQFCKESFPGPIPLHQHERYLCKMNEEIKAVLQPHENIVPNKAGVFVDNKALLLSSVLSEKGMTSPINPYKDHMSVLKAYYAMNMEPNSDELLKISIAVGLPQEFVKEWFEQRKVYQYSNSRSPSLERSSKPLAPNSNPPTKDSLLPRSPVKPMDSITSPSIAELHNSVTNCDPPLRLTKPSHFTNIKPVEKLDHSRSNTPSPLNLSSTSSKNSHSSSYTPNSFSSEELQAEPLDLSLPKQMKEPKSIIATKNKTKASSISLDHNSVSSSSENSDEPLNLTFIKKEFSNSNNLDNKSTNPVFSMNPFSAKPLYTALPPQSAFPPATFMPPVQTSIPGLRPYPGLDQMSFLPHMAYTYPTGAATFADMQQRRKYQRKQGFQGELLDGAQDYMSGLDDMTDSDSCLSRKKIKKTESGMYACDLCDKTFQKSSSLLRHKYEHTGKRPHQCQICKKAFKHKHHLIEHSRLHSGEKPYQCDKCGKRFSHSGSYSQHMNHRYSYCKREAEEREAAEREAREKGHLEPTELLMNRAYLQSITPQGYSDSEERESMPRDGESEKEHEKEGEDGYGKLGRQDGDEEFEEEEEESENKSMDTDPETIRDEEETGDHSMDDSSEDGKMETKSDHEEDNMEDGM

SEQ ID NO: 10363 - protein, 501 aa, Homo sapiens
LPPDTLGEVFVQFAPGAVSSLPPFSPPHFAASSCFFFSPFLAKTTNKTSQIEPACCRSRAPSPCELPSDPLLSMKQPIMADGPRCKRRKQANPRRKNVVNYDNVVDTGSETDEEDKLHIAEDDGIANPLDQETSPASVPNHESSPHVSQALLPREEEEDEIREGGVEHPWHNNEILQASVDGPEEMKEDYDTMGPEATIQTAINNGTVKNANCTSDFEEYFAKRKLEERDGHAVSIEEYLQRSDTAIIYPEAPEELSRLGTPEANGQEENDLPPGTPDAFAQLLTCPYCDRGYKRLTSLKEHIKYRHEKNEENFSCPLCSYTFAYRTQLERHMVTHKPGTDQHQMLTQGAGNRKFKCTECGKAFKYKHHLKEHLRIHSGEKPYECPNCKKRFSHSGSYSSHISSKKCIGLISVNGRMRNNIKTGSSPNSVSSSPTNSAITQLRNKLENGKPLSMSEQTGLLKNSRRQWLMPVIPALWEANEGGSGQEFETSLANMVKHHLS

SEQ ID NO: 10364 - protein, 130 aa, Homo sapiens
LPSDPLLSMKQPIMADGPRCKRRKQANPRRKNVVNYDNVVDTGSETDEEDKLHIAEDDGIANPLDQETSPASVPNHESSPHVSQALLPREEEEDEIREGGVEHPWHNNEILQASVDGPESSLFLCLACLV

SEQ ID NO: 10365 - protein, 201 aa, Homo sapiens
LPPDTLGEVFVQFAPGAVSSLPPFSPPHFAASSCFFFSPFLAKTTNKTSQIEPACCRSRAPSPCELPSDPLLSMKQPIMADGPRCKRRKQANPRRKNVVNYDNVVDTGSETDEEDKLHIAEDDGIANPLDQETSPASVPNHESSPHVSQALLPREEEEDEIREGGVEHPWHNNEILQASVDGPGKCLKSLGLFLYHLHIFN

SEQ ID NO: 10366 - protein, 33 aa, Homo sapiens
LLTASVGATTAAVAAAILMAGRVRFWDSWRQWW

SEQ ID NO: 10367 - protein, 17 aa, Homo sapiens
MPRSPGFSRPPPISSLC

SEQ ID NO: 10368 - protein, 18 aa, Homo sapiens
MIMETVKRGQVTWAEIAV

SEQ ID NO: 10369 - protein, 614 aa, Homo sapiens
LSTFNFLENACNSAEAMPCVQAQYGSSPQGASPASQSYSYHSSGEYSSDFLTPEFVKFSMDLTNTEITATTSLPSFSTFMDNYSTGYDVKPPCLYQMPLSGQQSSIKVEDIQMHNYQQHSHLPPQSEEMMPHSGSVYYKPSSPPTPTTPGFQVQHSPMWDDPGSLHNFHQNYVATTHMIEQRKTPVSRLSLFSFKQSPPGTPVSSCQMRFDGPLHVPMNPEPAGSHHVVDGQTFAVPNPIRKPASMGFPGLQIGHASQLLDTQVPSPPSRGSPSNEGLCAVCGDNAACQHYGVRTCEGCKGFFKRTVQKNAKYVCLANKNCPVDKRRRNRCQYCRFQKCLAVGMVKEVVRTDSLKGRRGRLPSKPKSPQEPSPPSPPVSLISALVRAHVDSNPAMTSLDYSRFQANPDYQMSGDDTQHIQQFYDLLTGSMEIIRGWAEKIPGFADLPKADQDLLFESAFLELFVLRLAYRSNPVEGKLIFCNGVVLHRLQCVRGFGEWIDSIVEFSSNLQNMNIDISAFSCIAALAMVTERHGLKEPKRVEELQNKIVNCLKDHVTFNNGGLNRPNYLSKLLGKLPELRTLCTQGLQRIFYLKLEDLVPPPAIIDKLFLDTLPF

SEQ ID NO: 10370 - protein, 17 aa, Homo sapiens
LLFLGRRLDRLDSPLLF

SEQ ID NO: 10371 - protein, 23 aa, Homo sapiens
MNEDRRGELLRRRLDRLDSPLLF

SEQ ID NO: 10372 - protein, 9 aa, Homo sapiens
LTDCGVLSN

SEQ ID NO: 10373 - protein, 526 aa, Homo sapiens [sequence omitted]

SEQ ID NO: 10374 - protein, 706 aa, Homo sapiens
LGIPPLFAPPAQNHDSSSFHSRTSGKSNRNGPEKGVNGSINGSNTSSVIGINTSVLSTTASSSMGQTKSTSSGGGNRKCNQEQSKNQPLDARVDKIKDKKPRKKAMESSSNSDSDSGTSSDTSSEGISSSDSDDLEEDEEEEDQSIEESEDDDSDSESEAQHKSNNQVLLHGISDPKADGQKATEKAQEKRIHQPLPLASESQTHSFQSQQKQPQVLSQQLPFIFQSSQAKEESVNKHTSVIQSTGLVSNVKPLSLVNQAKKETYMKLIVPSPDVLKAGNKNTSEESSLLTSELRSKREQYKQAFPSQLKKQESSKSLKKVIAALSNPKATSSSPAHPKQTLENNHPNPFLTNALLGNHQPNGVIQSVIQEAPLALTTKTKMQSKINENIAAASSTPFSSPVNLSTSGRRTPGNQTPVMPSASPILHSQGKEKAVSNNVNPVKTQHHSHPAKSLVEQFRGTDSDIPSSKDSEDSNEDEEEDDEEEDEEDDEDDESDDSQSGTSKRRRVTDERELRIPLEYGWQRETRIRNFGGRLQGEVAYYAPCGKKLRQYPEVIKYLSRNGIMDISRDNFSFSAKIRVGDFYEARDGPQGMQWCLLKEEDVIPRIRAMEGRRGRPPNPDRQRAREESRMRRRKGRPPNVGNAEFLDNADAKLLRKLQAQEIARQAAQIKLLRKLQKQEQARVAKEAKKQQAIMLLRRSGSKKNR

SEQ ID NO: 10375 - protein, 238 aa, Homo sapiens
MESGERLPSSAASSTTPTSSSTPSVASVVSKGGLSTGVASLSSTINPCGAEWWRTTDAHTRTGATFFPPLLGIPPLFAPPAQNHDSSSFHSRTSGKSNRNGPEKGVNGSINGSNTSSVIGINTSVLSTTASSSMGQTKSTSSGGGNRKCNQEQSKNQPLDARVDKIKDKKPRKKAMESSSNSDSDSGTSSDTSSEGISSSDSDDLEEDEEEEDQSIEESEDDDSDSESEAQHKSNNQV

SEQ ID NO: 10376 - protein, 29 aa, Homo sapiens
LNWNKMQLPVGVTRPGAGDLRGEGTQLKA

SEQ ID NO: 10377 - protein, 23 aa, Homo sapiens
LTRNMDRLLRLGGGMPGLGQVSI

SEQ ID NO: 10378 - protein, 61 aa, Homo sapiens
LSFVFHSQAVEEEDKMTPEQLAIKNVGKQDPKRHLEEHVDVLMTSNIVQCLAAMLDTVVFK

SEQ ID NO: 10379 - protein, 26 aa, Homo sapiens
MLKKNIESRKEKKADSGKGVDRETCL

SEQ ID NO: 10380 - protein, 26 aa, Homo sapiens
LIPQSIESRKEKKADSGKGVDRETCL

SEQ ID NO: 10381 - protein, 138 aa, Homo sapiens
LSVKLKEEERMVEMFLEYQNQISRQNKLIQEKKDNLLKLIAEVKGKKQELEVLTANIQDLKEEYSRKKETISTANKANAERLKRLQKSADLYKDRLGLEIRKIYGEKLQFIFTNIDPKNPESPFMFSLHLNEARDYEE

SEQ ID NO: 10382 - protein, 137 aa, Homo sapiens
LTYRGRNLYLKPINDLSWASPSGAINTFGSQRRLWLLFRKELRIPECPVPPFSPRESKALSYIMVEDELALFDKSINEFWNKFKSTDTSCQMAGLRDTYKDSIKAFAEKLSVKLKEEERMVEMFLEYQNRTVLNALH

SEQ ID NO: 10383 - protein, 26 aa, Homo sapiens
LLARVGADLVWGRRRDSGLPAKHCPT

SEQ ID NO: 10384 - protein, 35 aa, Homo sapiens
LEEAVHWNAFTVIVMEAKYMKEKLLFVSLLIAPDD

SEQ ID NO: 10385 - protein, 54 aa, Homo sapiens
LSFHNPRILQKICGALRENLAEAVHWNAFTVIVMEAKYMKEKLLFVSLLIAPDD

SEQ ID NO: 10386 - protein, 560 aa, Homo sapiens
LAMALKGQEDYIYLFKDSTHPVDFLDAFRTFYLDGLFTDITLQCPSGIIFHCHRAVLAACSNYFKAMFTADMKEKFKNKIKLSGIHHDILEGLVNYAYTSQIEITKRNVQSLLEAADLLQFLSVKKACERFLVRHLDIDNCIGMHSFAEFHVCPELEKESRRILCSKFKEVWQQEEFLEISLEKFLFILSRKNLSVWKEEAIIEPVIKWTAHDVENRIECLYNLLSYINIDIDPVYLKTALGLQRSCLLTENKIRSLIYNALNPMHKEISQRSTATMYIIGGYYWHPLSEVHIWDPLTNVWIQGAEIPDYTRESYGVTCLGPNIYVTGGYRTDNIEALDTVWIYNSESDEWTEGLPMLNARYYHCAVTLGGCVYALGGYRKGAPAEEAEFYDPLKEKWIPIANMIKGVGNATACVLHDVIYVIGGHCGYRGSCTYDKVQSYNSDINEWSLITSSPHPEYGLCSVPFENKLYLVGGQTTITECYDPEQNEWREIAPMMERRMECGAVIMNGCIYVTGGYSYSKGTYLQSIEKYDPDLNKWEIVGNLPSAMRSHGCVCVYNV

SEQ ID NO: 10387 - protein, 596 aa, Homo sapiens
LAASERLFQRWSEGPEASPLPLATSPRASAASRAPAGAMALKGQEDYIYLFKDSTHPVDFLDAFRTFYLDGLFTDITLQCPSGIIFHCHRAVLAACSNYFKAMFTADMKEKFKNKIKLSGIHHDILEGLVNYAYTSQIEITKRNVQSLLEAADLLQFLSVKKACERFLVRHLDIDNCIGMHSFAEFHVCPELEKESRRILCSKFKEVWQQEEFLEISLEKFLFILSRKNLSVWKEEAIIEPVIKWTAHDVENRIECLYNLLSYINIDIDPVYLKTALGLQRSCLLTENKIRSLIYNALNPMHKEISQRSTATMYIIGGYYWHPLSEVHIWDPLTNVWIQGAEIPDYTRESYGVTCLGPNIYVTGGYRTDNIEALDTVWIYNSESDEWTEGLPMLNARYYHCAVTLGGCVYALGGYRKGAPAEEAEFYDPLKEKWIPIANMIKGVGNATACVLHDVIYVIGGHCGYRGSCTYDKVQSYNSDINEWSLITSSPHPEYGLCSVPFENKLYLVGGQTTITECYDPEQNEWREIAPMMERRMECGAVIMNGCIYVTGGYSYSKGTYLQSIEKYDPDLNKWEIVGNLPSAMRSHGCVCVYNV

SEQ ID NO: 10388 - protein, 316 aa, Homo sapiens
LPPPTPEPCSRLSESLSSPGARVREGTSENEEAAGGDAGQITPVRAEPSGSLGAVQRKGGSARLAVAEPRWPVSAPDQSRTLDSRGPGTTELMASSTPSSSATSSNAGADPNTTNLRPTTYDTWCGVAHGCTRKLGLKICGFLQRTNSLEEKSRLVSAFKERQSSKNLLSCENSDRDARFRRTETDFSNLFARDLLPAKNGEEQTVQFLLEVVDILLNYVRKTFDRSTKVLDFHHPHQLLEGMEGFNLELSDHPESLEQILVDCRDTLKYGVRTGHPRFFNQLSTGLDIIGLAGEWLTSTANTNMPSDMRECWLLR

SEQ ID NO: 10389 - protein, 472 aa, Homo sapiens
VPPAAQSLRCAGPRKSSPHSSRFSLQPVSAPDQSRTLDSRGPGTTELMASSTPSSSATSSNAGADPNTTNLRPTTYDTWCGVAHGCTRKLGLKICGFLQRTNSLEEKSRLVSAFKERQSSKNLLSCENSDRDARFRRTETDFSNLFARDLLPAKNGEEQTVQFLLEVVDILLNYVRKTFDRSTKVLDFHHPHQLLEGMEGFNLELSDHPESLEQILVDCRDTLKYGVRTGHPRFFNQLSTGLDIIGLAGEWLTSTANTNMFTYEIAPVFVLMEQITLKKMREIVGWSSKDGDGIFSPGGAISNMYSIMAARYKYFPEVKTKGMAAVPKLVLFTSEQSHYSIKKAGAALGFGTDNVILIKCNERGKIIPADFEAKILEAKQKGYVPFYVNATAGTTVYGAFDPIQEIADICEKYNLWLHVDGFNFSQLANRIICLATELMTNKGCVTWHPNYSVNMHHGCLGRWAAHVQEAPP

SEQ ID NO: 10390 - protein, 244 aa, Homo sapiens
LDSRGPGTTELMASSTPSSSATSSNAGADPNTTNLRPTTYDTWCGVAHGCTRKLGLKICGFLQRTNSLEEKSRLVSAFKERQSSKNLLSCENSDRDARFRRTETDFSNLFARDLLPAKNGEEQTVQFLLEVVDILLNYVRKTFDRSTKVLDFHHPHQLLEGMEGFNLELSDHPESLEQILVDCRDTLKYGVRTGHPRFFNQLSTGLDIIGLAGEWLTSTANTNMGRHIQHVQHHGCSLQVLPGS

SEQ ID NO: 10391 - protein, 605 aa, Homo sapiens
LDSRGPGTTELMASSTPSSSATSSNAGADPNTTNLRPTTYDTWCGVAHGCTRKLGLKICGFLQRTNSLEEKSRLVSAFKERQSSKNLLSCENSDRDARFRRTETDFSNLFARDLLPAKNGEEQTVQFLLEVVDILLNYVRKTFDRSTKVLDFHHPHQLLEGMEGFNLELSDHPESLEQILVDCRDTLKYGVRTGHPRFFNQLSTGLDIIGLAGEWLTSTANTNMFTYEIAPVFVLMEQITLKKMREIVGWSSKDGDGIFSPGGAISNMYSIMAARYKYFPEVKTKGMAAVPKLVLFTSEQSHYSIKKAGAALGFGTDNVILIKCNERGKIIPADFEAKILEAKQKGYVPFYVNATAGTTVYGAFDPIQEIADICEKYNLWLHVDAAWGGGLLMSRKHRHKLNGIERANSVTWNPHKMMGVLLQCSAILVKEKGILQGCNQMCAGYLFQPDKQYDVSYDTGDKAIQCGRHVDIFKFWLMWKAKGTVGFENQINKCLELAEYLYAKIKNREEFEMVFNGEPEHTNVCFWYIPQSLRGVPDSPQRREKLHKVAPKIKALMMESGTTMVGYQPQGDKANFFRMVISNPAATQSDIDFLIEEIERLGQDL

SEQ ID NO: 10392 - protein, 96 aa, Homo sapiens
LESCWMQGVVNRLSKLLKPGGMLLFRDYGRYDKTQLRFKKGHCLSENFYVRGDGTRAYFFTKGEVHSMFCKASLDEKQNLVDRRLQVNRKKQVKMH

SEQ ID NO: 10393 - protein, 10 aa, Homo sapiens
MSGQLIPGHL

SEQ ID NO: 10394 - protein, 464 aa, Homo sapiens
MLNTRLCFIFSAQLHVSMHQNVDAINIGCHAYLTGFFHPTWARGLRASARAAAGARLSRLERTQPAAGSAACPGALAASQPGLPQSAPRAHARSPRAASTPQGFGRAATGRLQRAGRRASARGHVTDANMAAPSGVHLLVRRGSHRIFSSPLNHIYLHKQSSSQQRRNFFFRRQRDISHSIVLPAAVSSAHPVPKHIKKPDYVTTGIVPDWGDSIEVKNEDQIQGLHQACQLARHVLLLAGKSLKVDMTTEEIDALVHREIISHNAYPSPLGYGGFPKSVCTSVNNVLCHGIPDSRPLQDGDIINIDVTVYYNGYHGDTSETFLVGNVDECGKKLVEVARRCRDEAIAACRAGAPFSVIGNTISHITHQNGFQVCPHFVGHGIGSYFHGHPEIWHHANDSDLPMEEGMAFTIEPIITEGSPEFKVLEDAWTVVSLDNQRSAQFEHTVLITSRGAQILTKLPHEA

SEQ ID NO: 10395 - protein, 106 aa, Homo sapiens
VVIELLLSVSGVAKPSQVYFGGTVVGEQAMKSEDEVGSLIEYEFRVINLGKPLTNLGTATLNIQWPKEISNGKWLLYLVKVESKGLEKVTCEPQKEINSLNLTVCR

SEQ ID NO: 10396 - protein, 54 aa, Homo sapiens
LCGFFKRSRYDDSVPRYHAVRIRKEEREIKDEKYIDNLEKKQWITKWNENESYS

SEQ ID NO: 10397 - protein, 83 aa, Homo sapiens
LRLGGQRKQEGSVNACEKTSFMFLRQELPVRLANIMKEISLLPDNLLRTPSVQLVQSWYIQSLQELLDFKDKSAEDAKAIYEE

SEQ ID NO: 10398 - protein, 40 aa, Homo sapiens
LGTRHQHGRSPRAAERSQSKEELKEIQICEVDFHGNLVIL

SEQ ID NO: 10399 - protein, 22 aa, Homo sapiens
LGTRHQHGRSPRAEAAVSSGRL

SEQ ID NO: 10400 - protein, 194 aa, Homo sapiens
MDARRVPQKDLRVKKNLKKFRYVKLISMETSSSSDDSCDSFASDNFANTRLQSVREGCRTRSQCRHSGPLRVAMKFPARSTRGATNKKAESRQPSENSVTDSNSDSEDESGMNFLEKRALNIKQNKAMLAKLMSELESFPGSFRGRHPLPGSDSVSTSSCLYTVVFWAHLRSICVVFKNLISLFVWPSRQTKGT

SEQ ID NO: 10401 - protein, 162 aa, Homo sapiens
VQDVLDHCGFLQKPRPDVTNELAGIFHADSDDESFCGFSESEIQDGMRLQSVREGCRTRSQCRHSGPLRVAMKFPARSTRGATNKKAESRQPSENSVTDSNSDSEDESGMNFLEKRALNIKQNKAMLAKLMSELESFPGSFRGRHPLPGSDSTNEGDLEETP

SEQ ID NO: 10402 - protein, 286 aa, Homo sapiens
VSSPRPSTMPPKKGGDGIKPPPIIGRFGTSLKIGIVGLPNVGKSTFFNVLTNSQASAENFPFCTIDPNESRVPVPDERFDFLCQYHKPASKIPAFLNVVDIAGLVKGAHNGQGLGNAFLSHISACDGIFHLTRAFEDDDITHVEGSVDPIRDIEIIHEELQLKDEEMIGPIIDKLEKVAVRGGDKKLKPEYDIMCKVKSWVIDQKKPVRFYHDWNDKEIEVLNKHLFLTSKPMVYLVNLSEKDYIRKKNKWLLESTDNKAEIILLKMEILSSSNLTHLNNRRRNKI

SEQ ID NO: 10403 - protein, 105 aa, Homo sapiens
LSPTADQRKETLCLQSVILNAISFLWSFFSKKGTKAPQAAGKIHTDFEKGFIMAEVMKYEDFKEEGSENAVKAAGKYRQQGRNYIVEDGDIIFFKFNTPQQPKKK

SEQ ID NO: 10404 - protein, 34 aa, Homo sapiens
MAAGKYRQQGRNYIVEDGDIIFFKFNTPQQPKKK

SEQ ID NO: 10405 - protein, 39 aa, Homo sapiens
LPARLSPADPGRSFPEKMPSAARGCGVVRSRCAIYQQDC

SEQ ID NO: 10406 - protein, 56 aa, Homo sapiens
LPARLSPADPGRSFPEKMPSAARGCGVVRSRCAAGVQWCHQFAAASTSQAQMILLP

SEQ ID NO: 10407 - protein, 17 aa, Homo sapiens
LNFSFLMRNFPEKISSL

SEQ ID NO: 10408 - protein, 313 aa, Homo sapiens
LFYNMSLDVNRKAESPPRFYFSSNGTSDVITGSIQVSSREANCRTHQAFMRKDVRDILTPIQIEAAYHLGPHVISKRSTEEFPPLQPILQQKKEKDIMKKTINFARFCAHENCSADLQVSAKIGFLKPHENKTYLAVGSMKTLMLNVSLFNAGDDAYETTLHVKLPVGLYFIKILELEEKQINCEVTDNSGVVQLDCSIGYIYVDHLSRIDISFLLDVSSLSRAEEDLSITVHATCENEEEMDNLKHSRVTVAIPLKYEVKLTVHGFVNPTSFVYGSNDENEPETCMVEKMNLTFHVRKVNCVNICNNLKGCH

SEQ ID NO: 10409 - protein, 332 aa, Homo sapiens
LKYPMMRGPDPAAAPYSTQKSSVLPLYENTFQELQVMRRSLNLFRTQMMDLELAMLRQQTMVYHHMTEEERFEVDQLQGLRNSVRMELQDLELQLEERLLGLEEQLRAVRMPSPFRSSALMGMCGSRSADNLSCPSPLNVMEPVTELMQEQSYLKSELGLGLGEMGFEIPPGESSESVFSQATSESSSVCSGPSHANRRTGVPSTASVGKSKTPLVARKKVFRASVALTPTAPSRTGSVQTPPDLESSEEVDAAEGAPEVVGPKSEVEEGHGKLPSMPAAEEMHKNVEQDELQQVIREIKESIVGEIRREIVSGLLAAVSSSKASNSKQDYH

SEQ ID NO: 10410 - protein, 127 aa, Homo sapiens
MVEEENIRVVRCGGSELNFRRAVFSADSKYIFCVSGDFVKVYSTVTEECVHILHGHRNLVTGIQLNPNNHLQLYSCSLDGTIKLWDYIDGILIKTFIVGCKLHALFTLAQAEDSVFVIVNKEKPGMV

SEQ ID NO: 10411 - protein, 187 aa, Homo sapiens
MVEEENIRVVRCGGSELNFRRAVFSADSKYIFCVSGDFVKVYSTVTEECVHILHGHRNLVTGIQLNPNNHLQLYSCSLDGTIKLWDYIDGILIKTFIVGCKLHALFTLAQAEDSVFVIVNKEKPDIFQLVSVKLPKSSSQEVEAKELSFVLDYINQSPKCIAFGNEVNFVLFVFCFVPKISFLQSLF

SEQ ID NO: 10412 - protein, 781 aa, Homo sapiens
LESSLTPTTIYRFPYMHCEYPKELYSCSLDGTIKLWDYIDGILIKTFIVGCKLHALFTLAQAEDSVFVIVNKEKPDIFQLVSVKLPKSSSQEVEAKELSFVLDYINQSPKCIAFGNEGVYVAAVREFYLSVYFFKKKTTSRFTLSSSRNKKHAKNNFTCVACHPTEDCIASGHMDGKIRLWRNFYDDKKYTYTCLHWHHDMVMDLAFSVTGTSLLSGGRESVLVEWRDATEKNKEFLPRLGATIEHISVSPAGDLFCTSHSDNKIIIIHRNLEASAVIQGLVKDRSIFTGLMIDPRTKALVLNGKPGHLQFYSLQSDKQLYNLDIIQQEYINDYGLIQIELTKAAFGCFGNWLATVEQRQEKETELELQMKLWMYNKKTQGFILNTKINMPHEDCITALCFCNAEKSEQPTLVTASKDGYFKVWILTDDSDIYKKAVGWTCDFVGSYHKYQATNCCFSEDGSLLAVSFEEIVTIWDSVTWELKCTFCQRAGKIRHLCFGRLTCSKYLLGATENGILCCWNLLSCALEWNAKLNVRVMEPDPNSENIAAISQSSVGSDLFVFKPSEPRPLYIQKGISREKVQWGVFVPRDVPESFTSEAYQWLNRSQFYFLTKSQSLLTFSTKSPEEKLTPTSKQLLAEESLPTTPFYFILGKHRQQQDEKLNETLENELVQLPLTENIPAISELLHTPAHVLPSAAFLCSMFVNSLLLSKETKSAKEIPEDVDMEEEKESEDSDEENDFTEKVQDTSNTGLGEDIIHQLSKSEEKELRKFRKIDYSWIAAL

SEQ ID NO: 10413 - protein, 50 aa, Homo sapiens
LLFVTTSADRSIFTGLMIDPRTKALVLNGKPGHLQFYSLQSDKQLYNVRF

SEQ ID NO: 10414 - protein, 66 aa, Homo sapiens
LSHLASNRMMAETKGGQAERKRARKSDKSGRPSAPIPPHRRAPHSLSPGPERNEASCASRRHSLFT

SEQ ID NO: 10415 - protein, 562 aa, Homo sapiens [sequence omitted]

SEQ ID NO: 10416 - protein, 767 aa, Homo sapiens
LLLWLNPQALVGAQGGRMSQWYELQQLDSKFLEQVHQLYDDSFPMEIRQYLAQWLEKQDWEHAANDVSFATIRFHDLLSQLDDQYSRFSLENNFLLQHNIRKSKRNLQDNFQEDPIQMSMIIYSCLKEERKILENAQRFNQAQSGNIQSTVMLDKQKELDSKVRNVKDKVMCIEHEIKSLEDLQDEYDFKCKTLQNREHETNGVAKSDQKQEQLLLKKMYLMLDNKRKEVVHKIIELLNVTELTQNALINDELVEWKRRQQSACIGGPPNACLDQLQNWFTIVAESLQQVRQQLKKLEELEQKYTYEHDPITKNKQVLWDRTFSLFQQLIQSSFVVERQPCMPTHPQRPLVLKTGVQFTVKLRLLVKLQELNYNLKVKVLFDKDVNERNTVKGFRKFNILGTHTKVMNMEESTNGSLAAEFRHLQLKEQKNAGTRTNEGPLIVTEELHSLSFETQLCQPGLVIDLETTSLPVVVISNVSQLPSGWASILWYNMLVAEPRNLSFFLTPPCARWAQLSEVLSWQFSSVTKRGLNVDQLNMLGEKLLGPNASPDGLIPWTRFCKENINDKNFPFWLWIESILELIKKHLLPLWNDGCIMGFISKERERALLKDQQPGTFLLRFSESSREGAITFTWVERSQNGGEPDFHAVEPYTKKELSAVTFPDIIRNYKVMAAENIPENPLKYLYPNIDKDHAFGKYYSRPKEAPEPMELDGPKGTGYIKTELISVSEVHPSRLQTTDNLLPMSPEEFDEVSRIVGSVEFDSMMNTV

SEQ ID NO: 10417 - protein, 524 aa, Homo sapiens
MKSRAWKIYKMNMTSNAKPCRTEEVVHKIIELLNVTELTQNALINDELVEWKRRQQSACIGGPPNACLDQLQNWFTIVAESLQQVRQQLKKLEELEQKYTYEHDPITKNKQVLWDRTFSLFQQLIQSSFVVERQPCMPTHPQRPLVLKTGVQFTVKLRLLVKLQELNYNLKVKVLFDKDVNERNTVKGFRKFNILGTHTKVMNMEESTNGSLAAEFRHLQLKEQKNAGTRTNEGPLIVTEELHSLSFETQLCQPGLVIDLETTSLPVVVISNVSQLPSGWASILWYNMLVAEPRNLSFFLTPPCARWAQLSEVLSWQFSSVTKRGLNVDQLNMLGEKLLGPNASPDGLIPWTRFCKENINDKNFPFWLWIESILELIKKHLLPLWNDGCIMGFISKERERALLKDQQPGTFLLRFSESSREGAITFTWVERSQNGGEPDFHAVEPYTKKELSAVTFPDIIRNYKVMAAENIPENPLKYLYPNIDKDHAFGKYYSRPKEAPEPMELDGPKGTGYIKTELISVSEV

SEQ ID NO: 10418 - protein, 729 aa, Homo sapiens
LLLWLNPQALVGAQGGRMSQWYELQQLDSKFLEQVHQLYDDSFPMEIRQYLAQWLEKQDWEHAANDVSFATIRFHDLLSQLDDQYSRFSLENNFLLQHNIRKSKRNLQDNFQEDPIQMSMIIYSCLKEERKILENAQRFNQAQSGNIQSTVMLDKQKELDSKVRNVKDKVMCIEHEIKSLEDLQDEYDFKCKTLQNREHETNGVAKSDQKQEQLLLKKMYLMLDNKRKEVVHKIIELLNVTELTQNALINDELVEWKRRQQSACIGGPPNACLDQLQNWFTIVAESLQQVRQQLKKLEELEQKYTYEHDPITKNKQVLWDRTFSLFQQLIQSSFVVERQPCMPTHPQRPLVLKTGVQFTVKLRLLVKLQELNYNLKVKVLFDKDVNERNTVKGFRKFNILGTHTKVMNMEESTNGSLAAEFRHLQLKEQKNAGTRTNEGPLIVTEELHSLSFETQLCQPGLVIDLETTSLPVVVISNVSQLPSGWASILWYNMLVAEPRNLSFFLTPPCARWAQLSEVLSWQFSSVTKRGLNVDQLNMLGEKLLGPNASPDGLIPWTRFCKENINDKNFPFWLWIESILELIKKHLLPLWNDGCIMGFISKERERALLKDQQPGTFLLRFSESSREGAITFTWVERSQNGGEPDFHAVEPYTKKELSAVTFPDIIRNYKVMAAENIPENPLKYLYPNIDKDHAFGKYYSRPKEAPEPMELDGPKGTGYIKTELISVSEV

SEQ ID NO: 10419 - protein, 182 aa, Homo sapiens
MLVAEPRNLSFFLTPPCARWAQLSEVLSWQFSSVTKRGLNVDQLNMLGEKLLGPNASPDGLIPWTRFCKENINDKNFPFWLWIESILELIKKHLLPLWNDGCIMGFISKERERALLKDQQPGTFLLRFSESSREGAITFTWVERSQNGGGEWEFEHIVPPFHVCEVPLHRRQSAHTDSAFGT

SEQ ID NO: 10420 - protein, 210 aa, Homo sapiens
LLLWLNPQALVGAQGGRMSQWYELQQLDSKFLEQVHQLYDDSFPMEIRQYLAQWLEKQDWEHAANDVSFATIRFHDLLSQLDDQYSRFSLENNFLLQHNIRKSKRNLQDNFQEDPIQMSMIIYSCLKEERKILENAQRFNQAQSGNIQSTVMLDKQKELDSKVRNVKDKVMCIEHEIKSLEDLQDEYDFKCKTLQNRGSSSQNNRVAECH

SEQ ID NO: 10421 - protein, 35 aa, Homo sapiens
LAPNVLCVAAPLVESPGPCWGTRWQDVSVVRTSAA

SEQ ID NO: 10422 - protein, 7 aa, Homo sapiens
MASAAFS

SEQ ID NO: 10423 - protein, 1164 aa, Homo sapiens
VAGLLPPPLSTPQLGAHGSLNRGAWRQYQSARRAVGRQPRDSLGRTAAAGAPQPRAGPASRSATGERGRRGGGVAPGEVAPGELETMAKMEVKTSLLDNMIGVGDMVLLEPLNEETFINNLKKRFDHSEIYTYIGSVVISVNPYRSLPIYSPEKVEEYRNRNFYELSPHIFALSDEAYRSLRDQDKDQCILITGESGAGKTEASKLVMSYVAAVCGKGAEVNQVKEQLLQSNPVLEAFGNAKTVRNDNSSRFGKYMDIEFDFKGDPLGGVISNYLLEKSRVVKQPRGERNFHVFYQLLSGASEELLNKLKLERDFSRYNYLSLDSAKVNGVDDAANFRTVRNAMQIVGFMDHEAESVLAVVAAVLKLGNIEFKPESRVNGLDESKIKDKNELKEICELTGIDQSVLERAFSFRTVEAKQEKVSTTLNVAQAYYARDALAKNLYSRLFSWLVNRINESIKAQTKVRKKVMGVLDIYGFEIFEDNSFEQFIINYCNEKLQQIFIELTLKEEQEEYIREDIEWTHIDYFNNAIICDLIENNTNGILAMLDEECLRPGTVTDETFLEKLNQVCATHQHFESRMSKCSRFLNDTSLPHSCFRIQHYAGKVLYQVEGFVDKNNDLLYRDLSQAMWKASHALIKSLFPEGNPAKINLKRPPTAGSQFKASVATLMKNLQTKNPNYIRCIKPNDKKAAHIFNEALVCHQIRYLGLLENVRVRRAGYAFRQAYEPCLERYKMLCKQTWPHWKGPARSGVEVLFNELEIPVEEYSFGRSKIFIRNPRTLFKLEDLRKQRLEDLATLIQKIYRGWKCRTHFLLMKKSQIVIAAWYRRYAQQKRYQQTKSSALVIQSYIRGWKARKILRELKHQKRCKEAVTTIAAYWHGTQVRREYRKFFRANAGKKIYEFTLQRIVQKYFLEMKNKMPSLSPIDKNWPSRPYLFLDSTHKELKRIFHLWRCKKYRDQFTDQQKLIYEEKLEASELFKDKKALYPSSVGQPFQGAYLEINKNPKYKKLKDAIEEKIIIAEVVNKINRANGKSTSRIFLLTNNNLLLADQKSGQIKSEVPLVDVTKVSMSSQNDGFFAVHLKEGSEAASKGDFLFSSDHLIEMATKLYRTTLSQTKQKLNIEISDEFLVQFRQDKVCVKFIQGNQKNGSVPTCKRKNNRLLEVAVP

SEQ ID NO: 10424 - protein, 1214 aa, Homo sapiens
LSTPQLGAHGSLNRGAWRQYQSARRAVGRQPRDSLGRTAAAGAPQPRAGPASRSATGERGRRGGGVAPGEVAPGELETMAKMEVKTSLLDNMIGVGDMVLLEPLNEETFINNLKKRFDHSEIYTYIGSVVISVNPYRSLPIYSPEKVEEYRNRNFYELSPHIFALSDEAYRSLRDQDKDQCILITGESGAGKTEASKLVMSYVAAVCGKGAEVNQVKEQLLQSNPVLEAFGNAKTVRNDNSSRFGKYMDIEFDFKGDPLGGVISNYLLEKSRVVKQPRGERNFHVFYQLLSGASEELLNKLKLERDFSRYNYLSLDSAKVNGVDDAANFRTVRNAMQIVGFMDHEAESVLAVVAAVLKLGNIEFKPESRVNGLDESKIKDKNELKEICELTGIDQSVLERAFSFRTVEAKQEKVSTTLNVAQAYYARDALAKNLYSRLFSWLVNRINESIKAQTKVRKKVMGVLDIYGFEIFEDNSFEQFIINYCNEKLQQIFIELTLKEEQEEYIREDIEWTHIDYFNNAIICDLIENNTNGILAMLDEECLRPGTVTDETFLEKLNQVCATHQHFESRMSKCSRFLNDTSLPHSCFRIQHYAGKVLYQVEGFVDKNNDLLYRDLSQAMWKASHALIKSLFPEGNPAKINLKRPPTAGSQFKASVATLMKNLQTKNPNYIRCIKPNDKKAAHIFNEALVCHQIRYLGLLENVRVRRAGYAFRQAYEPCLERYKMLCKQTWPHWKGPARSGVEVLFNELEIPVEEYSFGRSKIFIRNPRTLFKLEDLRKQRLEDLATLIQKIYRGWKCRTHFLLMKKSQIVIAAWYRRYAQQKRYQQTKSSALVIQSYIRGWKARKILRELKHQKRCKEAVTTIAAYWHGTQARRELRRLKEEARNKHAIAVIWAYWLGSKARRELKRLKEEARRKHAVAVIWAYWLGLKVRREYRKFFRANAGKKIYEFTLQRIVQKYFLEMKNKMPSLSPIDKNWPSRPYLFLDSTHKELKRIFHLWRCKKYRDQFTDQQKLIYEEKLEASELFKDKKALYPSSVGQPFQGAYLEINKNPKYKKLKDAIEEKIIIAEVVNKINRANGKSTSRIFLLTNNNLLLADQKSGQIKSEVPLVDVTKVSMSSQNDGFFAVHLKEGSEAASKGDFLFSSDHLIEMATKLYRTTLSQTKQKLNIEISDEFLVQFRQDKVCVKFIQGNQKNGSVPTCKRKNNRLLEVAVP

SEQ ID NO: 10425 - protein, 1110 aa, Homo sapiens
LETMAKMEVKTSLLDNMIGVGDMVLLEPLNEETFINNLKKRFDHSEIYTYIGSVVISVNPYRSLPIYSPEKVEEYRNRNFYELSPHIFALSDEAYRSLRDQDKDQCILITGESGAGKTEASKLVMSYVAAVCGKGAEVNQVKEQLLQSNPVLEAFGNAKTVRNDNSSRFGKYMDIEFDFKGDPLGGVISNYLLEKSRVVKQPRGERNFHVFYQLLSGASEELLNKLKLERDFSRYNYLSLDSAKVNGVDDAANFRTVRNAMQIVGFMDHEAESVLAVVAAVLKLGNIEFKPESRVNGLDESKIKDKNELKEICELTGIDQSVLERAFSFRTVEAKQEKVSTTLNVAQAYYARDALAKNLYSRLFSWLVNRINESIKAQTKVRKKVMGVLDIYGFEIFEDNSFEQFIINYCNEKLQQIFIELTLKEEQEEYIREDIEWTHIDYFNNAIICDLIENNTNGILAMLDEECLRPGTVTDETFLEKLNQVCATHQHFESRMSKCSRFLNDTSLPHSCFRIQHYAGKVLYQVEGFVDKNNDLLYRDLSQAMWKASHALIKSLFPEGNPAKINLKRPPTAGSQFKASVATLMKNLQTKNPNYIRCIKPNDKKAAHIFNEALVCHQIRYLGLLENVRVRRAGYAFRQAYEPCLERYKMLCKQTWPHWKGPARSGVEVLFNELEIPVEEYSFGRSKIFIRNPRTLFKLEDLRKQRLEDLATLIQKIYRGWKCRTHFLLMKKSQIVIAAWYRRYAQQKRYQQTKSSALVIQSYIRGWKARKILRELKHQKRCKEAVTTIAAYWHGTQARRELKRLKEEARRKHAVAVIWAYWLGLKVRREYRKFFRANAGKKIYEFTLQRIVQKYFLEMKNKMPSLSPIDKNWPSRPYLFLDSTHKELKRIFHLWRCKKYRDQFTDQQKLIYEEKLEASELFKDKKALYPSSVGQPFQGAYLEINKNPKYKKLKDAIEEKIIIAEVVNKINRANGKSTSRIFLLTNNNLLLADQKSGQIKSEVPLVDVTKVSMSSQNDGFFAVHLKEGSEAASKGDFLFSSDHLIEMATKLYRTTLSQTKQKLNIEISDEFLVQFRQDKVCVKFIQGNQKNGSVPTCKRKNNRLLEVAVP

SEQ ID NO: 10426 - protein, 267 aa, Homo sapiens
MCGISHGLRCLSVIVLRELVAWFIKLFFIFSIQDNSFEQFIINYCNEKLQQIFIELTLKEEQEEYIREDIEWTHIDYFNNAIICDLIENNTNGILAMLDEECLRPGTVTDETFLEKLNQVCATHQHFESRMSKCSRFLNDTSLPHSCFRIQHYAGKVLYQVEGFVDKNNDLLYRDLSQAMWKASHALIKSLFPEGNPAKINLKRPPTAGSQFKASVATLMKNLQTKNPNYIRYFWHMKLSQFKCESTPKEYHFSLCFNLSVAQAEGN

SEQ ID NO: 10427 - protein, 8 aa, Homo sapiens
LATCGKNK

SEQ ID NO: 10428 - protein, 108 aa, Homo sapiens
LKDAASEMNIEDWGGFKQVETDGMDTGLGSSASPTSAEEHRKFCSTGFLCSSTYASSFSLVACRAWLALRPEVLKSAGILHLCNLLLSPSHHRNQSLEAFGLGAAFTV

SEQ ID NO: 10429 - protein, 84 aa, Homo sapiens
LNDELEIIEGMKFDRGYISPYFINTSKGQKCEFQDAYVLLSEKKISSIQSIVPALEIANAHRKPLVIIAEDVDGEALSTLVLNR

SEQ ID NO: 10430 - protein, 158 aa, Homo sapiens
MLRLPTVFRQMRPVSRVLAPHLTRAYAKDVKFGADARALMLQGVDLLADAVAVTMGPKGRTVIIEQSWGSPKVTKDGVTVAKSIDLKDKYKNIGAKLVQDVANNTNEEAGDGTTTATVLARSIAKEGFEKISKGANPVEIRRGRNVCCHHSVLNFSVL

SEQ ID NO: 10431 - protein, 170 aa, Homo sapiens
LRRALGANRGARRGDRPPSLGGARGLAATAGASAPARWVIFSRVARAGLRVSLRRYTRAEYESEAEGVMAGQAFRKFLPLFDRVLVERSAAETVTKGGIMLPEKSQGKVLQATVVAVGSGSKGKGGEIQPVSVKVGDKVLLPEYGGTKVVLDDKDYFLFRDGDILGKYVD

SEQ ID NO: 10432 - protein, 25 aa, Homo sapiens
VSPGPDCESLCGATLEQSTSLRRRE

SEQ ID NO: 10433 - protein, 95 aa, Homo sapiens
LRVSLRRYTRAEYESEAEGVMAGQAFRKFLPLFDRVLVERSAAETVTKGGIMLPEKSQGKVLQATVVAVGSGSKGKVNGSCSGTIFYSVQWREKK

SEQ ID NO: 10434 - protein, 117 aa, Homo sapiens
LRRYTRAEYESEAEGVMAGQAFRKFLPLFDRVLVERSAAETVTKGGIMLPEKSQGKVLQATVVAVGSGSKGKGGEIQPVSVKVGDKVLLPEYGGTKVVLDDKVCKLNNSKKKSDICN

SEQ ID NO: 10435 - protein, 126 aa, Homo sapiens
MYSTVALPVDNVITFSFCFKTFLFLQAGQAFRKFLPLFDRVLVERSAAETVTKGGIMLPEKSQGKVLQATVVAVGSGSKGKGGEIQPVSVKVGDKVLLPEYGGTKVVLDDKVCKLNNSKKKSDICN

SEQ ID NO: 10436 - protein, 20 aa, Homo sapiens
LKWHQHDAAHSTEVLKSFVM

SEQ ID NO: 10437 - protein, 248 aa, Homo sapiens
VMECPVMETGSLFTSGIKRHLKDKRISKTTKLNVSLASKIKTKILNNSSIFKISLKHNNRALAQALSREKENSRRITTEKMLLQKEVEKLNFENTFLRLKLNNLNKKLIDIEALMNNNLITAIEMSSLSEFHQSSFLLSASKKKRISKQCKLMRLPFARVPLTSNDDEDEDKEKMQCDNNIKSKTLPDIPSSGSTTQPLSTQDNSEVLFLKENNQNVYGLDDSEHISSIVDVPPRGEIVLKIHFEYLY

SEQ ID NO: 10438 - protein, 1266 aa, Homo sapiens
VMECPVMETGSLFTSGIKRHLKDKRISKTTKLNVSLASKIKTKILNNSSIFKISLKHNNRALAQALSREKENSRRITTEKMLLQKEVEKLNFENTFLRLKLNNLNKKLIDIEALMNNNLITAIEMSSLSEFHQSSFLLSASKKKRISKQCKLMRLPFARVPLTSNDDEDEDKEKMQCDNNIKSKTLPDIPSSGSTTQPLSTQDNSEVLFLKENNQNVYGLDDSEHISSIVDVPPRESHSHSDQSSKTSLMSEMRNAQSIGRRWEKPSPSNVTERKKRGSSWESNNLSADTPCATVLDKQHISSPELNCNNEINGHTNETNTEMQRNKQDLPGLSSESAREPNAECMNQIEDNDDFQLQKTVYDADMDLTASEVSKIVTVSTGIKKKSNKKTNEHGMKTFRKVKDSSSEKKRERSKRQFKNSSDVDIGEKIENRTERSDVLDGKRGAEDPGFIFNNEQLAQMNEQLAQVNELKKMTLQTGFEQGDRENVLCNKKEKRITNEQEETYSLSQSSGKFHQESKFDKGQNSLTCNKSKASRQTFVIHKLEKDNLLPNQKDKVTIYENLDVTNEFHTANLSTKDNGNLCDYGTHNILDLKKYVTDIQPSEQNESNINKLRKKVNRKTEIISGMNHMYEDNDKDVVHGLKKGNFFFKTQEDKEPISENIEVSKELQIPALSTRDNENQCDYRTQNVLGLQKQITNMYPVQQNESKVNKKLRQKVNRKTEIISEVNHLDNDKSIEYTVKSHSLFLTQKDKEIIPGNLEDPSEFETPALSTKDSGNLYDSEIQNVLGVKHGHDMQPACQNDSKIGKKPRLNVCQKSEIIPETNQIYENDNKGVHDLEKDNFFSLTPKDKETISENLQVTNEFQTVDLLIKDNGNLCDYDTQNILELKKYVTDRKSAEQNESKINKLRNKVNWKTEIISEMNQIYEDNDKDAHVQESYTKDLDFKVNKSKQKLECQDIINKHYMEVNSNEKESCDQILDSYKVVKKRKKESSCKAKNILTKAKNKLASQLTESSQTSISLESDLKHITSEADSDPGNPVELCKTQKQSTTTLNKKDLPFVEEIKEGECQVKKVNKMTSKSKKRKTSIDPSPESHEVMERILDSVQGKSTVSEQADKENNLENEKMVKNKPDFYTKAFRSLSEIHSPNIQDSSFDSVREGLVPLSVSSGKNVIIKENFALECSPAFQVSDDEHEKMNKMKFKVNRRTQKSGIGDRPLQDLSNTSFVSNNTAESENKSEDLSSERTSRRRRCTPFYFKEPSLRDKMRR

SEQ ID NO: 10439 - protein, 85 aa, Homo sapiens
LEALQENLFLALSIPDGCWQSLACGCITPVSAVSLMECPVMETGSLFTSGIKRHLKDKRISKTTKLNVSLASKIKTKILSKCHQF

SEQ ID NO: 10440 - protein, 79 aa, Homo sapiens
MLLQKEVEKLNFENTFLRLKLNNLNKKLIDIEALMNNNLITAIEMSSLSEFHQSSFLLSASKKKRISKQCKLMRLPFAR

SEQ ID NO: 10441 - protein, 94 aa, Homo sapiens
LNKKLIDIEALMNNNLITAIEMSSLSEFHQSSFLLSASKKKRISKQCKLMRLPFASRTWWLMPVIPALWEAEAGGSRGQEIETILANMVKPRLY

SEQ ID NO: 10442 - protein, 31 aa, Homo sapiens
MCNDSGKVPCEVTVSEFCSCRMCSTLKGWQQ

SEQ ID NO: 10443 - protein, 412 aa, Homo sapiens
LGAPSRRLGERRLRWQRQESPAATGRVLMAEIGEDLDKSDVSSLIFLMKDYMGRGKISKEKSFLDLVVELEKLNLVAPDQLDLLEKCLKNIHRIDLKTKIQKYKQSVQGAGTSYRNVLQAAIQKSLKDPSNNFRLHNGRSKEQRLKEQLGAQQEPVKKSIQESEAFLPQSIPEERYKMKSKPLGICLIIDCIGNETELLRDTFTSLGYEVQKFLHLSMHGISQILGQFACMPEHRDYDSFVCVLVSRGGSQSVYGVDQTHSGLPLHHIRRMFMGDSCPYLAGKPKMFFIQNYVVSEGQLEDSSLLEVDGPAMKNVEFKAQKRGLCTVHREADFFWSLCTADMSLLEQSHSSPSLYLQCLSQKLRQERKRPLLDLHIELNGYMYDWNSRVSAKEKYYVWLQHTLRKKLILSYT

SEQ ID NO: 10444 - protein, 53 aa, Homo sapiens
LANSGRPLQPQPQRPTRELQWRALSVVTPPLERILKEMKSALRNEVDCLLAFC

SEQ ID NO: 10445 - protein, 100 aa, Homo sapiens
VAGIRREAVQQAEVLGRPPAKPPVDAFDFLSLFLVPSGAFPILVLRSSRSELVRRGWELVPAEIQWEEPAAARATPPLERILKEMKSALRNEVDCLLAFC

SEQ ID NO: 10446 - protein, 44 aa, Homo sapiens
MWGFLADEFICCFISFTITPPLERILKEMKSALRNEVDCLLAFC

SEQ ID NO: 10447 - protein, 39 aa, Homo sapiens
LIRFSEKFPFNHRTPPLERILKEMKSALRNEVDCLLAFC

SEQ ID NO: 10448 - protein, 173 aa, Homo sapiens
LDILRERGKLSVGDLAELLYRVRRFDLLKRILKMDRKAVETHLLRNPHLVSDYRVLMAEIGEDLDKSDVSSLIFLMKDYMGRGKISKEKSFLDLVVELEKLNLVAPDQLDLLEKCLKNIHRIDLKTKIQKYKQSVQGAGTSYRNVLQAAIQKSLKDPSNNFRVSLEKTYGIPA

SEQ ID NO: 10449 - protein, 121 aa, Homo sapiens
LRVLMAEIGEDLDKSDVSSLIFLMKDYMGRGKISKEKSFLDLVVELEKLNLVAPDQLDLLEKCLKNIHRIDLKTKIQKYKQSVQGAGTSYRNVLQAAIQKSLKDPSNNFRVSLEKTYGIPA

SEQ ID NO: 10450 - protein, 372 aa, Homo sapiens
LVCRVLMAEIGEDLDKSDVSSLIFLMKDYMGRGKISKEKSFLDLVVELEKLNLVAPDQLDLLEKCLKNIHRIDLKTKIQKYKQSVQGAGTSYRNVLQAAIQKSLKDPSNNFRLHNGRSKEQRLKEQLGAQQEPVKKSIQESEAFLPQSIPEERYKMKSKPLGICLIIDCIGNETELLRDTFTSLGYEVQKFLHLSMHGISQILGQFACMPEHRDYDSFVCVLVSRGGSQSVYGVDQTHSGLPLHHIRRMFMGDSCPYLAGKPKMFFIQNYVVSEGQLEDSSLLEVDGPAMKNVEFKAQKRGLCTVHREADFFWSLCTADMSLLEQSHSSPSLYLQCLSQKLRQERGTIPGSGITESKDMHFSSLGCILLDVL

SEQ ID NO: 10451 - protein, 89 aa, Homo sapiens
VLMAEIGEDLDKSDVSSLIFLMKDYMGRGKISKEKSFLDLVVELEKLNLVAPDQLDLLEKCLKNIHRIDLKTKIQKYKQSGKNFGLSVV

SEQ ID NO: 10452 - protein, 121 aa, Homo sapiens
MVSLSHPPEEPVKKSIQESEAFLPQSIPEERYKMKSKPLGICLIIDCIGNETGRCGSCRLTGAPRLRSWHRQAVFIGVISTNCRDKPVQESVLHPGCGGSCLEFQHFVRLRWEDHLSPVKN

SEQ ID NO: 10453 - protein, 8 aa, Homo sapiens
VEGLGSVF

SEQ ID NO: 10454 - protein, 57 aa, Homo sapiens
MLIFSSFSCKAPLYDLAAHEDKVLSVDWTDTGLLLSGGADNKLYSYRYSPTTSHVGA

SEQ ID NO: 10455 - protein, 432 aa, Homo sapiens
VGKSCVLLAMAQLQTRFYTDNKKYAVDDVPFSIPAASEIADLSNIINKLLKDKNEFHKHVEFDFLIKGQFLRMPLDKHMEMENISSEEVVEIEYVEKYTAPQPEQCMFHDDWISSIKGAEEWILTGSYDKTSRIWSLEGKSIMTIVGHTDVVKDVAWVKKDSLSCLLLSASMDQTILLWEWNVERNKVKALHCCRGHAGSVDSIAVDGSGTKFCSGSWDKMLKIWSTVPTDEEDEMEESTNRPRKKQKTEQLGLTRTPIVTLSGHMEAVSSVLWSDAEEICSASWDHTIRVWDVESGSLKSTLTGNKVFNCISYSPLCKRLASGSTDRHIRLWDPRTKDGSLVSLSLTSHTGWVTSVKWSPTHEQQLISGSLDNIVKLWDTRSCKAPLYDLAAHEDKVLSVDWTDTGLLLSGGADNKLYSYRYSPTTSHVGA

SEQ ID NO: 10456 - protein, 145 aa, Homo sapiens
LRMPLDKHMEMENISSEEVVEIEYVEKYTAPQPEQCMFHDDWISSIKGAEEWILTGSYDKTSRIWSLEGKSIMTIVGHTDVVKDVAWVKKDSLSCLLLSASMDQTILLWEWNVERNKVKALHCCRGHAGSVDSIAVDGSGTKVSS

SEQ ID NO: 10457 - protein, 19 aa, Homo sapiens
LPSEPLVGNMYEKKKLARR

SEQ ID NO: 10458 - protein, 623 aa, Homo sapiens
LGRRRRQRLEERERRFPCPGPREGRPTAAMEQLSDEEIDHGAEEDSDKEDQDLDKMFGAWLGELDKLTQSLDSDKPMEPVKRSPLRQETNMANFSYRFSIYNLNEALNQGETVDLDALMADLCSIEQELSSIGSGNSKRQITETKATQKLPVSRHTLKHGTLKGLSSSSNRIAKPSHASYSLDDVTAQLEQASLSMDEAAQQSVLEDTKPLVTNQHRRTASAGTVSDAEVHSISNSSHSSITSAASSMDSLDIDKVTRPQELDLTHQGQPITEEEQAAKLKAEKIRVALEKIKEAQVKKLVIRVHMSDDSSKTMMVDERQTVRQVLDNLMDKSHCGYSLDWSLVETVSELQMERIFEDHENLVENLLNWTRDSQNKLIFMERIEKYALFKNPQNYLLGKKETAEMADRNKEVLLEECFCGSSVTVPEIEGVLWLKDDGKKSWKKRYFLLRASGIYYVPKGKAKVSRDLVCFLQLDHVNVYYGQDYRNKYKAPTDYCLVLKHPQIQKKSQYIKYLCCDDVRTLHQWVNGIRIAKYGKQLYMNYQEALKRTESAYDWTSLSSSSIKSGSSSSSIPESQSNHSNQSDSGVSDTQPAGHVRSQSIVSSVFSEAWKRGTQLEESSKIN

SEQ ID NO: 10459 - protein, 32 aa, Homo sapiens
LQKSVDIVPQGKSDASKVGEEMVNNSRMSKSA

SEQ ID NO: 10460 - protein, 56 aa, Homo sapiens
LYFGWKRHRRGCVLSLKISISCGLDQKLLITYLEGIYKCLSMCSLFVHVVYYITKE

SEQ ID NO: 10461 - protein, 1279 aa, Homo sapiens
LGRRRRQRLEERERRFPCPGPREGRPTAAMEQLSDEEIDHGAEEDSDKEDQDLDKMFGAWLGELDKLTQSLDSDKPMEPVKRSPLRQETNMANFSYRFSIYNLNEALNQGETVDLDALMADLCSIEQELSSIGSGNSKRQITETKATQKLPVSRHTLKHGTLKGLSSSSNRIAKPSHASYSLDDVTAQLEQASLSMDEAAQQSVLEDTKPLVTNQHRRTASAGTVSDAEVHSISNSSHSSITSAASSMDSLDIDKVTRPQELDLTHQGQPITEEEQAAKLKAEKIRVALEKIKEAQVKKLVIRVHMSDDSSKTMMVDERQTVRQVLDNLMDKSHCGYSLDWSLVETVSELQMERIFEDHENLVENLLNWTRDSQNKLIFMERIEKYALFKNPQNYLLGKKETAEMADRNKEVLLEECFCGSSVTVPEIEGVLWLKDDGKKSWKKRYFLLRASGIYYVPKGKAKVSRDLVCFLQLDHVNVYYGQDYRNKYKAPTDYCLVLKHPQIQKKSQYIKYLCCDDVRTLHQWVNGIRIAKYGKQLYMNYQEALKRTESAYDWTSLSSSSIKSGSSSSSIPESQSNHSNQSDSGVSDTQPAGHVRSQSIVSSVFSEAWKRGTQLEESSKARMESMNRPYTSLVPPLSPQPKIVTPYTASQPSPPLPPPPPPPPPPPPPPPPPPPPLPSQSAPSAGSAAPMFVKYSTITRLQNASQHSGALFKPPTPPVMQSQSVKPQILVPPNGVVPPPPPPPPPPTPGSAMAQLKPAPCAPSLPQFSAPPPPLKIHQVQHITQVAPPTPPPPPPIPAPLPPQAPPKPLVTIPAPTSTKTVAPVVTQAAPPTPTPPVPPAKKQPAFPASYIPPSPPTPPVPVPPPTLPKQQSFCAKPPPSPLSPVPSVVKQIASQFPPPPTPPAMESQPLKPVPANVAPQSPPAVKAKPKWQPSSIPVPSPDFPPPPPESSLVFPPPPPSPVPAPPPPPPPTASPTPDKSGSPGKKTSKTSSPGGKKPPPTPQRNSSIKSSSGAEHPEPKRPSVDSLVSKFTPPAESGSPSKETLPPPAAPPKPGKLNLSGVNLPGVLQQGCVSAKAPVLSGRGKDSVVEFPSPPSDSDFPPPPPETELPLPPIEIPAVFSGNTSPKVAVVNPQPQQWSKMSVKKAPPPTRPKRNDSTRLTQAEISEQPTMATVVPQVPTSPKSSLSVQPGFLADLNRTLQRKSITRHGSLSSRMSRAEPTATMDDMALPPPPPELLSDQQKAGYGGSHISGYATLRRGPPPAPPKRDQNTKLSRDW

SEQ ID NO: 10462 - protein, 1331 aa, Homo sapiens
LGRRRRQRLEERERRFPCPGPREGRPTAAMEQLSDEEIDHGAEEDSDKEDQDLDKMFGAWLGELDKLTQSLDSDKPMEPVKRSPLRQETNMANFSYRFSIYNLNEALNQGETVDLDALMADLCSIEQELSSIGSGNSKRQITETKATQKLPVSRHTLKHGTLKGLSSSSNRIAKPSHASYSLDDVTAQLEQASLSMDEAAQQSVLEDTKPLVTNQHRRTASAGTVSDAEVHSISNSSHSSITSAASSMDSLDIDKVTRPQELDLTHQGQPITEHAISLRCSSKQAKRHIDFTEEQAELTPHSYLDRETSLLLRNIAGKPSHLLTKEEQAAKLKAEKIRVALEKIKEAQVKKLVIRVHMSDDSSKTMMVDERQTVRQVLDNLMDKSHCGYSLDWSLVETVSELQMERIFEDHENLVENLLNWTRDSQNKLIFMERIEKYALFKNPQNYLLGKKETAEMADRNKEVLLEECFCGSSVTVPEIEGVLWLKDDGKKSWKKRYFLLRASGIYYVPKGKAKVSRDLVCFLQLDHVNVYYGQDYRNKYKAPTDYCLVLKHPQIQKKSQYIKYLCCDDVRTLHQWVNGIRIAKYGKQLYMNYQEALKRTESAYDWTSLSSSSIKSGSSSSSIPESQSNHSNQSDSGVSDTQPAGHVRSQSIVSSVFSEAWKRGTQLEESSKARMESMNRPYTSLVPPLSPQPKIVTPYTASQPSPPLPPPPPPPPPPPPPPPPPPPPLPSQSAPSAGSAAPMFVKYSTITRLQNASQHSGALFKPPTPPVMQSQSVKPQILVPPNGVVPPPPPPPPPPTPGSAMAQLKPAPCAPSLPQFSAPPPPLKIHQVQHITQVAPPTPPPPPPIPAPLPPQAPPKPLVTIPAPTSTKTVAPVVTQAAPPTPTPPVPPAKKQPAFPASYIPPSPPTPPVPVPPPTLPKQQSFCAKPPPSPLSPVPSVVKQIASQFPPPPTPPAMESQPLKPVPANVAPQSPPAVKAKPKWQPSSIPVPSPDFPPPPPESSLVFPPPPPSPVPAPPPPPPPTASPTPDKSGSPGKKTSKTSSPGGKKPPPTPQRNSSIKSSSGAEHPEPKRPSVDSLVSKFTPPAESGSPSKETLPPPAAPPKPGKLNLSGVNLPGVLQQGCVSAKAPVLSGRGKDSVVEFPSPPSDSDFPPPPPETELPLPPIEIPAVFSGNTSPKVAVVNPQPQQWSKMSVKKAPPPTRPKRNDSTRLTQAEISEQPTMATVVPQVPTSPKSSLSVQPGFLADLNRTLQRKSITRHGSLSSRMSRAEPTATMDDMALPPPPPELLSDQQKAGYGGSHISGYATLRRGPPPAPPKRDQNTKLSRDW

SEQ ID NO: 10463 - protein, 678 aa, Homo sapiens
LGRRRRQRLEERERRFPCPGPREGRPTAAMEQLSDEEIDHGAEEDSDKEDQDLDKMFGAWLGELDKLTQSLDSDKPMEPVKRSPLRQETNMANFSYRFSIYNLNEALNQGETVDLDALMADLCSIEQELSSIGSGNSKRQITETKATQKLPVSRHTLKHGTLKGLSSSSNRIAKPSHASYSLDDVTAQLEQASLSMDEAAQQSVLEDTKPLVTNQHRRTASAGTVSDAEVHSISNSSHSSITSAASSMDSLDIDKVTRPQELDLTHQGQPITEHAISLRCSSKQAKRHIDFTEEQAELTPHSYLDRETSLLLRNIAGKPSHLLTKEEQAAKLKAEKIRVALEKIKEAQVKKLVIRVHMSDDSSKTMMVDERQTVRQVLDNLMDKSHCGYSLDWSLVETVSELQMERIFEDHENLVENLLNWTRDSQNKLIFMERIEKYALFKNPQNYLLGKKETAEMADRNKEVLLEECFCGSSVTVPEIEGVLWLKDDGKKSWKKRYFLLRASGIYYVPKGKAKVSRDLVCFLQLDHVNVYYGQDYRNKYKAPTDYCLVLKHPQIQKKSQYIKYLCCDDVRTLHQWVNGIRIAKYGKQLYMNYQEALKRTESAYDWTSLSSSSIKSGSSSSSIPESQSNHSNQSDSGVSDTQPAGHVRSQSIVSSVFSEAWKRGTQLEESSKVTASF

SEQ ID NO: 10464 - protein, 673 aa, Homo sapiens
LGRRRRQRLEERERRFPCPGPREGRPTAAMEQLSDEEIDHGAEEDSDKEDQDLDKMFGAWLGELDKLTQSLDSDKPMEPVKRSPLRQETNMANFSYRFSIYNLNEALNQGETVDLDALMADLCSIEQELSSIGSGNSKRQITETKATQKLPVSRHTLKHGTLKGLSSSSNRIAKPSHASYSLDDVTAQLEQASLSMDEAAQQSVLEDTKPLVTNQHRRTASAGTVSDAEVHSISNSSHSSITSAASSMDSLDIDKVTRPQELDLTHQGQPITEHAISLRCSSKQAKRHIDFTEEQAELTPHSYLDRETSLLLRNIAGKPSHLLTKEEQAAKLKAEKIRVALEKIKEAQVKKLVIRVHMSDDSSKTMMVDERQTVRQVLDNLMDKSHCGYSLDWSLVETVSELQMERIFEDHENLVENLLNWTRDSQNKLIFMERIEKYALFKNPQNYLLGKKETAEMADRNKEVLLEECFCGSSVTVPEIEGVLWLKDDGKKSWKKRYFLLRASGIYYVPKGKAKVSRDLVCFLQLDHVNVYYGQDYRNKYKAPTDYCLVLKHPQIQKKSQYIKYLCCDDVRTLHQWVNGIRIAKYGKQLYMNYQEALKRTESAYDWTSLSSSSIKSGSSSSSIPESQSNHSNQSDSGVSDTQPAGHVRSQSIVSSVFSEAWKRGTQLEESSK

SEQ ID NO: 10465 - protein, 73 aa, Homo sapiens
LGRRRRQRLEERERRFPCPGPREGRPTAAMEQLSDEEIDHGAEEDSDKEDQDLDKMFGAWLGELDKLTQVSSA

SEQ ID NO: 10466 - protein, 144 aa, Homo sapiens
LKNLFLTMHVAQPAVVLASSRGIASFVCEYASPGKATEVRVTVLRQADSQVTEVCAATYMMGNELTFLDDSICTGTSSGNQVNLTIQGLRAMDTGLYICKVELMYPPPYYLGIGNGTQIYVIAKEKKPSYNRGLCENAPNRARM

SEQ ID NO: 10467 - protein, 35 aa, Homo sapiens
LLKKRSPLTTGVYVKMPPTEPECEKQFQPYFIPIN

SEQ ID NO: 10468 - protein, 10 aa, Homo sapiens
LLAYKKDVTL

SEQ ID NO: 10469 - protein, 41 aa, Homo sapiens
MPILLIYFQTQRKVHGQFVGHLIQGPQFVRGEVGMQKYFDL

SEQ ID NO: 10470 - protein, 188 aa, Homo sapiens
LERGSCLLKGRIIGDSMCSCLLCLPRPIKIESFMLSSLRDSVLFMQLDPTLHAPLLTGYGSLGMMTSVLVCPDGKTVEAEAAHGTVTRHYRMYQKGQETSTNPIASIFAWTRGLAHRAKLDNNKELAFFANALEEVSIETIEAGFMTKDLAACIKGLPNVQRSDYLNTFEFMDKLGENLKIKLAQAKL

SEQ ID NO: 10471 - protein, 422 aa, Homo sapiens
LSRFIEVKMSKKISGGSVVEMQGDEMTRIIWELIKEKLIFPYVELDLHSYDLGIENRDATNDQVTKDAAEAIKKHNVGVKCATITPDEKRVEEFKLKQMWKSPNGTIRNILGGTVFREAIICKNIPRLVSGWVKPIIIGRHAYGDQYRATDFVVPGPGKVEITYTPSDGTQKVTYLVHNFEEGGGVAMGMYNQDKSIEDFAHSSFQMALSKGWPLYLSTKNTILKKYDGRFKDIFQEIYDKQYKSQFEAQKIWYEHRLIDDMVAQAMKSEGGFIWACKNYDGDVQSDSVAQGYGSLGMMTSVLVCPDGKTVEAEAAHGTVTRHYRMYQKGQETSTNPIASIFAWTRGLAHRAKLDNNKELAFFANALEEVSIETIEAGFMTKDLAACIKGLPNVQRSDYLNTFEFMDKLGENLKIKLAQAKL

SEQ ID NO: 10472 - protein, 49 aa, Homo sapiens
LSRFIEVKMSKKISGGSVVEMQGDEMTRIIWELIKEKLIFPYVELDLHR

SEQ ID NO: 10473 - protein, 821 aa, Homo sapiens
LAARRPRRGKSLAGFESLACSFPVVSRGFLASRSARSLSSEGGTMPDNRQPRNRQPRIRSGNEPRSAPAMEPDGRGAWAHSRAALDRLEKLLRCSRCTNILREPVCLGGCEHIFCSNCVSDCIGTGCPVCYTPAWIQDLKINRQLDSMIQLCSKLRNLLHDNELSDLKEDKPRKSLFNDAGNKKNSIKMWFSPRSKKVRYVVSKASVQTQPAIKKDASAQQDSYEFVSPSPPADVSERAKKASARSGKKQKKKTLAEINQKWNLEAEKEDGEFDSKEESKQKLVSFCSQPSVISSPQINGEIDLLASGSLTESECFGSLTEVSLPLAEQIESPDTKSRNEVVTPEKVCKNYLTSKKSLPLENNGKRGHHNRLSSPISKRCRTSILSTSGDFVKQTVPSENIPLPECSSPPSCKRKVGGTSGRKNSNMSDEFISLSPGTPPSTLSSSSYRRVMSSPSAMKLLPNMAVKRNHRGETLLHIASIKGDIPSVEYLLQNGSDPNVKDHAGWTPLHEACNHGHLKVVELLLQHKALVNTTGYQNDSPLHDAAKNGHVDIVKLLLSYGASRNAVNIFGLRPVDYTDDESMKSLLLLPEKNESSSASHCSVMNTGQRRDGPLVLIGSGLSSEQQKMLSELAVILKAKKYTEFDSTVTHVVVPGDAVQSTLKCMLGILNGCWILKFEWVKACLRRKVCEQEEKYEIPEGPRRSRLNREQLLPKLFDGCYFYLWGTFKHHPKDNLIKLVTAGGGQILSRKPKPDSDVTQTINTVAYHARPDSDQRFCTQYIIYEDLCNYHPERVRQGKVWKAPSSWFIDCVMSFELLPLDS

SEQ ID NO: 10474 - protein, 308 aa, Homo sapiens
LAARRPRRGKSLAGFESLACSFPVVSRGFLASRSARSLSSEGGTMPDNRQPRNRQPRIRSGNEPRSAPAMEPDGRGAWAHSRAALDRLEKLLRCSRCTNILREPVCLGGCEHIFCSNCVSDCIGTGCPVCYTPAWIQDLKINRQLDSMIQLCSKLRNLLHDNELSGVKACLRRKVCEQEEKYEIPEGPRRSRLNREQLLPKLFDGCYFYLWGTFKHHPKDNLIKLVTAGGGQILSRKPKPDSDVTQTINTVAYHARPDSDQRFCTQYIIYEDLCNYHPERVRQGKVWKAPSSWFIDCVMSFELLPLDS

SEQ ID NO: 10475 - protein, 802 aa, Homo sapiens
LAARRPRRGKSLAGFESLACSFPVVSRGFLASRSARSLSSEGGTMPDNRQPRNRQPRIRSGNEPRSAPAMEPDGRGAWAHSRAALDRLEKLLRCSRCNCVSDCIGTGCPVCYTPAWIQDLKINRQLDSMIQLCSKLRNLLHDNELSDLKEDKPRKSLFNDAGNKKNSIKMWFSPRSKKVRYVVSKASVQTQPAIKKDASAQQDSYEFVSPSPPADVSERAKKASARSGKKQKKKTLAEINQKWNLEAEKEDGEFDSKEESKQKLVSFCSQPSVISSPQINGEIDLLASGSLTESECFGSLTEVSLPLAEQIESPDTKSRNEVVTPEKVCKNYLTSKKSLPLENNGKRGHHNRLSSPISKRCRTSILSTSGDFVKQTVPSENIPLPECSSPPSCKRKVGGTSGRKNSNMSDEFISLSPGTPPSTLSSSSYRRVMSSPSAMKLLPNMAVKRNHRGETLLHIASIKGDIPSVEYLLQNGSDPNVKDHAGWTPLHEACNHGHLKVVELLLQHKALVNTTGYQNDSPLHDAAKNGHVDIVKLLLSYGASRNAVNIFGLRPVDYTDDESMKSLLLLPEKNESSSASHCSVMNTGQRRDGPLVLIGSGLSSEQQKMLSELAVILKAKKYTEFDSTVTHVVVPGDAVQSTLKCMLGILNGCWILKFEWVKACLRRKVCEQEEKYEIPEGPRRSRLNREQLLPKLFDGCYFYLWGTFKHHPKDNLIKLVTAGGGQILSRKPKPDSDVTQTINTVAYHARPDSDQRFCTQYIIYEDLCNYHPERVRQGKVWKAPSSWFIDCVMSFELLPLDS

SEQ ID NO: 10476 - protein, 96 aa, Homo sapiens
LAGFESLACSFPVVSRGFLASRSARSLSSEGGTMPDNRQPRNRQPRIRSGNEPRSAPAMEPDGRGAWAHSRAALDRLEKLLRCSRWGKSMSTKKSM

SEQ ID NO: 10477 - protein, 109 aa, Homo sapiens
LAGFESLACSFPVVSRGFLASRSARSLSSEGGTMPDNRQPRNRQPRIRSGNEPRSAPAMEPDGRGAWAHSRAALDRLEKLLRCSRCTNILREPVCLGGCEHIFCRFERR

SEQ ID NO: 10478 - protein, 99 aa, Homo sapiens
LACSFPVVSRGFLASRSARSLSSEGGTMPDNRQPRNRQPRIRSGNEPRSAPAMEPDGRGAWAHSRAALDRLEKLLRCSRCTNILREPVCLGGCEHIFCR

SEQ ID NO: 10479 - protein, 309 aa, Homo sapiens
VDACAPNCARGIKRGEKKPEENSRPKQNARRGGRAACSPRPRPRPRRDARGPARDARAAAVPAPGRWRGGRAPASIARRGDSAPGFRRRWGPSLSMGLRDWLRTVCCCCGCECLEERALPEKEPLVSDNNPYSSFGATLVRDDEKNLWSMPHDVSHTEADDDRTLYNLIVIRNQQAKDSEEWQKLNYDIHTLRQVRREVRNRWKCILEDLGFQKEADSLLSVTKLSTISDSKNTRKAREMLLKLAEETNIFPTSWELSERYLFVVDRLIALDAAEEFFKLARRTYPKKPGVPCLADGQKELHYLPFPSP

SEQ ID NO: 10480 - protein, 228 aa, Homo sapiens
MASWAKGRSYLAPGLLQGQVAIVTGGATGIGKAIVKELLELGSNVVIASRKLERLKSAADELQANLPPTKQARVIPIQCNIRNEEEVNNLVKSTLDTFGKINFLVNNGGGQFLSPAEHISSKGWHAVLETNLTGTFYMCKAVYSSWMKEHGGSIVNIIVPTKAGFPLAVHSGAARAGVYNLTKSLALEWACSGIRINCVAPKESCSVAQAGEQWRDLGSLQPLPPGFK

SEQ ID NO: 10481 - protein, 165 aa, Homo sapiens
LLWHPAAGMASWAKGRSYLAPGLLQGQVAIVTGGATGIGKAIVKELLELGSNVVIASRKLERLKSAADELQANLPPTKQARVIPIQCNIRNEEEVNNLVKSTLDTFGKINFLVNNGGGQFLSPAEHISSKGWHAVLETNLTGTFYMCKAGILELQEQVFTTSPNL

SEQ ID NO: 10482 - protein, 173 aa, Homo sapiens
MSLRPRRACAQLLWHPAAGMASWAKGRSYLAPGLLQGQVAIVTGGATGIGKAIVKELLELGSNVVIASRKLERLKSAADELQANLPPTKQARVIPIQCNIRNEEEVNNLVKSTLDTFGKINFLVNNGGGQFLSPAEHISSKGWHAVLETNLTGTFYMCKAGKSAMSYQSKIPC

SEQ ID NO: 10483 - protein, 189 aa, Homo sapiens
MSLRPRRACAQLLWHPAAGMASWAKGRSYLAPGLLQGQVAIVTGGATGIGKAIVKELLELGSNVVIASRKLERLKSAADELQANLPPTKQARVIPIQCNIRNEEEVNNLVKSTLDTFGKINFLVNNGGGQFLSPAEHISSKGWHAVLETNLTGTFYMCKAGKYHQYPQVNMSLFRDLRIPIRDSEAPCH

SEQ ID NO: 10484 - protein, 74 aa, Homo sapiens
LGSDLGRGDMAKRTKKVGIVGKYGTRYGASLRKMVKKIEISQHAKYTCSFCGKVSKAKSLVRGEGGQVSYPSEA

SEQ ID NO: 10485 - protein, 81 aa, Homo sapiens
LGSDLGRGDMAKRTKKVGIVGKYGTRYGASLRKMVKKIEISQHAKYTCSFCGKTKMKRRAVGIWHCGSCMKTVAGGAWTYK

SEQ ID NO: 10486 - protein, 101 aa, Homo sapiens
LGSDLGRGDMAKRTKKVGIVGKYGTRYGASLRKMVKKIEISQHAKYTCSFCGKTKMKRRAVGIWHCGSCMKTVAGGAWTYNTTSAVTVKSAIRRLKELKDQ

SEQ ID NO: 10487 - protein, 94 aa, Homo sapiens
VCGGSRACLGSRSITGFSLHSKQAKRTKKVGIVGKYGTRYGASLRKMVKKIEISQHAKYTCSFCGKTKMKRRAVGIWHCGSCMKTVAGGAWTYK

SEQ ID NO: 10488 - protein, 114 aa, Homo sapiens
VCGGSRACLGSRSITGFSLHSKQAKRTKKVGIVGKYGTRYGASLRKMVKKIEISQHAKYTCSFCGKTKMKRRAVGIWHCGSCMKTVAGGAWTYNTTSAVTVKSAIRRLKELKDQ

SEQ ID NO: 10489 - protein, 106 aa, Homo sapiens
VCGGSRACLGSRSITGFSLHSKQAKRTKKVGIVGKYGTRYGASLRKMVKKIEISQHAKYTCSFCGKTKMKRRAVGIWHCGSCMKTVAGGAWTYKDAKMEPNLHELC

SEQ ID NO: 10490 - protein, 134 aa, Homo sapiens
VCGGSRACLGSRSITGFSLHSKQAKRTKKVGIVGKYGTRYGASLRKMVKKIEISQHAKYTCSFCGKTKMKRRAVGIWHCGSCMKTVAGGAWTYKKMSAENGQQREPLMSFDHQEMPKWNQISMNSANGRRGKGR

SEQ ID NO: 10491 - protein, 66 aa, Homo sapiens
LLFLWQRRKGGFHIPDNKTKMKRRAVGIWHCGSCMKTVAGGAWTYNTTSAVTVKSAIRRLKELKDQ

SEQ ID NO: 10492 - protein, 91 aa, Homo sapiens
MILLEVNNRIIEETLALKFENAAAGNKPEAVEVTFADFDGVLYHISNPNGDKTKVMVSISLKFYKELQAHGADELLKRVYGSFLVNPESGM

SEQ ID NO: 10493 - protein, 144 aa, Homo sapiens
MILLEVNNRIIEETLALKFENAAAGNKPEAVEVTFADFDGVLYHISNPNGDKTKVMVSISLKFYKELQAHGADELLKRVYGSFLVNPESDSLILLPRLECSGTVIAHCSLLQILGSSNPPALASPVAGNYRHMPPYPINFFNIL

SEQ ID NO: 10494 - protein, 152 aa, Homo sapiens
MILLEVNNRIIEETLALKFENAAAGNKPEAVEVTFADFDGVLYHISNPNGDKTKVMVSISLKFYKELQAHGADELLKRVYGSFLVNPESGYNVSLLYDLENLPASKDSIVHQAGMLKRNCFASVFEKYFQFQEEGKEGENRAVIHYRDDETM

SEQ ID NO: 10495 - protein, 58 aa, Homo sapiens
VMVSISLKFYKELQAHGADEVRSTSFSLGLLFPHLSLAVCHSWKIHGTKSPPHDYLLT

SEQ ID NO: 10496 - protein, 155 aa, Homo sapiens [sequence omitted]

SEQ ID NO: 10497 - protein, 83 aa, Homo sapiens
MRECISVHVGQAGVQMGNACWELYCLEHGIQPDGQMPSDKTIGGGDDSFTTFFCETGAGKHVPRAVFVDLEPTVIGERKWGQN

SEQ ID NO: 10498 - protein, 101 aa, Homo sapiens
MDAALSCALLAIPPQPTSPHRVPILATAIQEELEKGTPEPGPLNAVDERHHSVLMSLLCAHLGLSPKDIVEMELCLADTQPAVRTGCRNLWVKGLQDPGHP

SEQ ID NO: 10499 - protein, 84 aa, Homo sapiens
LLCARPCVSHRGHETRGTDGQEGSLPAGSGPQLPAPVSPPMTSPGALIHAAGCRVRIPAEVLILNSIVLPHKELSRSFTNQIIL

SEQ ID NO: 10500 - protein, 520 aa, Homo sapiens
LAMANGVIPPPGGASPLPQVRVPLEEPPLSPDVEEEDDDLGKTLAVSRFGDLISKPPAWDPEKPSRSYSERDFEFHRHTSHHTHHPLSARLPPPHKLRRLPPTSARHTRRKRKKEKTSAPPSEGTPPIQEEGGAGVDEEEEEEEEEEGESEAEPVEPPHSGTPQKAKFSIGSDEDDSPGLPGRAAVTKPLPSVGPHTDKSPQHSSSSPSPRARASRLAGEKSRPWSPSASYDLRERLCPGSALGNPGGPEQQVPTDEAEAQMLGSADLDDMKSHRLEDNPGVRRHLVKKPSRTQGGRGSPSGLAPILRRKKKKKKLDRRPHEVFVELNELMLDRSQEPHWRETARWIKFEEDVEEETERWGKPHVASLSFRSLLELRRTIAHGAALLDLEQTTLPGIAHLVVETMIVSDQIRPEDRASVLRTLLLKHSHPNDDKDSGFFPRNPSSSSMNSVLGNHHPTPSHGPDGAVPTMADDLGEPAPLWPHDPDAKEPYSSSASSEAPPHAWGRWSPGEKPEAAGEDP

SEQ ID NO: 10501 - protein, 14 aa, Homo sapiens
LRRKRLFGKLMSIG

SEQ ID NO: 10502 - protein, 195 aa, Homo sapiens
LSAAPAPALASRPRFSSAPCSQGGGGGGPATMIHFILLFSRQGKLRLQKWYITLPDKERKKITREIVQIILSRGHRTSSFVDWKELKLVYKRYASLYFCCAIENQDNELLTLEIVHRYVELLDKYFGNVCELDIIFNFEKAYFILDEFIIGGEIQETSKKIAVKAIEDSDMLQENRLSPRGRDCSEPRSCHCTLA

SEQ ID NO: 10503 - protein, 112 aa, Homo sapiens
LSAAPAPALASRPRFSSAPCSQGGGGGGPATMIHFILLFSRQGKLRLQKWYITLPDKERKKITREIVQIILSRGHRTSSFVDWKELKLVYKRSVSWILSLILKRLISSWTSL

SEQ ID NO: 10504 - protein, 135 aa, Homo sapiens
LSAAPAPALASRPRFSSAPCSQGGGGGGPATMIHFILLFSRQGKLRLQKWYITLPDKERKKITREIVQIILSRGHRTSSFVDWKELKLVYKRYASLYFCCAIENQDNELLTLEIVHRYVELLDKYFGNTWPFARA

SEQ ID NO: 10505 - protein, 44 aa, Homo sapiens
LWLFWNGIGHSPRTERTLLGLEVSLAHHGGFSAYLICASLDLSN

SEQ ID NO: 10506 - protein, 20 aa, Homo sapiens
MVVSRKGMSLQERGANVQPA

SEQ ID NO: 10507 - protein, 78 aa, Homo sapiens
LVSSEKKANMNLKDLSKIRGRKRGKPGTHFTQSDRAPQKRVRSRGKKEKRNALSITKHLISCALCCIFSNKPISLIVL

SEQ ID NO: 10508 - protein, 69 aa, Homo sapiens
LTDTLRSWNGERADGRVRGAAMITSAAGIISLLDEDEPQLKEFALHKLNAVVNDFWAEISESVDKIKMH

SEQ ID NO: 10509 - protein, 9 aa, Homo sapiens
LSLCFPFSI

SEQ ID NO: 10510 - protein, 65 aa, Homo sapiens
MVKLAKAGKNQGDPKKMAPPPKEVEEDSEDEEMSEDEEDDSSGEEVILSNLMQNYVKTTKWRVKT

SEQ ID NO: 10511 - protein, 503 aa, Homo sapiens
LSLSLGEPPPLVQILAAYRVFMERVLSLLGADAVEQKAQEILQVEQQLANITVSEHDDLRRDVSSMYNKVTLGQLQKITPHLRWKWLLDQIFQEDFSEEEEVVLLATDYMQQVSQLIRSTPHRVLHNYLVWRVVVVLSEHLSPPFREALHELAQEMEGSDKPQELARVCLGQANRHFGMALGALFVHEHFSAASKAKVQQLVEDIKYILGQRLEELDWMDAETRAAARAKLQYMMVMVGYPDFLLKPDAVDKEYEFEVHEKTYFKNILNSIRFSIQLSVKKIRQEVDKSTWLLPPQALNAYYLPNKNQMVFPAGILQPTLYDPDFPQSLNYGGIGTIIGHELTHGYDDWGGQYDRSGNLLHWWTEASYSRFLRKAECIVRLYDNFTVYNQRVNGKHTLGENIADMGGLKLAYHAYQKWVREHGPEHPLPRLKYTHDQLFFIAFAQNWCIKRRSQSIYLQVLTDKHAPEHYRVLGSVSQFEEFGRAFHCPKDSPMNPAHKCSVW

SEQ ID NO: 10512 - protein, 37 aa, Homo sapiens
LDGRRDQGCCSGQAPVHDGDGRLPGLPAETRCCGQGV

SEQ ID NO: 10513 - protein, 58 aa, Homo sapiens
LEDAMSDQQQTTKKKGSLKDDDSGDHDQNEENSTQKDGEKEKTERDKNQSSSKRKVRR

SEQ ID NO: 10514 - protein, 944 aa, Homo sapiens
LQGALWVPGEANPINMVSKLSQLTSLLSSIEDKVKALLHEGPESPHRPSLIPPVTFEVKAESLGIPQKMQLKVDVESGKLIIKKSKDGSEDKFYSHKKILQLIKSQKFLNKLVILVETEKEKILRKEYVFADSKKREGFCQLLQQMKNKHSEQPEPDMITIFIGTWNMGNAPPPKKITSWFLSKGQGKTRDDSADYIPHDIYVIGTQEDPLSEKEWLEILKHSLQEITSVTFKTVAIHTLWNIRIVVLAKPEHENRISHICTDNVKTGIANTLGNKGAVGVSFMFNGTSLGFVNSHLTSGSEKKLRRNQNYMNILRFLALGDKKLSPFNITHRFTHLFWFGDLNYRVDLPTWEAETIIQKIKQQQYADLLSHDQLLTERREQKVFLHFEEEEITFAPTYRFERLTRDKYAYTKQKATGMKYNLPSWCDRVLWKSYPLVHVVCQSYGSTSDIMTSDHSPVFATFEAGVTSQFVSKNGPGTVDSQGQIEFLRCYATLKTKSQTKFYLEFHSSCLESFVKSQEGENEEGSEGELVVKFGETLPKLKPIISDPEYLLDQHILISIKSSDSDESYGEGCIALRLEATETQLPIYTPLTHHGELTGHFQGEIKLQTSQGKTREKLYDFVKTERDESSGPKTLKSLTSHDPMKQWEVTSRAPPCSGSSITEIINPNYMGVGPFGPPMPLHVKQTLSPDQQPTAWSYDQPPKDSPLGPCRGESPPTPPGQPPISPKKFLPSTANRGLPPRTQESRPSDLGKNAGDTLPQEDLPLTKPEMFENPLYGSLSSFPKPAPRKDQESPKMPRKEPPPCPEPGILSPSIVLTKAQEADRGEGPGKQVPAPRLRSFTCSSSAEGRAAGGDKSQGKPKTPVSSQAPVPAKRPIKPSRSEINQQTPPTPTPRPPLPVKSPAVLHLQHSKGRDYRDNTELPHHGKHRPEEGPPGPLGRTAMQ

SEQ ID NO: 10515 - protein, 8 aa, Homo sapiens
MCMGSWSS

SEQ ID NO: 10516 - protein, 131 aa, Homo sapiens
LALGYWLGPMLGTLRAMEGEDVEDDQLLQKLRASRRRFQRRMQRLIEKYNQPFEDTPVVQMATLTYETPQGLRIWGGRLIKERNEGEIQDSSMKPADRTDGSVQAAAWGPELPSHRTVLGAACSASKPFEK

SEQ ID NO: 10517 - protein, 88 aa, Homo sapiens
VEDDQLLQKLRASRRRFQRRMQRLIEKYNQPFEDTPVVQMATLTYETPQGLRIWGGRLIKERNEGEIQIQKAVRSMPRQTRKSQLLGP

SEQ ID NO: 10518 - protein, 628 aa, Homo sapiens
LFFCLNQINNTAVGHALVLPAGRDLTDFLENVLTCHVCLDICNIDPSCGFGSWRPSFRDRRAAGSDVDIDMAFILDSAETTTLFQFNEMKKYIAYLVRQLDMSPDPKASQHFARVAVVQHAPSESVDNASMPPVKVEFSLTDYGSKEKLVDFLSRGMTQLQGTRALGSAIEYTIENVFESAPNPRDLKIVVLMLTGEVPEQQLEEAQRVILQAKCKGYFFVVLGIGRKVNIKEVYTFASEPNDVFFKLVDKSTELNEEPLMRFGRLLPSFVSSENAFYLSPDIRKQCDWFQGDQPTKNLVKFGHKQVNVPNNVTSSPTSNPVTTTKPVTTTKPVTTTTKPVTTTTKPVTIINQPSVKPAAAKPAPAKPVAAKPVATKMATVRPPVAVKPATAAKPVAAKPAAVRPPAAAAAKPVATKPEVPRPQAAKPAATKPATTKPMVKMSREVQVFEITENSAKLHWERAEPPGPYFYDLTVTSAHDQSLVLKQNLTVTDRVIGGLLAGQTYHVAVVCYLRSQVRATYHGSFSTKKSQPPPPQPARSASSSTINLMVSTEPLALTETDICKLPKDEGTCRDFILKWYYDPNTKSCARFWYGGCGGNENKFGSQKECEKVCAPVLAKPGVISVMGT

SEQ ID NO: 10519 - protein, 81 aa, Homo sapiens
LVLKQNLTVTDRVIGGLLAGQTYHVAVVCYLRSQVRATYHGSFSTKKSQPPPPQPARSASSSTINLMVSTEPLALTETGEL

SEQ ID NO: 10520 - protein, 402 aa, Homo sapiens
VKSERALGPMPSVPCSPSQFVGLFLPQGGFGRRGPPGAKGNKGGPGQPGFEGEQGTRGAQGPAGPAGPPGLIGEQGISGPRGSGGAAGAPGERGRTGPLGRKGEPGEPGPKGGIGNRGPRGETGDDGRDGVGSEGRRGKKGERGFPGYPGPKGNPGEPGLNGTTGPKGIRGRRGNSGPPGIVGQKGDPGYPGPAGPKGNRGDSIDQCALIQSIKDKCPCCYGPLECPVFPTELAFALDTSEGVNQDTFGRMRDVVLSIVNDLTIAESNCPRGARVAVVTYNNEVTTEIRFADSKRKSVLLDKIKNLQVALTSKQQSLETAMSFVARNTFKRVRNGFLMRKVAVFFSNTPTRASPQLREAVLKLSDAGITPLFLTRQEDRQLINALQVCALCVLLASPFLLGL

SEQ ID NO: 10521 - protein, 15 aa, Homo sapiens
VCPLLPNMLANGTGA

SEQ ID NO: 10522 - protein, 136 aa, Homo sapiens
LSPEAQKLAEARLAAKRAARAEAREIRMKELERQQKEIYQVQKKYYGLDTKWGDIEQWMEDSERYSRRSRRNTSASDEDERMSVGSRGSLRPSCLYSAARPSGSYRASVLDEGSFGGTRRGSTSGSRAHANHTNRW

SEQ ID NO: 10523 - protein, 56 aa, Homo sapiens
MPDQDLAPQHHRDRGNMSEDLLNFDDPLNIEAAEHHLRDKEDFRNKVDDYIKRYAR

SEQ ID NO: 10524 - protein, 47 aa, Homo sapiens [sequence omitted]

SEQ ID NO: 10525 - protein, 205 aa, Homo sapiens
VLRSANPDAPGRRGPASSPALWARSAPREGGWMPGSSGAGMEAAVAPGRDAPAPAASQPSGCGKHNSPERKVYMDYNATTPLEPEVIQAMTKAMWEAWGNPSSPYSAGRKAKDIINAARESLAKMIGGKPQDIIFTSGGTESNNLVIHSVVKHFHANQTSKGHTGGHHSPVKGAKPHFITSSVEHDSIRLPLEHLVEEQVAAYSM

SEQ ID NO: 10526 - protein, 119 aa, Homo sapiens
MPGSSGAGMEAAVAPGRDAPAPAASQPSGCGKHNSPERKVYMDYNATTPLEPEVIQAMTKAMWEAWGNPSSPYSAGRKAKDIINAARESLAKMIGGKPQDIIFTSGGTEVKLLNTLTFC

SEQ ID NO: 10527 - protein, 238 aa, Homo sapiens
MDYNATTPLEPEVIQAMTKAMWEAWGNPSSPYSAGRKAKDIINAARESLAKMIGGKPQDIIFTSGGTESNNLVIHSVVKHFHANQTSKGHTGGHHSPVKGAKPHFITSSVEHDSIRLPLEHLVEEQVAAVTFVPVSKVSGQAEVDDILAAVRPTTRLVTIMLANNETGIVMPVPEISQRIKALNQERVAAGLPPILVHTDAAQALGKQRVDVEDLGVDFLTIVGHKLTRARDIFSTQF

SEQ ID NO: 10528 - protein, 177 aa, Homo sapiens [sequence omitted]

SEQ ID NO: 10529 - protein, 73 aa, Homo sapiens
LQLADVVDSEALQVYMKPPAHEEAKAPSRGFVVRDAPWTASSSEKAPDMSSSEEFPSFGAQVAPKTLPWGPKR

SEQ ID NO: 10530 - protein, 163 aa, Homo sapiens
LDHRVHARIIGARGKAIRKIMDEFKVDIRFPQSGAPDPNCVTVTGLPENVEEAIDHILNLEEEYVSLCGPWSPEAPWHVHRPEAQPGASGDKLADVVDSEALQVYMKPPAHEEAKAPSRGFVVRDAPWTASSSEKAPDMSSSEEFPSFGAQVAPKTLPWGPKR

SEQ ID NO: 10531 - protein, 67 aa, Homo sapiens
LQLADVVDSEALQVYMKPPAHEEAKAPSRGFVVRDAPWTASSSEKVRCGLLPSWVPGRVGGQAGLVS

SEQ ID NO: 10532 - protein, 109 aa, Homo sapiens
MDEFKVDIRFPQSGAPDPNCVTVTGLPENVEEAIDHILNLEEEYLADVVDSEALQVYMKPPAHEEAKAPSRGFVVRDAPWTASSSEKVRCGLLPSWVPGRVGGQAGLVS

SEQ ID NO: 10533 - protein, 44 aa, Homo sapiens
LEALVPVTIEVEVPFDLHRYVIGQKGSGIRKMMDEFESAPSSRR

SEQ ID NO: 10534 - protein, 50 aa, Homo sapiens
LVEALCAAGHRAELLRFPERSTEIGKLLSSYLQKKSDVEDHSTGSLCHAG

SEQ ID NO: 10535 - protein, 76 aa, Homo sapiens
VEAAPRASAARTRAGLELGWDPELGSSAAGRPTCWCPGGSEPRRRPGPRGTTGRDASHPSGCSCGFPVQEEAVGVG

SEQ ID NO: 10536 - protein, 28 aa, Homo sapiens
VRGSVLHASHPSGCSCGFPVQEEAVGVG

SEQ ID NO: 10537 - protein, 25 aa, Homo sapiens
LATDASHPSGCSCGFPVQEEAVGVG

SEQ ID NO: 10538 - protein, 30 aa, Homo sapiens
LANSASLSDASHPSGCSCGFPVQEEAVGVG

SEQ ID NO: 10539 - protein, 107 aa, Homo sapiens
LAPGGLPGTTTGFRKCQQLVEGKVETPGSLLRLQFSPAGREDPDSVPPIDVLWIKGAQGGDYFYSFGGCHRYAAYQQLQRETIPAKLVQSTLSDLRVYLGASTPDLQ

SEQ ID NO: 10540 - protein, 60 aa, Homo sapiens
LGPPGRRWERPLPARVRAVSLSKACARGAGTRLARAPVAGVQLPTFCPDLWLLISPVSAD

SEQ ID NO: 10541 - protein, 14 aa, Homo sapiens
MGVQVETISPGDGE

SEQ ID NO: 10542 - protein, 60 aa, Homo sapiens
LREFVAVTGAEEDRARFFLESAGWDLQIALASFYEDGGDEDIVTISQATPSSVSRGTAPR

SEQ ID NO: 10543 - protein, 119 aa, Homo sapiens
MVLLHVLFEHAVGYALLALKEVEEISLLQPQVEESVLNLGKFHSIVRLVAFCPFASSQVALENANAVSEGKSATAKCHREMWFLSVSSRAACDSICRPWLALSLIGVRQYLSHTMCNLK

SEQ ID NO: 10544 - protein, 39 aa, Homo sapiens
LNEDKLEKLEELTMDGAKAKAILDASRSSMGQCRAWQPA

SEQ ID NO: 10545 - protein, 63 aa, Homo sapiens
LTGFVTHTHPEVPTSVFGEKLREQVEERLSFYETGEIPRKNLDVMKEAMVQVSWALLGVEWHS

SEQ ID NO: 10546 - protein, 42 aa, Homo sapiens
LSLDAKEFSVAQLDGWISLSSCDLTFCVSVSLISAGVPGGAG

SEQ ID NO: 10547 - protein, 678 aa, Homo sapiens
LVASGGAAAVIFRIYKEVEVAAATRGFPGWCLSPASLAPRPPRIPLLPRAWPCGSSSLPPSPPPHPSPAASLGPASCAGVCWLPCARPSSQPSAGPAAMEVPQPEPAPGSALSPAGVCGGAQRPGHLPGLLLGSHGLLGSPVRAAASSPVTTLTQTMHDLAGLGSETPKSQVGTLLFRSRSRLTHLSLSRRASESSLSSESSESSDAGLCMDSPSPMDPHMAEQTFEQAIQAASRIIRNEQFAIRRFQSMPVRLLGHSPVLRNITNSQAPDGRRKSEAGSGAASSSGEDKENDGFVFKMPWKPTHPSSTHALAEWASRREAFAQRPSSAPDLMCLSPDRKMEVEELSPLALGRFSLTPAEGDTEEDDGFVDILESDLKDDDAVPPGMESLISAPLVKTLEKEEEKDLVMYSKCQRLFRSPSMPCSVIRPILKRLERPQDRDTPVQNKRRRSVTPPEEQQEAEEPKARVLRSKSLCHDEIENLLDSDHRELIGDYSKAFLLQTVDGKHQDLKYISPETMVALLTGKFSNIVDKFVIVDCRYPYEYEGGHIKTAVNLPLERDAESFLLKSPIAPCSLDKRVILIFHCEFSSERGPRMCRFIRERDRAVNDYPSLYYPEMYILKGGYKEFFPQHPNFCEPQDYRPMNHEAFKDELKTFRLKTRSWAGERSRRELCSRLQDQ

SEQ ID NO: 10548 - protein, 645 aa, Homo sapiens
VAAATRGFPGWCLSPASLAPRPPRIPLLPRAWPCGSSSLPPSPPPHPSPAASLGPASCAGVCWLPCARPSSQPSAGPAAMEVPQPEPAPGSALSPAGVCGGAQRPGHLPGLLLGSHGLLGSPVRAAASSPVTTLTQTMHDLAGLGSRSRLTHLSLSRRASESSLSSESSESSDAGLCMDSPSPMDPHMAEQTFEQAIQAASRIIRNEQFAIRRFQSMPVRLLGHSPVLRNITNSQAPDGRRKSEAGSGAASSSGEDKENDGFVFKMPWKPTHPSSTHALAEWASRREAFAQRPSSAPDLMCLSPDRKMEVEELSPLALGRFSLTPAEGDTEEDDGFVDILESDLKDDDAVPPGMESLISAPLVKTLEKEEEKDLVMYSKCQRLFRSPSMPCSVIRPILKRLERPQDRDTPVQNKRRRSVTPPEEQQEAEEPKARVLRSKSLCHDEIENLLDSDHRELIGDYSKAFLLQTVDGKHQDLKYISPETMVALLTGKFSNIVDKFVIVDCRYPYEYEGGHIKTAVNLPLERDAESFLLKSPIAPCSLDKRVILIFHCEFSSERGPRMCRFIRERDRAVNDYPSLYYPEMYILKGGYKEFFPQHPNFCEPQDYRPMNHEAFKDELKTFRLKTRSWAGERSRRELCSRLQDQ

SEQ ID NO: 10549 - protein, 555 aa, Homo sapiens
LPCARPSSQPSAGPAAMEVPQPEPAPGSALSPAGVCGGAQRPGHLPGLLLGSHGLLGSPVRAAASSPVTTLTQTMHDLAGLGSETPKSQVGTLLFRSRSRLTHLSLSRRASESSLSSESSESSDAGLCMDSPSPMDPHMAEQTFEQAIQAASRIIRNEQFAIRRFQSMPDGFVFKMPWKPTHPSSTHALAEWASRREAFAQRPSSAPDLMCLSPDRKMEVEELSPLALGRFSLTPAEGDTEEDDGFVDILESDLKDDDAVPPGMESLISAPLVKTLEKEEEKDLVMYSKCQRLFRSPSMPCSVIRPILKRLERPQDRDTPVQNKRRRSVTPPEEQQEAEEPKARVLRSKSLCHDEIENLLDSDHRELIGDYSKAFLLQTVDGKHQDLKYISPETMVALLTGKFSNIVDKFVIVDCRYPYEYEGGHIKTAVNLPLERDAESFLLKSPIAPCSLDKRVILIFHCEFSSERGPRMCRFIRERDRAVNDYPSLYYPEMYILKGGYKEFFPQHPNFCEPQDYRPMNHEAFKDELKTFRLKTRSWAGERSRRELCSRLQDQ

SEQ ID NO: 10550 - protein, 226 aa, Homo sapiens
LMCLSPDRKMEVEELSPLALGRFSLTPAEGDTEEDDGFVDILESDLKDDDAVPPGMESLISAPLVKTLEKEEEKDLVMYSKCQRLFRSPSMPCSVIRPILKRLERPQDRDTPVQNKRRRSVTPPEEQQEAEEPKARVLRSKSLCHDEIENLLDSDHRELIGDYSKVVPWVSDPRGASQLPWEPELNLKAKAGLPPTDSRRKAPRPQVHLTRNDGGPIDGQVQQHRG

SEQ ID NO: 10551 - protein, 39 aa, Homo sapiens
LRRCALQTPSGSCGGETEFPEPLRQMGFSTARGRQESCG

SEQ ID NO: 10552 - protein, 26 aa, Homo sapiens
MEAAVAQCLSGCRVSMEKRLASVPGC

SEQ ID NO: 10553 - protein, 21 aa, Homo sapiens
MLNIYGHVNVLTTGGRFRFSL

SEQ ID NO: 10554 - protein, 278 aa, Homo sapiens
LGSRTMSLTNTKTGFSVKDILDLPDTNDEEGSVAEGPEEENEGPEPAKRAGPLGQGALDAVQSLPLKNPFYDSSDNPYTRWLASTEGLQYSLHGLAAGAPPQDSSSKSPEPSADESPDNDKETPGGGGDAGKKRKRRVLFSKAQTYELERRFRQQRYLSAPEREHLASLIRLTPTQVKIWFQNHRYKMKRARAEKGMEVTPLPSPRRVAVPVLVRDGKPCHALKAQDLAAATFQAGIPFSAYSAQSLQHMQYNAQYSSASTPQYPTAHPLVQAQQWTW

SEQ ID NO: 10555 - protein, 95 aa, Homo sapiens
LAPLLELETKAGARGARRAGRPASCVHFRVLSKKTERGTGLGFIFFLPIPSFFLFLKIIIIPIIKANSPLPSPSPSPQLPPPPPAGAGERHELTK

SEQ ID NO: 10556 - protein, 48 aa, Homo sapiens
LEEMKALYEQNQSDVNEAKSGGRSDLIPTIKFRHCSLLRNRRCTVAYL

SEQ ID NO: 10557 - protein, 41 aa, Homo sapiens
LRLEATGPMKGDVAPHGSRGSQNLILALDLRRESLTRDETQ

SEQ ID NO: 10558 - protein, 11 aa, Homo sapiens
LVPGGGMEFLG

SEQ ID NO: 10559 - protein, 38 aa, Homo sapiens
VGRKEGAARARVSLLPEFGTAEVHLPAPSAVRAARPGF

SEQ ID NO: 10560 - protein, 69 aa, Homo sapiens [sequence omitted]

SEQ ID NO: 10561 - protein, 25 aa, Homo sapiens
VKEKIATLSQTCRPDRLIKPQKVTC

SEQ ID NO: 10562 - protein, 756 aa, Homo sapiens
LLFCVKWETMSQVKSSYSYDAPSDFINFSSLDDEGDTQNIDSWFEEKANLENKLLGKNGTGGLFQGKTPLRKANLQQAIVTPLKPVDNTYYKEAEKENLVEQSIPSNACSSLEVEAAISRKTPAQPQRRSLRLSAQKDLEQKEKHHVKMKAKRCATPVIIDEILPSKKMKVSNNKKKPEEEGSAHQDTAEKNASSPEKAKGRHTVPCMPPAKQKFLKSTEEQELEKSMKMQQEVVEMRKKNEEFKKLALAGIGQPVKKSVSQVTKSVDFHFRTDERIKQHPKNQEEYKEVNFTSELRKHPSSPARVTKGCTIVKPFNLSQGKKRTFDETVSTYVPLAQQVEDFHKRTPNRYHLRSKKDDINLLPSKSSVTKICRDPQTPVLQTKHRARAVTCKSTAELEAEELEKLQQYKFKARELDPRILEGGPILPKKPPVKPPTEPIGFDLEIEKRIQERESKKKTEDEHFEFHSRPCPTKILEDVVGVPEKKVLPITVPKSPAFALKNRIRMPTKEDEEEDEPVVIKAQPVPHYGVPFKPQIPEARTVEICPFSFDSRDKERQLQKEKKIKELQKGEVPKFKALPLPHFDTINLPEKKVKNVTQIEPFCLETDRRGALKAQTWKHQLEEELRQQKEAACFKARPNTVISQEPFVPKKEKKSVAEGLSGSLVQEPFQLATEKRAKERQELEKRMAEVEAQKAQQLEEARLQEEEQKKEELARLRRELVHKANPIRKYQGLEIKSSDQPLTVPVSPKFSTRFHC

SEQ ID NO: 10563 - protein, 792 aa, Homo sapiens
LLFCVKWETMSQVKSSYSYDAPSDFINFSSLDDEGDTQNIDSWFEEKANLENKLLGKNGTGGLFQGKTPLRKANLQQAIVTPLKPVDNTYYKEAEKENLVEQSIPSNACSSLEVEAAISRKTPAQPQRRSLRLSAQKDLEQKEKHHVKMKAKRCATPVIIDEILPSKKMKVSNNKKKPEEEGSAHQDTAEKNASSPEKAKGRHTVPCMPPAKQKFLKSTEEQELEKSMKMQQEVVEMRKKNEEFKKLALAGIGQPVKKSVSQVTKSVDFHFRTDERIKQHPKNQEEYKEVNFTSELRKHPSSPARVTKGCTIVKPFNLSQGKKRTFDETVSTYVPLAQQVEDFHKRTPNRYHLRSKKDDIKTGSCSVTQAGVQWRDHGSLQCPTPGLKQSSCLSLPNLLPSKSSVTKICRDPQTPVLQTKHRARAVTCKSTAELEAEELEKLQQYKFKARELDPRILEGGPILPKKPPVKPPTEPIGFDLEIEKRIQERESKKKTEDEHFEFHSRPCPTKILEDVVGVPEKKVLPITVPKSPAFALKNRIRMPTKEDEEEDEPVVIKAQPVPHYGVPFKPQIPEARTVEICPFSFDSRDKERQLQKEKKIKELQKGEVPKFKALPLPHFDTINLPEKKVKNVTQIEPFCLETDRRGALKAQTWKHQLEEELRQQKEAACFKARPNTVISQEPFVPKKEKKSVAEGLSGSLVQEPFQLATEKRAKERQELEKRMAEVEAQKAQQLEEARLQEEEQKKEELARLRRELVHKANPIRKYQGLEIKSSDQPLTVPVSPKFSTRFHC

SEQ ID NO: 10564 - protein, 47 aa, Homo sapiens
MACGRHHVPGPSSGAHQRLRGEWEGTQTVQDEKRPRHQSPSERRPRL

SEQ ID NO: 10565 - protein, 583 aa, Homo sapiens
LVPAREHIRGLEASGKGLRQCRTRNARGTKAPQSVAPASSSRKSVSRHWHPGTSGAAELGGRSSCEDPGCPRDEERAPRMGCMKSKFLQVGGNTFSKTETSASPHCPVYVPDPTSTIKPGPNSHNSNTPGIREGSEDIIVVALYDYEAIHHEDLSFQKGDQMVVLEESGEWWKARSLATRKEGYIPSNYVARVDSLETEEWFFKGISRKDAERQLLAPGNMLGSFMIRDSETTKGSYSLSVRDYDPRQGDTVKHYKIRTLDNGGFYISPRSTFSTLQELVDHYKKGNDGLCQKLSVPCMSSKPQKPWEKDAWEIPRESLKLEKKLGAGQFGEVWMATYNKHTKVAVKTMKPGSMSVEAFLAEANVMKTLQHDKLVKLHAVVTKEPIYIITEFMAKGSLLDFLKSDEGSKQPLPKLIDFSAQIAEGMAFIEQRNYIHRDLRAANILVSASLVCKIADFGLARVIEDNEYTAREGAKFPIKWTAPEAINFGSFTIKSDVWSFGILLMEIVTYGRIPYPGMSNPEVIRALERGYRMPRPENCPEELYNIMMRCWKNRPEERPTFEYIQSVLDDFYTATESQYQQQP

SEQ ID NO: 10566 - protein, 584 aa, Homo sapiens
LVPAREHIRGLEASGKGLRQCRTRNARGTKAPQSVAPASSSRKSVSRHWHPGTSGAAELGGRSSCEDPGCPRDEERAPRMGCMKSKFLQVGGNTFSKTETSASPHCPVYVPDPTSTIKPGPNSHNSNTPGIREAGSEDIIVVALYDYEAIHHEDLSFQKGDQMVVLEESGEWWKARSLATRKEGYIPSNYVARVDSLETEEWFFKGISRKDAERQLLAPGNMLGSFMIRDSETTKGSYSLSVRDYDPRQGDTVKHYKIRTLDNGGFYISPRSTFSTLQELVDHYKKGNDGLCQKLSVPCMSSKPQKPWEKDAWEIPRESLKLEKKLGAGQFGEVWMATYNKHTKVAVKTMKPGSMSVEAFLAEANVMKTLQHDKLVKLHAVVTKEPIYIITEFMAKGSLLDFLKSDEGSKQPLPKLIDFSAQIAEGMAFIEQRNYIHRDLRAANILVSASLVCKIADFGLARVIEDNEYTAREGAKFPIKWTAPEAINFGSFTIKSDVWSFGILLMEIVTYGRIPYPGMSNPEVIRALERGYRMPRPENCPEELYNIMMRCWKNRPEERPTFEYIQSVLDDFYTATESQYQQQP

SEQ ID NO: 10567 - protein, 592 aa, Homo sapiens
VGRDSDSAGRETPAAPKPLRASPPPLVLESQFPGTGTPEPQGLPSWGGAQAARIRAARETRSGRPDKQSKTAQVLRWQIFPSSHQKRMGCMKSKFLQVGGNTFSKTETSASPHCPVYVPDPTSTIKPGPNSHNSNTPGIREAGSEDIIVVALYDYEAIHHEDLSFQKGDQMVVLEESGEWWKARSLATRKEGYIPSNYVARVDSLETEEWFFKGISRKDAERQLLAPGNMLGSFMIRDSETTKGSYSLSVRDYDPRQGDTVKHYKIRTLDNGGFYISPRSTFSTLQELVDHYKKGNDGLCQKLSVPCMSSKPQKPWEKDAWEIPRESLKLEKKLGAGQFGEVWMATYNKHTKVAVKTMKPGSMSVEAFLAEANVMKTLQHDKLVKLHAVVTKEPIYIITEFMAKGSLLDFLKSDEGSKQPLPKLIDFSAQIAEGMAFIEQRNYIHRDLRAANILVSASLVCKIADFGLARVIEDNEYTAREGAKFPIKWTAPEAINFGSFTIKSDVWSFGILLMEIVTYGRIPYPGMSNPEVIRALERGYRMPRPENCPEELYNIMMRCWKNRPEERPTFEYIQSVLDDFYTATESQYQQQP

SEQ ID NO: 10568 - protein, 36 aa, Homo sapiens
LAPRNLRGCRAGGALKLRGSGLPARRGAGAQGQPLS

SEQ ID NO: 10569 - protein, 40 aa, Homo sapiens
LAPRNLRGCRAGGALKLRGSGLPARRGAGAQTNKAKPLKS

SEQ ID NO: 10570 - protein, 50 aa, Homo sapiens
LAPRNLRGCRAGGALKLRGSGLPARRGAGAQDGVHEVQVPPGRRQYILKN

SEQ ID NO: 10571 - protein, 23 aa, Homo sapiens
LHINDGVHEVQVPPGRRQYILKN

SEQ ID NO: 10572 - protein, 506 aa, Homo sapiens
MMGCMKSKFLQVGGNTFSKTETSASPHCPVYVPDPTSTIKPGPNSHNSNTPGIREAGSEDIIVVALYDYEAIHHEDLSFQKGDQMVVLEESGEWWKARSLATRKEGYIPSNYVARVDSLETEEWFFKGISRKDAERQLLAPGNMLGSFMIRDSETTKGSYSLSVRDYDPRQGDTVKHYKIRTLDNGGFYISPRSTFSTLQELVDHYKKGNDGLCQKLSVPCMSSKPQKPWEKDAWEIPRESLKLEKKLGAGQFGEVWMATYNKHTKVAVKTMKPGSMSVEAFLAEANVMKTLQHDKLVKLHAVVTKEPIYIITEFMAKGSLLDFLKSDEGSKQPLPKLIDFSAQIAEGMAFIEQRNYIHRDLRAANILVSASLVCKIADFGLARVIEDNEYTAREGAKFPIKWTAPEAINFGSFTIKSDVWSFGILLMEIVTYGRIPYPGMSNPEVIRALERGYRMPRPENCPEELYNIMMRCWKNRPEERPTFEYIQSVLDDFYTATESQYQQQP

SEQ ID NO: 10573 - protein, 39 aa, Homo sapiens
VPRWWLQGGSSTIRQGPHPLPTPRHPPSLQPQFPHLSSG

SEQ ID NO: 10574 - protein, 554 aa, Homo sapiens
LRGPGGARARPGPQRGAPSAVKRLFSESCVGGCDRAESLCGADGEAFSITWPFAISLAMTTFFTSVPPWIQDAKQEEEVGWKLVPRPRGREAESQVKCQCEISGTPFSNGEKLRPHSLPQPEQRPYSCPQLHCGKAFASKYKLYRHMATHSAQKPHQCMYCDKMFHRKDHLRNHLQTHDPNKEALHCSECGKNYNTKLGYRRHLAMHAASSGDLSCKVCLQTFESTQALLEHLKAHSRRVAGGAKEKKHPCDHCDRRFYTRKDVRRHLVVHTGRKDFLCQYCAQRFGRKDHLTRHVKKSHSQELLKIKTEPVDMLGLLSCSSTVSVKEELSPVLCMASRDVMGTKAFPGMLPMGMYGAHIPTMPSTGVPHSLVHNTLPMGMSYPLESSPISSPAQLPPKYQLGSTSYLPDKLPKVEVDSFLAELPGSLSLSSAEPQPASPQPAAAAALLDEALLAKSPANLSEALCAANVDFSHLLGFLPLNLPPCNPPGATGGLVMGYSQAEAQPLLTTLQAQPQDSPGAGGPLNFGPLHSLPPVFTSGLSSTTLPRFHQAFQ

SEQ ID NO: 10575 - protein, 39 aa, Homo sapiens
MHRTMARPPPLPGPEGAWRSPSAARPAAWGPERGEEIVF

SEQ ID NO: 10576 - protein, 247 aa, Homo sapiens
LGRQFRDWCLRTYGDSAKTKTVTRSKYQRIAEVLQGGGGTGAGSGPAAGEKGKFQFWVRSKGFRLGSGREPKMGQVVYVPVKTGSGADGLSEPEGISLKRVAVVEDFFDIIYSMHVESSAEPGKAPKHAGQKKTYRAIAETYAFLPREAVTRFLMSCTECQKRMHFNSNGLEPKENEPPSPLVSGIIDYNMPLTSTYLKQMKLRVMNSQEQCLPSGAEDIMSGGPTLEAAEFDDLIGKCLPDRPIAE

SEQ ID NO: 10577 - protein, 59 aa, Homo sapiens
LLFSGSERRPNAEAAQWCWDSITNNKSNTLITDTPAAQTTLPLCVGNPTQAHFPHWNYL

SEQ ID NO: 10578 - protein, 77 aa, Homo sapiens
LQVQATQLKSSNWVTRAKMPPARVLLHHHGSGQGATTPSEHACWGCQGDQCTGRPHPGLETGSAGQLHPGLEDRLEF

SEQ ID NO: 10579 - protein, 440 aa, Homo sapiens
VSVMALAGAPAGGPCAPALEALLGAGALRLLDSSQIVIISAAQDASAPPAPTGPAAPAAGPCDPDLLLFATPQAPRPTPSAPRPALGRPPVKRRLDLETDHQYLAESSGPARGRGRHPGKGVKSPGEKSRYETSLNLTTKRFLELLSHSADGVVDLNWAAEVLKVQKRRIYDITNVLEGIQLIAKKSKNHIQWLGSHTTVGVGGRLEGLTQDLRQLQESEQQLDHLMNICTTQLRLLSEDTDSQRLAYVTCQDLRSIADPAEQMVMVIKAPPETQLQAVDSSENFQISLKSKQGPIDVFLCPEETVGGISPGKTPSQEVTSEEENRATDSATIVSPPPSSPPSSLTTDPSQSLLSLEQEPLLSRMGSLRAPVDEDRLSPLVAADSLLEHVREDFSGLLPEEFISLSPPHEALDYHFGLEEGEGIRDLFDCDFGDLTPLDF

SEQ ID NO: 10580 - protein, 97 aa, Homo sapiens
LWARSWNLRLSVRLQFLTPTLRAARTMAAPPQLRALLVVVNALLRKRRYHAALAVLKGFRNGAVYGAKIRAPHALVMTFLFRNGRSTCTCCHASCLP

SEQ ID NO: 10581 - protein, 162 aa, Homo sapiens
VGRAHAPGKPGCFWAGLQTPRARVTVSFPGDREGGEPGTRAGAAGGAELRGAAPGAPTPARLSGAGRGQGSRLRGSRRCQCGGARERRQLGAAEPREAEGAVAAATATTTTPARVPSLFPPQPPFSSLPYVPECGSTASFPAARLPPDLSARVSPIPRGRWC

SEQ ID NO: 10582 - protein, 161 aa, Homo sapiens
LSLTISHGLGLPDRHFEQMKDDAIVCNIGHFDVEIDVKWLNENAVEKVNIKPQVDRYRLKNGRRIILLAEGRLVNLGCAMGHPSFVMSNSFTNQVMAQIELWTHPDKYPVGVHFLPKKLDEAVAEAHLGKLNVKLTKLTEKQAQYLGMSCDGPFKPDHYRY

SEQ ID NO: 10583 - protein, 451 aa, Homo sapiens
LCALRPLSAPSPPLRAQDLIVCKSKHGKADIGLAAWGRKALDIAENEMPGLMRMRERYSASKPLKGARIAGCLHMTVETAVLIETLVTLGAEVQWSSCNIFSTQDHAAAAIAKAGIPVYAWKGETDEEYLWCIEQTLYFKDGPLNMILDDGGDLTNLIHTKYPQLLPGIRGISEETTTGVHNLYKMMANGILKVPAINVNDSVTKSKFDNLYGCRESLIDGIKRATDVMIAGKVAVVAGYGDVGKGCAQALRGFGARVIITEIDPINALQAAMEGYEVTTMDEACQEGNIFVTTTGCIDIILGRHFEQMKDDAIVCNIGHFDVEIDVKWLNENAVEKVNIKPQVDRYRLKNGRRIILLAEGRLVNLGCAMGHPSFVMSNSFTNQVMAQIELWTHPDKYPVGVHFLPKKLDEAVAEAHLGKLNVKLTKLTEKQAQYLGMSCDGPFKPDHYRY

SEQ ID NO: 10584 - protein, 285 aa, Homo sapiens
MSDKLPYKVADIGLAAWGRKALDIAENEMPGLMRMRERYSASKPLKGARIAGCLHMTVETAVLIETLVTLGAEVQWSSCNIFSTQDHAAAAIAKAGIPVYAWKGETDEEYLWCIEQTLYFKDGPLNMILDDGGDLTNLIHTKYPQLLPGIRGISEETTTGVHNLYKMMANGILKVPAINVNDSVTKSKFDNLYGCRESLIDGIKRATDVMIAGKVAVVAGYGDVGKGCAQALRGFGARVIITEIDPINALQAAMEGYEVTTMDEACQEGNIFVTTTGCIDIILGR

SEQ ID NO: 10585 - protein, 52 aa, Homo sapiens
VLPPLVVQWSSCNIFSTQDHAAAAIAKAGIPGKSCLLLRRGICEGILPSLLH

SEQ ID NO: 10586 - protein, 125 aa, Homo sapiens
VMGLPEERVRSGSGSRGQEEAGAGGRARSWSPPPEVSRSAHVPSLQRYRELHRRSVEEPREFWGDIAKEFYWKTPCPGPFLRYNFDVTKGKIFIEWMKGATTNICYNVLDRNVHEKKLGDKVAFY

SEQ ID NO: 10587 - protein, 188 aa, Homo sapiens
VMGLPEERVRSGSGSRGQEEAGAGGRARSWSPPPEVSRSAHVPSLQRYRELHRRSVEEPREFWGDIAKEFYWKTPCPGPFLRYNFDVTKGKIFIEWMKGATTNICYNVLDRNVHEKKLGDKVAFYWCSSSPGQGSCAQSMGTTNALRQPTLRSFLDTMLQEMAASGTRMAITGSLAGLMTCSMYLDTC

SEQ ID NO: 10588 - protein, 424 aa, Homo sapiens
LISWNQGIDLWWHELMQEAGDECEPEWCDAEDPLFILYTSGSTGKPKGVVHTVGGYMLYVATTFKYVFDFHAEDVFWCTADIGWITGHSYVTYGPLANGATSVLFEGIPTYPDVNRLWSIVDKYKVTKFYTAPTAIRLLMKFGDEPVTKHSRASLQVLGTVGEPINPEAWLWYHRVVGAQRCPIVDTFWQTETGGHMLTPLPGATPMKPGSATFPFFGVAPAILNESGEELEGEAEGYLVFKQPWPGIMRTVYGNHERFETTYFKKFPGYYVTGDGCQRDQDGYYWITGRIDDMLNVSGHLLSTAEVESALVEHEAVAEAAVVGHPHPVKGECLYCFVTLCDGHTFSPKLTEELKKQIREKIGPIATPDYIQNAPGLPKTRSGKIMRRVLRKIAQNDHDLGDMSTVADPSVISHLFSHRCLTIQ

SEQ ID NO: 10589 - protein, 144 aa, Homo sapiens
LLCQAHQHLLSGSDRRLRELLQETEEILADVLKVEVFRQTVADQVLVGSYCVFSNQGGLVHPKTSIEDQDELSSLLQVPLVAGTVNRGSEVIAAGMVVNDWCAFCGLDTTSTELSVVESVFKLNEAQPSTIATSMRDSLIDSLT

SEQ ID NO: 10590 - protein, 29 aa, Homo sapiens
LGIMIPLTFLPFGKYLSVQLHEASAGERF

SEQ ID NO: 10591 - protein, 204 aa, Homo sapiens
LESRPDGRPSSTHPASPSAFSAPGKPHPPEAKMSSKRAKAKTTKKRPQRATSNVFAMFDQSQIQEFKEAFNMIDQNRDGFIDKEDLHDMLASLGKNPTDEYLEGMMSEAPGPINFTMFLTMFGEKLNGTDPEDVIRNAFACFDEEASGFIHEDHLRELLTTMGDRFTDEEVDEMYREAPIDKKGNFNYVEFTRILKHGAKDKDD

SEQ ID NO: 10592 - protein, 19 aa, Homo sapiens
MRPQPHQRPRAALAPGAPC

SEQ ID NO: 10593 - protein, 573 aa, Homo sapiens
LGRAVAMASHVDLLTELQLLEKVPTLERLRAAQKRRAQQLKKWAQYEQDLQHRKRKHERKRSTGGRRKKVSFEASVALLEASLRNDAEEVRYFLKNKVSPDLCNEDGLTALHQCCIDNFEEIVKLLLSHGANVNAKDNELWTPLHAAATCGHINLVKILVQYGADLLAVNSDGNMPYDLCEDEPTLDVIETCMAYQGITQEKINEMRVAPEQQMIADIHCMIAAGQDLDWIDAQGATLLHIAGANGYLRAAELLLDHGVRVDVKDWDGWEPLHAAAFWGQMQMAELLVSHGASLSARTSMDEMPIDLCEEEEFKVLLLELKHKHDVIMKSQLRHKSSLSRRTSSAGSRGKVVRRASLSDRTNLYRKEYEGEAILWQRSAAEDQRTSTYNGDIRETRTDQENKDPNPRLEKPVLLSEFPTKIPRGELDMPVENGLRAPVSAYQYALANGDVWKVHEVPDYSMAYGNPGVADATPPWSSYKEQSPQTLLELKRQRAAAKLLSHPFLSTHLGSSMARTGESSSEGKAPLIGGRTSPYSSNGTSVYYTVTSGDPPLLKFKAPIEEMEEKVHGCCRIS

SEQ ID NO: 10594 - protein, 531 aa, Homo sapiens
LGRAVAMASHVDLLTELQLLEKVPTLERLRAAQKRRAQQLKKWAQYEQDLQHRKRKHERKRSTGGRRKKVSFEASVALLEASLRNDAEEVRYFLKNKVSPDLCNEDGLTALHQCCIDNFEEIVKLLLSHGANVNAKDNELWTPLHAAATCGHINLVKILVQYGADLLAVNSDGNMPYDLCEDEPTLDVIETCMAYQGITQEKINEMRVAPEQQMIADIHCMIAAGQDLDWIDAQGATLMQMAELLVSHGASLSARTSMDEMPIDLCEEEEFKVLLLELKHKHDVIMKSQLRHKSSLSRRTSSAGSRGKVVRRASLSDRTNLYRKEYEGEAILWQRSAAEDQRTSTYNGDIRETRTDQENKDPNPRLEKPVLLSEFPTKIPRGELDMPVENGLRAPVSAYQYALANGDVWKVHEVPDYSMAYGNPGVADATPPWSSYKEQSPQTLLELKRQRAAAKLLSHPFLSTHLGSSMARTGESSSEGKAPLIGGRTSPYSSNGTSVYYTVTSGDPPLLKFKAPIEEMEEKVHGCCRIS

SEQ ID NO: 10595 - protein, 61 aa, Homo sapiens
LGRGSWNPGQPNSPGWGGVRAAGERWALLFRGTQTPALSWLPIASHVPRPVVLLPAASSAI

SEQ ID NO: 10596 - protein, 37 aa, Homo sapiens
LRPIVLLRVIPKSEPPATPDRGEKSSLCSEGARNLHG

SEQ ID NO: 10597 - protein, 85 aa, Homo sapiens [sequence omitted]

SEQ ID NO: 10598 - protein, 20 aa, Homo sapiens
LWIVSRSLGFTGWCWENEAK

SEQ ID NO: 10599 - protein, 8 aa, Homo sapiens
LQTPSPPQ

SEQ ID NO: 10600 - protein, 618 aa, Homo sapiens
VRPMARACLIQRLPIKRDCTPVFVRGLSSPSAAMALLSEGLDEVPAACLSPCGPPNPTELFSESRRLALEELVAGGPEAFAAFLRRERLARFLNPDEVHAILRAAERPGEEGAAAAAAAEDSFGSSHDCSSGTYFPEQSDLEPPLLELGWPAFYQGAYRGATRVETHFQPRGAGEGGPYGCKDALRQQLRSAREVIAVVMDVFTDIDIFRDLQEICRKQGVAVYILLDQALLSQFLDMCMDLKVHPEQEKLMTVRTITGNIYYARSGTKIIGKVHEKFTLIDGIRVATGSYSFTWTDGKLNSSNLVILSGQVVEHFDLEFRILYAQSKPISPKLLSHFQSSNKFDHLTNRKPQSKELTLGNLLRMRLARLSSTPRKADLDPEMPAEGKAERKPHDCESSTVSEEDYFSSHRDELQSRKAIDAATQTEPGEEMPGLSVSEVGTQTSITTACAGTQTAVITRIASSQTTIWSRSTTTQTDMDENILFPRGTQSTEGSPVSKMSVSRSSSLKSSSSVSSQGSVASSTGSPASIRTTDFHNPGYPKYLGTPHLELYLSDSLRNLNKERQFHFAGIRSRLNHMLAMLSRRTLFTENHLGLHSGNFSRVNLLAVRDVALYPSYQ

SEQ ID NO: 10601 - protein, 138 aa, Homo sapiens
LACAAAAPSVGAMAGAASPCANGCGPGAPSDAEVLHLCRSLEVGTVMTLFYSKKSQRPERKTFQVKLETRQITWSRGADKIEGAIDIREIKEIRPGKTSRDFDRYQEDPAFRPDQSHCFVILYGMEFRLKTLSLQGGS

SEQ ID NO: 10602 - protein, 152 aa, Homo sapiens
VGTVMTLFYSKKSQRPERKTFQVKLETRQITWSRGADKIEGAIDIREIKEIRPGKTSRDFDRYQEDPAFRPDQSHCFVILYGMEFRLKTLSLQATSEDEVNMWIKGLTWLMEDTLQAPTPLQIERWLRKQFYSVDRNREDRPRWARPTGQRS

SEQ ID NO: 10603 - protein, 150 aa, Homo sapiens
LTDNLVFDSLYDLITHYQQVPLRCNEFEMRLSEPVPQTNAHESKEWYHASLTRAQAEHMLMRVPRDGAFLVRKRNEPNSYAISFRAEGKIKHCRVQQEGQTVMLGNSEFDSLVDLISYYEKHPLYRKMKLRYPINEEALEKIGTAVRGLW

SEQ ID NO: 10604 - protein, 311 aa, Homo sapiens
MSSFPETKAEKYVNKAKGKKFLQYNRLQLSRIYPKGQRLDSSNYDPLPMWICGSQLVALNFQTPDKPMQMNQALFMTGRHCGYVLQPSTMRDEAFDPFDKSSLRGLEPCAISIEVLGARHLPKNGRGIVCPFVEIEVAGAEYDSTKQKTEFVVDNGLNPVWPAKPFHFQISNPEFAFLRFVVYEEDMFSDQNFLAQATFPVKGLKTGYRAVPLKNNYSEDLELASLLIKIDIFPAKQENGDLSPFSGTSLRERGSDASGQLFHGRAREGSFESRYQQPFEDFRISQEHLADHFDSRERRPTLQPVHAGLWR

SEQ ID NO: 10605 - protein, 75 aa, Homo sapiens
LTICMSLDSSYLHCKWATMEELEKDPRIAQKIKRFRNKQAQMKHIFTEVKQYLLTHLTAAFLAAVNTVFTFLSPS

SEQ ID NO: 10606 - protein, 199 aa, Homo sapiens
VEKKKKGKRKSETTVESLELDQGLTNPSLRSPEESTESTDSQKRRSGRQVKRRKYNEDLDFKVVDDDGETIAVLGAGRTSALSASTLAWQAEEPPEDDANIIEKILASKTVQEVHPGEPPFDLELFYVKYRNFSYLHCKWATMEELEKDPRIAQKIKRFRNKQAQMKHIFTEVKQYLLTHLTAAFLAAVNTVFTFLSPS

SEQ ID NO: 10607 - protein, 32 aa, Homo sapiens
LQFLRARSAGPADTLTPSSAARGPERPEQPGS

SEQ ID NO: 10608 - protein, 501 aa, Homo sapiens
LLFLAFFPLSLLIMQQTRTEAVAGAFSRCLGFCGMRLGLLLLARHWCIAGVFPQKFDGDSAYVGMSDGNPELLSTSQTYNGQSENNEDYEIPPITPPNLPEPSLLHLGDHEASYHSLCHGLTPNGLLPAYSYQAMDLPAIMVSNMLAQDSHLLSGQLPTIQEMVHSEVAAYDSGRPGPLLGRPAMLASHMSALSQSQLISQMGIRSSIAHSSPSPPGSKSATPSPSSSTQEEESEVHFKISGEKRPSADPGKKAKNPKKKKKKDPNEPQKPVSAYALFFRDTQAAIKGQNPSATFGDVSKIVASMWDSLGEEQKQSSPDQGETKSTQANPPAKMLPPKQPMYAMPGLASFLTPSDLQAFRSGASPASLARTLGSKSLLPGLSASPPPPPSFPLSPTLHQQLSLPPHAQGALLSPPVSMSPAPQPPVLPTPMALQVQLAMSPSPPGPQDFPHISEFPSSSGSCSPGPSNPTSSGDWDSSYPSGECGISTCSLLPRDKSLYLT

SEQ ID NO: 10609 - protein, 482 aa, Homo sapiens
LAESCGSVHFDGDSAYVGMSDGNPELLSTSQTYNGQSENNEDYEIPPITPPNLPEPSLLHLGDHEASYHSLCHGLTPNGLLPAYSYQAMDLPAIMVSNMLAQDSHLLSGQLPTIQEMVHSEVAAYDSGRPGPLLGRPAMLASHMSALSQSQLISQMGIRSSIAHSSPSPPGSKSATPSPSSSTQEEESEVHFKISGEKRPSADPGKKAKNPKKKKKKDPNEPQKPVSAYALFFRDTQAAIKGQNPSATFGDVSKIVASMWDSLGEEQKQAYKRKTEAAKKEYLKALAAYRASLVSKSSPDQGETKSTQANPPAKMLPPKQPMYAMPGLASFLTPSDLQAFRSGASPASLARTLGSKSLLPGLSASPPPPPSFPLSPTLHQQLSLPPHAQGALLSPPVSMSPAPQPPVLPTPMALQVQLAMSPSPPGPQDFPHISEFPSSSGSCSPGPSNPTSSGDWDSSYPSGECGISTCSLLPRDKSLYLT

SEQ ID NO: 10610 - protein, 384 aa, Homo sapiens
MEQEREGFSEEVTFQIQEMVHSEVAAYDSGRPGPLLGRPAMLASHMSALSQSQLISQMGIRSSIAHSSPSPPGSKSATPSPSSSTQEEESEVHFKISGEKRPSADPGKKAKNPKKKKKKDPNEPQKPVSAYALFFRDTQAAIKGQNPSATFGDVSKIVASMWDSLGEEQKQAYKRKTEAAKKEYLKALAAYRASLVSKSSPDQGETKSTQANPPAKMLPPKQPMYAMPGLASFLTPSDLQAFRSGASPASLARTLGSKSLLPGLSASPPPPPSFPLSPTLHQQLSLPPHAQGALLSPPVSMSPAPQPPVLPTPMALQVQLAMSPSPPGPQDFPHISEFPSSSGSCSPGPSNPTSSGDWDSSYPSGECGISTCSLLPRDKSLYLT

SEQ ID NO: 10611 - protein, 7 aa, Homo sapiens
LQEPSAR

SEQ ID NO: 10612 - protein, 158 aa, Homo sapiens
LAMGSLLTASSHTWLYSASLQAVDILKTERLGHGYHTLEDQALYNRLRQENMHFEICPWSSYLTGAWKPDTEHAVIRLKNDQANYSLNTDDPLIFKSTLDTDYQMTKRDMGFTEEEFKRLNINAAKSSFLPEDEKRELLDLLYKAYGMPPSASAGQNL

SEQ ID NO: 10613 - protein, 400 aa, Homo sapiens
VAGRGHRWPQGKPSGHRAGRDPPSGGGGSSAGAHEGTMAQTPAFDKPKVELHVHLDGSIKPETILYYGRRRGIALPANTAEGLLNVIGMDKPLTLPDFLAKFDYYMPAIAGCREAIKRIAYEFVEMKAKEGVVYVEVRYSPHLLANSKVEPIPWNQAEGDLTPDEVVALVGQGLQEGERDFGVKARSILCCMRHQPNWSPKVVELCKKYQQQTVVAIDLAGDETIPGSSLLPGHVQAYQEAVKSGIHRTVHAGEVGSAEVVKEAVDILKTERLGHGYHTLEDQALYNRLRQENMHFEICPWSSYLTGAWKPDTEHAVIRLKNDQANYSLNTDDPLIFKSTLDTDYQMTKRDMGFTEEEFKRLNINAAKSSFLPEDEKRELLDLLYKAYGMPPSASAGQNL

SEQ ID NO: 10614 - protein, 129 aa, Homo sapiens
LAMGSLLTASSHTWLYSASLQAVDILKTERLGHGYHTLEDQALYNRLRQENMHFEICPWSSYLTGAWKPDTEHAVIRLKNDQANYSLNTDDPLIFKSTLDTDYQMTKRDMGFTEEEFKRLVSGCEPYWP

SEQ ID NO: 10615 - protein, 274 aa, Homo sapiens [sequence omitted]

SEQ ID NO: 10616 - protein, 121 aa, Homo sapiens
MAQTPAFDKPKVELHVHLDGSIKPETILYYGRRRGIALPANTAEGLLNVIGMDKPLTLPDFLAKFDYYMPAIAGCREAIKRIAYEFVEMKAKEGVVYVEVRYSPHLLANSKVEPIPWNQAE

SEQ ID NO: 10617 - protein, 21 aa, Homo sapiens
VELHVHLDGSIKPETILYYGR

SEQ ID NO: 10618 - protein, 29 aa, Homo sapiens
MVCVSATSVRLSGGRHAARGLRCSRGPRF

SEQ ID NO: 10619 - protein, 22 aa, Homo sapiens
LLVGTGLDFSGEGSQGILKGGH

SEQ ID NO: 10620 - protein, 117 aa, Homo sapiens
LIGRRPQRVTIQTRAGGPAVLQLQSCSPSSCLSANAARMASQNRDPAATSVAAARKGAEPSGGAARGPVGKRLQQELMTLMMSGDKGISAFPESDNLFKWVGTIHGAAGTNPTLIVP

SEQ ID NO: 10621 - protein, 170 aa, Homo sapiens
LIGRRPQRVTIQTRAGGPAVLQLQSCSPSSCLSANAARMASQNRDPAATSVAAARKGAEPSGGAARGPVGKRLQQELMTLMAVGSIRTSSTVCLLSGPRETQDSSKPLVWGLGWDMRLLLELTLQLFLQMPEPNIDSPLNTHAAELWKNPTAFKKYLQETYSKQVTSQEP

SEQ ID NO: 10622 - protein, 217 aa, Homo sapiens
LIGRRPQRVTIQTRAGGPAVLQLQSCSPSSCLSANAARMASQNRDPAATSVAAARKGAEPSGGAARGPVGKRLQQELMTLMMSGDKGISAFPESDNLFKWVGTIHGAAGTVYEDLRYKLSLEFPSGYPYNAPTVKFLTPCYHPNVDTQGNICLDILKEKWSALYDVRTILLSIQSLLGEPNIDSPLNTHAAELWKNPTAFKKYLQETYSKQVTSQEP

SEQ ID NO: 10623 - protein, 179 aa, Homo sapiens
LQLQSCSPSSCLSANAARMASQNRDPAATSVAAARKGAEPSGGAARGPVGKRLQQELMTLMMSGDKGISAFPESDNLFKWVGTIHGAAGTAVGSIRTSSTVCLLSGPRETQDSSKPLVWGLGWDMRLLLELTLQLFLQMPEPNIDSPLNTHAAELWKNPTAFKKYLQETYSKQVTSQEP

SEQ ID NO: 10624 - protein, 149 aa, Homo sapiens
LWIWLQQELMTLMMSGDKGISAFPESDNLFKWVGTIHGAAGTVYEDLRYKLSLEFPSGYPYNAPTVKFLTPCYHPNVDTQGNICLDILKEKWSALYDVRTILLSIQSLLGEPNIDSPLNTHAAELWKNPTAFKKYLQETYSKQVTSQEP

SEQ ID NO: 10625 - protein, 50 aa, Homo sapiens
MGRDHPWSSWNKPNIDSPLNTHAAELWKNPTAFKKYLQETYSKQVTSQEP

SEQ ID NO: 10626 - protein, 75 aa, Homo sapiens
LVNLQYRRLYRSMNSQYLKLLSSQVSGESTAGSPAALGPQSSTASWGPLRLPVRTREAETPKGEAQGPVIGGVRI

SEQ ID NO: 10627 - protein, 438 aa, Homo sapiens
VDVRRGRRTTERVKVTELQLTSSELDFQPQQELMLQITNASLGLRFRRQLLYWFFYDGGYINASAEGVSIRTGLELSRDPAGRMKVSNVSCQASVSRMHAAFGGTFKKVYDFLSTFITSGMRFLLNQQICPVLYHAGTVLLNSLLDTVPVRSSVDELVGIDYSLMKDPVASTSNLDMDFRGAFFPLTERNWSLPNRAVEPQLQEEERMVYVAFSEFFFDSAMESYFRAGALQLLLVGDKVPHDLDMLLRATYFGSIVLLSPAVIDSPLKLELRVLAPPRCTIKPSGTTISVTASVTIALVPPDQPEVQLSSMTMDARLSAKMALRGKALRTQLDLRRFRIYSNHSALESLALIPLQAPLKTMLQIGVMPMLNERTWRGVQIPLPEGINFVHEVVTNHAGFLTIGADLHFAKGLREVIEKNRPADVRASTAPTPSTAAV

SEQ ID NO: 10628 - protein, 188 aa, Homo sapiens
LPLQCVLWGCLLTAVHPEPPTACREKQYLINSQCCSLCQPGQKLVSDCTEFTETECLPCGESEFLDTWNRETHCHQHKYCDPNLGLRVQQKGTSETDTICTCEEGWHCTSEACESCVLHRSCSPGFGVKQIATGVSDTICEPCPVGFFSNVSSAFEKCHPWTSCETKDLVVQQAGTNKTDVVCGLGLE

SEQ ID NO: 10629 - protein, 14 aa, Homo sapiens
LGFPPPFLYPHEIL

SEQ ID NO: 10630 - protein, 379 aa, Homo sapiens
VTSLLTLLHRELQALTEAMYTNLHAVLLGDATEAGSGWHEMGLLDFSYSFLLRAGYLTLYGIEALPRTHESQAQDRVHSADVFHTFRQLDRLLPKLARGSLSVGDKDHMCSVKSRLWKLLSPARLARRAHRSKWLESYLLHLEEMGVSEEMQARALVLQLWATQGNMGPAAFWLLLFLLKNPEALAAVRGELESILWQAEQPVSQTTTLPQKVLDSTPVLDSVLSESLRLTAAPFITREVVVDLAMPMADGREFNLRRGDRLLLFPFLSPQRDPEIYTDPEVFKYNRFLNPDGSEKKDFYKDGKRLKNYNMPWGAGHNHCLGRSYAVNSIKQFVFLVLVHLDLELINADVEIPEFDLSRYGFGLMQPEHDVPVRYRIRP

SEQ ID NO: 10631 - protein, 98 aa, Homo sapiens
MRSGARELALFLTPEPGAEAKEVEETIEGMLLRLEEFCSLADLIRSDTSQILEENIPVLKAKLTEMRGIYAKVDRLEILALPAFLSSWPLPPPSKPTE

SEQ ID NO: 10632 - protein, 116 aa, Homo sapiens
LGRRRSRVRSTDTQVQTATSLAHPISGQLADAIHWTVPEHLGMHTPCFSDTGDAKAGGCSPVRGHDLYLHNQTVSPAENPRGAWVLLGGHLSCGGEDKEISKQETRVTIQETLLSL

SEQ ID NO: 10633 - protein, 47 aa, Homo sapiens
LYLALLGDSGCWLLQAGRVGASSESFRGFQQKQNEDGLPGLFLNSQF

SEQ ID NO: 10634 - protein, 12 aa, Homo sapiens
MTLRCRYWLIGC

SEQ ID NO: 10635 - protein, 165 aa, Homo sapiens [sequence omitted]

SEQ ID NO: 10636 - protein, 418 aa, Homo sapiens
VAHARNPSIFGGRGIMDRSKENCISGPVKATAPVGGPKRVLVTQQFPCQNPLPVNSGQAQRVLCPSNSSQRIPLQAQKLVSSHKPVQNQKQKQLQATSVPHPVSRPLNNTQKSKQPLPSAPENNPEEELASKQKNEESKKRQWALEDFEIGRPLGKGKFGNVYLAREKQSKFILALKVLFKAQLEKAGVEHQLRREVEIQSHLRHPNILRLYGYFHDATRVYLILEYAPLGTVYRELQKLSKFDEQRTATYITELANALSYCHSKRVIHRDIKPENLLLGSAGELKIADFGWSVHAPSSRRTTLCGTLDYLPPEMIEGRMHDEKVDLWSLGVLCYEFLVGKPPFEANTYQETYKRISRVEFTFPDFVTEGARDLISRLLKHNPSQRPMLREVLEHPWITANSSKPSNCQNKESASKQS

SEQ ID NO: 10637 - protein, 413 aa, Homo sapiens
LGRRWEPTGIMDRSKENCISGPVKATAPVGGPKRVLVTQQFPCQNPLPVNSGQAQRVLCPSNSSQRIPLQAQKLVSSHKPVQNQKQKQLQATSVPHPVSRPLNNTQKSKQPLPSAPENNPEEELASKQKNEESKKRQWALEDFEIGRPLGKGKFGNVYLAREKQSKFILALKVLFKAQLEKAGVEHQLRREVEIQSHLRHPNILRLYGYFHDATRVYLILEYAPLGTVYRELQKLSKFDEQRTATYITELANALSYCHSKRVIHRDIKPENLLLGSAGELKIADFGWSVHAPSSRRTTLCGTLDYLPPEMIEGRMHDEKVDLWSLGVLCYEFLVGKPPFEANTYQETYKRISRVEFTFPDFVTEGARDLISRLLKHNPSQRPMLREVLEHPWITANSSKPSNCQNKESASKQS

SEQ ID NO: 10638 - protein, 489 aa, Homo sapiens
LEDLGPWVAGGSRRVGRPWGISQWRTRTAGTRGGWSEWRSVKSPVGSSVPECPWRCLVPAQRLCIRSWAPRRPVGYCLLLITARGIMDRSKENCISGPVKATAPVGGPKRVLVTQQFPCQNPLPVNSGQAQRVLCPSNSSQRIPLQAQKLVSSHKPVQNQKQKQLQATSVPHPVSRPLNNTQKSKQPLPSAPENNPEEELASKQKNEESKKRQWALEDFEIGRPLGKGKFGNVYLAREKQSKFILALKVLFKAQLEKAGVEHQLRREVEIQSHLRHPNILRLYGYFHDATRVYLILEYAPLGTVYRELQKLSKFDEQRTATYITELANALSYCHSKRVIHRDIKPENLLLGSAGELKIADFGWSVHAPSSRRTTLCGTLDYLPPEMIEGRMHDEKVDLWSLGVLCYEFLVGKPPFEANTYQETYKRISRVEFTFPDFVTEGARDLISRLLKHNPSQRPMLREVLEHPWITANSSKPSNCQNKESASKQS

SEQ ID NO: 10639 - protein, 414 aa, Homo sapiens
LEDLGPWVAGIMDRSKENCISGPVKATAPVGGPKRVLVTQQFPCQNPLPVNSGQAQRVLCPSNSSQRIPLQAQKLVSSHKPVQNQKQKQLQATSVPHPVSRPLNNTQKSKQPLPSAPENNPEEELASKQKNEESKKRQWALEDFEIGRPLGKGKFGNVYLAREKQSKFILALKVLFKAQLEKAGVEHQLRREVEIQSHLRHPNILRLYGYFHDATRVYLILEYAPLGTVYRELQKLSKFDEQRTATYITELANALSYCHSKRVIHRDIKPENLLLGSAGELKIADFGWSVHAPSSRRTTLCGTLDYLPPEMIEGRMHDEKVDLWSLGVLCYEFLVGKPPFEANTYQETYKRISRVEFTFPDFVTEGARDLISRLLKHNPSQRPMLREVLEHPWITANSSKPSNCQNKESASKQS

SEQ ID NO: 10640 - protein, 358 aa, Homo sapiens
LEDLGPWVAGIMDRSKENCISGPVKATAPVGGPKRVLVTQQFPCQNPLPVNSGQAQRVLCPSNSSQRIPLQAQKLVSSHKPVQNQKQKQLQATSVPHPVSRPLNNTQKSKQPLPSAPENNPEEELASKQKNEESKKRQWALEDFEIGRPLGKGKFGNVYLAREKQSKFILALKVLFKAQLEKAGVEHQLRREVEIQSHLRHPNILRLYGYFHDATRVYLILEYAPLGTVYRELQKLSKFDEQRTATYITELANALSYCHSKRVIHRDIKPENLLLGSAGELKIADFGWSVHAPSSRRTTLCGTLDYLPPEMIEGRMHDEKVDLWSLGVLCYEFLVGKPPFEANTYQETYKRISRVRRN

SEQ ID NO: 10641 - protein, 361 aa, Homo sapiens
LQSSGELLHITDMKGTGIMDCAPKALLARALYDNCPDCSDELAFSRGDILTILEQHVPESEGWWKCLLHGRQGLAPANRLQILTEVAADRPCPPFLRGLEEAPASSEETYQVPTLPRPPTPGPVYEQMRSWAEGPQPPTAQVYEFPDPPTSARIICEKTLSFPKQAILTLPRPVRASLPTLPSQVYDVPTQHRGPVVLKEPEKQQLYDIPASPKKAGLHPPDSQASNPGPLIPQPSSQQTPERKPRLSEHCRLYFGALFKAISAFHGSLSSSQPAEIITQSKLVIMVGQKLVDTLCMETQERDVRNEILRGSSHLCSLLKDVALATKNAVLTYPSPAALGHLQAEAEKLEQHTRQFRGTLG

SEQ ID NO: 10642 - protein, 157 aa, Homo sapiens
LRDQWSRKTLPRQHNSTSGVSATAAGPEASFEARIPSPGTHPEGEAAQRIHMKSCFLEDATIGNSNKMSISPGVAGPGGVAGSGEGEPGEDAGRRPADTQSRSHFPRDIGQPITPSHSKLTPKLETMTLGNRSHKAAEGSHYVDEASHEGSWWGGGI

SEQ ID NO: 10643 - protein, 488 aa, Homo sapiens
LTPAQWKLASLPLWVQSCKKHQARPLQKPQPRPSPPSQGHSAEACTPAKSLRLLAAAVSMAQAPADPGREGHLEQRILQVLTEAGSPVKLAQLVKECQAPKRELNQVLYRMKKELKVSLTSPATWCLGGTDPEGEGPAELALSSPAERPQQHAATIPETPGPQFSQQREEDIYRFLKDNGPQRALVIAQALGMRTAKDVNRDLYRMKSRHLLDMDEQSKAWTIYRPEDSGRRAKSASIIYQHNPINMICQNGPNSWISIANSEAIQIGHGNIITRQTVSREDGSAGPRHLPSMAPGDSSTWGTLVDPWGPQDIHMEQSILRRVQLGHSNEMRLHGVPSEGPAHIPPGSPPVSATAAGPEASFEARIPSPGTHPEGEAAQRIHMKSCFLEDATIGNSNKMSISPGVAGPGGVAGSGEGEPGEDAGRRPADTQSRSHFPRDIGQPITPSHSKLTPKLETMTLGNRSHKAAEGSHYVDEASHEGSWWGGGI

SEQ ID NO: 10644 - protein, 431 aa, Homo sapiens
LKPNLAGLARHLFPGCKQLTPAQWKLASLPLWVQSCKKHQARPLQKPQPRPSPPSQGHSAEACTPAKSLRLLAAAVSMAQAPADPGREAERPQQHAATIPETPGPQFSQQREEDIYRFLKDNGPQRALVIAQALGMRTAKDVNRDLYRMKSRHLLDMDEQSKAWTIYRPEDSGRRAKSASIIYQHNPINMICQNGPNSWISIANSEAIQIGHGNIITRQTVSREDGSAGPRHLPSMAPGDSSTWGTLVDPWGPQDIHMEQSILRRVQLGHSNEMRLHGVPSEGPAHIPPGSPPVSATAAGPEASFEARIPSPGTHPEGEAAQRIHMKSCFLEDATIGNSNKMSISPGVAGPGGVAGSGEGEPGEDAGRRPADTQSRSHFPRDIGQPITPSHSKLTPKLETMTLGNRSHKAAEGSHYVDEASHEGSWWGGGI

SEQ ID NO: 10645 - protein, 232 aa, Homo sapiens
LVIAQALGMRTAKDVNRDLYRMKSRHLLDMDEQSKAWTIYRPEDSGRRAKSASIIYQHNPINMICQNGPNSWISIANSEAIQIGHGNIITRQTVSREDGSAGPRHLPSMAPGDSSTWGTLVDPWGPQDIHMEQSILRRVQLGHSNEMRLHGVPSEGPAHIPPGSPPVFQCSGKQAAEERGAESQRKTLTSRSAGRDQWGRPTAGSVEQKDASQTAQQHERSLCHCCRPRSFV

SEQ ID NO: 10646 - protein, 64 aa, Homo sapiens
VGWSMVPLTSRSGWCPGYQGHARGLDDLSLQGALVVVQLAKGSPVKAGAVTAALDPRKPQVFAI

SEQ ID NO: 10647 - protein, 14 aa, Homo sapiens
LGVQWAMIPELLEN

SEQ ID NO: 10648 - protein, 61 aa, Homo sapiens
LLLAEQELDELADDRMALVSGISLDPEAAIGVTKRPPPKWVDGVDEVSSIFSMMLAGLSRR

SEQ ID NO: 10649 - protein, 128 aa, Homo sapiens
MATRRLTDAFLLLRNNSIQNRQLLAEQVSSHITSSPLHSRSIAALADDRMALVSGISLDPEAAIGVTKRPPPKWVDGVDEIQYDVGRIKQKMKELASLHDKHLNRPTLDDSSEEEHAIEITTQEITQA

SEQ ID NO: 10650 - protein, 166 aa, Homo sapiens
LHSRSIAAELDELADDRMALVSGISLDPEAAIGVTKRPPPKWVDGVDEIQYDVGRIKQKMKELASLHDKHLNRPTLDDSSEEEHAIEITTQEITQVPACRAGPAEPGPGLLRAGGAAAWERGGLAGAGPAGTLHQLPARTVRLPQTHEESRGKIPAFFRHISTTNG

SEQ ID NO: 10651 - protein, 110 aa, Homo sapiens
LLLVLLAGAAQGGLYFRRGQTCYRPLRGDGLAPLGRSTYPRPHEYLSPADLPKSWDWRNVDGVNYASITRNQHIPQYCGSCWAHASTSAMAGEWPPFDCGPGKPIPAACL

SEQ ID NO: 10652 - protein, 16 aa, Homo sapiens
MLHFQGEDVWAHVMAD

SEQ ID NO: 10653 - protein, 81 aa, Homo sapiens [sequence omitted]

SEQ ID NO: 10654 - protein, 119 aa, Homo sapiens
LALCQALCWMLGSIVRPGTAKAETNIPTVAHDTKLHRPENGRIHRNERQAVRCPALGRLQKRREDHPSWLTLGGLGSSQIVFLGIYKRVKIDTRNIHLFPFIYLTHTLGAMSSIPRRGS

SEQ ID NO: 10655 - protein, 94 aa, Homo sapiens
VWWQQAQPSLEMQNDAGEFVDLYVPRKCSASNRIIGAKDHASIQMNVAEVDKVTGRFNGQFKTYAICGAIRRMGESDDSILRLAKADGIVSKNF

SEQ ID NO: 10656 - protein, 68 aa, Homo sapiens
LPRERWLPFCACLHSLSGGETWAGGTADLLPSQAAGVEIFLVCFFFFLKGESDDSILRLAKADGIVSK

SEQ ID NO: 10657 - protein, 15 aa, Homo sapiens
LTGENHRCGIFVINK

SEQ ID NO: 10658 - protein, 11 aa, Homo sapiens
LERITDVEYLS

SEQ ID NO: 10659 - protein, 114 aa, Homo sapiens
LACNPTSVGADAVVFYCRCVRDPQRSFALGIQWIVVRILGGIPGPIAFGWVIDKACLLWQDQCGQQGSCLVYQNSAMSRYILIMGLLYKFQLPEVHHSLNVLNRKFQKQTVHNL

SEQ ID NO: 10660 - protein, 70 aa, Homo sapiens
LGIQWIVVRILGGIPGPIAFGWVIDKACLLWQDQCGQQGSCLVYQNSAMSRYILIMGLLYKEEENEFRRL

SEQ ID NO: 10661 - protein, 95 aa, Homo sapiens
VRKGTQPPCLPPAQLRPNHLPPERMSASAWTPWRQGPPCASEASTCQKIIFTPSLEKMALRLCTQRKEGEPQVSRRTMRLTEPAGRWRVSRALDI

SEQ ID NO: 10662 - protein, 22 aa, Homo sapiens
LCKEDTRMRCLHTQRAAADAGR

SEQ ID NO: 10663 - protein, 65 aa, Homo sapiens
LGSRLTLLRVPGLHEARAKVPFARALPSACCPLCSCSPWLPRDRCVGWRTRERLSPPQWTPRCRP

SEQ ID NO: 10664 - protein, 191 aa, Homo sapiens
LHHRIRQAPNPYSSEIKAFDTRLQRGELFSREDLVWYKKVLWEARKFELDRHEVILCTCSCAASASLKILDVRQILVDEAGMATEPETLIPLVQFPQAEKVVLLGDHKQLRPVVKNERLQNLGLDRSLFERYHEDAHMLDTQYRMHEGICAFPSVAFYKSKLKTWQGLRRPPSVLGHAGKESCPLTFGRHL

SEQ ID NO: 10665 - protein, 2116 aa, Homo sapiens
LLLTSDSQTRAVLRGSSAGHTVGALADSTEAPSKKPMSSSPSRSAADIYIREYFHSHVSGGHPEATPLRVMYTDRPLSQTDPVTLQYCCLTDDRQAFRPPTRAELARHRVVVTTTSQARELRVPVGFFSHILIDEAAQMLECEALTPLAYASHGTRLVLAGDHMQVTPRLFSVARARAAEHTLLHRLFLCYQQETHEVARQSRLVFHENYRCTDAIVSFISRHFYVAKGNPIHARGKVPPHPRHYPLMFCHVAGSPDRDMSMASWLNLAEIAQVVEKVQEAYNTWPSCWGGREQRCICVVSHGAQVSALRQELRRRDLGQVSVGSFEILPGRQFRVVVLSTVHTCQSLLSPGALAPEFFTDARVLNTVLTRAQSQLVVVGDAVALCSFGACGKLWESFIRECVERHSVCPEGLSMEQVEQGVAQRRRWPPRGTQAGAAGNWEAAPEPVGDLAEEQAAVVTAMVKAEPGDEALSPASRDITATTAQTEAAAAPAGDAVKEDVVPGACAAGAAAAAGVESTEAEDAEADFWPWDGELNADDAILRELLDESQKVMVTVGEDGLLDTVARPESLQQARLYENLPPAALRKLLHAEPERYRHCSFVPETFERASAIPLDDASSGPIQVRGRLDCGMAFAGDEVLVQLLSGDKAPEGRLRGRVLGVLKRKRHELAFVCRMDTWDPRIMVPINGSVTKIFVAELKDPSQVPIYSLRKGRLQRVGLERLTAEARHSRLFWVQIVLWRQGFYYPLGIVREVLPEASTWEQGLRILGLEYSLRVPPSDQATITKVLQKYHTELGRVAGRREDCRAFLTFTVDPQGACNLDDALSVRDLGPRCEVAVHITDVASFVPRDGVLDVEARRQGAAFYAPGREPVPMLPASLCQDVLSLLPGRDRLAISLFLTMEKASGQLKSLRFAPSVVQSDRQLSYEEAEEVIRQHPGAGRELPARLDSVDACVVAACYFSRLLRRHRLRSDCFYEQPDEDGTLGFRAAHIMVKEYMIQFNRLVAEFLVGSECTRTVTPLRWQPAPRSQQLKALCEKHGDRVPLSLHLGHHLHGGGGSPPDTRLHLLASLWKQVQFAARTQDYEQMVDLVTTDDMHPFLAPAGRDLRKALERSAFGRCARGHQQQGGHYSLQVDWYTWATSPIRRYLDVVLQRQILLALGHGGSAYSARDIDGLCQAFSLQHALAQSYQRRARSLHLAVQLKAQPLDKLGFVVDVEAGSRCFRLLFPSNRETLPDPCPVPYGSLQLAEHPHALAGRPGLRLLWRRRVYSAQGSSPPLPLPGTVPDPHTLAVETALWKQLLELVELQRWPEAAALIQEKGEASQRRELVQVQRSHCGHFLEVARELGSGDTLQVQLGTSLQHGFLVPSPQLWTVAPGFSLCLEHVERPGDCFSGRVYRAPRDRYRDVDEYACVWEPFCALESATGAVAENDSVTLQHLSVSWEASRTPQGQLQGAFRLEAAFLEENCADINFSCCYLCIRLEGLPAPTASPRPGPSSLGPGLNVDPGTYTWVAHGQTQDWDQERRADRQEAPRRVHLFVHHMGMEKVPEEVLRPGTLFTVELLPKQLPDLRKEEAVRGLEEASPLVTSIALGRPVPQPLCRVIPSRFLERQTYNIPGGRHKLNPSQNVAVREALEKPFTVIQGPPGTGKTIVGLHIVFWFHKSNQEQVQPGGPPRGEKRLGGPCILYCGPSNKSVDVLAGLLLRRMELKPLRVYSEQAEASEFPVPRVGSRKLLRKSPREGRPNQSLRSITLHHRIRQAPNPYSSEIKAFDTRLQRGELFSREDLVWYKKVLWEARKFELDRHEVILCTCSCAASASLKILDVRQILVDEAGMATEPETLIPLVQFPQAEKVVLLGDHKQLRPVVKNERLQNLGLDRSLFERYHEDAHMLDTQYRMHEGICAFPSVAFYKSKLKTWQGLRRPPSVLGHAGKESCPVIFGHVQGHERSLLVSTDEGNENSKANLEEVAEVVRITKQLTLGRTVEPQDIAVLTPYNAQASEISKALRREGIAGVAVSSITKSQGSEWRYVLVSTVRTCAKSDLDQRPTKSWLKKFLGFVVDPNQVNVAVTRAQEGLCLIGDHLLLRCCPLWRSLLDFCEAQQTLVPAGQVRVCRRPTMPS

SEQ ID NO: 10666 - protein, 2651 aa, Homo sapiens
VEMAVWEAEQLGGLQRGDLLTPPAPDGDGRTAPLGQPPGAQLYCPACLVTCHSQEAFENHCASSEHAQMVAFDQALPWEHRSPPPGLSKFELCPKPDLCEYGDACTKAHSAQELQEWVRRTQAVELRGQAAWQDGLVPYQERLLAEYQRSSSEVLVLAETLDGVRVTCNQPLMYQAQERKTQYSWTFAVHSEEPLLHVALLKQEPGADFSLVAPGLPPGRLYARGERFRVPSSTADFQVGVRVQAASFGTFEQWVVFDFGRRPVLLQKLGLQLGQGRRPGPCRNLALGHPEEMERWHTGNRHVVPGVERTAEQTALMAKYKGPALALEFNRSSVASGPISPTNYRQRMHQFLYEEEAAQQQLVAKLTLRGQVFLKTALQTPALNMLFAPPGALYAEVPVPSSLMPDTDQGFLLGRAVSTALVAPVPAPDNTVFEVRLERRASSEQALWLLLPARCCLALGLQPEARLVLEVQFQIDPMTFRLWHQAVDTLPEEQLVVPDLPTCALPRPWSVPPLRRGNRKQELAVALIAGWGPGDGRRVPPLLIYGPFGTGKTYTLAMASLEVIRRPETKVLICTHTNSAADIYIREYFHSHVSGGHPEATPLRVMYTDRPLSQTDPVTLQYCCLTDDRQAFRPPTRAELARHRVVVTTTSQARELRVPVGFFSHILIDEAAQMLECEALTPLAYASHGTRLVLAGDHMQVTPRLFSVARARAAEHTLLHRLFLCYQQETHEVARQSRLVFHENYRCTDAIVSFISRHFYVAKGNPIHARGKVPPHPRHYPLMFCHVAGSPDRDMSMASWLNLAEIAQVVEKVQEAYNTWPSCWGGREQRCICVVSHGAQVSALRQELRRRDLGQVSVGSFEILPGRQFRVVVLSTVHTCQSLLSPGALAPEFFTDARVLNTVLTRAQSQLVVVGDAVALCSFGACGKLWESFIRECVERHSVCPEGLSMEQVEQGVAQRRRWPPRGTQAGAAGNWEAAPEPVGDLAEEQAAVVTAMVKAEPGDEALSPASRDITATTAQTEAAAAPAGDAVKEDVVPGACAAGAAAAAGVESTEAEDAEADFWPWDGELNADDAILRELLDESQKVMVTVGEDGLLDTVARPESLQQARLYENLPPAALRKLLHAEPERYRHCSFVPETFERASAIPLDDASSGPIQVRGRLDCGMAFAGDEVLVQLLSGDKAPEGRLRGRVLGVLKRKRHELAFVCRMDTWDPRIMVPINGSVTKIFVAELKDPSQVPIYSLRKGRLQRVGLERLTAEARHSRLFWVQIVLWRQGFYYPLGIVREVLPEASTWEQGLRILGLEYSLRVPPSDQATITKVLQKYHTELGRVAGRREDCRAFLTFTVDPQGACNLDDALSVRDLGPRCEVAVHITDVASFVPRDGVLDVEARRQGAAFYAPGREPVPMLPASLCQDVLSLLPGRDRLAISLFLTMEKASGQLKSLRFAPSVVQSDRQLSYEEAEEVIRQHPGAGRELPARLDSVDACVVAACYFSRLLRRHRLRSDCFYEQPDEDGTLGFRAAHIMVKEYMIQFNRLVAEFLVGSECTRTVTPLRWQPAPRSQQLKALCEKHGDRVPLSLHLGHHLHGGGGSPPDTRLHLLASLWKQVQFAARTQDYEQMVDLVTTDDMHPFLAPAGRDLRKALERSAFGRCARGHQQQGGHYSLQVDWYTWATSPIRRYLDVVLQRQILLALGHGGSAYSARDIDGLCQAFSLQHALAQSYQRRARSLHLAVQLKAQPLDKLGFVVDVEAGSRCFRLLFPSNRETLPDPCPVPYGSLQLAEHPHALAGRPGLRLLWRRRVYSAQGSSPPLPLPGTVPDPHTLAVETALWKQLLELVELQRWPEAAALIQEKGEASQRRELVQVQRSHCGHFLEVARELGSGDTLQVQLGTSLQHGFLVPSPQLWTVAPGFSLCLEHVERPGDCFSGRVYRAPRDRYRDVDEYACVWEPFCALESATGAVAENDSVTLQHLSVSWEASRTPQGQLQGAFRLEAAFLEENCADINFSCCYLCIRLEGLPAPTASPRPGPSSLGPGLNVDPGTYTWVAHGQTQDWDQERRADRQEAPRRVHLFVHHMGMEKVPEEVLRPGTLFTVELLPKQLPDLRKEEAVRGLEEASPLVTSIALGRPVPQPLCRVIPSRFLERQTYNIPGGRHKLNPSQNVAVREALEKPFTVIQGPPGTGKTIVGLHIVFWFHKSNQEQVQPGGPPRGEKRLGGPCILYCGPSNKSVDVLAGLLLRRMELKPLRVYSEQAEASEFPVPRVGSRKLLRKSPREGRPNQSLRSITLHHRIRQAPNPYSSEIKAFDTRLQRGELFSREDLVWYKKVLWEARKFELDRHEVILCTCSCAASASLKILDVRQILVDEAGMATEPETLIPLVQFPQAEKVVLLGDHKQLRPVVKNERLQNLGLDRSLFERYHEDAHMLDTQYRMHEGICAFPSVAFYKSKLKTWQGLRRPPSVLGHAGKESCPVIFGHVQGHERSLLVSTDEGNENSKANLEEVAEVVRITKQLTLGRTVEPQDIAVLTPYNAQASEISKALRREGIAGVAVSSITKSQGSEWRYVLVSTVRTCAKSDLDQRPTKSWLKKFLGFVVDPNQVNVAVTRAQEGLCLIGDHLLLRCCPLWRSLLDFCEAQQTLVPAGQVRVCRRPTMPS

SEQ ID NO: 10667 - protein, 230 aa, Homo sapiens
VRRRRKRKSDTRLHELHRGPRSSRALRPASMDLLRPHWLEVSRDITGPQAAPSAFPHQELPRALPAAAATAGCAGLEATYSNVGLAALPGVSLAASPVVAEYARVQKRKGTHRSPQEPQQGKTEVTPAAQVDVLYSRVCKPKRRDPGPTTDPLDPKGQGAILALAGDLAYQTLPLRALDVDSGPLENVYESIRELGDPAGRSSTCGAGTPPASSCPSLGRGWRPLPASLP

SEQ ID NO: 10668 - protein, 233 aa, Homo sapiens
LCSACQPLGQTRSCPLPGVNSALTPPPALRPASMDLLRPHWLEVSRDITGPQAAPSAFPHQELPRALPAAAATAGCAGLEATYSNVGLAALPGVSLAASPVVAEYARVQKRKGTHRSPQEPQQGKTEVTPAAQVDVLYSRVCKPKRRDPGPTTDPLDPKGQGAILALAGDLAYQTLPLRALDVDSGPLENVYESIRELGDPAGRSSTCGAGTPPASSCPSLGRGWRPLPASLP

SEQ ID NO: 10669 - protein, 376 aa, Homo sapiens
LERRCSAADTRGTRPRSCRWQPRRSEPVGRPSLEYCLSVILNMGGAVSAGEDNDELIDNLKEAQYIRTELVEQAFRAIDRADYYLEEFKENAYKDLAWKHGNIHLSAPCIYSEVMEALDLQPGLSFLNLGSGTGYLSSMVGLILGPFGVNHGVELHSDVIEYAKQKLDFFIRTSDSFDKFDFCEPSFVTGNCLEISPDCSQYDRVYCGAGVQKEHEEYMKNLLKVGGILVMPLEEKPCHSESGKSRLVQLPPVAVRSLQDLARIAIRGTIKKIIHQETVSKNGNGLKNTPRFKRRRVRRRRMETIVFLDKEVFASRISNPSDDNSCEDLEEERREEEEKTPPETKPDPPVNFLRQKVLSLPLPDPLKYYLLYYREK

SEQ ID NO: 10670 - protein, 253 aa, Homo sapiens
LERRCSAADTRGTRPRSCRWQPRRSEPVGRPSLEYCLSVILNMGGAVSAGEDNDELIDNLKEAQYIRTELVEQAFRAIDRADYYLEEFKENAYKDLAWKHGNIHLSAPCIYSEPCHSESGKSRLVQLPPVAVRSLQDLARIAIRGTIKKIIHQETVSKNGNGLKNTPRFKRRRVRRRRMETIVFLDKEVFASRISNPSDDNSCEDLEEERREEEEKTPPETKPDPPVNFLRQKVLSLPLPDPLKYYLLYYREK

SEQ ID NO: 10671 - protein, 403 aa, Homo sapiens
LERRCSAADTRGTRPRSCRWQPRRSEPVGRPSLEYCLSVILNMGGAVSAGEDNDELIDNLKEAQYIRTELVEQAFRAIDRADYYLEEFKENAYKDLAWKHGNIHLSAPCIYSEVMEALDLQPGLSFLNLGSGTGYLSSMVGLILGPFGVNHGVELHSDVIEYAKQKLDFFIRTSDSFDKFDFCEPSFVTGNCLEISPDCSQYDRVYCGAGVQKEHEEYMKNLLKVGGILVMPLEEKLTKITRTGPSAWETKKILAVSFAPLIQPCHSESGKSRLVQLPPVAVRSLQDLARIAIRGTIKKIIHQETVSKNGNGLKNTPRFKRRRVRRRRMETIVFLDKEVFASRISNPSDDNSCEDLEEERREEEEKTPPETKPDPPVNFLRQKVLSLPLPDPLKYYLLYYREK

SEQ ID NO: 10672 - protein, 324 aa, Homo sapiens
LERRCSAADTRGTRPRSCRWQPRRSEPVGRPSLEYCLSVILNMGGAVSAGEDNDELIDNLKEAQYIRTELVEQAFRAIDRADYYLEEFKENAYKDLAWKHGNIHLSAPCIYSEVMEALDLQPGLSFLNLGSGTGYLSSMVGLILGPFGVNHGVELHSDVIEYAKQKLDFFIRTSDSFDKFDFCEPSFVTGNCLEISPDCSQYDRVYCGAGVQKEHEEYMKNLLKVGGILVMPLEEKLTKITRTGPSAWETKKILAVSFAPLIQPCHSESGKSRLVQLRSPSFVQGWSVVVLSQLTAASTFQAEAILPSQSPTWLTLQVLATMPN

SEQ ID NO: 10673 - protein, 139 aa, Homo sapiens
VEMLRFCAGLSDFAPVAVRSLQDLARIAIRGTIKKIIHQETVSKNGNGLKNTPRFKRRRVRRRRMETIVFLDKEVFASRISNPSDDNSCEDLEEERREEEEKTPPETKPDPPVNFLRQKVLSLPLPDPLKYYLLYYREK

SEQ ID NO: 10674 - protein, 34 aa, Homo sapiens
MLKRKPSNVSEKEKHQKPKAEGLVQPGWQVSKRR

SEQ ID NO: 10675 - protein, 38 aa, Homo sapiens
VKPHGVSVAKQVCFYVQFVQSTIHSPDILFLIVNQVSK

SEQ ID NO: 10676 - protein, 1160 aa, Homo sapiens
LNMTHGEELGSDVHQDSIVLTYLEGLLMHQAAGGSGTAVDKKSAGHNEEDQNFNISGSAFPTCQSNGPVLNTHTYQGSGMLHLKKARLLQSSEDWNAAKRKRLSDSIMNLNVKKEALLAGMVDSVPKGKQDSTLLASLLQSFSSRLQTVALSQQIRQSLKEQGYALSHDSLKVEKDLRCYGVASSHLKTLLKKSKVKDQKPDTNLPDVTKNLIRDRFAESPHHVGQSGTKVMSEPLSCAARLQAVASMVEKRASPATSPKPSVACSQLALLLSSEAHLQQYSREHALKTQNANQAASERLAAMARLQENGQKDVGSYQLPKGMSSHLNGQARTSSSKLMASKSSATVFQNPMGIIPSSPKNAGYKNSLERNNIKQAANNSLLLHLLKSQTIPKPMNGHSHSERGSIFEESSTPTTIDEYSDNNPSFTDDSSGDESSYSNCVPIDLSCKHRTEKSESDQPVSLDNFTQSLLNTWDPKVPDVDIKEDQDTSKNSKLNSHQKVTLLQLLLGHKNEENVEKNTSPQGVHNDVSKFNTQNYARTSVIESPSTNRTTPVSTPPLLTSSKAGSPINLSQHSLVIKWNSPPYVCSTQSEKLTNTASNHSMDLTKSKDPPGEKPAQNEGAQNSATFSASKLLQNLAQCGMQSSMSVEEQRPSKQLLTGNTDKPIGMIDRLNSPLLSNKTNAVEENKAFSSQPTGPEPGLSGSEIENLLERRTVLQLLLGNPNKGKSEKKEKTPLRDESTQEHSERALSEQILMVKIKSEPCDDLQIPNTNVHLSHDAKSAPFLGMAPAVQRSAPALPVSEDFKSEPVSPQDFSFSKNGLLSRLLRQNQDSYLADDSDRSHRNNEMALLESKNLCMVPKKRKLYTEPLENPFKKMKNNIVDAANNHSAPEVLYGSLLNQEELKFSRNDLEFKYPAGHGSASESEHRSWARESKSFNVLKQLLLSENCVRDLSPHRSNSVADSKKKGHKNNVTNSKPEFSISSLNGLMYSSTQPSSCMDNRTFSYPGVVKTPVSPTFPEHLGCAGSRPESGLLNGCSMPSEKGPIKWVITDAEKNEYEKDSPRLTKTNPILYYMLQKGGNSVTSRETQDKDIWREASSAESVSQVTAKEELLPTAETKASFFNLRSPYNSHMGNNASRPHSANGEVYGLLGSVLTIKKESE

SEQ ID NO: 10677 - protein, 13 aa, Homo sapiens
LIAMEGDKLILLY

SEQ ID NO: 10678 - protein, 37 aa, Homo sapiens
LFSGLIILTFGRNTARRTLIFAFNGEQKMKKEKEYIH

SEQ ID NO: 10679 - protein, 28 aa, Homo sapiens
MTSELLFNSLLNFLSQKAEAQSLETDEH

SEQ ID NO: 10680 - protein, 9 aa, Homo sapiens
LGETQPEEH

SEQ ID NO: 10681 - protein, 19 aa, Homo sapiens
MLCGLPNKSKRLTLAETRF

SEQ ID NO: 10682 - protein, 56 aa, Homo sapiens
MTSELLFNSLLNFLSQKAEAQSLETDAPEFQKLVCMDRFRAVPQSPGPVNKKRHVT

SEQ ID NO: 10683 - protein, 11 aa, Homo sapiens
LKEDRESEDSG

SEQ ID NO: 10684 - protein, 37 aa, Homo sapiens
LGAAAAWGSVWIVSYFRTVLRTHYFNIWEKHSQKMHT

SEQ ID NO: 10685 - protein, 39 aa, Homo sapiens
LVGGKSSPGRRARTGRQAPSRTEPDGAGGWEPRRPGMHT

SEQ ID NO: 10686 - protein, 41 aa, Homo sapiens
LVGGKSSPGRRARTGRQAPSRTEPDGAGGWEPRRPGEVFGL

SEQ ID NO: 10687 - protein, 7 aa, Homo sapiens
MKKLKPF

SEQ ID NO: 10688 - protein, 23 aa, Homo sapiens
MTKKHESPCWINLDFRLYHFSIC

SEQ ID NO: 10689 - protein, 11 aa, Homo sapiens
VVAAEALAARD

SEQ ID NO: 10690 - protein, 8 aa, Homo sapiens
LGRSMLEF

SEQ ID NO: 10691 - protein, 16 aa, Homo sapiens
MGSVAVDCYFVSVSNP

SEQ ID NO: 10692 - protein, 231 aa, Homo sapiens
LVESFWKAKQHTKEELKSLQAKDEEKNENEKAKAACSAAAMEEDSEASSSSTGDSSQGDNNLQKLGPDDVSVDTDSIRRVYTRLLSNEKIEIAFLNALVYLSPNVECDLMYHKVYSQDPNYLNLFIIVMENRNLHSPEYLEMALPLFCKAMSKLPLAAQGKLIRLWSKYNADQIRRMMETVQQLITYKVISNEFNSQNLVNDDDAIVAASKCLKMIYYANGSGRGSGHKSQ

SEQ ID NO: 10693 - protein, 212 aa, Homo sapiens
LQRCKSQEKTLKIAKMLLSQNAFIFRSLNLVLMVYISLVFGISYDSPDYTDESCTFKISLRNFRSILSWELKNHSIVPTHYTLLYTIMSKPEDLKVVKNCANTTRSFCDLTDEWRSTHEAYVTVLEGFSGNTTLFSCSHNFWLAIDMSFEPPEFEIVGFTNHINVMVKFPSIVEEELQFDLSLVIEEQSEGIVKKGEDEKLDISQFCHRQAL

SEQ ID NO: 10694 - protein, 95 aa, Homo sapiens
MVKFPSIVEEELQFDLSLVIEEQSEGIVKKHKPEIKGNMSGNFTYIIDKLIPNTNYCVSVYLEHSDEQAVIKSPLKCTLLPPGQESVIGYSKINA

SEQ ID NO: 10695 - protein, 80 aa, Homo sapiens
VLDVGFFMGICFEEKSCKCFCLIFIALGMVPPPENVRMNSVNFKNILQWESPAFAKGNLTFTAQYLSHYWTPWNASRSTC

SEQ ID NO: 10696 - protein, 138 aa, Homo sapiens
MDRHGIPTAQWKAFTKPEEACSFILSADFPALVVKASGLAAGKGVIVAKSKEEACKAVQEIMQEKAFGAAGETIVIEELLDGEEVSCLCFTDGKTVAPMPPAQDHKRLLEGDGGPNTGGMGAYCPAPQVLPEDSAEVL

SEQ ID NO: 10697 - protein, 224 aa, Homo sapiens
MAARVLIIGSGGREHTLAWKLAQSHHVKQVLVAPGNAGTACSEKISNTAISISDHTALAQFCKEKKIEFVVVGPEAPLAAGIVGNLRSAGVQCFGPTAEAAQLESSKRFAKEFMDRHGIPTAQWKAFTKPEEACSFILSADFPALVVKASGLAAGKGVIVAKSKEEACKAVQEIMQEKAFGAAGETIVIEELLDGEEVSVCIFIFLAFVVYKKLSSDLCTPEKT

SEQ ID NO: 10698 - protein, 321 aa, Homo sapiens
LSSIVGQQKLLCLKVYRSVSFTSLYNLLKTKLCPYFYVCTYQFTVLFRAAGLAGSDLITALISPTTRGLREAMRNEGIEFSLPLIKESGHKKETASGTSLGYGEEQAISDEDEEESFSWLEEMGVQDKIKKPDILSIKLRKEKHEVQMDHRPESVVLVKGINTFTLLNFLINSKSLVATSGPQAGLPPTLLSPVAFRGATMQMLKARSVNVKTQALSGYRDQFSLEITGPIMPHSLHSLTMLLKSSQSGSFSAVLYPHEPTAVFNICLQMDKVLDMEVVHKELTNCGLHPNTLEQLSQIPLLGKSSLRNVVLRDYIYNWRS

SEQ ID NO: 10699 - protein, 41 aa, Homo sapiens
LTITVFTNPPQVATYHRAIKITVDGPREPRNSLTWPRYPHI

SEQ ID NO: 10700 - protein, 293 aa, Homo sapiens
VPEKRFSPSRLRRMKVITCEIAWHNKEPVYSLDFQHGTAGRIHRLASAGVDTNVRIWKVEKGPDGKAIVEFLSNLARHTKAVNVVRFSPTGEILASGGDDAVILLWKVNDNKEPEQIAFQDEDEAQLNKENWTVVKTLRGHLEDVYDICWATDGNLMASASVDNTAIIWDVSKGQKISIFNEHKSYVQGVTWDPLGQYVATLSCDRHSLTLSPRQVLWRNLTISAHCNLCLLVSSDSPVSASLLAGITGTCHHARLIFVFLVETGFHHVGQAVLKLLTSNDLPALANVLGLQA

SEQ ID NO: 10701 - protein, 128 aa, Homo sapiens
VLRVYSIQKKRVAFNVSKMLSGIGAEGEARSYRMFHDDSMKSFFRRLSFTPDGSLLLTPGVELMSLPYRLVFAVASEDSVLLYDTQQSFPFGYVSNIHYHTLSDISCCIFSLVFAFKQACDFARTSLF

SEQ ID NO: 10702 - protein, 327 aa, Homo sapiens
VAAAAAAAAAAAARVRGSRAAGPDLCTMDNFAEGDFTVADYALLEDCPHVDDCVFAAEFMSNDYVRVTQLYCDGVGVQYKDYIQSERNLEFDICSIWCSKPISVLQDYCDAIKINIFWPLLFQHQNSSVISRLHPCVDANNSRASEINLKKLQHLELMEDIVDLAKKVANDSFLIGGLLRIGCKIENKILAMEEALNWIKYAGDVTILTKLGSIDNCWPMLSIFFTEYKYHITKIVMEDCNLLEELKTQSCMDCIEEGELMKMKGNEEFSKERFDIAIIYYTRAIEYRPENYLLYGNRALCFLRTGQFRTHSHGRKFGKYKSLKRRK

SEQ ID NO: 10703 - protein, 410 aa, Homo sapiens
LIALWPALLRNSPDECSVAKGGKMVGSPDTVGMNYGSYMEEKHMPPPNMTTNERRVIVPADPTLWSTDHVRQWLEWAVKEYGLPDVNILLFQNIDGKELCKMTKDDFQRLTPSYNADILLSHLHYLRETPLPHLTSDDVDKALQNSPRLMHARNTGGAAFIFPNTSVYPEATQRITTRPDLPYEPPRRSAWTGHGHPTPQSKAAQPSPSTVPKTEDQRPQLDPYQILGPTSSRLANPGSGQIQLWQFLLELLSDSSNSSCITWEGTNGEFKMTDPDEVARRWGERKSKPNMNYDKLSRALRYYYDKNIMTKVHGKRYAYKFDFHGIAQALQPHPPESSLYKYPSDLPYMGSYHAHPQKMNFVAPHPPALPVTSSSFFAAPNPYWNSPTGGIYPNTRLPTSHMPSHLGTYY

SEQ ID NO: 10704 - protein, 386 aa, Homo sapiens
LSRTQQLISRNSPDECSVAKGGKMVGSPDTVGMNYGSYMEEKHMPPPNMTTNERRVIVPADPTLWSTDHVRQWLEWAVKEYGLPDVNILLFQNIDGKELCKMTKDDFQRLTPSYNADILLSHLHYLRETPLPHLTSDDVDKALQNSPRLMHARNTDLPYEPPRRSAWTGHGHPTPQSKAAQPSPSTVPKTEDQRPQLDPYQILGPTSSRLANPGSGQIQLWQFLLELLSDSSNSSCITWEGTNGEFKMTDPDEVARRWGERKSKPNMNYDKLSRALRYYYDKNIMTKVHGKRYAYKFDFHGIAQALQPHPPESSLYKYPSDLPYMGSYHAHPQKMNFVAPHPPALPVTSSSFFAAPNPYWNSPTGGIYPNTRLPTSHMPSHLGTYY

SEQ ID NO: 10705 - protein, 465 aa, Homo sapiens
LKDMIQTVPDPAAHIKEALSVVSEDQSLFECAYGTPHLAKTEMTASSSSDYGQTSKMSPRVPQQDWLSQPPARVTIKMECNPSQVNGSRNSPDECSVAKGGKMVGSPDTVGMNYGSYMEEKHMPPPNMTTNERRVIVPADPTLWSTDHVRQWLEWAVKEYGLPDVNILLFQNIDGKELCKMTKDDFQRLTPSYNADILLSHLHYLRETPLPHLTSDDVDKALQNSPRLMHARNTDLPYEPPRRSAWTGHGHPTPQSKAAQPSPSTVPKTEDQRPQLDPYQILGPTSSRLANPGSGQIQLWQFLLELLSDSSNSSCITWEGTNGEFKMTDPDEVARRWGERKSKPNMNYDKLSRALRYYYDKNIMTKVHGKRYAYKFDFHGIAQALQPHPPESSLYKYPSDLPYMGSYHAHPQKMNFVAPHPPALPVTSSSFFAAPNPYWNSPTGGIYPNTRLPTSHMPSHLGTYY

SEQ ID NO: 10706 - protein, 489 aa, Homo sapiens
LKDMIQTVPDPAAHIKEALSVVSEDQSLFECAYGTPHLAKTEMTASSSSDYGQTSKMSPRVPQQDWLSQPPARVTIKMECNPSQVNGSRNSPDECSVAKGGKMVGSPDTVGMNYGSYMEEKHMPPPNMTTNERRVIVPADPTLWSTDHVRQWLEWAVKEYGLPDVNILLFQNIDGKELCKMTKDDFQRLTPSYNADILLSHLHYLRETPLPHLTSDDVDKALQNSPRLMHARNTGGAAFIFPNTSVYPEATQRITTRPDLPYEPPRRSAWTGHGHPTPQSKAAQPSPSTVPKTEDQRPQLDPYQILGPTSSRLANPGSGQIQLWQFLLELLSDSSNSSCITWEGTNGEFKMTDPDEVARRWGERKSKPNMNYDKLSRALRYYYDKNIMTKVHGKRYAYKFDFHGIAQALQPHPPESSLYKYPSDLPYMGSYHAHPQKMNFVAPHPPALPVTSSSFFAAPNPYWNSPTGGIYPNTRLPTSHMPSHLGTYY

SEQ ID NO: 10707 - protein, 466 aa, Homo sapiens
LKDMIQTVPDPAAHIKEALSVVSEDQSLFECAYGTPHLAKTEMTASSSSDYGQTSKMSPRVPQQDWLSQPPARVTIKMECNPSQVNGSRNSPDECSVAKGGKMVGSPDTVGMNYGSYMEEKHMPPPNMTTNERRVIVPADPTLWSTDHVRQWLEWAVKEYGLPDVNILLFQNIDGKELCKMTKDDFQRLTPSYNADILLSHLHYLRETPLPHLTSDDVDKALQNSPRLMHARNTGGAAFIFPNTSVYPEATQRITTRPAAQPSPSTVPKTEDQRPQLDPYQILGPTSSRLANPGSGQIQLWQFLLELLSDSSNSSCITWEGTNGEFKMTDPDEVARRWGERKSKPNMNYDKLSRALRYYYDKNIMTKVHGKRYAYKFDFHGIAQALQPHPPESSLYKYPSDLPYMGSYHAHPQKMNFVAPHPPALPVTSSSFFAAPNPYWNSPTGGIYPNTRLPTSHMPSHLGTYY

SEQ ID NO: 10708 - protein, 235 aa, Homo sapiens
LFECAYGTPHLAKTEMTASSSSDYGQTSKMSPRVPQQDWLSQPPARVTIKMECNPSQVNGSRNSPDECSVAKGGKMVGSPDTVGMNYGSYMEEKHMPPPNMTTNERRVIVPADPTLWSTDHVRQWLEWAVKEYGLPDVNILLFQNIDGKELCKMTKDDFQRLTPSYNADILLSHLHYLRETPLPHLTSDDVDKALQNSPRLMHARNTGGAAFIFPNTSVYPEATQRITTRPVSYR

SEQ ID NO: 10709 - protein, 262 aa, Homo sapiens
LKDMIQTVPDPAAHIKEALSVVSEDQSLFECAYGTPHLAKTEMTASSSSDYGQTSKMSPRVPQQDWLSQPPARVTIKMECNPSQVNGSRNSPDECSVAKGGKMVGSPDTVGMNYGSYMEEKHMPPPNMTTNERRVIVPADPTLWSTDHVRQWLEWAVKEYGLPDVNILLFQNIDGKELCKMTKDDFQRLTPSYNADILLSHLHYLRETPLPHLTSDDVDKALQNSPRLMHARNTGGAAFIFPNTSVYPEATQRITTRPGIYR

SEQ ID NO: 10710 - protein, 328 aa, Homo sapiens
LKDMIQTVPDPAAHIKEALSVVSEDQSLFECAYGTPHLAKTEMTASSSSDYGQTSKMSPRVPQQDWLSQPPARVTIKMECNPSQVNGSRNSPDECSVAKGGKMVGSPDTVGMNYGSYMEEKHMPPPNMTTNERRVIVPADPTLWSTDHVRQWLEWAVKEYGLPDVNILLFQNIDGKELCKMTKDDFQRLTPSYNADILLSHLHYLRETPLPHLTSDDVDKALQNSPRLMHARNTGGAAFIFPNTSVYPEATQRITTRPGTKTPLCDLFIERHPRCPAEIRALSHVIQRELIPELKPVPDSLILPLLIWRLNPLKPFHSKTTLKELRAD

SEQ ID NO: 10711 - protein, 383 aa, Homo sapiens
LKFTEKPRPGVQMLCSSFSVGGMFLATGSTDHVIRMYFLGFEAPEKIAELESHTDKVDSIQFCNNGDRFLSGSRDGTARIWRFEQLEWRSILLDMATRISGDLSSEEERFMKPKVTMIAWNQNDSIVVTAVNDHVLKVWNSYTGQLLHNLMGHADEVFVLETHPFDSRIMLSAGHDGSIFIWDITKGTKMKHYFNMIEGQGHGAVFDCKFSQDGQHFACTDSHGHLLIFGFGCSKPYEKIPDQMFFHTDYRPLIRDSNNYVLDEQTQQAPHLMPPPFLVDVDGNPHPTKYQRLVPGRENSADEHLIPQLGYVATSDGEVIEQIISLQTNDNDERSPESSILDGMIRQLQQQQDQRMGADQDTIPRGLSNGEETPRRGSWKTSD

SEQ ID NO: 10712 - protein, 721 aa, Homo sapiens
LTGRQHMSKAHKPWPYRRRSQFSSRKYLKKEMNSFQQQPPPFGTVPPQMMFPPNWQGAEKDAAFLAKDFNFLTLNNQPPPGNRSQPRAMGPENNLYSQYEQKVRPCIDLIDSLRALGVEQDLALPAIAVIGDQSSGKSSVLEALSGVALPRGSGIVTRCPLVLKLKKQPCEAWAGRISYRNTELELQDPGQVEKEIHKAQNVMAGNGRGISHELISLEITSPEVPDLTIIDLPGITRVAVDNQPRDIGLQIKALIKKYIQRQQTINLVVVPCNVDIATTEALSMAHEVDPEGDRTIGILTKPDLMDRGTEKSVMNVVRNLTYPLKKGYMIVKCRGQQEITNRLSLAEATKKEITFFQTHPYFRVLLEEGSATVPRLAERLTTELIMHIQKSLPLLEGQIRESHQKATEELRRCGADIPSQEADKMFFLIEKIKMFNQDIEKLVEGEEVVRENETRLYNKIREDFKNWVGILATNTQKVKNIIHEEVEKYEKQYRGKELLGFVNYKTFEIIVHQYIQQLVEPALSMLQKAMEIIQQAFINVAKKHFGEFFNLNQTVQSTIEDIKVKHTAKAENMIQLQFRMEQMVFCQDQIYSVVLKKVREEIFNPLGTPSQNMKLNSHFPSNESSVSSFTEIGIHLNAYFLETSKRLANQIPFIIQYFMLRENGDSLQKAMMQILQEKNRYSWLLQEQSETATKRRILKERIYRLTQARHALCQFSSKEIH

SEQ ID NO: 10713 - protein, 184 aa, Homo sapiens
LAERLTTELIMHIQKSLPLLEGQIRESHQKATEELRRCGADIPSQEADKMFFLIEKIKMFNQDIEKLVEGEEVVRENETRLYNKIREDFKNWVGILATNTQKGKFWAGLPAKQGGIYPDQRLCPAHDKCAKSGTRPSKTVEPLVISNCLSTNKTQKYGASTSATQHRAIPLPLMSSCLDFVLFC

SEQ ID NO: 10714 - protein, 135 aa, Homo sapiens
LFDVAVKNIIHEEVEKYEKQYRGKELLGFVNYKTFEIIVHQYIQQLVEPALSMLQKAMEIIQQAFINVAKKHFGEFFNLNQTVQVSTQSSLASHLDHWLFNLERSWIFTVIWNHEARDVMAGWRGWQGWRGWWSW

SEQ ID NO: 10715 - protein, 225 aa, Homo sapiens
LARLAGLAGLVELVTPGAPACLASAQEAASLPRRNEMRPVPCHLFCTTLRRMWGSTEDWLSTIEDIKVKHTAKAENMIQLQFRMEQMVFCQDQIYSVVLKKVREEIFNPLGTPSQNMKLNSHFPSNESSVSSFTEIGIHLNAYFLETSKRLANQIPFIIQYFMLRENGDSLQKAMMQILQEKNRYSWLLQEQSETATKRRILKERIYRLTQARHALCQFSSKEIH

SEQ ID NO: 10716 - protein, 30 aa, Homo sapiens
MAGSVGLALCGQTLVVRGGSRFLATSIASR

SEQ ID NO: 10717 - protein, 35 aa, Homo sapiens
LGFEIDAVNSVQFSNHTGALLLGLVVPAAGKGQLV

SEQ ID NO: 10718 - protein, 28 aa, Homo sapiens
LALWPVSKQLYRRLNCRLAYSLWSLAQN

SEQ ID NO: 10719 - protein, 33 aa, Homo sapiens
LGLPCGGNHRSCKGGKMERLFSGWAGVWGKPWA

SEQ ID NO: 10720 - protein, 86 aa, Homo sapiens
LSRPGCLQDGHHTLPVLQGCRGKGQDSRGLLSASPCLQWPEVRPELRGGASATNPMAGHSTLFPGRTPGPPALSPAECGVTFQERH

SEQ ID NO: 10721 - protein, 137 aa, Homo sapiens
LSQLGAVPRLQRVEASDAVQHLLDTGGPDREKRPPASPQSEVSPQRPCPAHPPPAKGPACPRAQGNLAGLWNRRGDSRQLHHPARSRCAVNIHQGGSSQGWQMGRSIPRAGDRREKAACWPPSQVAHACASVSPPVK

SEQ ID NO: 10722 - protein, 14 aa, Homo sapiens
LDSSVGTAISRNLT

SEQ ID NO: 10723 - protein, 35 aa, Homo sapiens
MPEGTGDTWRLLSPLCVQGHALCGSVPESRLPAGP

SEQ ID NO: 10724 - protein, 75 aa, Homo sapiens
LRGHPEVLSPRTEGRASPLGCPGRCPGPGDLTGRTATLMQGEGVWPQLFLSEAIFLHQGMGRKEAGAPEASVPHA

SEQ ID NO: 10725 - protein, 14 aa, Homo sapiens
LLTVSRRAGKDAAR

SEQ ID NO: 10726 - protein, 18 aa, Homo sapiens
VHGEGITWWPQSPFSPQQ

SEQ ID NO: 10727 - protein, 11 aa, Homo sapiens
MRDPETEGCLV

SEQ ID NO: 10728 - protein, 134 aa, Homo sapiens
MWIPVQFGKNVHTRSPTWQVPLAARGAGLRRQASRAPRHGPGSPPSPVCRPGEGVPRGQWAQGVRSHHAVVSPVDPGELMADRRNALPRPGRPIQMMQEHSLLKTRPACSRRSQSKFPEQAAVSEALNPVFPPS

SEQ ID NO: 10729 - protein, 98 aa, Homo sapiens
LTLGTCTERRSGDGSKPLGQAGPGQQKHSPPRVTALCPQKLSSRVFLDHNALPDTLKVTYDSFCSNGVTHRNQPRGDCDGVQINVPVSLATRVPIPAC

SEQ ID NO: 10730 - protein, 100 aa, Homo sapiens
VTFRRAKGYPIDLYYLMDLSYSMLDDLRNVKKLGGDLLRALNEITESGRIGERKQACPRAPLKLALPPGPSLPPPQPLHVPCRLRVLRGQDRAAVREHAP

SEQ ID NO: 10731 - protein, 124 aa, Homo sapiens
LRFLDVTQGRLVAKPPRPARSTAEDSSTPRDMLGLRPPLLALVGLLSLGCVLSQECTKFKVSSCRECIESGPGCTWCQKLGAALGPPAHATAASSPRRRSRVAPVCPRTEQGGQAPELHRAGGS

SEQ ID NO: 10732 - protein, 134 aa, Homo sapiens
VTQGRLVAKPPRPARSTAEDSSTPRDMLGLRPPLLALVGLLSLGCVLSQECTKFKVSSCRECIESGPGCTWCQKLGAALGPPAHATAASSPRRRSRVAPVCPRTEQGGQAPGGNYLGQAGFFPSPFWRFSAPLK

SEQ ID NO: 10733 - protein, 429 aa, Homo sapiens
LLTPPPPAECKCGPIDLLFVLDSSESIGLQNFEIAKDFVVKVIDRLSRDELVKFEPGQSYAGVVQYSHSQMQEHVSLRSPSIRNVQELKEAIKSLQWMAGGTFTGEALQYTRDQLLPPSPNNRIALVITDGRSDTQRDTTPLNVLCSPGIQVVSVGIKDVFDFIPGSDQLNVISCQGLAPSQGRPGLSLVKENYAELLEDAFLKNVTAQICIDKKCPDYTCPITFSSPADITILLDGSASVGSHNFDTTKRFAKRLAERFLTAGRTDPAHDVRVAVVQYSGTGQQRPERASLQFLQNYTALASAVDAMDFINDATDVNDALGYVTRFYREASSGAAKKRLLLFSDGNSQGATPAAIEKAVQEAQRAGIEIFVVVVGRQVNEPHIRVLVTGKTAEYDVAYGESHLFRVPSYQALLRGVFHQTVSRKVALG

SEQ ID NO: 10734 - protein, 82 aa, Homo sapiens [sequence omitted]

SEQ ID NO: 10735 - protein, 731 aa, Homo sapiens
VVLRCLRRRGGPYKTEPATDLGRWRLNCERGRQTWTYLQDERAGREQTGLEAYALGLDTKNYFKDLPKAHTAFEGALNGMTFYVGLQAEDGHWTGDYGGPLFLLPGLLITCHVARIPLPAGYREEIVRYLRSVQLPDGGWGLHIEDKSTVFGTALNYVSLRILGVGPDDPDLVRARNILHKKGGAVAIPSWGKFWLAVLNVYSWEGLNTLFPEMWLFPDWAPAHPSTLWCHCRQVYLPMSYCYAVRLSAAEDPLVQSLRQELYVEDFASIDWLAQRNNVAPDELYTPHSWLLRVVYALLNLYEHHHSAHLRQRAVQKLYEHIVADDRFTKSISIGPISKTINMLVRWYVDGPASTAFQEHVSRIPDYLWMGLDGMKMQGTNGSQIWDTAFAIQALLEAGGHHRPEFSSCLQKAHEFLRLSQVPDNPPDYQKYYRQMRKGGFSFSTLDCGWIVSDCTAEALKAVLLLQEKCPHVTEHIPRERLCDAVAVLLNMRNPDGGFATYETKRGGHLLELLNPSEVFGDIMIDYTYVECTSAVMQALKYFHKRFPEHRAAEIRETLTQGLEFCRRQQRADGSWEGSWGVCFTYGTWFGLEAFACMGQTYRDGTACAEVSRACDFLLSRQMADGGWGEDFESCEERRYLQSAQSQIHNTCWAMMGLMAVRHPDIEAQERGVRCLLEKQLPNGDWPQENIAGVFNKSCAISYTSYRNIFPIWALGRFSQLYPERALAGHP

SEQ ID NO: 10736 - protein, 170 aa, Homo sapiens [sequence omitted]

SEQ ID NO: 10737 - protein, 100 aa, Homo sapiens
LAVGRRGKLRPTTEEAAEVDLRGSARAPSPLPGPWEPETKSYATSPPNAPPRPGVLGLQRRTRPNAVRKPANRLDLQAPPLGAPAFPDRARVCSCVSLMS

SEQ ID NO: 10738 - protein, 276 aa, Homo sapiens
LLCVSPVTAGRPARSLREMEVEQEQRRRKVEAGRTKLAHFRQRKTKGDSSHSEKKTAKRKGSAVDASVQEESPVTKEDSALCGGGDICKSTSCDDTPDGAGGAFAAQPEDCDGEKREDLEQLQQKQVNDHPPEQCGMFTVSDHPPEQHGMFTVGDHPPEQRGMFTVSDHPPEQHGMFTVSDHPPEQRGMFTISDHQPEQRGMFTVSDHTPEQRGIFTISDHPAEQRGMFTKECEQECELAITDLESGREDEAGLHQSQRPFLRRRPCMALSWRRCA

SEQ ID NO: 10739 - protein, 333 aa, Homo sapiens
LHKRAERVAAALMEKGRLSVGDHVALVYPPGVDLIAAFYGCLYCGCVPVTVRPPHPQNLGTTLPTVKMIVEVSKSACVLTTQAVTRLLRSKEAAAAVDIRTWPTILDTDDIPKKKIASVFRPPSPDVLAYLDFSVSTTGILAGVKMSHAATSALCRSIKLQCELYPSRQIAICLDPYCGLGFALWCLCSVYSGHQSVLVPPLELESNVSLWLSAVSQYKARVTFCSYSVMEMCTKGLGAQTGVLRMKGVNLSCVRTCMVVAEERPRIALTQSFSKLFKDLGLPARAVSTTFGCRVNVAICLQVRCLGLRFSKAGCWQHGDPVSQLLMCRFVAA

SEQ ID NO: 10740 - protein, 51 aa, Homo sapiens
VLGLQEIKEQEVVDKVMETLDNDGDGECDFQEFMAFVAMVTTACHEFFEHE

SEQ ID NO: 10741 - protein, 97 aa, Homo sapiens
LRAPRMSELEKAMVALIDVFHQYSGREGDKHKLKKSELKELINNELSHFLEEIKEQEVVDKVMETLDNDGDGECDFQEFMAFVAMVTTACHEFFEHE

SEQ ID NO: 10742 - protein, 497 aa, Homo sapiens
LGSDSPLPTPHPALSIDETRAHLLLKEKMMRLGGRLVLNTKEELANERLMTLKIAEMKEAMRTLIFPPSMHFFQAKHLIERSQVFNILRMMPKGAALHLHDIGIVTMDWLVRNVTYRPHCHICFTPRGIMQFRFAHPTPRPSEKCSKWILLEDYRKRVQNVTEFDDSLLRNFTLVTQHPEVIYTNQNVVWSKFETIFFTISGLIHYAPVFRDYVFRSMQEFYEDNVLYMEIRARLLPVYELSGEHHDEEWSVKTYQEVAQKFVETHPEFIGIKIIYSDHRSKDVAVIAESIRMAMGLRIKFPTVVAGFDLVGHEDTGHSLHDYKEALMIPAKDGVKLPYFFHAGETDWQGTSIDRNILDALMLNTTRIGHGFALSKHPAVRTYSWKKDIPIEVCPISNQVLKLVSDLRNHPVATLMATGHPMVISSDDPAMFGAKGLSYDFYEVFMGIGGMKADLRTLKQLAMNSIKYSTLLESEKNTFMEIWKKRWDKFIADVATK

SEQ ID NO: 10743 - protein, 526 aa, Homo sapiens
LGSDSPLPTPHPGIPMLVDGPSERPALCFLLLAVAMSFFGSALSIDETRAHLLLKEKMMRLGGRLVLNTKEELANERLMTLKIAEMKEAMRTLIFPPSMHFFQAKHLIERSQVFNILRMMPKGAALHLHDIGIVTMDWLVRNVTYRPHCHICFTPRGIMQFRFAHPTPRPSEKCSKWILLEDYRKRVQNVTEFDDSLLRNFTLVTQHPEVIYTNQNVVWSKFETIFFTISGLIHYAPVFRDYVFRSMQEFYEDNVLYMEIRARLLPVYELSGEHHDEEWSVKTYQEVAQKFVETHPEFIGIKIIYSDHRSKDVAVIAESIRMAMGLRIKFPTVVAGFDLVGHEDTGHSLHDYKEALMIPAKDGVKLPYFFHAGETDWQGTSIDRNILDALMLNTTRIGHGFALSKHPAVRTYSWKKDIPIEVCPISNQVLKLVSDLRNHPVATLMATGHPMVISSDDPAMFGAKGLSYDFYEVFMGIGGMKADLRTLKQLAMNSIKYSTLLESEKNTFMEIWKKRWDKFIADVATK

SEQ ID NO: 10744 - protein, 84 aa, Homo sapiens
VYELSGEHHDEEWSVKTYQEVAQKFVETHPEFIGIKIIYSDHRSKDVAVIAESIRMAMGLRIKFPTVVAGFDLVTHAVNRRAAC

SEQ ID NO: 10745 - protein, 170 aa, Homo sapiens
MALLLSDWCPDGDADTHTGTDPGRTTHRLCARERGVRGTQPCPRIYLRLPAQNCEETRFCCASPGSVVLGHGAPRTASPPSALSHPSPLEGLSFSPFPPSVLSHPSPPEGLSFSLFHCLCSGKLSESPGCFWNSLGWSFSVLTEPGVWKVGEAIWVAENLAQPLTSPCAC

SEQ ID NO: 10746 - protein, 201 aa, Homo sapiens
VCALRDGRPSLGVGGSGARQPAPSDLSLFPLHTFDGPVHHFNLGRRIPGFDYGPDGFGTGLTPLHLSDDGEGGTFHFHDPPPPYTAYKYPDIGQPDDPPPPYEASIHPDSVFYDPADDDAFEPVEVSLPAPGDGGSEGALLRRLEQPLPTAGASLADLEDSADSSSALLVPPDPAQSGSTPAAEALPGGGRHSRSSLNTVV

SEQ ID NO: 10747 - protein, 259 aa, Homo sapiens
MASWACTAALAPCSTVPSPRRPSGEARPVAAAGGGLGRGSPSHPPPASRFGMFEFLSNHMRDAQGRLDSTRGLLCGLGAGVAEAVVVVCPMETIKVKFIHDQTSPNPKYRGFFHGVREIVREQGLKGTYQGLTATVLKQGSNQAIRFFVMTSLRNWYRGDNPNKPMNPLITGVFGAIAGAASVFGNTPLDVIKTRMQGLEAHKYRNTWDCGLQILKKEGLKAFYKGTVPRLGRVCLDVAIVFVIYDEVVKLLNKVWKTD

SEQ ID NO: 10748 - protein, 314 aa, Homo sapiens
VGWGVVEARSWSPPGALGLARLPSVTPCASPGQRGGLAGGIEICITFPTEYVKTQLQLDERSHPPRYRGIGDCVRQTVRSHGVLGLYRGLSSLLYGSIPKAAVRFGMFEFLSNHMRDAQGRLDSTRGLLCGLGAGVAEAVVVVCPMETIKVKFIHDQTSPNPKYRGFFHGVREIVREQGLKGTYQGLTATVLKQGSNQAIRFFVMTSLRNWYRGDNPNKPMNPLITGVFGAIAGAASVFGNTPLDVIKTRMQGLEAHKYRNTWDCGLQILKKEGLKAFYKGTVPRLGRVCLDVAIVFVIYDEVVKLLNKVWKTD

SEQ ID NO: 10749 - protein, 353 aa, Homo sapiens
LELTRPPRPWDHNRPPPPPRTERGVLESRTRSRHRAPRLPPAMPAPRAPRALAAAAPASGKAKLTHPGKAILAGGLAGGIEICITFPTEYVKTQLQLDERSHPPRYRGIGDCVRQTVRSHGVLGLYRGLSSLLYGSIPKAAVRFGMFEFLSNHMRDAQGRLDSTRGLLCGLGAGVAEAVVVVCPMETIKVKFIHDQTSPNPKYRGFFHGVREIVREQGLKGTYQGLTATVLKQGSNQAIRFFVMTSLRNWYRGDNPNKPMNPLITGVFGAIAGAASVFGNTPLDVIKTRMQGLEAHKYRNTWDCGLQILKKEGLKAFYKGTVPRLGRVCLDVAIVFVIYDEVVKLLNKVWKTD

SEQ ID NO: 10750 - protein, 118 aa, Homo sapiens
LESRTRSRHRAPRLPPAMPAPRAPRALAAAAPASGKAKLTHPGKAILAGGLAGGIEICITFPTEYVKTQLQLDERSHPPRYRGIGDCVRQTVRSHGVLGLYRGLSSLLYGSIPKAAVR

SEQ ID NO: 10751 - protein, 568 aa, Homo sapiens
VAMFVSDFRKEFYEVVQSQRVLLFVASDVDALCACKILQALFQCDHVQYTLVPVSGWQELETAFLEHKEQFHYFILINCGANVDLLDILQPDEDTIFFVCDTHRPVNVVNVYNDTQIKLLIKQDDDLEVPAYEDIFRDEEEDEEHSGNDSDGSEPSEKRTRLEEEIVEQTMRRRQRREWEARRRDILFDYEQYEYHGTSSAMVMFELAWMLSKDLNDMLWWAIVGLTDQWVQDKITQMKYVTDVGVLQRHVSRHNHRNEDEENTLSVDCTRISFEYDLRLVLYQHWSLHDSLCNTSYTAARFKLWSVHGQKRLQEFLADMGLPLKQVKQKFQAMDISLKENLREMIEESANKFGMKDMRVQTFSIHFGFKHKFLASDVVFATMSLMESPEKDGSGTDHFIQALDSLSRSNLDKLYHGLELAKKQLRATQQTIASCLCTNLVISQGPFLYCSLMEGTPDVMLFSRPASLSLLSKHLLKSFVCSTKNRRCKLLPLVMAAPLSMEHGTVTVVGIPPETDSSDRKNFFGRAFEKAAESTSSRMLHNHFDLSVIELKAEDRSKFLDALISLLS

SEQ ID NO: 10752 - protein, 600 aa, Homo sapiens
VAMFVSDFRKEFYEVVQSQRVLLFVASDVDALCACKILQALFQCDHVQYTLVPVSGWQELETAFLEHKEQFHYFILINCGANVDLLDILQPDEDTIFFVCDTHRPVNVVNVYNDTQIKLLIKQDDDLEVPAYEDIFRDEEEDEEHSGNDSDGSEPSEKRTRLEEEIVEQTMRRRQRREWEARSGSGSEPVAAALEKSSRLFAGPMSDRTAPRSPRRDILFDYEQYEYHGTSSAMVMFELAWMLSKDLNDMLWWAIVGLTDQWVQDKITQMKYVTDVGVLQRHVSRHNHRNEDEENTLSVDCTRISFEYDLRLVLYQHWSLHDSLCNTSYTAARFKLWSVHGQKRLQEFLADMGLPLKQVKQKFQAMDISLKENLREMIEESANKFGMKDMRVQTFSIHFGFKHKFLASDVVFATMSLMESPEKDGSGTDHFIQALDSLSRSNLDKLYHGLELAKKQLRATQQTIASCLCTNLVISQGPFLYCSLMEGTPDVMLFSRPASLSLLSKHLLKSFVCSTKNRRCKLLPLVMAAPLSMEHGTVTVVGIPPETDSSDRKNFFGRAFEKAAESTSSRMLHNHFDLSVIELKAEDRSKFLDALISLLS

SEQ ID NO: 10753 - protein, 522 aa, Homo sapiens
VAMFVSDFRKEFYEVVQSQRVLLFVASDVDALCACKILQALFQCDHVQYTLVPVSGWQELETAFLEHKEQIKLLIKQDDDLEVPAYEDIFRDEEEDEEHSGNDSDGSEPSEKRTRLEEEIVEQTMRRRQRREWEARRRDILFDYEQYEYHGTSSAMVMFELAWMLSKDLNDMLWWAIVGLTDQWVQDKITQMKYVTDVGVLQRHVSRHNHRNEDEENTLSVDCTRISFEYDLRLVLYQHWSLHDSLCNTSYTAARFKLWSVHGQKRLQEFLADMGLPLKQVKQKFQAMDISLKENLREMIEESANKFGMKDMRVQTFSIHFGFKHKFLASDVVFATMSLMESPEKDGSGTDHFIQALDSLSRSNLDKLYHGLELAKKQLRATQQTIASCLCTNLVISQGPFLYCSLMEGTPDVMLFSRPASLSLLSKHLLKSFVCSTKNRRCKLLPLVMAAPLSMEHGTVTVVGIPPETDSSDRKNFFGRAFEKAAESTSSRMLHNHFDLSVIELKAEDRSKFLDALISLLS

SEQ ID NO: 10754 - protein, 162 aa, Homo sapiens
VASDVDALCACKILQALFQCDHVQYTLVPVSGWQELETAFLEHKEQFHYFILINCGANVDLLDILQPDEDTIFFVCDTHRPVNVVNVYNDTQIKLLIKQDDDLEVPAYEDIFRDEEEDEEHSGNDSDGSEPSEKRTRLEEEIVEQTMRRRQRREWEARRIIY

SEQ ID NO: 10755 - protein, 298 aa, Homo sapiens
LRLFPTSDPQRGTRSPSLGRSAFGGAWTLALRGRPVPRSVATDPRTLFAGDSRSLSQGRDLKLCLWDLAEGRSAVVDSVCLESVGFCRSSILAGGQPRWTLAVPGRGSDEVQILEMPSKTSVCALKPKADAKLGMPMCLRLWQADCSSRPLLLAGYEDGSVVLWDVSEQKVCSRIACHEEPVMDLDFDSQKARGISGSAGKALAVWSLDWQQALQVRGTHELTNPGIAEVTIRPDRKILATAGWDHRIRVFHWRTMQPLAVLAFHSAAVQCVAFTADGLLAAGSKDQRISLWSLYPRA

SEQ ID NO: 10756 - protein, 79 aa, Homo sapiens
LLCCRAQRRPQTPPAARGLEPAQRCFEDAGGPASAVGSCVAGPGAAGGAAAASEALGLGPVPYRLERVHPAAHPQPAHG

SEQ ID NO: 10757 - protein, 82 aa, Homo sapiens
VSGRVLLGQLPDPAIEDQGGEYVQPMLSKYAAVCVRCPGYGTRTNTIILVDADGHVTFTERSMMDKDLSHWETRTYEFTLQS

SEQ ID NO: 10758 - protein, 48 aa, Homo sapiens
LPCPDAAAGTNTIILVDADGHVTFTERSMMDKDLSHWETRTYEFTLQS

SEQ ID NO: 10759 - protein, 280 aa, Homo sapiens
LAMGSALGRARRTLSGRPFQRAPCKTRRALSLSAALRNVTKAQGGCPKSLVLWGCRPKRPRKRRTSLKLAWRGTFCSSSLKISEDTHEDHDTSTENTDESNHDPQFEPIVSLPEQEIKTLEEDEEELFKMRAKLFRFASENDLPEWKERGTGDVKLLKHKEKGAIRLLMRRDKTLKICANHYITPMMELKPNAGSDRAWVWNTHADFADECPKPELLAIRFLNAENAQKFKTKFEECRKEIEEREKKAGSGKNDHAEKVAEKLEALSVKEETKEDAEEKQ

SEQ ID NO: 10760 - protein, 62 aa, Homo sapiens
LGSGVEVRVVGRREERAGGRRRRQTRREGATSSRREAAEPATTDPAEPPPPPRPHGGRQGHS

SEQ ID NO: 10761 - protein, 127 aa, Homo sapiens
MAAAKDTHEDHDTSTENTDESNHDPQFEPIVSLPEQEIKTLEEDEEELFKMRAKLFRFASENDLPEWKERGTGDVKLLKHKEKGAIRLLMRRDKTLKICANHYSRWHERPPRQSPAAWPGTFGKIQG

SEQ ID NO: 10762 - protein, 112 aa, Homo sapiens
LMGGRSAQAGLGTRITPMMELKPNAGSDRAWVWNTHADFADECPKPELLAIRFLNAENAQKFKTKFEECRKEIEEREKKAGSGKNDHAEKVAEKLEALSVKEETKEDAEEKQ

SEQ ID NO: 10763 - protein, 30 aa, Homo sapiens
LLPYLSLCLTCSLQDLITLMFCGDHTFNYS

SEQ ID NO: 10764 - protein, 278 aa, Homo sapiens
VFVQHDAAQLYLKLWNLIKDQIADVHLVERLQALYMIRMKDSLICLDCAMESSRNSSMLTLRLSFFDVDSKPLKTLEDALHCFFQPRELSSKSKCFCENCGKKTRGKQVLKLTHLPQTLTIHLMRFSIRNSQTRKICHSLYFPQSLDFSQILPMKRESCDAEEQSGGQYELFAVIAHVGMADSGHYCVYIRNAVDGKWFCFNDSNICLVSWEDIQCTYGNPNYHWPPFLCHACILIEDGEYLRLFRPANIRQFTSREETWVECWCVLTLQRKQLQQVW

SEQ ID NO: 10765 - protein, 23 aa, Homo sapiens
LPLPVLPPELGFQPDPSNEARVL

SEQ ID NO: 10766 - protein, 687 aa, Homo sapiens
VAAPRGSAAGPSAPGAVLALQGLPWILEATQLPTPPGEAAVEAMEIPAPEPEKTALSSQDPALSLKENLEDISGWGLPEARSKESVSFKDVAVDFTQEEWGQLDSPQRALYRDVMLENYQNLLALGPPLHKPDVISHLERGEEPWSMQREVPRGPCPEWELKAVPSQQQGICKEEPAQEPIMERPLGGAQAWGRQAGALQRSQAAPWAPAPAMVWDVPVEEFPLRCPLFAQQRVPEGGPLLDTRKNVQATEGRTKAPARLCAGENASTPSEPEKFPQVRRQRGAGAGEGEFVCGECGKAFRQSSSLTLHRRWHSREKAYKCDECGKAFTWSTNLLEHRRIHTGEKPFFCGECGKAFSCHSSLNVHQRIHTGERPYKCSACEKAFSCSSLLSMHLRVHTGEKPYRCGECGKAFNQRTHLTRHHRIHTGEKPYQCGSCGKAFTCHSSLTVHEKIHSGDKPFKCSDCEKAFNSRSRLTLHQRTHTGEKPFKCADCGKGFSCHAYLLVHRRIHSGEKPFKCNECGKAFSSHAYLIVHRRIHTGEKPFDCSQCWKAFSCHSSLIVHQRIHTGEKPYKCSECGRAFSQNHCLIKHQKIHSGEKSFKCEKCGEMFNWSSHLTEHQRLHSEGKPLAIQFNKHLLSTYYVPGSLLGAGDAGLRDVDPIDALDVAKLLCVVPPRAGRNFSLGSKPRN

SEQ ID NO: 10767 - protein, 46 aa, Homo sapiens
VAAKRDTGGGSWGTGMDVSGQETDWRSTAFRQKLRGCHEESWCGTQ

SEQ ID NO: 10768 - protein, 162 aa, Homo sapiens
LRSWALVPGSAGPCCCWVWPWSPMACCAQWLHRKAGTQTLEPQLEAADPACGACGAGQPKANPTVTLFPPSSEELQANKATLVCLISDFYPGAVTVAWKADGSPVKAGVETTKPSKQSNNKYAASSYLSLTPEQWKSHRSYSCQVTHEGSTVEKTVAPTECS

SEQ ID NO: 10769 - protein, 457 aa, Homo sapiens
LGRSCWESLVPAFLTKPISSYATCLGPSWDFITVPHFLELLVRSTITSILFNWPPENTSVYYQPPQRSSFRIKLAFRNLSWPGLGLEDHQEIVLGQLVLPEPNEAKPDDPAPRPGQHALTMPALEPAPPLLADLGPALEPESPAALGPPGYLHSAPGPAPAPGEGPPPGTVLEPQSAPESSCPCRGSVKNQPSEELPDMTTFPPRLLAEQLTLMDAELFKKVVLHECLGCIWGQGHLKGNEHMAPTVRATIAHFNRLTNCITTSCLGDHSMRARDRARVVEHWIKVARECLSLNNFSSVHVIVSALCSNPIGQLHKTWAGVSSKSMKELKELCKKDTAVKRDLLIKAGSFKVATQERNPQRVQMRLRRQKKGVVPFLGDFLTELQRLDSAIPDDLDGNTNKRSKEVRVLQEMQLLQVAAMNYRLRPLEKFVTYFTRMEQLSDKESYKLSCQLEPENP

SEQ ID NO: 10770 - protein, 531 aa, Homo sapiens
LRDPSPSAPWLPSSPCPPPPDICPFPPNPRTRGPRSGALMRKLLTNLPAAAVLSAQVYSAVLQGLWEENVCGTPGRTRVCTALLYGQVCPFQDSTDGLRTITSILFNWPPENTSVYYQPPQRSSFRIKLAFRNLSWPGLGLEDHQEIVLGQLVLPEPNEAKPDDPAPRPGQHALTMPALEPAPPLLADLGPALEPESPAALGPPGYLHSAPGPAPAPGEGPPPGTVLEPQSAPESSCPCRGSVKNQPSEELPDMTTFPPRLLAEQLTLMDAELFKKVVLHECLGCIWGQGHLKGNEHMAPTVRATIAHFNRLTNCITTSCLGDHSMRARDRARVVEHWIKVARECLSLNNFSSVHVIVSALCSNPIGQLHKTWAGVSSKSMKELKELCKKDTAVKRDLLIKAGSFKVATQERNPQRVQMRLRRQKKGVVPFLGDFLTELQRLDSAIPDDLDGNTNKRSKEVRVLQEMQLLQVAAMNYRLRPLEKFVTYFTRMEQLSDKERWGFTMMSRIVSNSWPQAIHPPQPPKVLTLQV

SEQ ID NO: 10771 - protein, 512 aa, Homo sapiens
LRDPSPSAPWLPSSPCPPPPDICPFPPNPRTRGPRSGALMRKLLTNLPAAAVLSAQVYSAVLQGLWEENVCGTPGRTRVCTALLYGQVCPFQDSTDGLRTITSILFNWPPENTSVYYQPPQRSSFRIKLAFRNLSWPGLGLEDHQEIVLGQLVLPEPNEAKPDDPAPRPGQHALTMPALEPAPPLLADLGPALEPESPAALGPPGYLHSAPGPAPAPGEGPPPGTVLEPQSAPESSCPCRGSVKNQPSEELPDMTTFPPRLLAEQLTLMDAELFKKVVLHECLGCIWGQGHLKGNEHMAPTVRATIAHFNRLTNCITTSCLGDHSMRARDRARVVEHWIKVARECLSLNNFSSVHVIVSALCSNPIGQLHKTWAGVSSKSMKELKELCKKDTAVKRDLLIKAGSFKVATQERNPQRVQMRLRRQKKGVVPFLGDFLTELQRLDSAIPDDLDGNTNKRSKEVRVLQEMQLLQVAAMNYRLRPLEKFVTYFTRMEQLSDKESYKLSCQLEPENP

SEQ ID NO: 10772 - protein, 452 aa, Homo sapiens
LEGCVGEGQASDSAVYSITSTITSILFNWPPENTSVYYQPPQRSSFRIKLAFRNLSWPGLGLEDHQEIVLGQLVLPEPNEAKPDDPAPRPGQHALTMPALEPAPPLLADLGPALEPESPAALGPPGYLHSAPGPAPAPGEGPPPGTVLEPQSAPESSCPCRGSVKNQPSEELPDMTTFPPRLLAEQLTLMDAELFKKVVLHECLGCIWGQGHLKGNEHMAPTVRATIAHFNRLTNCITTSCLGDHSMRARDRARVVEHWIKVARECLSLNNFSSVHVIVSALCSNPIGQLHKTWAGVSSKSMKELKELCKKDTAVKRDLLIKAGSFKVATQERNPQRVQMRLRRQKKGVVPFLGDFLTELQRLDSAIPDDLDGNTNKRSKEVRVLQEMQLLQVAAMNYRLRPLEKFVTYFTRMEQLSDKERWGFTMMSRIVSNSWPQAIHPPQPPKVLTLQV

SEQ ID NO: 10773 - protein, 506 aa, Homo sapiens
LEGCVGEGQASDSAVYSITSTITSILFNWPPENTSVYYQPPQRSSFRIKLAFRNLSWPGLGLEDHQEIVLGQLVLPEPNEAKPDDPAPRPGQHALTMPALEPAPPLLADLGPALEPESPAALGPPGYLHSAPGPAPAPGEGPPPGTVLEPQSAPESSCPCRGSVKNQPSEELPDMTTFPPRLLAEQLTLMDAELFKKVVLHECLGCIWGQGHLKGNEHMAPTVRATIAHFNRLTNCITTSCLGDHSMRARDRARVVEHWIKVARECLSLNNFSSVHVIVSALCSNPIGQLHKTWAGVSSKSMKELKELCKKDTAVKRDLLIKAGSFKVATQERNPQRVQMRLRRQKKGVVPFLGDFLTELQRLDSAIPDDLDGNTNKRSKEVRVLQEMQLLQVAAMNYRLRPLEKFVTYFTRMEQLSDKERLHCSVTISVHCNVCLLGSSPSSASQAAGTTAVHHHVRLFCCCCSATSCPASWSPKTRRLATSCSGWEPTGMLARTPALHHPSPRP

SEQ ID NO: 10774 - protein, 161 aa, Homo sapiens
LHHSLQKRKQSQGGPAARLGDTHRECGSGPVAGSFKVATQERNPQRVQMRLRRQKKGVVPFLGDFLTELQRLDSAIPDDLDGNTNKRSKEVRVLQEMQLLQVAAMNYRLRPLEKFVTYFTRMEQLSDKERWGFTMMSRIVSNSWPQAIHPPQPPKVLTLQV

SEQ ID NO: 10775 - protein, 91 aa, Homo sapiens
VRALQPAQHRQDRRRAEPLLQQAAVRPAGRAPAHQPGQVRGVAEGRGRGGGARPGPGLSHPLSPASSPRRVYINYYDMNAANVGWNNSTFA

SEQ ID NO: 10776 - protein, 12 aa, Homo sapiens
LAPPGNPPHAVF

SEQ ID NO: 10777 - protein, 51 aa, Homo sapiens [sequence omitted]

SEQ ID NO: 10778 - protein, 627 aa, Homo sapiens
VPAPRPAAPAPPRPAASERANEPPRPWPGARPSSTAQMPRRSRRGIWRIPVDEIDRPGSFAWHMNRSIVLLLKVLAQLRDHSTLLKVSSMLQRTPDQGKKYLRDADRQVLAQRAFILTVKVLEDTLSELAEGSERPGPKVCGLPGARMTTDVSHKASPEDGQEGLPQPKKPPLADGSGPGPEPGGKVGLLNHRPVAMDAGDSADQSGERKDKESPRAGPTEPMDTSEATVCHSDLERTPPLLPGRPARDRGPESRPTELSLEELSISARQQPTPLTPAQPAPAPAPATTTGTRAGGHPEEPLSRLSRKRKLLEDTESGKTLLLDAYRVWQQGQKGVAYDLGRVERIMSETYMLIKQVDEEAALEQAVKFCQVHLGAAAQRQASGDTPTTPKHPKDSRENFFPVTVVPTAPDPVPADSVQRPSDAHTKPRPALAAATTIITCPPSASASTLDQSKDPGPPRPHRPEATPSMASLGPEGKLRPEPRRDGEAQEAASETQPLSSPPTAASSKAPSSGSAQPPEGHPGKPEPSRAKSRPLPNMPKLVIPSAATKFPPEITVTPPTPTLLSPKGSISEETKQKLKSAILSAQSAANVRKESLCQPALEVLETSSQESSLESETDEDDDYMDI

SEQ ID NO: 10779 - protein, 174 aa, Homo sapiens
LGRVERIMSETYMLIKQVDEEAALEQAVKFCQVHLGAAAQRQASGDTPTTPKHPKDSRENFFPVTVVPTAPDPVPADSVQRPSDAHTKPRPALAAATTIITCPPSASASTLDQSKDPGPPRPHRPEATPSMASLGPGPPLLLPPCLKDPACFLAADPALAHSLCHPWRLTCLPS

SEQ ID NO: 10780 - protein, 60 aa, Homo sapiens
LAQAWGCWGWNVELQPQPIWQSPRNSETGTAALSASAVCCHVTHPKHLLAAGSIPQDPKP

SEQ ID NO: 10781 - protein, 183 aa, Homo sapiens
LTRFSIRKLIKEYEKLDNEEDRLCRSRQIYDAYIMKELLSCSHPFSKQAVEHVQSHLSKKQVTSTLFQPYIEEICESLRGDIFQKFMESDKFTRFCQWKNVELNIHLTMNEFSVHRIIGRGGFGEVYGCRKADTGKMYAMKCLDKKRIKMKQGETLALNERIMLSLVSTGCFKTTPQITFLPP

SEQ ID NO: 10782 - protein, 241 aa, Homo sapiens [sequence omitted]

SEQ ID NO: 10783 - protein, 530 aa, Homo sapiens
LRLRRVCGSRWAHAVVMSRESDVEAQQSHGSSACSQPHGSVTQSQGSSSQSQGISSSSTSTMPNSSQSSHSSSGTLSSLETVSTQELYSIPEDQEPEDQEPEEPTPAPWARLWALQDGFANLECVNDNYWFGRDKSCEYCFDEPLLKRTDKYRTYSKKHFRIFREVGPKNSYIAYIEDHSGNGTFVNTELVGKGKRRPLNNNSEIALSLSRNKVFVFFDLTVDDQSVYPKALRDEYIMSKTLGSGACGEVKLAFERKTCKKVAIKIISKRKFAIGSAREADPALNVETEIEILKKLNHPCIIKIKNFFDAEDYYIVLELMEGGELFDKVVGNKRLKEATCKLYFYQMLLAVQITDFGHSKILGETSLMRTLCGTPTYLAPEVLVSVGTAGYNRAVDCWSLGVILFICLSGYPPFSEHRTQVSLKDQITSGKYNFIPEVWAEVSEKALDLVKKLLVVDPKARFTTEEALRHPWLQDEDMKRKFQDLLSEENESTALPQVLAQPSTSRKRPREGEAEGAETTKRPAVCAAVL

SEQ ID NO: 10784 - protein, 116 aa, Homo sapiens
LAFERKTCKKVAIKIISKRKFAIGSAREADPALNVETEIEILKKLNHPCIIKIKNFFDAEDYYIVLELMEGGELFDKVVGNKRLKEATCKLYFYQMLLAVQVKEALNSFDSCLSFS

SEQ ID NO: 10785 - protein, 262 aa, Homo sapiens
LRRRLTATSAAPHWSGGRGGGFDWLRVEFVSAGLAPLCWLRLRRVCGSRWAHAVVMSRESDVEAQQSHGSSACSQPHGSVTQSQGSSSQSQGISSSSTSTMPNSSQSSHSSSGTLSSLETVSTQELYSIPEDQEPEDQEPEEPTPAPWARLWALQDGFANLECVNDNYWFGRDKSCEYCFDEPLLKRTDKYRTYSKKHFRIFREVGPKNSYIAYIEDHSGNGTFVNTELVGKGKRRPLNNNSEIALSLSRNKEKILKIYSLS

SEQ ID NO: 10786 - protein, 175 aa, Homo sapiens
LRRVCGSRWAHAVVMSRESDVEAQQSHGSSACSQPHGSVTQSQGSSSQSQGISSSSTSTMPNSSQSSHSSSGTLSSLETVSTQELYSIPEDQEPEDQEPEEPTPAPWARLWALQDGFANLECVNDNYWFGRDKSCEYCFDEPLLKRTDKYRTYSKKHFRIFREENLSCPYRIWFK

SEQ ID NO: 10787 - protein, 146 aa, Homo sapiens
LAEKYRECLSNKEKILKEIEVKKEYLSSLQPRLNSIMQASLPVQEYLFMPFDQAHKQYETARHLPPPLYVLFVQATAYGQACGEYGAWVRTRGYGSSSCGRVNQLEAVPAQEISQSCPKPSGDRSFLPSALPSMAALTSWPKAGLT

SEQ ID NO: 10788 - protein, 215 aa, Homo sapiens
LRFPPRPSEVQPIMKVLAAGVVPLLLVLHWKHGAGSPLPITPVNATCAIRHPCHNNLMNQIRSQLAQLNGSANALFILYYTAQGEPFPNNLDKLCGPNVTDFPPFHANGTEKAKLVELYRIVVYLGTSLGNITRDQKILNPSALSLHSKLNATADILRGLLSNVLCRLCSKYHVGHVDVTYGPDTSGKDVFQKKKLGCQLLGKYKQIIAVLAQAF

SEQ ID NO: 10789 - protein, 94 aa, Homo sapiens [sequence omitted]

SEQ ID NO: 10790 - protein, 343 aa, Homo sapiens
LGLVGGGVGSARAAMELHILEHRVRVLSVARPGLWLYTHPLIKLLFLPRRSRCKFFSLTETPEDYTLMVDEEGFKELPPSEFLQVAEATWLVLNVSSHSGAAVQAAGVTKIARSVIAPLAEHHVSVLMLSTYQTDFILVREQDLSVVIHTLAQEFDIYREVGGEPVPVTRDDSSNGFPRTQHGPSPTVHPIQSPQNRFCVLTLDPETLPAIATTLIDVLFYSHSTPKEAASSSPEPSSITFFAFSLIEGYISIVMDAETQKKFPSDLLLTSSSGELWRMVRIGGQPLGFDECGIVAQIAGPLAAADISAYYISTFNFDHALVPEDGIGSVIEVLQRRQEGLAS

SEQ ID NO: 10791 - protein, 305 aa, Homo sapiens
LGLVGGGVGSARAAMELHILEHRVRVLSVARPGLWLYTHPLIKLLFLPRRSRCKFFSLTETPEDYTLMVDEEGFKELPPSEFLQVAEATWLVLNVSSHSGAAVQAAGVTKIARSVIAPLAEHHVSVLMLSTYQTDFILVREQDLSVVIHTLAQEFDIYREVGGEPVPVTRDDSSNGFPRTQHGPSPTVHPIQSPQNRFCVLTLDPETLPAIATTLIDVLFYSHRFPSDLLLTSSSGELWRMVRIGGQPLGFDECGIVAQIAGPLAAADISAYYISTFNFDHALVPEDGIGSVIEVLQRRQEGLAS

SEQ ID NO: 10792 - protein, 298 aa, Homo sapiens
LAGDPGCKFFSLTETPEDYTLMVDEEGFKELPPSEFLQVAEATWLVLNVSSHSGAAVQAAGVTKIARSVIAPLAEHHVSVLMLSTYQTDFILVREQDLSVVIHTLAQEFDIYREVGGEPVPVTRDDSSNGFPRTQHAGPSPTVHPIQSPQNRFCVLTLDPETLPAIATTLIDVLFYSHSTPKEAASSSPEPSSITFFAFSLIEGYISIVMDAETQKKFPSDLLLTSSSGELWRMVRIGGQPLGFDECGIVAQIAGPLAAADISAYYISTFNFDHALVPEDGIGSVIEVLQRRQEGLAS

SEQ ID NO: 10793 - protein, 295 aa, Homo sapiens
LPGPVRDHRATAEPQPQDHAGGLSGPGELPPSEFLQVAEATWLVLNVSSHSGAAVQAAGVTKIARSVIAPLAEHHVSVLMLSTYQTDFILVREQDLSVVIHTLAQEFDIYREVGGEPVPVTRDDSSNGFPRTQHGPSPTVHPIQSPQNRFCVLTLDPETLPAIATTLIDVLFYSHSTPKEAASSSPEPSSITFFAFSLIEGYISIVMDAETQKKFPSDLLLTSSSGELWRMVRIGGQPLGFDECGIVAQIAGPLAAADISAYYISTFNFDHALVPEDGIGSVIEVLQRRQEGLAS

SEQ ID NO: 10794 - protein, 197 aa, Homo sapiens
LPGPVRDHRATAEPQPQDHAGGLSGPGELPPSEFLQVAEATWLVLNVSSHSGAAVQAAGVTKIARSVIAPLAEHHVSVLMLSTYQTDFILVREQDLSVVIHTLAQEFDIYREVGGEPVPVTRDDSSNGFPRTQHGPSPTVHPIQSPQNRFCVLTLDPETLPAIATTLIDVLFYSHRGGWGCPAHHPSPSPGSPVTSC

SEQ ID NO: 10795 - protein, 189 aa, Homo sapiens
LPPSEFLQVAEATWLVLNVSSHSGAAVQAAGVTKIARSVIAPLAEHHVSVLMLSTYQTDFILVREQDLSVVIHTLAQEFDIYREVGGEPVPVTRDDSSNGFPRTQHGPSPTVHPIQSPQNRFCVLTLDPETLPAIATTLIDVLFYSHRWTLELRLCPHSTVPYTLSHHFPPIYQFCTSCLSSLGVPGSP

SEQ ID NO: 10796 - protein, 252 aa, Homo sapiens
MELHILEHRVRVLSVARPGLWLYTHPLIKLLFLPRRSRCKFFSLTETPEDYTLMVDEEGFKELPPSEFLQVAEATWLVLNVSSHSGAAVQAAGVTKIARSVIAPLAEHHVSVLMLSTYQTDFILVREQDLSVVIHTLAQEFDIYREVGGEPVPVTRDDSSNGFPRTQHAGPSPTVHPIQSPQNRFCVLTLDPETLPAIATTLIDVLFYSHRWTLELRLCPHSTVPYTLSHHFPPIYQFCTSCLSSLGVPGSP

SEQ ID NO: 10797 - protein, 145 aa, Homo sapiens
MGAFLPGHCGELLPGRLPSCQRGWTRGSKVRRPWGCRRGCKFFSLTETPEDYTLMVDEEGFKELPPSEFLQVAEATWLVLNVSSHSGAAVQAAGVTKIARSVIAPLAEHHVSVLMLSTYQTDFILVSFLLVLMQSRVDIGTWEPM

SEQ ID NO: 10798 - protein, 549 aa, Homo sapiens
VGLEPRPPALRRPIGAARGRGVGGSRAAEVAAGAQAAGAAGMAKSNGENGPRAPAAGESLSGTRESLAQGPDAATTDELSSLGSDSEANGFAERRIDKFGFIVGSQGAEGALEEVPLEVLRQRESKWLDMLNNWDKWMAKKHKKIRLRCQKGIPPSLRGRAWQYLSGGKVKLQQNPGKFDELDMSPGDPKWLDVIERDLHRQFPFHEMFVSRGGHGQQDLFRVLKAYTLYRPEEGYCQAQAPIAAVLLMHMPAEQAFWCLVQICEKYLPGYYSEKLEAIQLDGEILFSLLQKVSPVAHKHLSRQKIDPLLYMTEWFMCAFSRTLPWSSVLRVWDMFFCEGVKIIFRVGLVLLKHALGSPEKVKACQGQYETIERLRSLSPKIMQEAFLVQEVVELPVTERQIEREHLIQLRRWQETRGELQCRSPPRLHGAKAILDAEPGPRPALQPSPSIRLPLDAPLPGSKAKPKPPKQAQKEQRKQMKGRGQLEKPPAPNQAMVVAAAGDACPPQHVPPKDSAPKDSAPQDLAPQVSAHHRSQESLTSQESEDTYL

SEQ ID NO: 10799 - protein, 301 aa, Homo sapiens
LPCGLMERLEEVPLEVLRQRESKWLDMLNNWDKWMAKKHKKIRLRCQKGIPPSLRGRAWQYLSGGKVKLQQNPGKFDELDMSPGDPKWLDVIERDLHRQFPFHEMFVSRGGHGQQDLFRVLKAYTLYRPEEGYCQAQAPIAAVLLMHMPAEQAFWCLVQICEKYLPGYYSEKLEAIQLDGEILFSLLQKVSPVAHKHLSRQKIDPLLYMTEWFMCAFSRTLPWSSVLRVWDMFFCEGVKIIFRVGLVLLKHALGSPEKVKACQGQYETIERLRSLSPKIMQEAFLVQEGQLGGTCVTSFYT

SEQ ID NO: 10800 - protein, 112 aa, Homo sapiens
MAKSNGENGPRAPAAGESLSGTRESLAQGPDAATTDELSSLGSDSEANGFAERRIDKFGFIVGSQGAEGALEEVPLEVLRQRESKWLDMLNNWDKWMAKKHKKAGGILPHGC

SEQ ID NO: 10801 - protein, 392 aa, Homo sapiens
LGLYSGWRRGRVCAPSAAAPAASRPQTPSPRLSHDERQSRRSEPQAEGGIGQARSFDLQKSEAMLRKVIQQYLSGGMCGYDLDGCPVWYDIIGPLDAKGLLFSASKQDLLRTKMRECELLLQECAHQTTKLGRKVETITIIYDCEGLGLKHLWKPAVEAYGEFLCMFEENYPETLKRLFVVKAPKLFPVAYNLIKPFLSEDTRKKIMVLGANWKEVLLKHISPDQVPVEYGGTMTDPDGNPKCKSKINYGGDIPRKYYVRDQVKQQYEHSVQISRGSSHQVEYEILFPGCVLRWQFMSDGADVGFGIFLKTKMGERQRAGEMTEVLPNQRYNSHLVPEDGTLTCSDPGIYVLRFDNTYSFIHAKKVNFTVEVLLPDKASEEKMKQLGAGTPK

SEQ ID NO: 10802 - protein, 188 aa, Homo sapiens
LRWLRARSFDLQKSEAMLRKHVEFRKQKDIDNIISWQPPEVIQQYLSGGMCGYDLDGCPVWYDIIGPLDAKGLLFSASKQDLLRTKMRECELLLQECAHQTTKLGRKVETITIIYDCEGLGLKHLWKPAVEAYGEFLCMFEENYPETLKRLFVVKAPKLFPVAYNLIKPFLSEDTRKKIMVLGDQLRG

SEQ ID NO: 10803 - protein, 149 aa, Homo sapiens
LAASRASKQDLLRTKMRECELLLQECAHQTTKLGRKVETITIIYDCEGLGLKHLWKPAVEAYGEFLCMFEENYPETLKRLFVVKAPKLFPVAYNLIKPFLSEDTRKKIMVLGANWKEVLLKHISPDQVPVEYGGTMTDPDGNPKCKSKV

SEQ ID NO: 10804 - protein, 96 aa, Homo sapiens
LTRLPALCSLQLGRKVETITIIYDCEGLGLKHLWKPAVEAYGEFLCMFEENYPETLKRLFVVKAPKLFPVAYNLIKPFLSEDTRKKIMVLGDQLRG

SEQ ID NO: 10805 - protein, 24 aa, Homo sapiens
LSVDFLLDSSLRKLYPTVGKPSSS

SEQ ID NO: 10806 - protein, 85 aa, Homo sapiens
LCPQKPRVMAGTLKLEDKQRLAQEEESEAKRLAIMMMKKREKYLYQKIMFGKRRKIREANKLAEKRKAHDEAVRSEKKAKKARPE

SEQ ID NO: 10807 - protein, 92 aa, Homo sapiens
LNESEEEEEEDDNNEGDGDEEGENEEEEEDAEAGSEKEEEARLAALEEQRMEGKVGGAAMRGLAWEAALLGACSGLEGQEPEDCGGRENLPP

SEQ ID NO: 10808 - protein, 140 aa, Homo sapiens
MQQDPELPSVTRFCLPLCARCYVQPQWVFDSVNARLLLPVAEYFSGVQLPPHLSPFVTEKEGDYVPPEKLKLLALQRGEDPGERDGTGLALTPGPTLAVSLSCQGGKLQGTGSRSRKPFEVTCRIRLRRRDIYLLGSGVI

SEQ ID NO: 10809 - protein, 123 aa, Homo sapiens
MGGLEKKKYERGSATNYITRNKARKKLQLSLADFRRLCILKGIYPHEPKHKKKVNKGSTAARTFYLIKDIRFLLHEPIVNKFREYKVFVRKLRKAYGKSEWNTVERLKDNKPNYKLDHIIKER

SEQ ID NO: 10810 - protein, 944 aa, Homo sapiens
LREFSELVTGATGTGDLTRKEPTELGASEMADEALAGLDEGALRKLLEVTADLAERRRIRSAIRELQRQELEREEEALASKRFRAERQDNKENWLHSQQREAEQRAALARLAGQLESMNDVEELTALLRSAGEYEERKLIRAAIRRVRAQEIEAATLAGRLYSGRPNSGSREDSKGLAAHRLEQCEVPEREEQEQQAEVSKPTPTPEGTSQDVTTVTLLLRAPPGSTSSSPASPSSSPTPASPEPPLEPAEAQCLTAEVPGSPEPPPSPPKTTSPEPQESPTLPSTEGQVVNKLLSGPKETPAAQSPTRGPSDTKRADVAGPRPCQRSLSVLSPRQPAQNRESTPLASGPSSFQRAGSVRDRVHKFTSDSPMAARLQDGTPQAALSPLTPARLLGPSLTSTTPASSSSGSSSRGPSDTSSRFSKEQRGVAQPLAQLRSCPQEEGPRGRGLAARPLENRAGGPVARSEEPGAPLPVAVGTAEPGGSMKTTFTIEIKDGRGQASTGRVLLPTGNQRAELTLGLRAPPTLLSTSSGGKSTITRVNSPGTLARLGSVTHVTSFSHAPPSSRGGCSIKMEAEPAEPLAAAVEAANGAEQTRVNKAPEGRSPLSAEELMTIEDEGVLDKMLDQSTDFEERKLIRAALRELRQRKRDQRDKERERRLQEARGRPGEGRGNTATETTTRHSQRAADGSAVSTVTKTERLVHSNDGTRTARTTTVESSFVRRSENGSGSTMMQTKTFSSSSSSKKMGSIFDREDQASPRAGSLAALEKRQAEKKKELMKAQSLPKTSASQARKAMIEKLEKEGAAGSPGGPRAAVQRSTSFGVPNANSIKQMLLDWCRAKTRGYEHVDIQNFSSSWSDGMAFCALVHNFFPEAFDYGQLSPQNRRQNFEVAFSSAETHADCPQLLDTEDMVRLREPDWKCVYTYIQEFYRCLVQKGLVKTKKS

SEQ ID NO: 10811 - protein, 969 aa, Homo sapiens
LREFSELVTGATGTGDLTRKEPTELGASEMADEALAGLDEGALRKLLEVTADLAERRRIRSAIRELQRQELEREEEALASKRFRAERQDNKENWLHSQQREAEQRAALARLAGQLESMNDVEELTALLRSAGEYEERKLIRAAIRRVRAQEIEAATLAGRLYSGRPNSGSREDSKGLAAHRLEQCEVPEREEQEQQAEVSKPTPTPEGTSQDVTTVTLLLRAPPGSTSSSPASPSSSPTPASPEPPLEPAEAQCLTAEVPGSPEPPPSPPKTTSPEPQESPTLPSTEGQVVNKLLSGPKETPAAQSPTRGPSDTKRADVAGPRPCQRSLSVLSPRQPAQNRESTPLASGPSSFQRAGSVRDRVHKFTSDSPMAARLQDGTPQAALSPLTPARLLGPSLTSTTPASSSSGSSSRGPSDTSSRFSKEQRGVAQPLAQLRSCPQEEGPRGRGLAARPLENRAGGPVARSEEPGAPLPVAVGTAEPGGSMKTTFTIEIKDGRGQASTGRVLLPTGNQRAELTLGLRAPPTLLSTSSGGKSTITRVNSPGTLARLGSVTHVTSFSHAPPSSRGGCSIKMEAEPAEPLAAAVEAANGAEQTRVNKAPEGRSPLSAEELMTIEDEGVLDKMLDQSTDFEERKLIRAALRELRQRKRDQRDKERERRLQEARGRPGEGRGNTATETTTRHSQRAADGSAVSTVTKTERLVHSNDGTRTARTTTVESSFVRRSENGSGSTMMQTKTFSSSSSSKKMGSIFDREDQASPRAGSLAALEKRQAEKKKELMKAQSLPKTSASQARKAMIEKLEKEGAAGSPGGPRAAVQRSTSFGVPNANSIKQMLLDWCRAKTRGYEHVDIQNFSSSWSDGMAFCALVHNFFPEAFDYGQLSPQNRRQNFEVAFSSAETHADCPQLLDTEDMVRLREPDWKMLVDCVPLVEVDDMMIMGKKPDPKCVFTYVQSLYNHLRRHELRLRGKNV

SEQ ID NO: 10812 - protein, 946 aa, Homo sapiens
LREFSELVTGATGTGDLTRKEPTELGASEMADEALAGLDEGALRKLLEVTADLAERRRIRSAIRELQRQELEREEEALASKRFRAERQDNKENWLHSQQREAEQRAALARLAGQLESMNDVEELTALLRSAGEYEERKLIRAAIRRVRAQEIEAATLAGRLYSGRPNSGSREDSKGLAAHRLEQCEVPEREEQEQQAEVSKPTPTPEGTSQDVTTVTLLLRAPPGSTSSSPASPSSSPTPASPEPPLEPAEAQCLTAEVPGSPEPPPSPPKTTSPEPQESPTLPSTEGQVVNKLLSGPKETPAAQSPTRGPSDTKRADVAGPRPCQRSLSVLSPRQPAQNRESTPLASGPSSFQRAGSVRDRVHKFTSDSPMAARLQDGTPQAALSPLTPARLLGPSLTSTTPASSSSGSSSRGPSDTSSRFSKEQRGVAQPLAQLRSCPQEEGPRGRGLAARPLENRAGGPVARSEEPGAPLPVAVGTAEPGGSMKTTFTIEIKDGRGQASTGRVLLPTGNQRAELTLGLRAPPTLLSTSSGGKSTITRVNSPGTLARLGSVTHVTSFSHAPPSSRGGCSIKMEAEPAEPLAAAVEAANGAEQTRVNKAPEGRSPLSAEELMTIEDEGVLDKMLDQSTDFEERKLIRAALRELRQRKRDQRDKERERRLQEARGRPGEGRGNTATETTTRHSQRAADGSAVSTVTKTERLVHSNDGTRTARTTTVESSFVRRSENGSGSTMMQTKTFSSSSSSKKMGSIFDREDQASPRAGSLAALEKRQAEKKKELMKAQSLPKTSASQARKAMIEKLEKEGAAGSPGGPRAAVQRSTSFGVPNANSIKQMLLDWCRAKTRGYEHVDIQNFSSSWSDGMAFCALVHNFFPEAFDYGQLSPQNRRQNFEVAFSSAEMLVDCVPLVEVDDMMIMGKKPDPKCVFTYVQSLYNHLRRHELRLRGKNV

SEQ ID NO: 10813 - protein, 995 aa, Homo sapiens
LADLGTRAVASGPGSRTFLRIGPGMGGMGTPGDLHAACPSTTRRDALCLGPEFEFDLRHSAGCPGDLGFFPLDPDTEAGGSGCLPTWLPLRRLARGRLEVTADLAERRRIRSAIRELQRQELEREEEALASKRFRAERQDNKENWLHSQQREAEQRAALARLAGQLESMNDVEELTALLRSAGEYEERKLIRAAIRRVRAQEIEAATLAGRLYSGRPNSGSREDSKGLAAHRLEQCEVPEREEQEQQAEVSKPTPTPEGTSQDVTTVTLLLRAPPGSTSSSPASPSSSPTPASPEPPLEPAEAQCLTAEVPGSPEPPPSPPKTTSPEPQESPTLPSTEGQVVNKLLSGPKETPAAQSPTRGPSDTKRADVAGPRPCQRSLSVLSPRQPAQNRESTPLASGPSSFQRAGSVRDRVHKFTSDSPMAARLQDGTPQAALSPLTPARLLGPSLTSTTPASSSSGSSSRGPSDTSSRFSKEQRGVAQPLAQLRSCPQEEGPRGRGLAARPLENRAGGPVARSEEPGAPLPVAVGTAEPGGSMKTTFTIEIKDGRGQASTGRVLLPTGNQRAELTLGLRAPPTLLSTSSGGKSTITRVNSPGTLARLGSVTHVTSFSHAPPSSRGGCSIKMEAEPAEPLAAAVEAANGAEQTRVNKAPEGRSPLSAEELMTIEDEGVLDKMLDQSTDFEERKLIRAALRELRQRKRDQRDKERERRLQEARGRPGEGRGNTATETTTRHSQRAADGSAVSTVTKTERLVHSNDGTRTARTTTVESSFVRRSENGSGSTMMQTKTFSSSSSSKKMGSIFDREDQASPRAGSLAALEKRQAEKKKELMKAQSLPKTSASQARKAMIEKLEKEGAAGSPGGPRAAVQRSTSFGVPNANSIKQMLLDWCRAKTRGYEHVDIQNFSSSWSDGMAFCALVHNFFPEAFDYGQLSPQNRRQNFEVAFSSAETHADCPQLLDTEDMVRLREPDWKCVYTYIQEFYRCLVQKGLVKTKKS

SEQ ID NO: 10814 - protein, 531 aa, Homo sapiens
LHSQQREAEQRAALARLAGQLESMNDVEELTALLRSAGEYEERKLIRAAIRRVRAQEIEAATLAGRLYSGRPNSGSREDSKGLAAHRLEQCEVPEREEQEQQAEVSKPTPTPEGTSQDVTTVTLLLRAPPGSTSSSPASPSSSPTPASPEPPLEPAEAQCLTAEVPGSPEPPPSPPKTTSPEPQESPTLPSTEGQVVNKLLSGPKETPAAQSPTRGPSDTKRADVAGPRPCQRSLSVLSPRQPAQNRESTPLASGPSSFQRAGSVRDRVHKFTSDSPMAARLQDGTPQAALSPLTPARLLGPSLTSTTPASSSSGSSSRGPSDTSSRFSKEQRGVAQPLAQLRSCPQEEGPRGRGLAARPLENRAGGPVARSEEPGAPLPVAVGTAEPGGSMKTTFTIEIKDGRGQASTGRVLLPTGNQRAELTLGLRAPPTLLSTSSGGKSTITRVNSPGTLARLGSVTHVTSFSHAPPSSRGGCSIKMEAEPAEPLAAAVEAANGAEQTRVNKAPEGRSPLSAEELMTIEDEGVLDKMV

SEQ ID NO: 10815 - protein, 759 aa, Homo sapiens
LARLAGQLESMNDVEELTALLRSAGEYEERKLIRAAIRRVRAQEIEAATLAGRLYSGRPNSGSREDSKGLAAHRLEQCEVPEREEQEQQAEVSKPTPTPEGTSQDVTTVTLLLRAPPGSTSSSPASPSSSPTPASPEPPLEPAEAQCLTAEVPGSPEPPPSPPKTTSPEPQESPTLPSTEGQVVNKLLSGPKETPAAQSPTRGPSDTKRADVAGPRPCQRSLSVLSPRQPAQNRESTPLASGPSSFQRAGSVRDRVHKFTSDSPMAARLQDGTPQAALSPLTPARLLGPSLTSTTPASSSSGSSSRGPSDTSSRFSKEQRGVAQPLAQLRSCPQEEGPRGRGLAARPLENRAGGPVARSEEPGAPLPVAVGTAEPGGSMKTTFTIEIKDGRGQASTGRVLLPTGNQRAELTLGLRAPPTLLSTSSGGKSTITRVNSPGTLARLGSVTHVTSFSHAPPSSRGGCSIKMEAEPAEPLAAAVEAANGAEQTRVNKAPEGRSPLSAEELMTIEDEGVLDKMLDQSTDFEERKLIRAALRELRQRKRDQRDKERERRLQEARGRPGEGRGNTATETTTRHSQRAADGSAVSTVTKTERLVHSNDGTRTARTTTVESSFVRRSESKATWCRPVPACLSAHLLRLFLELSLRVFNCAVTFSSLPAAITTPPYSLPSHLLMSSPGPHLVPLPLFCRWQWQHHDANQDLLLFLLIQEDGQHLRPRGPGQPTGRQPGGARETAGREEERADEGAESAQDLSLPGAQGHD

SEQ ID NO: 10816 - protein, 466 aa, Homo sapiens
LQRLRHSARDSSPCHCPTITPHRVPTSTMPGVPGPGPELAAALEEQLGRALEELRAVAEAGRVAVTQAAEVAVATVEPVARAAEELRAERAALSRRLDALSRQVEVLSLRLGVPLVSGLEPELEPSELLLAAADPEALFQAAEDAGTPVAHPPAFSTRRRSSTGTTRSTSLMEAEPAEPLAAAVEAANGAEQTRVNKAPEGRSPLSAEELMTIEDEGVLDKMLDQSTDFEERKLIRAALRELRQRKRDGSGSTMMQTKTFSSSSSSKKMGSIFDREDQASPRAGSLAALEKRQAEKKKELMKAQSLPKTSASQARKAMIEKLEKEGAAGSPGGPRAAVQRSTSFGVPNANSIKQMLLDWCRAKTRGYEHVDIQNFSSSWSDGMAFCALVHNFFPEAFDYGQLSPQNRRQNFEVAFSSAETHADCPQLLDTEDMVRLREPDWKCVYTYIQEFYRCLVQKGLVKTKKS

SEQ ID NO: 10817 - protein, 278 aa, Homo sapiens
LSSYGCPLTPAAPREALVTCVIHVSNKPPSTPSCVPHAPVHLCCVGVGGPFAHAWGIPCPDQRDKERERRLQEARGRPGEGRGNTATETTTRHSQRAADGSAVSTVTKTERLVHSNDGTRTARTTTVESSFVRRSENGSGSTMMQTKTFSSSSSSKKMGSIFDREDQASPRAGSLAALEKRQAEKKKELMKAQSLPKTSASQARKAMIEKLEKEGAAGSPGGPRAAVQRSTSFGVPNANSIKQMLLDWCRAKTRGYEVSPGRPGGLEASPDPSSTPPS

SEQ ID NO: 10818 - protein, 53 aa, Homo sapiens
LRIICGRVPMSLLLPPLALLLLLAALVAPATAATAYRPDWNRLSGLTRARVEG

SEQ ID NO: 10819 - protein, 63 aa, Homo sapiens
LRIICGRVPMSLLLPPLALLLLLAALVAPATAATAYRPDWNRLSGLTRARVEGPAFPSDLGNC

SEQ ID NO: 10820 - protein, 151 aa, Homo sapiens
LRIICGRVPMSLLLPPLALLLLLAALVAPATAATAYRPDWNRLSGLTRARVEVSTPASSPGTIVPQPCGPMGAPSVPAPRPPRTASLPAFPLAPGPSLLFPSPRWPQHPPWKPETPTLGPGTPNPSPAPPTRSDSGHPDTLTQSPNSSRGL

SEQ ID NO: 10821 - protein, 204 aa, Homo sapiens
LQGWDWEAEPPPRGPRLNTGRSITCKTKEARMLLAWVQAFLVSNMLLAEAYGSGGCFWDNGHLYREDQTSPAPGLRCLNWLDAQSGLASAPVSGAGNHSYCRNPDEDPRGPWCYVSGEAGVPEKRPCEDLRCPETTSQALPAFTTEIQEASEGPGADEVQVFAPANALPARSEAAAVQPVIGISQRVRMNSKEKKDLGTLGGRI

SEQ ID NO: 10822 - protein, 107 aa, Homo sapiens
LRGAERQKLMRADLHHQHSVLHRALQAWVTYQGRVRSILREVAARESQHNRQLLRGALRRWKENTMARVDEAKKTFQASTHYRRTICSKVRYKEASWSPRRVGTVFW

SEQ ID NO: 10823 - protein, 96 aa, Homo sapiens
LGTTTASTPPPTGLCPTGATSQDLHTNSPRHSKGSYNDFSFVTHTNREGVPMRKGEHLGEFNLGSTIVLIFEAPKDFNFQLKTGQKIRFGEALGSL

SEQ ID NO: 10824 - protein, 290 aa, Homo sapiens
LLARGKGRKEENKGSDRVSLAPPSLRRPMMCQSEARQGPELRAAKWLHFPQLALRRRLGQLSCMSRPALKLRSWPLTVLYYLLPFGALRPLSRVGWRPVSRVALYKSVPTRLLSRAWGRLNQVELPHWLRRPVYSLYIWTFGVNMKEAAVEDLHHYRNLSEFFRRKLKPQARPVCGLHSVISPSDGRILNFGQVKNCEVEQVKGVTYSLESFLGPRMCTEDLPFPPAASCDSFKNQLVTREGNELYHCVIYLAPGDYHCFHSPTDWTVSHRRHFPGPAHKQPKAQQGLLQ

SEQ ID NO: 10825 - protein, 47 aa, Homo sapiens
LLQRARLAEQAERYDDMASAMKALLRWMSRAQPHPSKIPWVTHHLHF

SEQ ID NO: 10826 - protein, 72 aa, Homo sapiens
LSPLVCEVRKTRGAVMSGFDDPGIFYSDSFGGDAQADEGQARKSQLQRRFKEFLRQYRVGTDRTGFTFKYSS

SEQ ID NO: 10827 - protein, 25 aa, Homo sapiens
MSGFDDPGIFYSDSFGGDAQPFQHS

SEQ ID NO: 10828 - protein, 135 aa, Homo sapiens
LPLARRQDSQAWRLFKGHPETLEKFDKFKHLKSEDEMKASEDLKKHGATVLTALGGILKKKGHHEAEIKPLAQSHATKHKIPVKYLEFISECIIQVLQSKHPGDFGADAQGAMNKALELFRKDMASNYKELGFQG

SEQ ID NO: 10829 - protein, 168 aa, Homo sapiens
LGLVFPRCVTLDCAMGLSDGEWQLVLNVWGKVEADIPGHGQEVLIRLFKGHPETLEKFDKFKHLKSEDEMKASEDLKKHGATVLTALGGILKKKGHHEAEIKPLAQSHATKHKIPVKYLEFISECIIQVLQSKHPGDFGADAQGAMNKALELFRKDMASNYKELGFQG

SEQ ID NO: 10830 - protein, 42 aa, Homo sapiens
LLFLSSSDCAMGLSDGEWQLVLNVWGKVEADIPGHGQEVLIR

SEQ ID NO: 10831 - protein, 32 aa, Homo sapiens
LAWSFARYCRAGERVRGKDSKLDQFLAMKQRL

SEQ ID NO: 10832 - protein, 22 aa, Homo sapiens
MFLRTWHTMALEVQIISSTSWR

SEQ ID NO: 10833 - protein, 70 aa, Homo sapiens
LDTAEETAAPLPTCPRFDVLPRMKSFPGDGPLPCLSSIHSVLSSWKCISVSQWLLDDGGGGGGCSVMDPL

SEQ ID NO: 10834 - protein, 57 aa, Homo sapiens [sequence omitted]

SEQ ID NO: 10835 - protein, 7 aa, Homo sapiens
MKPGRDS

SEQ ID NO: 10836 - protein, 69 aa, Homo sapiens
LGSRVYLRAWRTCLVIMQMHGWRWDPHSSEQLDLAHTLSREASLKRNALLKRPPNTSGRESAQCICKSC

SEQ ID NO: 10837 - protein, 45 aa, Homo sapiens
LGSRVYLRAWRTCLVIMQMHGWRWDPHSSEQLDLAHTLSREASLG

SEQ ID NO: 10838 - protein, 62 aa, Homo sapiens
LGSRVYLRAWRTCLVIMQMHGWRWDPHSSEQLDLAHTLSREASLDKRTLPWCESEGRGSWSK

SEQ ID NO: 10839 - protein, 34 aa, Homo sapiens
MQMHGWRWDPHSSEQLDLAHTLSREASLRGGMYL

SEQ ID NO: 10840 - protein, 73 aa, Homo sapiens
MQMHGWRWDPHSSEQLDLAHTLSREASLLGYPSHRGFSEADISPIRRQVYFSLALAHTSPSTLRWWHHNPNHY

SEQ ID NO: 10841 - protein, 8 aa, Homo sapiens
LLTLLHQL

SEQ ID NO: 10842 - protein, 64 aa, Homo sapiens
LVIMQMHGWRWDPHSSEQLDLAHTLSREASLENNTALLGVHASFQMSVAALPSFSTLTNRNINK

SEQ ID NO: 10843 - protein, 29 aa, Homo sapiens
MQMHGWRWDPHSSEQLDLAHTLSREASLR

SEQ ID NO: 10844 - protein, 65 aa, Homo sapiens
LWKREHNCGSVSLALCVCRSRNKPGRFWIINIILSCFNVRVRRSGVDLPPALQEVCDTGEVTSPL

SEQ ID NO: 10845 - protein, 31 aa, Homo sapiens
MQMHGWRWDPHSSEQLDLAHTLSREASLASG

SEQ ID NO: 10846 - protein, 240 aa, Homo sapiens
VSRDRATAPQPGNRARLWLKKKKKKKKNWRGTLFRLPVPGSDVMYVPPRGSDDRRALDRQGGLGCASLRSHCREMAQRLLLRRFLASVISRKPSQGQWPPLTSRALQTPQCSPGGLTVTPNPARTIYTTRISLTTFNIQDGPDFQDRVVNSETPVVVDFHAQWCGPCKILGPRLEKMVAKQHGKVVMAKVDIDDHTDLAIEYEVSAVPTVLAMKNGDVVDKFVGIKDEDQLEAFLKKLIG

SEQ ID NO: 10847 - protein, 288 aa, Homo sapiens
VPFLPLAVPVRAVHRLLEHRHHSVTWPATELPITQLTSSIVRRVNEASGLYQMFGVLADVILLKENSTAFEYLEEFPIQMLAQLETLTGRKAKHGLFVINMEYGRNFSGPDKDVFFDDRSVGHTEDAWQSNFLHPVIYYYRYLPTEQEVRFRPAHWPLPRPTAIHHIVEDFLTDWTAPIGHILPLRRFLENCLDTDLRSFYAESCFLFALTRQKLPPFCQQGYLRMQGLVSTESLWQHRVESRLLRDYAPTGRRLEDSSQQLGDQEPLGSPLAPGPLAQSVDSNKEEL

SEQ ID NO: 10848 - protein, 695 aa, Homo sapiens
VRGLTPLICCRMGLSAAAPLWGPPGLLLAIALHPALSVPPRRDYCVLGAGPAGLQMAYFLQRAGRDYAVFERAPRPGSFFTRYPRHRKLISINKRYTGKANAEFNLRHDWNSLLSHDPRLLFRHYSRAYFPDARDMVRYLGDFADTLGLRVQYNTTIAHVTLDKDRQAWNGHYFILTDQKGQVHQCSVLFVATGLSVPNQVDFPGSEYAEGYESVSVDPEDFVGQNVLILGRGNSAFETAENILGVTNFIHMLSRSRVRLSWATHYVGDLRAINNGLLDTYQLKSLDGLLESDLTDLAILKDSKGKFHVTPKFFLEEANTNQSADSITLPQDDNDNFAMRVPYDRVIRCLGWNFDFSIFNKSLRLNSGNAFGKKYPLIRASYESKGSRGLFILGTASHSVDYRKSAGGFIHGFRYTVRAVHRLLEHRHHSVTWPATELPITQLTSSIVRRVNEASGLYQMFGVLADVILLKENSTAFEYLEEFPIQMLAQLETLTGRKAKHGLFVINMEYGRNFSGPDKDVFFDDRSVGHTEDAWQSNFLHPVIYYYRYLPTEQEVRFRPAHWPLPRPTAIHHIVEDFLTDWTAPIGHILPLRRFLENCLDTDLRSFYAESCFLFALTRQKLPPFCQQGYLRMQGLVSTESLWQHRVESRLLRDYAPTGRRLEDSSQQLGDQEPLGSPLAPGPLAQSVDSNKEEL

SEQ ID NO: 10849 - protein, 354 aa, Homo sapiens
LGPSPTMAVAQQLRAESDFEQLPDDVAISANIADIEEKRGFTSHFVFVIEVKTKGGSKYLIYRRYRQFHALQSKLEERFGPDSKSSALACTLPTLPAKVYVGVKQEIAEMRIPALNAYMKSLLSLPVWVLMDEDVRIFFYQSPYDSEQVPQALRRLRPRTRKVKSVSPQGNSVDRMAAPRAEALFDFTGNSKLELNFKAGDVIFLLSRINKDWLEGTVRGATGIFPLSFVKILKDFPEEDDPTNWLRCYYYEDTISTIKSVAWEGGACPAFLPSLRPLPLTSPSHGSLSHSKAPSGSQMSHNAVTSHQRPGWPGQPHSPFPHPTPHFQPDASLLQPVTPLGTSRWRKISAALPY

SEQ ID NO: 10850 - protein, 345 aa, Homo sapiens
LGPSPTMAVAQQLRAESDFEQLPDDVAISANIADIEEKRGFTSHFVFVIEVKTKGGSKYLIYRRYRQFHALQSKLEERFGPDSKSSALACTLPTLPAKVYVGVKQEIAEMRIPALNAYMKSLLSLPVWVLMDEDVRIFFYQSPYDSEQVPQALRRLRPRTRKVKSVSPQGNSVDRMAAPRAEALFDFTGNSKLELNFKAGDVIFLLSRINKDWLEGTVRGATGIFPLSFVKILKDFPEEDDPTNWLRCYYYEDTISTIKDIAVEEDLSSTPLLKDLLELTRREFQREDIALNYRDAEGDLVRLLSDEDVALMVRQARGLPSQKRLFPWKLHITQKDNYRVYNTMP

SEQ ID NO: 10851 - protein, 207 aa, Homo sapiens
LGSIPSSSTKKWGGLREVAYSPQASVSTSVKWETKALFDFTGNSKLELNFKAGDVIFLLSRINKDWLEGTVRGATGIFPLSFVKILKDFPEEDDPTNWLRCYYYEDTISTIKSVAWEGGACPAFLPSLRPLPLTSPSHGSLSHSKAPSGSQMSHNAVTSHQRPGWPGQPHSPFPHPTPHFQPDASLLQPVTPLGTSRWRKISAALPY

SEQ ID NO: 10852 - protein, 315 aa, Homo sapiens
LSLFPGSHPCQVTRRAEAMVHQVLYRALVSTKWLAESIRTGKLGPGLRVLDASWYSPGTREARKEYLERHVPGASFFDIEECRDTASPYEMMLPSEAGFAEYVGRLGISNHTHVVVYDGEHLGSFYAPRVWWMFRVFGHRTVSVLNGGFRNWLKEGHPVTSEPSRPEPAVFKATLDRSLLKTYEQVLENLESKRFQLVDSRSQGRFLGTEPEPDAVGLDSGHIRGAVNMPFMDFLTEDGFEKGPEELRALFQTKKVDLSQPLIATCRKGVTACHVALAAYLCGKPDVAVYDGSWSEWFRRAPPESRVSQGKSEKA

SEQ ID NO: 10853 - protein, 331 aa, Homo sapiens
LGSCGRGFEPANFSSRPGRAPARRPGRVTRRAEAMVHQVLYRALVSTKWLAESIRTGKLGPGLRVLDASWYSPGTREARKEYLERHVPGASFFDIEECRDTASPYEMMLPSEAGFAEYVGRLGISNHTHVVVYDGEHLGSFYAPRVWWMFRVFGHRTVSVLNGGFRNWLKEGHPVTSEPSRPEPAVFKATLDRSLLKTYEQVLENLESKRFQLVDSRSQGRFLGTEPEPDAVGLDSGHIRGAVNMPFMDFLTEDGFEKGPEELRALFQTKKVDLSQPLIATCRKGVTACHVALAAYLCGKPDVAVYDGSWSEWFRRAPPESRVSQGKSEKA

SEQ ID NO: 10854 - protein, 304 aa, Homo sapiens
VEARSPSVAAMASPQLCRALVSAQWVAEALRAPRAGQPLQLLDASWYLPKLGRDARREFEERHIPGAAFFDIDQCSDRTSPYDHMLPGAEHFAEYAGRLGVGAATHVVIYDASDQGLYSAPRVWWMFRAFGHHAVSLLDGGLRHWLRQNLPLSSGKSQPAPAEFRAQLDPAFIKTYEDIKENLESRRFQVVDSRATGRFRGTEPEPRDGNAGEGGRRSSGARPLRPEQCPGLDLSFIFLIYLAFISFPFFFPFLPFPFPPFPLFPTLAFFSQGLALPPRLECSGTIMAHCSLNLLGSGDPPRSA

SEQ ID NO: 10855 - protein, 307 aa, Homo sapiens
VEARSPSVAAMASPQLCRALVSAQWVAEALRAPRAGQPLQLLDASWYLPKLGRDARREFEERHIPGAAFFDIDQCSDRTSPYDHMLPGAEHFAEYAGRLGVGAATHVVIYDASDQGLYSAPRVWWMFRAFGHHAVSLLDGGLRHWLRQNLPLSSGKSQPAPAEFRAQLDPAFIKTYEDIKENLESRRFQVVDSRATGRFRGTEPEPRDGIEPGHIPGTVNIPFTDFLSQEGLEKSPEEIRHLFQEKKVDLSKPLVATCGSGVTACHVALGAYLCGKPDVPIYDGSWVEWYMRARPEDVISEGRGKTH

SEQ ID NO: 10856 - protein, 130 aa, Homo sapiens [sequence omitted]

SEQ ID NO: 10857 - protein, 82 aa, Homo sapiens
VLSKTQIWPRSPSVQNLAQVPLPSAPLLSLVLVPPVSCGDIPFCNPPYRPPEPLRAPSHPLCCTCYSLGLLCAPPHLGDKLP

SEQ ID NO: 10858 - protein, 66 aa, Homo sapiens
LLRVLSPLLRTLSVQLQLDFSTRMAPTQSCTLGPSISKPPLLLPGPAARARNCVCCRGAVTPQLPR

SEQ ID NO: 10859 - protein, 153 aa, Homo sapiens
MVATCPRTSCGLHGSAPRGEAGKGHFKKKKWPERRRVLIGKGEVSSVAENLFDSIKSEPFSIPEDDGNDLTHTFFNPDREGWLLKLGGRVKTWKRRWFILTDNCLYYFEFTTDKEPRGIIPLENLSVQKVDDPKKPVGVQVAGSRGWSHWEIS

SEQ ID NO: 10860 - protein, 117 aa, Homo sapiens
LGGTVEALGSRCPAAGKGSRGRSNPGRLSRSTLPPPPTTPRSTPETAEFLGEDLLQVEQRLEPAKRAAHNIHKRLQACLQGQSGADMDKRVKKLPLMALSTTMAESFKELDPDSSMG

SEQ ID NO: 10861 - protein, 60 aa, Homo sapiens
LEPAKRAAHNIHKRLQACLQGQSGADMDKRVKKLPLMALSTTMAESFKELDPDSSMGPWR

SEQ ID NO: 10862 - protein, 148 aa, Homo sapiens
LVRLPGNILLDSIMACGLVASNLNLKPGECLRVRGEVAPDAKSFVLNLGKDSNNLCLHFNPRFNAHGDANTIVCNSKDGGAWGTEQREAVFPFQPGSVAEVCITFDQANLTVKLPDGYEFKFPNRLNLEAINYMAADGDFKIKCVAFD

SEQ ID NO: 10863 - protein, 171 aa, Homo sapiens
LVRGCRAGTTPLPPPATPGHFEQWRPCPLTRLGRGLSVQGLVASNLNLKPGECLRVRGEVAPDAKSFVLNLGKDSNNLCLHFNPRFNAHGDANTIVCNSKDGGAWGTEQREAVFPFQPGSVAEVCITFDQANLTVKLPDGYEFKFPNRLNLEAINYMAADGDFKIKCVAFD

SEQ ID NO: 10864 - protein, 32 aa, Homo sapiens
LNLKPGECLRVRGEVAPDAKSEFFQQGAFMGY

SEQ ID NO: 10865 - protein, 130 aa, Homo sapiens
LSDRLVGQWGWSWPRWPHAHPLPPSFVLNLGKDSNNLCLHFNPRFNAHGDANTIVCNSKDGGAWGTEQREAVFPFQPGSVAEVCITFDQANLTVKLPDGYEFKFPNRLNLEAINYMAADGDFKIKCVAFD

SEQ ID NO: 10866 - protein, 465 aa, Homo sapiens
LRPRCARLPGRQARSGEVGAMWPGNAWRAALFWVPRGRRAQSALAQLRGILEGELEGIRGAGTWKSERVITSRQGPHIRVDGVSGGPGTVIFPGLPLPHLSCCIHLLSFTSGILNFCANNYLGLSSHPEVIQAGLQALEEFGAGLSSVRFICGTQSIHKNLEAKIARFHQREDAILYPSCYDANAGLFEALLTPEDAVLSDELNHASIIDGIRLCKAHKYRYRHLDMADLEAKLQEAQKHRLRLVATDGAFSMDGDIAPLQEICCLASRYGALVFMDECHATGFLGPTGRGTDELLGVMDQVTIINSTLGKALGGASGGYTTGPGPLVSLLRQRARPYLFSNSLPPAVVGCASKALDLLMGSNTIVQSMAAKTQRFRSKMEAAGFTISGASHPICPVMLGDARLASRMADDMLKRGIFVIGFSYPVVPKGKARIRVQISAVHSEEDIDRCVEAFVEVGRLHGALP

SEQ ID NO: 10867 - protein, 114 aa, Homo sapiens
LHLAMSKDNVEMIKALIVFGAEVDTPNDFGETPTFLASKIGRLVTRKAILTLLRTVGAEYCFPPIHGVPAEQGSAAPHHPFSLERAQPPPISLNNLGSHPSQAGWWAWGAASDG

SEQ ID NO: 10868 - protein, 183 aa, Homo sapiens
VRNAGPGGRSAAQRAPSANMSVDPLSSKALKIKRELSENTPHLSDEALMGLSVRELNRHLRGLSAEEVTRLKQRRRTLKNRGYAASCRVKRVCQKEELQKQKSELEREVDKLARENAAMRLELDALRGKCEALQGFARSVAAARGPATLVAPASVITIVKSTPGSGSGPAHGPDPAHGPASCS

SEQ ID NO: 10869 - protein, 180 aa, Homo sapiens
VDLVTKSAAQRAPSANMSVDPLSSKALKIKRELSENTPHLSDEALMGLSVRELNRHLRGLSAEEVTRLKQRRRTLKNRGYAASCRVKRVCQKEELQKQKSELEREVDKLARENAAMRLELDALRGKCEALQGFARSVAAARGPATLVAPASVITIVKSTPGSGSGPAHGPDPAHGPASCS

SEQ ID NO: 10870 - protein, 182 aa, Homo sapiens
MWREEGGRSAAQRAPSANMSVDPLSSKALKIKRELSENTPHLSDEALMGLSVRELNRHLRGLSAEEVTRLKQRRRTLKNRGYAASCRVKRVCQKEELQKQKSELEREVDKLARENAAMRLELDALRGKCEALQGFARSVAAARGPATLVAPASVITIVKSTPGSGSGPAHGPDPAHGPASCS

SEQ ID NO: 10871 - protein, 157 aa, Homo sapiens
MRLERLELRQGAPGQGGGGGLSHEDTLALLEGLVSRREAALKEDFRRETAARIQEELSALRAEHQQDSEDLFKKIVRASQESEARIQQLKSEWQRYWAPPAGLGLLLPSPTHSPGRTGEQSRRAESSDHLAKQMVGGGVETQLRTPAQGLSLRCHGG

SEQ ID NO: 10872 - protein, 28 aa, Homo sapiens
LFWRMGPRPFSSCETQTQWCHLLQQDRG

SEQ ID NO: 10873 - protein, 19 aa, Homo sapiens
LFWRMGPRPFSSCETQTQW

SEQ ID NO: 10874 - protein, 27 aa, Homo sapiens
LQGRCKQEVKPQSFKKRAGQGQAYLRG

SEQ ID NO: 10875 - protein, 253 aa, Homo sapiens
LNMNPQIRNPMERMYRDTFYDNFENEPILYGRSYTWLCYEVKIKRGRSNLLWDTGVFRGQVYFKPQYHAEMCFLSWFCGNQLPAYKCFQITWFVSWTPCPDCVAKLAEFLSEHPNVTLTISAARLYYYWERDYRRALCRLSQAGARVTIMDYEEFAYCWENFVYNEGQQFMPWYKFDENYAFLHRTLKEILRLRIFSVAFTAAMRSCASWTWFLLCSWTRPRSTGSLGSSPGAPASPGAVPGKCVRSFRRTHT

SEQ ID NO: 10876 - protein, 359 aa, Homo sapiens
LNMNPQIRNPMERMYRDTFYDNFENEPILYGRSYTWLCYEVKIKRGRSNLLWDTGVFRGQVYFKPQYHAEMCFLSWFCGNQLPAYKCFQITWFVSWTPCPDCVAKLAEFLSEHPNVTLTISAARLYYYWERDYRRALCRLSQAGARVTIMDYEEFAYCWENFVYNEGQQFMPWYKFDENYAFLHRTLKEILRYLMDPDTFTFNFNNDPLVLRRRQTYLCYEVERLDNGTWVLMDQHMGFLCNELDPAQIYRVTWFISWSPCFSWGCAGEVRAFLQENTHVRLRIFAARIYDYDPLYKEALQMLRDAGAQVSIMTYDEFEYCWDTFVYRQGCPFQPWDGLEEHSQALSGRLRAILQNQGN

SEQ ID NO: 10877 - protein, 384 aa, Homo sapiens
LNMNPQIRNPMERMYRDTFYDNFENEPILYGRSYTWLCYEVKIKRGRSNLLWDTGVFRGQVYFKPQYHAEMCFLSWFCGNQLPAYKCFQITWFVSWTPCPDCVAKLAEFLSEHPNVTLTISAARLYYYWERDYRRALCRLSQAGARVTIMDYEEFAYCWENFVYNEGQQFMPWYKFDENYAFLHRTLKEILRYLMDPDTFTFNFNNDPLVLRRRQTYLCYEVERLDNGTWVLMDQHMGFLCNEAKNLLCGFYGRHAELRFLDLVPSLQLDPAQIYRVTWFISWSPCFSWGCAGEVRAFLQENTHVRLRIFAARIYDYDPLYKEALQMLRDAGAQVSIMTYDEFEYCWDTFVYRQGCPFQPWDGLEEHSQALSGRLRAILQNQGN

SEQ ID NO: 10878 - protein, 492 aa, Homo sapiens
LNMNPQIRNPMERMYRDTFYDNFENEPILYGRSYTWLCYEVKIKRGRSNLLWDTGVFRGQVYFKPQYHAEMCFLSWFCGNQLPAYKCFQITWFVSWTPCPDCVAKLAEFLSEHPNVTLTISAARLYYYWERDYRRALCRLSQAGARVTIMDYEEFAYCWENFVYNEGQQFMPWYKFDENYAFLHRTLKEILRYLMDPDTFTFNFNNDPLVLRRRQTYLCYEVERLDNGTWVLMDQHMGFLCNEAKNLLCGFYGRHAELRFLDLVPSLQLDPAQIYRVTWFISWSPCFSWGCAGEVRAFLQENTHVRLRIFAARIYDYDPLYKEALQMLRDAGAQVSIMTYDEFEYCWDTFVYRQGCPFQPWDGLEEHSQALSGRLRAILQVRASSLCLVPHRPPPPPRSPVPCLPLCSEPPLGSLLPTGRPAPSLPFLLTASFSFPPPASLPPLPSLSLSPGHLPVPSFHSLTSCSIQPPCSSRIRETEGWASVSKEGRDLG

SEQ ID NO: 10879 - protein, 14 aa, Homo sapiens
LLHSTPLLFQNQGN

SEQ ID NO: 10880 - protein, 8 aa, Homo sapiens
LSRKREGP

SEQ ID NO: 10881 - protein, 23 aa, Homo sapiens
MTTRPWEVTLGRAVLKPEAWSRK

SEQ ID NO: 10882 - protein, 94 aa, Homo sapiens
LVLQTKILVGTSRPRMKPHFRNTVERMYRDTFSYNFYNRPILSRRNTVWLCYEVKTKGPSRPPLDAKIFRGQVPPGLQSLCRQELSQLGKQTTH

SEQ ID NO: 10883 - protein, 399 aa, Homo sapiens
LVLQTKILVGTSRPRMKPHFRNTVERMYRDTFSYNFYNRPILSRRNTVWLCYEVKTKGPSRPPLDAKIFRGQVYSELKYHPEMRFFHWFSKWRKLHRDQEYEVTWYISWSPCTKCTRDMATFLAEDPKVTLTIFVARLYYFWDPDYQEALRSLCQKRDGPRATMKIMNYDEFQHCWSKFVYSQRELFEPWNNLPKYYILLHIMLGEILRHSMDPPTFTFNFNNEPWVRGRHETYLCYEVERMHNDTWVLLNQRRGFLCNQAPHKHGFLEGRHAELCFLDVIPFWKLDLDQDYRVTCFTSWSPCFSCAQEMAKFISKNKHVSLCIFTARIYDDQGRCQEGLRTLAEAGAKISIMTYSEFKHCWDTFVDHQGCPFQPWDGLDEHSQDLSGRLRAILQNQEN

SEQ ID NO: 10884 - protein, 8 aa, Homo sapiens
MLSPQTRK

SEQ ID NO: 10885 - protein, 34 aa, Homo sapiens
LSHRVFEMSCVGHVQWVARTSNPSTLGGQGGQIT

SEQ ID NO: 10886 - protein, 18 aa, Homo sapiens
VYFSGAQVSNQSPISSTQ

SEQ ID NO: 10887 - protein, 63 aa, Homo sapiens
MGTFTMNRNVWARVLDSGKSPVNAPATFQGLRAAQSRGGEGCCQKLRGCSRQSGLGCRVTAAP

SEQ ID NO: 10888 - protein, 191 aa, Homo sapiens
LEQTNTQTEQGDGGKELQWQDLLDSCPGPSSPCPTPALLLLPLSELALTLLLSQVYSELKYHPEMRFFHWFSKWRKLHRDQEYEVTWYISWSPCTKCTRDMATFLAEDPKVTLTIFVARLYYFWDPDYQEALRSLCQKRDGPRATMKIMNYDEFQHCWSKFVYSQRELFEPWNNLPKYYILLHIMLGEILR

SEQ ID NO: 10889 - protein, 102 aa, Homo sapiens [sequence omitted]

SEQ ID NO: 10890 - protein, 47 aa, Homo sapiens
LKDGPQSLRKAETWVEPQNKRSSSKKCKQAVHHHLQLITDTSKAMHS

SEQ ID NO: 10891 - protein, 74 aa, Homo sapiens
VLPPYKCYQITWFISRSPSPDHVVKVAEYNKVKLSIFIARLYHDCDPGFQHGLRRLQDTEARVHIMSSKEFEHC

SEQ ID NO: 10892 - protein, 50 aa, Homo sapiens
LLRRLCTREMCHVSLARDSVKTTHLRSPSCRRPGARRGNHSVCKTSLPQA

SEQ ID NO: 10893 - protein, 107 aa, Homo sapiens
LQEARSQEGKPLSLQNVASTSLMAETAHCTLKPALPTASEINCCNSGTHDAYHSGSSMEPAGSQPFLGPMNSLKRGTEIFLLFVKSLTFPLFFMYTLNCNSSSQIKH

SEQ ID NO: 10894 - protein, 168 aa, Homo sapiens
LLRKLWPEAQIRNTMALLTAETFRLQFNNKRRLRRPYYPRKALLCYQLTPQNGSTPTRGYFENKKKCHAEICFINEIKSMGLDETQCYQVTCYLTWSPCSSCAWELVDFIKAHDHLNLGIFASRLYYHWCKPQQKGLRLLCGSQVPVEVMGFPDSRGTCAGSLHGYIV

SEQ ID NO: 10895 - protein, 214 aa, Homo sapiens
LLRKLWPEAQIRNTMALLTAETFRLQFNNKRRLRRPYYPRKALLCYQLTPQNGSTPTRGYFENKKKCHAEICFINEIKSMGLDETQCYQVTCYLTWSPCSSCAWELVDFIKAHDHLNLGIFASRLYYHWCKPQQKGLRLLCGSQVPVEVMGFPEFADCWENFVDHEKPLSFNPYKMLEELDKNSRAIKRRLERIKIPGVRAQGRYMDILCDAEV

SEQ ID NO: 10896 - protein, 196 aa, Homo sapiens
LLRKLWPEAQIRNTMALLTAETFRLQFNNKRRLRRPYYPRKALLCYQLTPQNGSTPTRGYFENKKKCHAEICFINEIKSMGLDETQCYQVTCYLTWSPCSSCAWELVDFIKAHDHLNLGIFASRLYYHWCKPQQKGLRLLCGSQVPVEVMGFPEFADCWENFVDHEKPLSFNPYKMLEELDKNSRAIKRRLERIKS

SEQ ID NO: 10897 - protein, 197 aa, Homo sapiens
LLRKLWPEAQIRNTMALLTAETFRLQFNNKRRLRRPYYPRKALLCYQLTPQNGSTPTRGYFENKKKCHAEICFINEIKSMGLDETQCYQVTCYLTWSPCSSCAWELVDFIKAHDHLNLGIFASRLYYHWCKPQQKGLRLLCGSQVPVEVMGFPEFADCWENFVDHEKPLSFNPYKMLEELDKNSRAIKRRLERIKQS

SEQ ID NO: 10898 - protein, 63 aa, Homo sapiens
MALLTAETFRLQFNNKRRLRRPYYPRKALLCYQLTPQNGSTPTRGYFENKVPHGLSGHRAGRG

SEQ ID NO: 10899 - protein, 172 aa, Homo sapiens
LPPQRLYSMDLRSSHKAKGKEKLCFSLTCPLGSGSPEGVVKAGAPELVDKGPLVPTLPFPLRKPRKAHKYLRLSRKKFPPRGPNLESHSHRRELFLQEPPAPDVLQAAGEWEPAAQPPEEEDADLAEGPPPWTPALPSSEVTVTDITANSITVTFREAQAAEGFFRDRSGKF

SEQ ID NO: 10900 - protein, 305 aa, Homo sapiens
VREREGVCARARARARPDEGDGDPASPSIARRSRGPAAPPPARPGPGPARPPPRMELSAIGEQVFAVESIRKKRVRKGKVEYLVKWKGWPPKYSTWEPEEHILDPRLVMAYEEKEERDRASGYRKRGPKPKRLLLQRLYSMDLRSSHKAKGKEKLCFSLTCPLGSGSPEGVVKAGAPELVDKGPLVPTLPFPLRKPRKAHKYLRLSRKKFPPRGPNLESHSHRRELFLQEPPAPDVLQAAGEWEPAAQPPEEEADADLAEGPPPWTPALPSSEVTVTDITANSITVTFREAQAAEGFFRDRSGKF

SEQ ID NO: 10901 - protein, 132 aa, Homo sapiens
LDWARERLEQQVPVNQVFGQDEMIDVIGVTKGKGYKGVTSRWHTKKLPRKTHRGLRKVACIGAWHPARVAFSVARAGQKGYHHRTEINKKIYKIGQGYLIKDGKLIKNNASTDYDLSDKSINPLVSNGCSAL

SEQ ID NO: 10902 - protein, 77 aa, Homo sapiens
VFGQDEMIDVIGVTKGKGYKGVTSRWHTKKLPRKTHRGLRKVACIGAWHPARVAFSVARAGQKGYHHRTEINKKQDL

SEQ ID NO: 10903 - protein, 181 aa, Homo sapiens
VMSHRKFSAPRHGSLGFLPRKRSSRHRGKVKSFPKDDPSKPVHLTAFLGYKAGMTHIVREVDRPGSKVNKKEVVEAVTIVETPPMVVVGIVGYVETPRGLRTFKTVFAEHISDECKRRFYKNCSARLCPMSSIQAPLAGGKGSLEAGNELHPHAVPVCLPLTPRRGDEGLHLVPSPTLLCS

SEQ ID NO: 10904 - protein, 203 aa, Homo sapiens
LSPKLTSTSERKLGAEERAWKWRSSHRKFSAPRHGSLGFLPRKRSSRHRGKVKSFPKDDPSKPVHLTAFLGYKAGMTHIVREVDRPGSKVNKKEVVEAVTIVETPPMVVVGIVGYVETPRGLRTFKTVFAEHISDECKRRFYKNCSARLCPMSSIQAPLAGGKGSLEAGNELHPHAVPVCLPLTPRRGDEGLHLVPSPTLLCS

SEQ ID NO: 10905 - protein, 123 aa, Homo sapiens
VMSHRKFSAPRHGSLGFLPRKRSSRHRGKVKSFPKDDPSKPVHLTAFLGYKAGMTHIVREVDRPGSKVNKKEVVEAVTIVETPPMVVVGIVGYVETPRGLRTFKTVFAEHISDECKRRFYKNW

SEQ ID NO: 10906 - protein, 56 aa, Homo sapiens [sequence omitted]

SEQ ID NO: 10907 - protein, 1837 aa, Homo sapiens
LLHFMREKEQEREEQLMEDKKRKKEDKKKKEATQKVTEQKTKVPEVTKPSLSQPTAASPIGSSPSPPVNGGNNAKRVAVPNGQPPSAARYMPREVPPRFRCQQDHKVLLKRGQPPPPSCMLLGGGAGPPPCTAPGANPNNAQVTGALLQSESGTAPDSTLGGAAASNYANSTWGSGASSNNGTSPNPIHIWDKVIVDGSDMEEWPCIASKDTESSSENTTDNNSASNPGSEKSTLPGSTTSNKGKGSQCQSASSGNECNLGVWKSDPKAKSVQSSNSTTENNNGLGNWRNVSGQDRIGPGSGFSNFNPNSNPSAWPALVQEGTSRKGALETDNSNSSAQVSTVGQTSREQQSKMENAGVNFVVSGREQAQIHNTDGPKNGNTNSLNLSSPNPMENKGMPFGMGLGNTSRSTDAPSQSTGDRKTGSVGSWGAARGPSGTDTVSGQSNSGNNGNNGKEREDSWKGASVQKSTGSKNDSWDNNNRSTGGSWNFGPQDSNDNKWGEGNKMTSGVSQGEWKQPTGSDELKIGEWSGPNQPNSSTGAWDNQKGHPLPENQGNAQAPCWGRSSSSTGSEVGGQSTGSNHKAGSSDSHNSGRRSYRPTHPDCQAVLQTLLSRTDLDPRVLSNTGWGQTQIKQDTVWDIEEVPRPEGKSDKGTEGWESAATQTKNSGGWGDAPSQSNQMKSGWGELSASTEWKDPKNTGGWNDYKNNNSSNWGGGRPDEKTPSSWNENPSKDQGWGGGRQPNQGWSSGKNGWGEEVDQTKNSNWESSASKPVSGWGEGGQNEIGTWGNGGNASLASKGGWEDCKRSPAWNETGRQPNSWNKQHQQQQPPQQPPPPQPEASGSWGGPPPPPPGNVRPSNSSWSSGPQPATPKDEEPSGWEEPSPQSISRKMDIDDGTSAWGDPNSYNYKNVNLWDKNSQGGPAPREPNLPTPMTSKSASVWSKSTPPAPDNGTSAWGEPNESSPGWGEMDDTGASTTGWGNTPANAPNAMKPNSKSMQDGWGESDGPVTGARHPSWEEEEDGGVWNTTGSQGSASSHNSASWGQGGKKQMKCSLKGGNNDSWMNPLAKQFSNMGLLSQTEDNPSSKMDLSVGSLSDKKFDVDKRAMNLGDFNDIMRKDRSGFRPPNSKDMGTTDSGPYFEKLTLPFSNQDGCLGDEAPCSPFSPSPSYKLSPSGSTLPNVSLGAIGTGLNPQNFAARQGGSHGLFGNSTAQSRGLHTPVQPLNSSPSLRAQVPPQFISPQVSASMLKQFPNSGLSPGLFNVGPQLSPQQIAMLSQLPQIPQFQLACQLLLQQQQQQQLLQNQRKISQAVRQQQEQQLARMVSALQQQQQQQQRQPGMKHSPSHPVGPKPHLDNMVPNALNVGLPDLQTKGPIPGYGSGFSSGGMDYGMVGGKEAGTESRFKQWTSMMEGLPSVATQEANMHKNGAIVAPGKTRGGSPYNQFDIIPGDTLGGHTGPAGDSWLPAKSPPTNKIGSKSSNASWPPEFQPGVPWKGIQNIDPESDPYVTPGSVLGGTATSPIVDTDHQLLRDNTTGSNSSLNTSLPSPGAWPYSASDNSFTNVHSTSAKFPDYKSTWSPDPIGHNPTHLSNKMWKNHISSRNTTPLPRPPPGLTNPKPSSPWSSTAPRSVRGWGTQDSRLASASTWSDGGSVRPSYWLVLHNLTPQIDGSTLRTICMQHGPLLTFHLNLTQGTALIRYSTKQEAAKAQTALHMCVLGNTTILAEFATDDEVSRFLAQAQPPTPAATPSAPAAGWQSLETGQNQSDPVGPALNLFGGSTGLGQWSSSAGGSSGADLAGASLWGPPNYSSSLWGVPTVEDPHRMGSPAPLLPGDLLGGGSDSI

SEQ ID NO: 10908 - protein, 1727 aa, Homo sapiens
LLHFMREKEQEREEQLMEDKKRKKEDKKKKEATQKVTEQKTKVPEVTKPSLSQPTAASPIGSSPSPPVNGGNNAKRVAVPNGQPPSAARYMPREVPPRFRCQQDHKVLLKRGQPPPPSCMLLGGGAGPPPCTAPGANPNNAQVTGALLQSESGTAPDSTLGGAAASNYANSTWGSGASSNNGTSPNPIHIWDKVIVDGSDMEEWPCIASKDTESSSENTTDNNSASNPGSEKSTLPGSTTSNKGKGSQCQSASSGNECNLGVWKSDPKAKSVQSSNSTTENNNGLGNWRNVSGQDRIGPGSGFSNFNPNSNPSAWPALVQEGTSRKGALETDNSNSSAQVSTVGQTSREQQSKMENAGVNFVVSGREQAQIHNTDGPKNGNTNSLNLSSPNPMENKGMPFGMGLGNTSRSTDAPSQSTGDRKTGSVGSWGAARGPSGTDTVSGQSNSGNNGNNGKEREDSWKGASVQKSTGSKNDSWDNNNRSTGGSWNFGPQDSNDNKWGEGNKMTSGVSQGEWKQPTGSDELKIGEWSGPNQPNSSTGAWDNQKGHPLPENQGNAQAPCWGRSSSSTGSEVGGQSTGSNHKAGSSDSHNSGRRSYRPTHPDCQAVLQTLLSRTDLDPRVLSNTGWGQTQIKQDTVWDIEEVPRPEGKSDKGTEGWESAATQTKNSGGWGDAPSQSNQMKSGWGELSASTEWKDPKNTGGWNDYKNNNSSNWGGGRPDEKTPSSWNENPSKDQGWGGGRQPNQGWSSGKNGWGEEVDQTKNSNWESSASKPVSGWGEGGQNEIGTWGNGGNASLASKGGWEDCKRSPAWNETGRQPNSWNKQHQQQQPPQQPPPPQPEASGSWGGPPPPPPGNVRPSNSSWSSGPQPATPKDEEPSGWEEPSPQSISRKMDIDDGTSAWGDPNSYNYKNVNLWDKNSQGGPAPREPNLPTPMTSKSASDSKSMQDGWGESDGPVTGARHPSWEEEEDGGVWNTTGSQGSASSHNSASWGQGGKKQMKCSLKGGNNDSWMNPLAKQFSNMGLLSQTEDNPSSKMDLSVGSLSDKKFDVDKRAMNLGDFNDIMRKDRSGFRPPNSKDMGTTDSGPYFEKGGSHGLFGNSTAQSRGLHTPVQPLNSSPSLRAQVPPQFISPQVSASMLKQFPNSGLSPGLFNVGPQLSPQQIAMLSQLPQIPQFQLACQLLLQQQQQQQLLQNQRKISQAVRQQQEQQLARMVSALQQQQQQQQRQPGMKHSPSHPVGPKPHLDNMVPNALNVGLPDLQTKGPIPGYGSGFSSGGMDYGMVGGKEAGTESRFKQWTSMMEGLPSVATQEANMHKNGAIVAPGKTRGGSPYNQFDIIPGDTLGGHTGPAGDSWLPAKSPPTNKIGSKSSNASWPPEFQPGVPWKGIQNIDPESDPYVTPGSVLGGTATSPIVDTDHQLLRDNTTGSNSSLNTSLPSPGAWPYSASDNSFTNVHSTSAKFPDYKSTWSPDPIGHNPTHLSNKMWKNHISSRNTTPLPRPPPGLTNPKPSSPWSSTAPRSVRGWGTQDSRLASASTWSDGGSVRPSYWLVLHNLTPQIDGSTLRTICMQHGPLLTFHLNLTQGTALIRYSTKQEAAKAQTALHMCVLGNTTILAEFATDDEVSRFLAQAQPPTPAATPSAPAAGWQSLETGQNQSDPVGPALNLFGGSTGLGQWSSSAGGSSGADLAGASLWGPPNYSSSLWGVPTVEDPHRMGSPAPLLPGDLLGGGSDSI

SEQ ID NO: 10909 - protein, 34 aa, Homo sapiens
MAAGGDHGSPDSYRSPLASRYASPEMCFVFSDRT

SEQ ID NO: 10910 - protein, 76 aa, Homo sapiens
LSSGAPFLTPLAAASVGKVWLGLRGAAPMASVLSYESLVHAVAGAVGSVTAMTVFFPLDTARLRLQAWHHIEGGFQ

SEQ ID NO: 10911 - protein, 64 aa, Homo sapiens
MILPLPGLNEILSDPEVLAAMQDPEVMVAFQDVAQNPANMSKYQSNPKVMNLISKLSAKFGGQA

SEQ ID NO: 10912 - protein, 68 aa, Homo sapiens
VRVRRGFQMGLLRRPPIICGLYSRVAPAEPPPSRPTPAGAPGWRRCPWNRCESLLTLCRSMHLTSESL

SEQ ID NO: 10913 - protein, 52 aa, Homo sapiens
VVRDTSGGTWRGCGAWSGVAWSGVAWRGLAARARTRSCGRRVPPSGLSFLML

SEQ ID NO: 10914 - protein, 230 aa, Homo sapiens
MAVTAQAARRKERVLCLFDVDGTLTPARQKIDPEVAAFLQKLRSRVQIGVVGGSDYCKIAEQLGDGDEVIEKFDYVFAENGTVQYKHGRLLSKQVSVPQGLARGTPLFHSGAVQGGFCPGLGERHCACLRVRQPRPRSEPCVPWPDHPEPPGGGAAAGLDQLLPQLHGPAQAAQEAVRSHQPGLQNLGPEGGEVWVPQREPGDTWAPDFLRGVWILVPFEVLGGWGPRWG

SEQ ID NO: 10915 - protein, 95 aa, Homo sapiens
MAFECETKGVGFLSLYLPVGSQTWSHTLSSSCPLCDPEVIEKFDYVFAENGTVQYKHGRLLSKQTIQNHLGEELLQDLINFCLSYMALLRLPKKR

SEQ ID NO: 10916 - protein, 98 aa, Homo sapiens
VRKIDPEVAAFLQKLRSRVQIGVVGGSDYCKIAEQLGDGDEVIEKFDYVFAENGTVQYKHGRLLSKQTIQNHLGEELLQDLINFCLSYMALLRLPKKR

SEQ ID NO: 10917 - protein, 125 aa, Homo sapiens
MAVTAQAARRKERVLCLFDVDGTLTPARQKIDPEVAAFLQKLRSRVQIGVVGGSDYCKIAEQLGDGDEVIEKFDYVFAENGTVQYKHGRLLSKQTIQNHLGEELLQDLINFCLSYMALLRLPKKR

SEQ ID NO: 10918 - protein, 56 aa, Homo sapiens
VGCFLYLRKHLPGRACIGNKTAVAGWPFGQALRPLLDSIQIQPPGGSSVGRPNGQS

SEQ ID NO: 10919 - protein, 228 aa, Homo sapiens
LPVAGVGARAAQGGLSPTPQPGPGLGPPLSLRFALPSGTGRSKPLPGARGPSWPPSPRVPMEPPNLYPVKLYVYDLSKGLARRLSPIMLGKQLEGIWHTSIVVHKDEFFFGSGGISSCPPGGTLLGPPDSVVDVGSTEVTEEIFLEYLSSLGESLFRGEAYNLFEHNCNTFSNEVAQFLTGRKIPSYITDLPSEVLSTPFGQALRPLLDSIQIQPPGGSSVGRPNGQS

SEQ ID NO: 10920 - protein, 146 aa, Homo sapiens
LLGPPDSVVDVGSTEVTEEIFLEYLSSLGESLFRGEAYNLFEHNCNTFSNEVAQFLTGRKIPSYITDLPSEVLSTTVFNRCFLQEHSAARSVLMCPKPWKSLAGHHPGSIPRKDTTPPKPSHLLPLVVDCIQAASAHSRTMSICLF

SEQ ID NO: 10921 - protein, 54 aa, Homo sapiens
LEYLSSLGESLFRGEAYNLFEHNCNTFSNEVAQFLTGRKIPSYITDLPSEVLST

SEQ ID NO: 10922 - protein, 10 aa, Homo sapiens
MLSWDQDKFA

SEQ ID NO: 10923 - protein, 196 aa, Homo sapiens
LLAVSRSPREWVEGPGPPQGVLCLGLDCPLSLPAQLVGTEDALLQQLADSMLKEDCASELKVHLAKSLPLPSSVNRPRIDLIVFVVNLHSKYSLQNTEESLRHVDASFFLGKVCFLATGAGRESHCSIHRHTVVKLAHTYQSPLLYCDLEVEGFRATMAQRLVRVLQICAGHVPGVSALNLLSLLRSSEGPSLEDL

SEQ ID NO: 10924 - protein, 202 aa, Homo sapiens
LDSGRFERSARTAGATVGPAAVMSVLRPLDKLPGLNTATILLVGTEDALLQQLADSMLKEDCASELKVHLAKSLPLPSSVNRPRIDLIVFVVNLHSKYSLQNTEESLRHVDASFFLGKVCFLATGAGRESHCSIHRHTVVKLAHTYQSPLLYCDLEVEGFRATMAQRLVRVLQICAGHVPGVSALNLLSLLRSSEGPSLEDL

SEQ ID NO: 10925 - protein, 123 aa, Homo sapiens
LLAVSRSPREWVEGPGPPQGVLCLGLDCPLSLPAQLVGTEDALLQQLADSMLKEDCASELKVHLAKSLPLPSSVNRPRIDLIVFVVNLHSKYSLQNTEESLRHVDASFFLGKVCFLATGGGRL

SEQ ID NO: 10926 - protein, 175 aa, Homo sapiens
LLAVSRSPREWVEGPGPPQGVLCLGLDCPLSLPAQLVGTEDALLQQLADSMLKEDCASELKVHLAKSLPLPSSVNRPRIDLIVFVVNLHSKYRIREARTSAFSVVKFCSLVCFLTLAWPPQSPEHRGVPAPCGCQLLLGEGVFPRHRCWAGEPLQHSPAHRGEAGPHLSKPPALL

SEQ ID NO: 10927 - protein, 154 aa, Homo sapiens
LDSGRFERSARTAGATVGPAAVMSVLRPLDKLPGLNTATILLVGTEDALLQQLADSMLKEDCASELKVHLAKSLPLPSSVNRPRIDLIVFVVNLHSKYSLQNTEESLRHVDASFFLGKVCFLATGGKYVPRLLLPTPSQGKAGAAVGFLLRHPG

SEQ ID NO: 10928 - protein, 46 aa, Homo sapiens
MSVLRPLDKLPGLNTATILLVGTEDALLQQLADSMLKEDCASELKV

SEQ ID NO: 10929 - protein, 434 aa, Homo sapiens
LPVVLCQCLWIMAGKVKWVTDIEKSVLINNFEKRGWVQVTENEDWNFYWMSVQTIRNVFSVEAGYRLSDDQIVNHFPNHYELTRKDLMVKNIKRYRKELEKEGSPLAEKDENGKYLYLDFVPVTYMLPADYNLFVEEFRKSPSSTWIMKPCGKAQGKGIFLINKLSQIKKWSRDSKTSSFVSQSNKEAYVISLYINNPLLIGGRKFDLRLYVLVSTYRPLRCYMYKLGFCRFCTVKYTPSTSELDNMFVHLTNVAIQKHGEDYNHIHGGKWTVSNLRLYLESTRGKEVTSKLFDEIHWIIVQSLKAVAPVMNNDKHCFECYGYDIIIDDKLKPWLIEVNASPSLTSSTANDRILKYNLINDTLNIAVPNGEIPDCKWNKSPPKEVLGNYEILYDEELAQGDGADRELRSRQGQSLGPRAGRSRDSGRAVLTTWK

SEQ ID NO: 10930 - protein, 156 aa, Homo sapiens
LPEPWNLLKALRFLQKNSSKFHFRRTRMLPVSGAFHTRLMEPAVEPLTQALKAVDIKKPLVSVYSNVHAHRYRHPGHIHKLLAQQLVSPVKWEQTMHAIYERKKGRGFPQTFEVGPGRQLGAILKSCNMQAWKSYSAVDVLQTLEHVDLDPQEPPR

SEQ ID NO: 10931 - protein, 61 aa, Homo sapiens
MAPPWVPAMGFTLAPSLGCFVGSRFVHGEGLRWYAGLQKPSWHPPHWVLGPVWGTLYSAMG

SEQ ID NO: 10932 - protein, 124 aa, Homo sapiens
LCLLQVHCEEFIPEFEKQYPEFPWTDVQAEIFRAFTELFQVACAKPPPLGLCDYPSSRAMYAVDLMLKWDNGPDGRRVMQPQILEVNFNPDCERACRYHPTFFNDVFSTLFLDQPGGCHVTCLV

SEQ ID NO: 10933 - protein, 126 aa, Homo sapiens
LGSVLSQVHCEEFIPEFEKQYPEFPWTDVQAEIFRAFTELFQVACAKPPPLGLCDYPSSRAMYAVDLMLKWDNGPDGRRVMQPQILEVNFNPDCERACRYHPTFFNDVFSTLFLDQPGGCHVTCLV

SEQ ID NO: 10934 - protein, 91 aa, Homo sapiens
LSLWACRALSPLSSAAQHRKRPSALSPATPAGSRPLRRCAPGFAATKTQRVQRRPPRRFENMAKRNAEKELTDRNWDQEDEAEEGKRRAIN

SEQ ID NO: 10935 - protein, 409 aa, Homo sapiens
LRSPLPENHPLAPPSVRGARPPRDPGGVAGCGGEEVAARAGTSVSEAPQNSQMDSVEKTTNRSEQKSRKFLKSLIRKQPQELLLVIGTGVSAAVAPGIPALCSWRSCIEAVIEAAEQLEVLHPGDVAEFRRKVTKDRDLLVVAHDLIRKMSPRTGDAKPSFFQDCLMEVFDDLEQHIRSPVVLQSILSLMDRGAMVLTTNYDNLLEAFGRRQNKPMESLDLKDKTKVLEWARGHMKYGVLHIHGLYTDPCGVVLDPSGYKDVTQDAEVMEVLQNLYRTKSFLFVGCGETLRDQIFQALFLYSVPNKVDLEHYMLVLKENEDHFFKHQADMLLHGIKVVSYGDCFDHFPGYVQDLATQICKQQSPDADRVDSTTLLGNACQDCAKRKLEENGIEVSKKRTQSDTDDAGGS

SEQ ID NO: 10936 - protein, 240 aa, Homo sapiens
VAARAGTSVSEAPQNSQMDSVEKTTNRSEQKSRKFLKSLIRKQPQELLLVIGTGVSAAVAPGIPALCSWRSCIEAVIEAAEQLEVLHPGDVAEFRRKVTKDRDLLVVAHDLIRKMSPRTGDAKPSFFQDCLMEVFDDLEQHIRSPVVLQSILSLMDRGAMVLTTNYDNLLEAFGRRQNKPMESLDLKDKTKVWAGGAGGLWPAAEQAHGVPGLEGQDQGMGWGCGRSLAGGRTSPWSPWT

SEQ ID NO: 10937 - protein, 219 aa, Homo sapiens
VAARAGTSVSEAPQNSQMDSVEKTTNRSEQKSRKFLKSLIRKQPQELLLVIGTGVSAAVAPGIPALCSWRSCIEAVIEAAEQLEVLHPGDVAEFRRKVTKDRDLLVVAHDLIRKMSPRTGDAKPSFFQDCLMEVFDDLEQHIRSPVVLQSILSLMDRGAMVLTTNYDNLLEAFGRRQNKPMESLDLKDKTKVWAGAAGSLQVWGVLCPGSCSHFVAVNY

SEQ ID NO: 10938 - protein, 27 aa, Homo sapiens
VPEARPASSAALVTSDSSLHGRRRRPR

SEQ ID NO: 10939 - protein, 744 aa, Homo sapiens
LTALSMEGGGGRDEPSACRAGDVNMDDPKKEDILLLADEKFDFDLSLSSSSANEDDEVFFGPFGHKERCIAASLELNNPVPEQPPLPTSESPFAWSPLAGEKFVEVYKEAHLLALHIESSSRNQAAQAAKPEDPRSQGVERFIQESKLKINLFEKEKEMKKSPTSLKRETYYLSDSPLLGPPVGEPRLLASSPALPSSGAQARLTRAPGPPHSAHALPRESCTAHAASQAATQRKPGTKLLLPRAASVRGRSIPGAAEKPKKEIPASPSRTKIPAEKESHRDVLPDKPAPGAVNVPAAGSHLGQGKRAIPVPNKLGLKKTLLKAPGSTSNLARKSSSGPVWSGASSACTSPAVGKAKSSEFASIPANSSRPLSNISKSGRMGPAMLRPALPAGPVGASSWQAKRVDVSELAAEQLTAPPSASPTQPQTPEGGGQWLNSSCAWSESSQLNKTRSIRRRDSCLNSKTKVMPTPTNQFKIPKFSIGDSPDSSTPKLSRAQRPQSCTSVGRVTVHSTPVRRSSGPAPQSLLSAWRVSALPTPASRRCSGLPPMTPKTMPRAVGSPLCVPARRRSSEPRKNSAMRTEPTRESNRKTDSRLVDVSPDRGSPPSRVPQALNFSPEESDSTFSKSTATEVAREEAKPGGDAAPSEALLVDIKLEPLAVTPDAASQPLIDLPLIDFCDTPEAHVAVGSESRPLIDLMTNTPDMNKNVAKPSPVVGQLIDLSSPLIQLSPEADKENVDSPLLKF

SEQ ID NO: 10940 - protein, 209 aa, Homo sapiens
LSNISKSGRMGPAMLRPALPAGPVGASSWQAKRVDVSELAAEQLTAPPSASPTQPQTPEGGGQWLNSSCAWSESSQLNKTRSIRRRDSCLNSKTKVMPTPTNQFKIPKFSIGDSPDSSTPKLSRAQRPQSCTSVGRVTVHSTPVRRSSGPAPQSLLSAWRVSALPTPASRRCSGLPPMTPKTMPRAVGSPLCVPARRRSSEPRKNSAMR

SEQ ID NO: 10941 - protein, 286 aa, Homo sapiens
LSNISKSGRMGPAMLRPALPAGPVGASSWQAKRVDVSELAAEQLTAPPSASPTQPQTPEGGGQWLNSSCAWSESSQLNKTRSIRRRDSCLNSKTKVMPTPTNQFKIPKFSIGDSPDSSTPKLSRAQRPQSCTSVGRVTVHSTPVRRSSGPAPQSLLSAWRVSALPTPASRRCSGLPPMTPKTMPRAVGSPLCVPARRRSSEPRKNSAMRTEPTRESNRKTDSRLVDVSPDRGSPPSRVPQALNFSPEESDSTFSKSTATEVAREEAKPGGDAAPSEVGRTGAAGFC

SEQ ID NO: 10942 - protein, 384 aa, Homo sapiens
VRRSACCASTRSPRAFRAHCAARTASGSDGRCPRRAARPDRPRLRRLGLGAPGRPSPAMLLSKFGSLAHLCGPGGVDHLPVKILQPAKADKESFEKAYQVGAVLGSGGFGTVYAGSRIADGLPVAVKHVVKERVTEWGSLGGATVPLEVVLLRKVGAAGGARGVIRLLDWFERPDGFLLVLERPEPAQDLFDFITERGALDEPLARRFFAQVLAAVRHCHSCGVVHRDIKDENLLVDLRSGELKLIDFGSGALLKDTVYTDFDGTRVYSPPEWIRYHRYHGRSATVWSLGVLLYDMVCGDIPFEQDEEILRGRLLFRRRVSPECQQLIRWCLSLRPSERPSLDQIAAHPWMLGADGGVPESCDLRLCTLDPDDVASTTSSSESL

SEQ ID NO: 10943 - protein, 191 aa, Homo sapiens
LYWTHGYVLISKEVEDCVPVFLKHIAHDIYVCGKTINLLKLCCPRHYLCWSDVPVPRISVIFSLEELKEIEKDCAVYVGRMERVARHSSVSKEEKELRMEIAKQELIAHAREAASRVLSALSDRQMSERMALDARKREQFQRLKEQFVKDQERRQAARQEELDDDFSYARELRDRERRLKSLEEELERKAR

SEQ ID NO: 10944 - protein, 118 aa, Homo sapiens
VSRLLCLPHSALESIQSARAAQAPHWKSLQQQDVTAVPMSPSSHSPEGRPPPLLPGGPVCKAAASAPSSLLDQPCLCPAPSVRTAVALTTPDITLVLPPDVIQQEASALREETEAWAR

SEQ ID NO: 10945 - protein, 190 aa, Homo sapiens
LVLVSAGFDSAIGDPEGQMQATPECFAHLTQLLQVLAGGRVCAVLEGGYHLESLAESVCMTVQTLLGDPAPPLSGPMAPCQSALESIQSARAAQAPHWKSLQQQDVTAVPMSPSSHSPEGRPPPLLPGGPVCKAAASAPSSLLDQPCLCPAPSVRTAVALTTPDITLVLPPDVIQQEASALREETEAWAR

SEQ ID NO: 10946 - protein, 176 aa, Homo sapiens
VSRLLCLPHSALESIQSARAAQAPHWKSLQQQDVTAVPMSPSSHSPEGRPPPLLPGGPVCKAAASAPSSLLDQPCLCPAPSVRTAVALTTPDITLVLPPDVIQQEASALREETEAWARWAGLAWGEGWGRIYTCACVCLTCGHSVSVCPSGLSTTGHTSPWPGRRPSLHLGSSCTS

SEQ ID NO: 10947 - protein, 53 aa, Homo sapiens
VELVRALPLALVLHELGAGRSRAGEPLRLGVGAELLVDVGQRLRRGASDPCCC

SEQ ID NO: 10948 - protein, 526 aa, Homo sapiens
LNPTVPTRGRGRVPGLGSGASGRGQRPKQAADPGRVRHPRRPGAMAALMTPGTGAPPAPGDFSGEGSQGLPDPSPEPKQLPELIRMKRDGGRLSEADIRGFVAAVVNGSAQGAQIGAMLMAIRLRGMDLEETSVLTQALAQSGQQLEWPEAWRQQLVDKHSTGGVGDKVSLVLAPALAACGCKVPMISGRGLGHTGGTLDKLESIPGFNVIQSPEQMQVLLDQAGCCIVGQSEQLVPADGILYAARDVTATVDSLPLITASILSKKLVEGLSALVVDVKFGGAAVFPNQEQARELAKTLVGVGASLGLRVAAALTAMDKPLGRCVGHALEVEEALLCMDGAGPPDLRDLVTTLGGALLWLSGHAGTQAQGAARVAAALDDGSALGRFERMLAAQGVDPGLARALCSGSPAERRQLLPRAREQEELLAPADGTVELVRALPLALVLHELGAGRSRAGEPLRLGVGAELLVDVGQRLRRGTPWLRVHRDGPALSGPQSRALQEALVLSDRAPFAAPSPFAELVLPPQQ

SEQ ID NO: 10949 - protein, 197 aa, Homo sapiens
LGWDPEQAGEGSALSRHPRRPGAMAALMTPGTGAPPAPGDFSGEGSQGLPDPSPEPKQLPELIRMKRDGGRLSEADIRGFVAAVVNGSAQGAQIGAWGGLGVPDPDWEVSPRDFGSLGVRRCPTTSTGPRVPHRCGLPPSRVPPHTRGHADGHPTSGHGSGGDLGADPGPGSVGTAAGVARGLAPAACGQAFHRGCG

SEQ ID NO: 10950 - protein, 66 aa, Homo sapiens
VRWSAGRPPRFKIMPAAPARPCNGERSSWGWCSSGLASMEYCGSSSGWGPAWASTSAFRSASASSV

SEQ ID NO: 10951 - protein, 1129 aa, Homo sapiens
LCDYQGLREDSKRKGEINQTACQFLWPRQKMSSQTKFKKDKEIIAEYEAQIKEIRTQLVEQFKCLEQQSESRLQLLQDLQEFFRRKAEIELEYSRSLEKLAERFSSKIRSSREHQFKKDQYLLSPVNCWYLVLHQTRRESRDHATLNDIFMNNVIVRLSQISEDVIRLFKKSKEIGLQMHEELLKVTNELYTVMKTYHMYHAESISAESKLKEAEKQEEKQFNKSGDLSMNLLRHEDRPQRRSSVKKIEKMKEKRQAKYSENKLKCTKARNDYLLNLAATNAAISKYYIHDVSDLIDCCDLGFHASLARTFRTYLSAEYNLETSRHEGLDVIENAVDNLDSRSDKHTVMDMCNQVFCPPLKFEFQPHMGDEVCQVSAQQPVQTELLMRYHQLQSRLATLKIENEEVRKTLDATMQTLQDMLTVEDFDVSDAFQHSRSTESVKSAASETYMSKINIAKRRANQQETEMFYFTKFKEYVNGSNLITKLQAKHDLLKQTLGEGERAECGTTRPPCLPPKPQKMRRPRPLSVYSHKLFNGSMEAFIKDSGQAIPLVVESCIRYINLYGLQQQGIFRVPGSQVEVNDIKNSFERGEDPLVDDQNERDINSVAGVLKLYFRGLENPLFPKERFQDLISTIKLENPAERVHQIQQILVTLPRVVIVVMRYLFAFLNHLSQYSDENMMDPYNLAICFGPTLMHIPDGQDPVSCQAHINEVIKTIIIHHEAIFPSPRELEGPVYEKCMAGGEEYCDSPHSEPGAIDEVDHDNGTEPHTSDEEVEQIEAIAKFDYMGRSPRELSFKKGASLLLYHRASEDWWEGRHNGVDGLIPHQYIVVQDMDDAFSDSLSQKADSEASSGPLLDDKASSKNDLQSPTEHISDYGFGGVMGRVRLRSDGAAIPRRRSGGDTHSPPRGLGPSIDTPPRAAACPSSPHKIPLTRGRIESPEKRRMATFGSAGSINYPDKKALSEGHSMRSTCGSTRHSSLGDHKSLEAEALAEDIEKTMSTALHELRELERQNTVKQAPDVVLDTLEPLKNPPGPVSSEPASPLHTIVIRDPDAAMRRSSSSSTEMMTTFKPALSARLAGAQLRPPPMRPVRPVVQHRSSSSSSSGVGSPAVTPTEKMFPNSSADKSGTM

SEQ ID NO: 10952 - protein, 1105 aa, Homo sapiens
LCDYQGLREDSKRKGEINQTACQFLWPRQKMSSQTKFKKDKEIIAEYEAQIKEIRTQLVEQFKCLEQQSESRLQLLQDLQEFFRRKAEIELEYSRSLEKLAERFSSKIRSSREHQFKKDQYLLSPVNCWYLVLHQTRRESRDHATLNDIFMNNVIVRLSQISEDVIRLFKKSKEIGLQMHEELLKVTNELYTVMKTYHMYHAESISAESKLKEAEKQEEKQFNKSGDLSMNLLRHEDRPQRRSSVKKIEKMKEKRQAKYSENKLKCTKARNDYLLNLAATNAAISKYYIHDVSDLIDCCDLGFHASLARTFRTYLSAEYNLETSRHEGLDVIENAVDNLDSRSDKHTVMDMCNQVFCPPLKFEFQPHMGDEVCQVSAQQPVQTELLMRYHQLQSRLATLKIENEEVRKTLDATMQTLQDMLTVEDFDVSDAFQHSRSTESVKSAASETYMSKINIAKRRANQQETEMFYFTKFKEYVNGSNLITKLQAKHDLLKQTLGEGERAECGTTRGRRNARTRNQDSGQAIPLVVESCIRYINLYGLQQQGIFRVPGSQVEVNDIKNSFERGEDPLVDDQNERDINSVAGVLKLYFRGLENPLFPKERFQDLISTIKLENPAERVHQIQQILVTLPRVVIVVMRYLFAFLNHLSQYSDENMMDPYNLAICFGPTLMHIPDGQDPVSCQAHINEVIKTIIIHHEAIFPSPRELEGPVYEKCMAGGEEYCDSPHSEPGAIDEVDHDNGTEPHTSDEEVEQIEAIAKFDYMGRSPRELSFKKGASLLLYHRASEDWWEGRHNGVDGLIPHQYIVVQDMDDAFSDSLSQKADSEASSGPLLDDKASSKNDLQSPTEHISDYGFGGVMGRVRLRSDGAAIPRRRSGGDTHSPPRGLGPSIDTPPRAAACPSSPHKIPLTRGRIESPEKRRMATFGSAGSINYPDKKALSEGHSMRSTCGSTRHSSLGDHKSLEAEALAEDIEKTMSTALHELRELERQNTVKQAPDVVLDTLEPLKNPPGPVSSEPASPLHTIVIRDPDAAMRRSSSSSTEMMTTFKPALSARLAGAQLRPPPMRPVRPVVQHRSSSSSSSGVGSPAVTPTEKMFPNSSADKSGTM

SEQ ID NO: 10953 - protein, 339 aa, Homo sapiens
MSKEIGLQMHEELLKVTNELYTVMKTYHMYHAESISAESKLKEAEKQEEKQFNKSGDLSMNLLRHEDRPQRRSSVKKIEKMKEKRQAKYSENKLKCTKARNDYLLNLAATNAAISKYYIHDVSDLIDCCDLGFHASLARTFRTYLSAEYNLETSRHEGLDVIENAVDNLDSRSDKHTVMDMCNQVFCPPLKFEFQPHMGDEVCQVSAQQPVQTELLMRYHQLQSRLATLKIENEEVRKTLDATMQTLQDMLTVEDFDVSDAFQHSRSTESVKSAASETYMSKINIAKRRANQQETEMFYFTKFKEYVNGSNLITKLQAKHDLLKQTLGEGERAECGTTR

SEQ ID NO: 10954 - protein, 450 aa, Homo sapiens
VPPSPPPVSCSYPCVPAEIRTQLVEQFKCLEQQSESRLQLLQDLQEFFRRKAEIELEYSRSLEKLAERFSSKIRSSREHQFKKDQYLLSPVNCWYLVLHQTRRESRDHATLNDIFMNNVIVRLSQISEDVIRLFKKSKEIGLQMHEELLKVTNELYTVMKTYHMYHAESISAESKLKEAEKQEEKQFNKSGDLSMNLLRHEDRPQRRSSVKKIEKMKEKRQAKYSENKLKCTKARNDYLLNLAATNAAISKYYIHDVSDLIDCCDLGFHASLARTFRTYLSAEYNLETSRHEGLDVIENAVDNLDSRSDKHTVMDMCNQVFCPPLKFEFQPHMGDEVCQVSAQQPVQTELLMRYHQLQSRLATLKIENEEVRKTLDATMQTLQDMLTVEDFDVSDAFQHSRSTESVKSAASETYMSKINIAKRRANQQETEMFYFTKGPDDVFPICHPRL

SEQ ID NO: 10955 - protein, 97 aa, Homo sapiens
LGGVFGRRRGLVLGRRGYYGAVPAVEMPARALLPRRMGHRTLASTPALWASIPCPRSELRLDLVLPSGQSFRVSLCCPGRNAERPIPASTPRAQPPE

SEQ ID NO: 10956 - protein, 88 aa, Homo sapiens
LPHDLTLSKVLSPLSLQCLQCQQAFNATAVVRHMRKLQLGTSQEGQGQTASHGELLTPVAGGPAAGCCCRDCCVEPGTELSPTLPHQL

SEQ ID NO: 10957 - protein, 67 aa, Homo sapiens
MQAFNATAVVRHMRKLQLGTSQEGQGQTASHGELLTPVAGGPAAGCCCRDCCVEPGTELSPTLPHQL

SEQ ID NO: 10958 - protein, 253 aa, Homo sapiens
VILAEDKRTQKLVAIKCIAKEALEGKEGSMENEIAVLHKIKHPNIVALDDIYESGGHLYLIMQLVSGGELFDRIVEKGFYTERDASRLIFQVLDAVKYLHDLGIVHRDLKPENLLYYSLDEDSKIMISDFGLSKMEDPGSVLSTACGTPGYVAPEVLAQKPYSKAVDCWSIGVIAYILLCGYPPFYDENDAKLFEQILKAEYEFDSPYWDDISDSAKDFIRHLMEKDPEKRFTCEQALQHPCKPSMPRLWCGT

SEQ ID NO: 10959 - protein, 188 aa, Homo sapiens
VTTAYTVALPGVYWEQGGSGYSSQTCVRLVHSWLAPQTVPVKAPSRKDILEGVKKTLSHFRVVATGSGCALVQLQPLTVFSSQLQVHMVLQLCPVLGDHMYSARVGTVLGQRFLLPAENNKPQRQVLDEALLRRLHLTPSQAAQLPLHLHLHRLLLPGTRARDTPVELLAPLPPYFSRTLQCLGLRLQ

SEQ ID NO: 10960 - protein, 48 aa, Homo sapiens
LLFPFNNVTTVRGSGRSQMLPSCHPEGFNNMLRRRRERRREGFLGLQH

SEQ ID NO: 10961 - protein, 108 aa, Homo sapiens
VKLKEIRVVKAFRSSLYEGLEKPESRTSIHNFMAHPEFRIEDSQPHIPLIDDTDLEEDAALKQNSSPPSSLNKNNSAIDSGINLTTDTSKSATSSSPGSPIHSLETSL

SEQ ID NO: 10962 - protein, 104 aa, Homo sapiens
LIRVVKAFRSSLYEGLEKPESRTSIHNFMAHPEFRIEDSQPHIPLIDDTDLEEDAALKQNSSPPSSLNKNNSAIDSGINLTTDTSKSATSSSPGSPIHSLETSL

SEQ ID NO: 10963 - protein, 14 aa, Homo sapiens
LASLKPDPRREGVP

SEQ ID NO: 10964 - protein, 31 aa, Homo sapiens
LLQPGRAREPWTQSSARESEIKRDPRREGVP

SEQ ID NO: 10965 - protein, 29 aa, Homo sapiens
VDCEPPSRRAELRHPVPRASKTWAPVSRP

SEQ ID NO: 10966 - protein, 1193 aa, Homo sapiens
LRCQQGKGWGRGQDHQARPRPARLPRPPRPRREHGAGRELLFLSGERSPRSWRGRGRPRRHIPSRRPAPRRAATMSTAAFHISSLLEKMTSSDKDFRFMATSDLMSELQKDSIQLDEDSERKVVKMLLRLLEDKNGEVQNLAVKWLGVPLGAFHASLLHCLLPQLSSPRLAVRKRAVGALGHLAAACSTDLFVELADHLLDRLPGPRVPTSPTAIRTLIQCLGSVGRQAGHRLGAHLDRLVPLVEDFCNLDDDELRESCLQAFEAFLRKCPKEMGPHVPNVTSLCLQYIKHDPNYNYDSDEDEEQMETEDSEFSEQESEDEYSDDDDMSWKVRRAAAKCIAALISSRPDLLPDFHCTLAPVLIRRFKEREENVKADVFTAYIVLLRQTQPPKGWLEAMEEPTQTGSNLHMLRGQVPLVVKALQRQLKDRSVRARQGCFSLLTELAGVLPGSLAEHMPVLVSGIIFSLADRSSSSTIRMDALAFLQGLLGTEPAEAFHPHLPILLPPVMACVADSFYKIAAEALVVLQELVRALWPLHRPRMLDPEPYVGEMSAVTLARLRATDLDQEVKERAISCMGHLVGHLGDRLGDDLEPTLLLLLDRLRNEITRLPAIKALTLVAVSPLQLDLQPILAEALHILASFLRKNQRALRLATLAALDALAQSQGLSLPPSAVQAVLAELPALVNESDMHVAQLAVDFLATVTQAQPASLVEVSGPVLSELLRLLRSPLLPAGVLAAAEGFLQALVGTRPPCVDYAKLISLLTAPVYEQAVDGGPGLHKQVFHSLARCVAALSAACPQEAASTASRLVCDARSPHSSTGVKVLAFLSLAEVGQVAGPGHQRELKAVLLEALGSPSEDVRAAASYALGRVGAGSLPDFLPFLLEQIEAEPRRQYLLLHSLREALGAAQPDSLKPYAEDIWALLFQRCEGAEEGTRGVVAECIGKLVLVNPSFLLPRLRKQLAAGRPHTRSTVITAVKFLISDQPHPIDPLLKSFIAVHNKPSLVRDLLDDILPLLYQETKIRRDLIREVEMGPFKHTVDDGLDVRKAAFECMYSLLESCLGQLDICEFLNHVEDGLKDHYDIRMLTFIMVARLATLCPAPVLQRVDRLIEPLRATCTAKVKAGSVKQEFEKQDELKRSAMRAVAALLTIPEVGKSPIMADFSSQIRSNPELAALFESIQKDSASAPSTDSMELS

SEQ ID NO: 10967 - protein, 159 aa, Homo sapiens
LRATVPSLFLGAAYGGGSHLLLGIMAALRPLVKPKIVKKRTKKFIRHQSDRYVKIKRNWRKPRGIDNRVRRRFKGQILMPNIGYGSNKKTKHMLPSGFRKFLVHNVKELEVLLMCNKSYCAEIAHNVSSKNRKAIVERAAQLAIRVTNPNARLRSEENE

SEQ ID NO: 10968 - protein, 93 aa, Homo sapiens
MAALRPLVKPKIVKKRTKKFIRHQSDRYVKIKRNWRKPRGIDNRVRRRFKGQILMPNIGYGSNKKTKHMLPSGFRKFLVHNVKELEVLLMCNK

SEQ ID NO: 10969 - protein, 7 aa, Homo sapiens
VRAHHVP

SEQ ID NO: 10970 - protein, 200 aa, Homo sapiens
LAAVARAPRQARGGQAWEGAGPRGLRRSPPCQRRGRSRRKGAAAATAASARSQGRAAAMSYCRQEGKDRIIFVTKEDHETPSSAELVADDPNDPYEEHGLILPNGNINWNCPCLGGMASGPCGEQFKSAFSCFHYSTEEIKGSDCVDQFRAMQECMQKYPDLYPQEDEDEEEEREKKPAEQAEETAPIEATATKEEEGSS

SEQ ID NO: 10971 - protein, 253 aa, Homo sapiens
VGRPGGLQAGSGLRGAASRWTPARQREGELSSTVQSKLCRSFRGAPESSPPPGRRSPRRAVLRQGLLPCPGAGPLRHGRHSTGAGRCAVRPSGGSARPRRPLLRGGVLLQVQSKSADPLKSKHQLDLERAHFLVTQAFDEDEKENVEDAIELYTEAVDLCLKTSYETADKVLQNKLKQLARQALDRAEALSEPLTKPVGKISSTSVKPKPPPVRAHFPLGANPFLERPQSFISPQSCDAQGQRYTAEEIEVLR

SEQ ID NO: 10972 - protein, 473 aa, Homo sapiens
LGALRGVTNLSLSPASVPWPVRFGPCLTMTGSSFSLAHLLIISGLLCYSAGCLALPSLDQKKRGGHKACCLLTPPPPPLFPPPFFRGGRSPLLSPDMKNLMLELETSQSPCMQGSLGSPGPPGPQGPPGLPGKTGPKGEKGELGRPGRKGRPGPPGVPGMPGPIGWPGPEGPRGEKGDLGMMGLPGSRGPMGSKGYPGSRGEKGSRGEKGDLGPKGEKGFPGFPGMLGQKGEMGPKGEPGIAGHRGPTGRPGKRGKQGQKGDSGVMGPPGKPGPSGQPGRPGPPGPPPAGQLIMGPKGERGFPGPPGRCLCGPTMNVNNPSYGESVYGPSSPRVPVIFVVNNQEELERLNTQNAIAFRRDQRSLYFKDSLGWLPIQLTPFYPVDYTADQHGTCGDGLLQPGEECDDGNSDVGDDCIRCHRAYCGDGHRHEGVEDCDGSDFGYLTCETYLPGSYGDLQCTQYCYIDSTPCRYFT

SEQ ID NO: 10973 - protein, 11 aa, Homo sapiens
LGMSVVFCKII

SEQ ID NO: 10974 - protein, 45 aa, Homo sapiens
MSPDRNIECKATGFTETTIYDLLFCKSVDSFYQLLISSSGSKSIT

SEQ ID NO: 10975 - protein, 298 aa, Homo sapiens
LRKESGRALVTLLMYRFFPPYSDYRKLIYHLKGCQGLRNKGSSPFTSIVSAAKVCGAASESPSVKSLRLLVADQDFSFKAGQWVDFFIPGVSVVGGFSICSSPRLLEQERVIELAVKYTNHPPALWVHNTCTLDCEVAVRVGGEFFFDPQPADASRNLVLIAGGVGINPLLSILRHAADLLREQANKRNGYEIGTIKLFYSAKNTSELLFKKNILDLVNEFPEKIACSLHVTKQTTQINAELKPYITEGRITEKEIRDHISKETLFYICGPPPMTDFFSKQLENNHVPKEHICFEKWW

SEQ ID NO: 10976 - protein, 34 aa, Homo sapiens
MLQSQTARTRESDRIGSEIYEPPSCPLGSQYVYT

SEQ ID NO: 10977 - protein, 86 aa, Homo sapiens [sequence omitted]

SEQ ID NO: 10978 - protein, 176 aa, Homo sapiens
LLSTGLPAPPGLIKRADWATRPSKVRDRLRYVIYRIRVRRGGRKRPVPKGATYGKPVHHGVNQLKFARSLQSVAEERAGRHCGALRVLNSYWVGEDSTYKFFEVILIDPFHKAIRRNPDTQWITKPVHKHREMRGLTSAGRKSRGLGKGHKFHHTIGGSRRAAWRRRNTLQLHRYR

SEQ ID NO: 10979 - protein, 150 aa, Homo sapiens
LCVGYVIYRIRVRRGGRKRPVPKGATYGKPVHHGVNQLKFARSLQSVAEERAGRHCGALRVLNSYWVGEDSTYKFFEVILIDPFHKAIRRNPDTQWITKPVHKHREMRGLTSAGRKSRGLGKGHKFHHTIGGSRRAAWRRRNTLQLHRYR

SEQ ID NO: 10980 - protein, 425 aa, Homo sapiens
LPPLREAGGPGRLREGTMEVNAGGVIAYISSSSSASSPASCHSEGSENSFQSSSSSVPSSPNSSNSDTNGNPKNGDLANIEGILKNDRIDCSMKTSKSSAPGMTKSHSGVTKFSGMVLLCKVCGDVASGFHYGVHACEGCKGFFRRSIQQNIQYKKCLKNENCSIMRMNRNRCQQCRFKKCLSVGMSRDAVRFGRIPKREKQRMLIEMQSAMKTMMNSQFSGHLQNDTLVEHHEQTALPAQEQLRPKPQLEQENIKSSSPPSSDFAKEEVIGMVTRAHKDTFMYNQEQQENSAESMQPQRGERIPKNMEQYNLNHDHCGNGLSSHFPCSESQQHLNGQFKGRNIMHYPNGHAICIANGHCMNFSNAYTQRVCDRVPIDGFSQNENKNSYLCNTGGRMHLYSVHIQPKFHQKQQYHTISSLNHEVL

SEQ ID NO: 10981 - protein, 596 aa, Homo sapiens
LPPLREAGGPGRLREGTMEVNAGGVIAYISSSSSASSPASCHSEGSENSFQSSSSSVPSSPNSSNSDTNGNPKNGDLANIEGILKNDRIDCSMKTSKSSAPGMTKSHSGVTKFSGMVLLCKVCGDVASGFHYGVHACEGCKGFFRRSIQQNIQYKKCLKNENCSIMRMNRNRCQQCRFKKCLSVGMSRDAVRFGRIPKREKQRMLIEMQSAMKTMMNSQFSGHLQNDTLVEHHEQTALPAQEQLRPKPQLEQENIKSSSPPSSDFAKEEVIGMVTRAHKDTFMYNQEQQENSAESMQPQRGERIPKNMEQYNLNHDHCGNGLSSHFPCSESQQHLNGQFKGRNIMHYPNGHAICIANGHCMNFSNAYTQRVCDRVPIDGFSQNENKNSYLCNTGGRMHLVCPMSKSPYVDPHKSGHEIWEEFSMSFTPAVKEVVEFAKRIPGFRDLSQHDQVNLLKAGTFEVLMVRFASLFDAKERTVTFLSGKKYSVDDLHSMGAGDLLNSMFEFSEKLNALQLSDEEMSLFTAVVLVSADRSGIENVNSVEALQETLIRALRTLIMKNHPNEASIFTKLLLKLPDLRSLNNMHSEELLAFKVHP

SEQ ID NO: 10982 - protein, 612 aa, Homo sapiens
LHTAEEAARARPLSPRGGASPKRALTPQCTGRRTLFSRGGVIAYISSSSSASSPASCHSEGSENSFQSSSSSVPSSPNSSNSDTNGNPKNGDLANIEGILKNDRIDCSMKTSKSSAPGMTKSHSGVTKFSGMVLLCKVCGDVASGFHYGVHACEGCKGFFRRSIQQNIQYKKCLKNENCSIMRMNRNRCQQCRFKKCLSVGMSRDAVRFGRIPKREKQRMLIEMQSAMKTMMNSQFSGHLQNDTLVEHHEQTALPAQEQLRPKPQLEQENIKSSSPPSSDFAKEEVIGMVTRAHKDTFMYNQEQQENSAESMQPQRGERIPKNMEQYNLNHDHCGNGLSSHFPCSESQQHLNGQFKGRNIMHYPNGHAICIANGHCMNFSNAYTQRVCDRVPIDGFSQNENKNSYLCNTGGRMHLVCPMSKSPYVDPHKSGHEIWEEFSMSFTPAVKEVVEFAKRIPGFRDLSQHDQVNLLKAGTFEVLMVRFASLFDAKERTVTFLSGKKYSVDDLHSMGAGDLLNSMFEFSEKLNALQLSDEEMSLFTAVVLVSADRSGIENVNSVEALQETLIRALRTLIMKNHPNEASIFTKLLLKLPDLRSLNNMHSEELLAFKVHP

SEQ ID NO: 10983 - protein, 708 aa, Homo sapiens
LQSMQLGEQLLVSSVNLPGAHFYPLESARGGSGGSAGHLPSAAPSPQKLDLDKASKKFSGSLSCEAVSGEPAAASAGAPAAMLSDTDAGDAFASAAAVAKPGPPDGRKGSPCGEEELPSAAAAAAAAAAAAAATARYSMDSLSSERYYLQSPGPQGSELAAPCSLFPYQAAAGAPHGPVYPAPNGARYPYGSMLPPGGFPAAVCPPGRAQFGPGAGAGSGAGGSSGGGGGPGTYQYSQGAPLYGPYPGAAAAGSCGGLGGLGVPGSGFRAHVYLCNRPLWLKFHRHQTEMIITKQGRRMFPFLSFNINGLNPTAHYNVFVEVVLADPNHWRFQGGKWVTCGKADNNMQGNKMYVHPESPNTGSHWMRQEISFGKLKLTNNKGANNNNTQMIVLQSLHKYQPRLHIVEVTEDGVEDLNEPSKTQTFTFSETQFIAVTAYQNTDITQLKIDHNPFAKGFRDNYDSMYTASENDRLTPSPTDSPRSHQIVPGGRYGVQSFFPEPFVNTLPQARYYNGERTVPQTNGLLSPQQSEEVANPPQRWLVTPVQQPGTNKLDISSYESEYTSSTLLPYGIKSLPLQTSHALGYYPDPTFPAMAGWGGRGSYQRKMAAGLPWTSRTSPTVFSEDQLSKEKVKEEIGSSWIETPPSIKSLDSNDSGVYTSACKRRRLSPSNSSNENSPSIKCEDINAEEYSKDTSKGMGGYYAFYTTP

SEQ ID NO: 10984 - protein, 731 aa, Homo sapiens
VGSPGAGGRGSYLPLGRGRWLPHPAFIIRPPEERKQPAAVCALQSMQLGEQLLVSSVNLPGAHFYPLESARGGSGGSAGHLPSAAPSPQKLDLDKASKKFSGSLSCEAVSGEPAAASAGAPAAMLSDTDAGDAFASAAAVAKPGPPDGRKGSPCGEEELPSAAAAAAAAAAAAAATARYSMDSLSSERYYLQSPGPQGSELAAPCSLFPYQAAAGAPHGPVYPAPNGARYPYGSMLPPGGFPAAVCPPGRAQFGPGAGAGSGAGGSSGGGGGPGTYQYSQGAPLYGPYPGAAAAGSCGGLGGLGVPGSGFRAHVYLCNRPLWLKFHRHQTEMIITKQGRRMFPFLSFNINGLNPTAHYNVFVEVVLADPNHWRFQGGKWVTCGKADNNMQGNKMYVHPESPNTGSHWMRQEISFGKLKLTNNKGANNNNTQMIVLQSLHKYQPRLHIVEVTEDGVEDLNEPSKTQTFTFSETQFIAVTAYQNTDITQLKIDHNPFAKGFRDNYDSSHQIVPGGRYGVQSFFPEPFVNTLPQARYYNGERTVPQTNGLLSPQQSEEVANPPQRWLVTPVQQPGTNKLDISSYESEYTSSTLLPYGIKSLPLQTSHALGYYPDPTFPAMAGWGGRGSYQRKMAAGLPWTSRTSPTVFSEDQLSKEKVKEEIGSSWIETPPSIKSLDSNDSGVYTSACKRRRLSPSNSSNENSPSIKCEDINAEEYSKDTSKGMGGYYAFYTTP

SEQ ID NO: 10985 - protein, 428 aa, Homo sapiens
LDSGRASTRSSGPRVGRRMFPFLSFNINGLNPTAHYNVFVEVVLADPNHWRFQGGKWVTCGKADNNMQGNKMYVHPESPNTGSHWMRQEISFGKLKLTNNKGANNNNTQMIVLQSLHKYQPRLHIVEVTEDGVEDLNEPSKTQTFTFSETQFIAVTAYQNTDITQLKIDHNPFAKGFRDNYDSMYTASENDRLTPSPTDSPRSHQIVPGGRYGVQSFFPEPFVNTLPQARYYNGERTVPQTNGLLSPQQSEEVANPPQRWLVTPVQQPGTNKLDISSYESEYTSSTLLPYGIKSLPLQTSHALGYYPDPTFPAMAGWGGRGSYQRKMAAGLPWTSRTSPTVFSEDQLSKEKVKEEIGSSWIETPPSIKSLDSNDSGVYTSACKRRRLSPSNSSNENSPSIKCEDINAEEYSKDTSKGMGGYYAFYTTP

SEQ ID NO: 10986 - protein, 13 aa, Homo sapiens
LLLVGPRPALRSL

SEQ ID NO: 10987 - protein, 54 aa, Homo sapiens
LPVPGAAASIPARLAGDPGLSRPAAPLAHSPSGRRAGEQLFGPSRTATQSQRAP

SEQ ID NO: 10988 - protein, 46 aa, Homo sapiens
LTSSMWRPTCSTSSDCCTSKGGSTCLPLRWSSPGTALIRVTSSCWT

SEQ ID NO: 10989 - protein, 185 aa, Homo sapiens
LPVVALNFQTPGPEMDVYQGRFQDNGACGYVLKPAFLRDPNGTFNPRALAQGPWWARKRLNIRVISGQQLPKVNKNKNSIVDPKVTVEIHGVSRDVASRQTAVITNNGFNPWWDTEFAFEVVVPDLALIRFLVEDYDASSKNDFIGQSTIPLNSLKQGYRHVHLMSKNGDQHPSATLFVKISLQD

SEQ ID NO: 10990 - protein, 853 aa, Homo sapiens
LTTPSAQISLSSRPSEVRPSSRTLAPPSHSWTPPLLPSKGDSSAPRTRAEGVVSIKHWRRHCPGPGSAQAGALWRAMQCLGIRSRSRSRELYLQERSLKVAALNGRRLGLQDDEDLQALLKGSQLLKVKSSSWRRERFYKLQEDCKTIWQESRKVMRTPESQLFSIEDIQEVRMGHRTEGLEKFARDVPEDRCFSIVFKDQRNTLDLIAPSPADAQHWVLGLHKIIHHSGSMDQRQKLQHWIHSCLRKADKNKDNKMSFKELQNFLKELNIQVDDSYARKIFRECDHSQTDSLEDEEIEAFYKMLTQRVEIDRTFAEAAGSGETLSVDQLVTFLQHQQREEAAGPALALSLIERYEPSETAKAQRQMTKDGFLMYLLSADGSAFSLAHRRVYQDMGQPLSHYLVSSSHNTYLLEDQLAGPSSTEAYIRALCKGCRCLELDCWDGPNQEPIIYHGYTFTSKILFCDVLRAIRDYAFKASPYPVILSLENHCTLEQQRVMARHLHAILGPMLLNRPLDGVTNSLPSPEQLKGKILLKGKKLGGLLPPGGEGGPEATVVSDEDEAAEMEDEAVRSRVQHKPKEDKLRLAQELSDMVIYCKSVHFGGFSSPGTPGQAFYEMASFSENRALRLLQESGNGFVRHNVGHLSRIYPAGWRTDSSNYSPVEMWNGGCQIVALNFQTPGPEMDVYQGRFQDNGACGYVLKPAFLRDPNGTFNPRALAQGPWWARKRLNIRVISGQQLPKVNKNKNSIVDPKVTVEIHGVSRDVASRQTAVITNNGFNPWWDTEFAFEVVVPDLALIRFLVEDYDASSKNDFIGQSTIPLNSLKQGYRHVHLMSKNGDQHPSATLFVKISLQD

SEQ ID NO: 10991 - protein, 819 aa, Homo sapiens
LAGSGGGGAGQRGRGGVPGPPPASSHRGPFRSLHRTPLGPQAAGAVATQVSPAVPLPPRRPSGMDSGRDFLTLHGLQDDEDLQALLKGSQLLKVKSSSWRRERFYKLQEDCKTIWQESRKVMRTPESQLFSIEDIQEVRMGHRTEGLEKFARDVPEDRCFSIVFKDQRNTLDLIAPSPADAQHWVLGLHKIIHHSGSMDQRQKLQHWIHSCLRKADKNKDNKMSFKELQNFLKELNIQVDDSYARKIFRECDHSQTDSLEDEEIEAFYKMLTQRVEIDRTFAEAAGSGETLSVDQLVTFLQHQQREEAAGPALALSLIERYEPSETAKAQRQMTKDGFLMYLLSADGSAFSLAHRRVYQDMGQPLSHYLVSSSHNTYLLEDQLAGPSSTEAYIRALCKGCRCLELDCWDGPNQEPIIYHGYTFTSKILFCDVLRAIRDYAFKASPYPVILSLENHCTLEQQRVMARHLHAILGPMLLNRPLDGVTNSLPSPEQLKGKILLKGKKLGGLLPPGGEGGPEATVVSDEDEAAEMEDEAVRSRVQHKPKEDKLRLAQELSDMVIYCKSVHFGGFSSPGTPGQAFYEMASFSENRALRLLQESGNGFVRHNVGHLSRIYPAGWRTDSSNYSPVEMWNGGCQIVALNFQTPGPEMDVYQGRFQDNGACGYVLKPAFLRDPNGTFNPRALAQGPWWARKRLNIRVISGQQLPKVNKNKNSIVDPKVTVEIHGVSRDVASRQTAVITNNGFNPWWDTEFAFEVVVPDLALIRFLVEDYDASSKNDFIGQSTIPLNSLKQGYRHVHLMSKNGDQHPSATLFVKISLQD

SEQ ID NO: 10992 - protein, 111 aa, Homo sapiens [sequence omitted]

SEQ ID NO: 10993 - protein, 425 aa, Homo sapiens
MDSGRDFLTLHGLQDDEDLQALLKGSQLLKVKSSSWRRERFYKLQEDCKTIWQESRKVMRTPESQLFSIEDIQEVRMGHRTEGLEKFARDVPEDRCFSIVFKDQRNTLDLIAPSPADAQHWVLGLHKIIHHSGSMDQRQKLQHWIHSCLRKADKNKDNKMSFKELQNFLKELNIQVDDSYARKIFRECDHSQTDSLEDEEIEAFYKMLTQRVEIDRTFAEAAGSGETLSVDQLVTFLQHQQREEAAGPALALSLIERYEPSETAKAQRQMTKDGFLMYLLSADGSAFSLAHRRVYQDMGQPLSHYLVSSSHNTYLLEDQLAGPSSTEAYIRALCKGCRCLELDCWDGPNQEPIIYHGYTFTSKILFCDVLRAIRDYAFKVGVPLAGEEWDARGGPPLLMCPWASRRPPTLSSYPWRTTAHWSSSA

SEQ ID NO: 10994 - protein, 711 aa, Homo sapiens
METRSSKTRRSLASRTNECQGTMWAPTSPPAGSSSPSQPTWKSSLYSSLAYSEAFHYSFAARPRRLTQLALAQRPEPQLLRLRPSSLRTQDISHLLTGVFRNLYSAEVIGDEVSASLIKARGSENERHEEFVDQLQQIRELYKQRLDEFEMLERHITQAQARAIAENERVMSQAGVQDLESLVRLPPVKSVSRWCIDSELLRKHHLISPEDYYTDTVPFHSAPKGISLPGCSKLTFSCEKRSVQKKELNKKLEDSCRKKLAEFEDELDHTVDSLTWNLTPKAKERTREPLKKASQPRNKNWMNHLRVPQRELDRLLLARMESRNHFLKNPRFFPPNTRYGGKSLVFPPKKPAPIGEFQSTEPEQSCADTPVFLAKPPIGFFTDYEIGPVYEMVIALQNTTTTSRYLRVLPPSTPYFALGLGMFPGKGGMVAPGMTCQYIVQFFPDCLGDFDDFILVETQSAHTLLIPLQARRPPPVLTLSPVLDCGYCLIGGVKMTRFICKNVGFSVGRFCIMPKTSWPPLSFKAIATVGFVEQPPFGILPSVFELAPGHAILVEVLFSPKSLGKAEQTFIIMCDNCQIKELVTIGIGQLIALDLIYISGEKSQPDPGELTDLTAQHFIRFEPENLRSTARKQLIIRNATHVELAFYWQIMKPNLQPLMPGETFSMDSIKCYPDKETAFSIMPRKGVLSPHTDHEFILSFSPHEVQMVSSQ

SEQ ID NO: 10995 - protein, 1850 aa, Homo sapiens
LPLLLRRMADTQTQVAPTPTMRMATAEDLPLPPPPALEDLPLPPPKESFSKFHQQRQASELRRLYRHIHPELRKNLAEAVAEDLAEVLGSEEPTEGDVQCMRWIFENWRLDAIGEHERPAAKEPVLCGDVQATSRKFEEGSFANSTDQEPTRPQPGGGDVRAARWLFETKPLDELTGQAKELEATVREPAASGDVQGTRMLFETRPLDRLGSRPSLQEQSPLELRSEIQELKGDVKKTVKLFQTEPLCAIQDAEGAIHEVKAACREEIQSNAVRSARWLFETRPLDAINQDPSQVRVIRGISLEEGARPDVSATRWIFETQPLDAIREILVDEKDFQPSPDLIPPGPDVQQQQHLFETRALDTLKGDEEAGAEAPPKEEVVPGDVRSTLWLFETKPLDAFRDKVQVGHLQRVDPQDGEGHLSSDSSSALPFSQSAPQRDELKGDVKTFKNLFETLPLDSIGQGEVLAHGSPSREEGTDSAGQAQGIGSPVYAMQDSKGRLHALTSVSREQIVGGDVQGYRWMFETQPLDQLGRSPSTIDVVRGITRQEVVAGDVGTARWLFETQPLEMIHQREQQERQKEEGKSQGDPQPEAPPKGDVQTIRWLFETCPMSELAEKQGSEVTDPTAKAEAQSCTWMFKPQPVDRPVGSREQHLQVSQVPAGERQTDRHVFETEPLQASGRPCGRRPVRYCSRVEIPSGQVSRQKEVFQALEAGKKEEQEPRVIAGSIPAGSVHKFTWLFENCPMGSLAAESIQGGNLLEEQPMSPSGNRMQESQETAAEGTLRTLHATPGILHHGGILMEARGPGELCLAKYVLSGTGQGHPYIRKEELVSGELPRIICQVLRRPDVDQQGLLVQEDPTGQLQLKPLRLPTPGSSGNIEDMDPELQQLLACGLGTSVARTGLVMQETEQGLVALTAYSLQPRLTSKASERSSVQLLASCIDKGDLSGLHSLRWEPPADPSPVPASEGAQSLHPTESIIHVPPLDPSMGMGHLRASGATPCPPQAIGKAVPLAGEAAAPAQLQNTEKQEDSHSGQKGMAVLGKSEGATTTPPGPGAPDLLAAMQSLRMATAEAQSLHQQVLNKHKQGPTPTATSNPIQDGLRKAGATQSNIRPGGGSDPRIPAAPRKVSREEQALPRGLPGGWVTIQDGIYTAHPVRTFDPPGGVQLSQREPQSRHRETALSVQAPRPLQGGPGQSTGPGREEPGGCTQMAWGPPGKAMAEVCPGGLQAAETTLKTAPLGRHILASGPQAAGASPHPHNAFVPPPPTLPAAVTGPDFPAGAHRAEDSIQQASEPLKDPLLHSHSSPAGQRTPGGSQTKTPKLDPTMPPKKKPQLPPKPAHLTQSHPPQRLPKPLPLSPSFSSEVGQREHQRGERDTAIPQPAKVPTTVDQGHIPLARCPSGHSQPSLQHGLSTTAPRPTKNQATGSNAQSSEPPKLNALNHDPTSPQWGPGPSGEQPMEGSHQGAPESPDSLQRNQKELQGLLNQVQALEKEAASSVDVQALRRLFEAVPQLGGAAPQAPAAHQKPEASVEQAFGELTRVSTEVAQLKEQTLARLLDIEEAVHKALSSMSSLQPEASARGHFQGPPKDHSAHKISVTVSSSARPSGSGQEVGGQTAVKNQAKVECHTEAQSQVKIRNHTEARGHTASTAPSTRRQETSREYLCPPRVLPSSRDSPSSPTFISIQSATRKPLETPSFKGNPDVSVKSTQLAQDIGQALLHQKGVQDKTGKKDITQCSVQPEPAPPSASPLPRGWQKSVLELQTGPGSSQHYGAMRTVTEQYEEVDQFGNTVLMSSTTVTEQAEPPRNPGSHLGLHASPLLRQFLHSPAGFSSDLTEAETVQVSCSYSQPAAQ

SEQ ID NO: 10996 - protein, 16 aa, Homo sapiens
LEPTVLRTPSSKPLSP

SEQ ID NO: 10997 - protein, 1128 aa, Homo sapiens
LPLLLRRMADTQTQVAPTPTMRMATAEDLPLPPPPALEDLPLPPPKESFSKFHQQRQASELRRLYRHIHPELRKNLAEAVAEDLAEVLGSEEPTEGDVQCMRWIFENWRLDAIGEHERPAAKEPVLCGDVQATSRKFEEGSFANSTDQEPTRPQPGGGDVRAARWLFETKPLDELTGQAKELEATVREPAASGDVQGTRMLFETRPLDRLGSRPSLQEQSPLELRSEIQELKGDVKKTVKLFQTEPLCAIQDAEGAIHEVKAACREEIQSNAVRSARWLFETRPLDAINQDPSQVRVIRGISLEEGARPDVSATRWIFETQPLDAIREILVDEKDFQPSPDLIPPGPDVQQQQHLFETRALDTLKGDEEAGAEAPPKEEVVPGDVRSTLWLFETKPLDAFRDKVQVGHLQRVDPQDGEGHLSSDSSSALPFSQSAPQRDELKGDVKTFKNLFETLPLDSIGQGEVLAHGSPSREEGTDSAGQAQGIGSPVYAMQDSKGRLHALTSVSREQIVGGDVQGYRWMFETQPLDQLGRSPSTIDVVRGITRQEVVAGDVGTARWLFETQPLEMIHQREQQERQKEEGKSQGDPQPEAPPKGDVQTIRWLFETCPMSELAEKQGSEVTDPTAKAEAQSCTWMFKPQPVDRPVGSREQHLQVSQVPAGERQTDRHVFETEPLQASGRPCGRRPVRYCSRVEIPSGQVSRQKEVFQALEAGKKEEQEPRVIAGSIPAGSVHKFTWLFENCPMGSLAAESIQGGNLLEEQPMSPSGNRMQESQETAAEGTLRTLHATPGILHHGGILMEARGPGELCLAKYVLSGTGQGHPYIRKEELVSGELPRIICQVLRRPDVDQQGLLVQEDPTGQLQLKPLRLPTPGSSGNIEDMDPELQQLLACGLGTSVARTGLVMQETEQGLVALTAYSLQPRLTSKASERSSVQLLASCIDKGDLSGLHSLRWEPPADPSPVPASEGAQSLHPTESIIHVPPLDPSMGMGHLRASGATPCPPQAIGKAVPLAGEAAAPAQLQNTEKQEDSHSGQKGMAVLGKSEGATTTPPGPGAPDLLAAMQSLRMATAEAQSLHQQVLNKHKQGPTPTATSNPIQDGLRKAGATQSNIRPGGGSDPRIPAAPRKLL

SEQ ID NO: 10998 - protein, 119 aa, Homo sapiens
LMDYTLDLSVTTVTDYYYPDIFSSPCDAELIQTNDLLSAGPVGVWDCNVQSGVWLLLHWLLQQHVFHHPHECGQVPGCCPCRVCPKGEDDQDGHNAVPGSMANRHYGYHPIASVLPSGL

SEQ ID NO: 10999 - protein, 32 aa, Homo sapiens
LSFPCYLQRGPYGVVLDSRRNLKGNFHNVRSP

SEQ ID NO: 11000 - protein, 32 aa, Homo sapiens
LQRGPYGVVLGCSLISDSRRNLKGNFHNVRSP

SEQ ID NO: 11001 - protein, 13 aa, Homo sapiens
MDSKMNLNTWRIS

SEQ ID NO: 11002 - protein, 24 aa, Homo sapiens
MVSLTVAGSGAVDHAARPPPPLGS

SEQ ID NO: 11003 - protein, 61 aa, Homo sapiens
VEVGRVAYVSFGPHAGKLVAIVDVIDQNRALVDGPCTQVRRQAMPFKCMQLTDFILKFPHR

SEQ ID NO: 11004 - protein, 80 aa, Homo sapiens
LVAIVDVIDQNRALVDGPCTQVRRQAMPFKCMQLTDFILKFPHSAHQKYVRQAWQKADINTKWAATRWAKKIEARERVIT

SEQ ID NO: 11005 - protein, 63 aa, Homo sapiens
MECSGVILAHCHLSLPDSSDSPASASQVSETTGVLMTSLVDHVRDLFCLRGTGKGWTAPLSLY

SEQ ID NO: 11006 - protein, 44 aa, Homo sapiens
LAGADFRRPPSGRGVLMTSLVDHVRDLFCLRGTGKGWTAPLSLY

SEQ ID NO: 11007 - protein, 65 aa, Homo sapiens
LAGADFRRPPSGRATWSLNRIYRFGNQFSSPVAEGVLMTSLVDHVRDLFCLRGTGKGWTAPLSLY

SEQ ID NO: 11008 - protein, 62 aa, Homo sapiens
LISMSKWHCGRSCAPIATEVAARAGREGEKSGVLMTSLVDHVRDLFCLRGTGKGWTAPLSLY

SEQ ID NO: 11009 - protein, 13 aa, Homo sapiens
METGSLPTQLVKT

SEQ ID NO: 11010 - protein, 1404 aa, Homo sapiens
VEAPAALFSGSRGEGAMAPGCKTELRSVTNGQSNQPSNEGDAIKVFVRIRPPAERSGSADGEQNLCLSVLSSTSLRLHSNPEPKTFTFDHVADVDTTQESVFATVAKSIVESCMSGYNGTIFAYGQTGSGKTFTMMGPSESDNFSHNLRGVIPRSFEYLFSLIDREKEKAGAGKSFLCKCSFIEIYNEQIYDLLDSASAGLYLREHIKKGVFVVGAVEQVVTSAAEAYQVLSGGWRNRRVASTSMNRESSRSHAVFTITIESMEKSNEIVNIRTSLLNLVDLAGSERQKDTHAEGMRLKEAGNINRSLSCLGQVITALVDVGNGKQRHVCYRDSKLTFLLRDSLGGNAKTAIIANVHPGSRCFGETLSTLNFAQRAKLIKNKAVVNEDTQGNVSQLQAEVKRLKEQLAELASGQTPPESFLTRDKKKTNYMEYFQEAMLFFKKSEQEKKSLIEKVTQLEDLTLKKEKFIQSNKMIVKFREDQIIRLEKLHKESRGGFLPEEQDRLLSELRNEIQTLREQIEHHPRVAKYAMENHSLREENRRLRLLEPVKRAQEMDAQTIAKLEKAFSEISGMEKSDKNQQGFSPKAQKEPCLFANTEKLKAQLLQIQTELNNSKQEYEEFKELTRKRQLELESELQSLQKANLNLENLLEATKACKRQEVSQLNKIHAETLKIITTPTKAYQLHSRPVPKLSPEMGSFGSLYTQNSSILDNDILNEPVPPEMNEQAFEAISEELRTVQEQMSALQAKLDEEEHKNLKLQQHVDKLEHHSTQMQELFSSERIDWTKQQEELLSQLNVLEKQLQETQTKNDFLKSEVHDLRVVLHSADKELSSVKLEYSSFKTNQEKEFNKLSERHMHVQLQLDNLRLENEKLLESKACLQDSYDNLQEIMKFEIDQLSRNLQNFKKENETLKSDLNNLMELLEAEKERNNKLSLQFEEDKENSSKEILKVLEAVRQEKQKETAKCEQQMAKVQKLEESLLATEKVISSLEKSRDSDKKVVADLMNQIQELRTSVCEKTETIDTLKQELKDINCKYNSALVDREESRVLIKKQEVDILDLKETLRLRILSEDIERDMLCEDLAHATEQLNMLTEASKKHSGLLQSAQEELTKKEALIQELQHKLNQKKEEVEQKKNEYNFKMRQLEHVMDSAAEDPQSPKTPPHFQTHLAKLLETQEQEIEDGRASKTSLEHLVTKLNEDREVKNAEILRMKEQLREMENLRLESQQLIEKNWLLQGQLDDIKRQKENSDQNHPDNQQLKNEQEESIKERLAKSKIVEEMLKMKADLEEVQSALYNKEMECLRMTDEVERTQTLESKAFQEKEQLRSKLEEMYEERERTSQEMEMLRKQVECLAEENGKLVGHQNLHQKIQYVVRLKKENVRLAEETEKLRAENVFLKEKKRSES

SEQ ID NO: 11011 - protein, 1370 aa, Homo sapiens
LQNNEGDAIKVFVRIRPPAERSGSADGEQNLCLSVLSSTSLRLHSNPEPKTFTFDHVADVDTTQESVFATVAKSIVESCMSGYNGTIFAYGQTGSGKTFTMMGPSESDNFSHNLRGVIPRSFEYLFSLIDREKEKAGAGKSFLCKCSFIEIYNEQIYDLLDSASAGLYLREHIKKGVFVVGAVEQVVTSAAEAYQVLSGGWRNRRVASTSMNRESSRSHAVFTITIESMEKSNEIVNIRTSLLNLVDLAGSERQKDTHAEGMRLKEAGNINRSLSCLGQVITALVDVGNGKQRHVCYRDSKLTFLLRDSLGGNAKTAIIANVHPGSRCFGETLSTLNFAQRAKLIKNKAVVNEDTQGNVSQLQAEVKRLKEQLAELASGQTPPESFLTRDKKKTNYMEYFQEAMLFFKKSEQEKKSLIEKVTQLEDLTLKKEKFIQSNKMIVKFREDQIIRLEKLHKESRGGFLPEEQDRLLSELRNEIQTLREQIEHHPRVAKYAMENHSLREENRRLRLLEPVKRAQEMDAQTIAKLEKAFSEISGMEKSDKNQQGFSPKAQKEPCLFANTEKLKAQLLQIQTELNNSKQEYEEFKELTRKRQLELESELQSLQKANLNLENLLEATKACKRQEVSQLNKIHAETLKIITTPTKAYQLHSRPVPKLSPEMGSFGSLYTQNSSILDNDILNEPVPPEMNEQAFEAISEELRTVQEQMSALQAKLDEEEHKNLKLQQHVDKLEHHSTQMQELFSSERIDWTKQQEELLSQLNVLEKQLQETQTKNDFLKSEVHDLRVVLHSADKELSSVKLEYSSFKTNQEKEFNKLSERHMHVQLQLDNLRLENEKLLESKACLQDSYDNLQEIMKFEIDQLSRNLQNFKKENETLKSDLNNLMELLEAEKERNNKLSLQFEEDKENSSKEILKVLEAVRQEKQKETAKCEQQMAKVQKLEESLLATEKVISSLEKSRDSDKKVVADLMNQIQELRTSVCEKTETIDTLKQELKDINCKYNSALVDREESRVLIKKQEVDILDLKETLRLRILSEDIERDMLCEDLAHATEQLNMLTEASKKHSGLLQSAQEELTKKEALIQELQHKLNQKKEEVEQKKNEYNFKMRQLEHVMDSAAEDPQSPKTPPHFQTHLAKLLETQEQEIEDGRASKTSLEHLVTKLNEDREVKNAEILRMKEQLREMENLRLESQQLIEKNWLLQGQLDDIKRQKENSDQNHPDNQQLKNEQEESIKERLAKSKIVEEMLKMKADLEEVQSALYNKEMECLRMTDEVERTQTLESKAFQEKEQLRSKLEEMYEERERTSQEMEMLRKQVECLAEENGKLVGHQNLHQKIQYVVRLKKENVRLAEETEKLRAENVFLKEKKRSES

SEQ ID NO: 11012 - protein, 452 aa, Homo sapiens
MAVVNEDTQGNVSQLQAEVKRLKEQLAELASGQTPPESFLTRDKKKTNYMEYFQEAMLFFKKSEQEKKSLIEKVTQLEDLTLKKEKFIQSNKMIVKFREDQIIRLEKLHKESRGGFLPEEQDRLLSELRNEIQTLREQIEHHPRVAKYAMENHSLREENRRLRLLEPVKRAQEMDAQTIAKLEKAFSEISGMEKSDKNQQGFSPKAQKEPCLFANTEKLKAQLLQIQTELNNSKQEYEEFKELTRKRQLELESELQSLQKANLNLENLLEATKACKRQEVSQLNKIHAETLKIITTPTKAYQLHSRPVPKLSPEMGSFGSLYTQNSSILDNDILNEPVPPEMNEQAFEAISEELRTVQEQMSALQAKLDEEEHKNLKLQQHVDKLEHHSTQMQELFSSERIDWTKQQEELLSQLNVLEKQLQETQTKNDCKLFYQELCDLKEYCNSISFYFY

SEQ ID NO: 11013 - protein, 8 aa, Homo sapiens
LKRYEPED

SEQ ID NO: 11014 - protein, 188 aa, Homo sapiens
LPPWLVEDTFTIDEVSEVLNGLQAVVHSEVESELINTAYTNVLLLRQLFAQAEKWYLKLQTDISELENRELLEQVAEFEKAEITSSNKKDFIKAQDLSNLENTVAALKSEFQKTLNDKTENQKSLEENLATAKHDLLRVQEQLHMAEKELEKKFQQTAAYRNMKEILTKKNDQIKDLRKRLAQYEPED

SEQ ID NO: 11015 - protein, 277 aa, Homo sapiens
LAGHRLASPVPLGCRRCLPPWLVEDTFTIDEVSEVLNGLQAVVHSEVESELINTAYTNVLLLRQLFAQAEKWYLKLQTDISELENRELLEQVAEFEKAEITSSNKKPILDVTKPKLAPLNEGGTAELLNKEILRLQEENEKLKSRLKTIEIQATNALDEKSKLEKALQDLQLDQGNQKDFIKAQDLSNLENTVAALKSEFQKTLNDKTENQKSLEENLATAKHDLLRVQEQLHMAEKELEKKFQQTAAYRNMKEILTKKNDQIKDLRKRLAQYEPED

SEQ ID NO: 11016 - protein, 32 aa, Homo sapiens
MYRVCLTHTQGCISKISKLILFWRPQPNVQCS

SEQ ID NO: 11017 - protein, 24 aa, Homo sapiens
MCSGNNPEKLWVETLTLQKAHLSS

SEQ ID NO: 11018 - protein, 28 aa, Homo sapiens
LLWKSHVWLHRCVIHSVNLGVYVTRQEG

SEQ ID NO: 11019 - protein, 89 aa, Homo sapiens
MGLAEGNRRAARRRRRQVARSRAGAGPGHGRLGAAVRVVAALLRAEGPGLPAAVAEGLCRCLQEEHLTVLSGATKARGGRCRGPAATTG

SEQ ID NO: 11020 - protein, 19 aa, Homo sapiens
MFSLDSFRKASLDVNEDPP

SEQ ID NO: 11021 - protein, 549 aa, Homo sapiens
VSAGRGGRGGGRGRGSGSSARPGAAMELGPEPPHRRRLLFACSPPPASQPVVKALFGASAAGGLSPVTNLTVTMDQLQGLGSDYEQPLEVKNNSNLQRMGSSESTDSGFCLDSPGPLDSKENLENPMRRIHSLPQKLLGCSPALKRSHSDSLDHDIFQLIDPDENKENEAFEFKKPVRPVSRGCLHSHGLQEGKDLFTQRQNSAPARMLSSNERDSSEPGNFIPLFTPQSPVTATLSDEDDGFVDLLDGENLKNEEETPSCMASLWTAPLVMRTTNLDNRCKLFDSPSLCSSSTRSVLKRPERSQEESPPGSTKRRKSMSGASPKESTNPEKAHETLHQSLSLASSPKGTIENILDNDPRDLIGDFSKGYLFHTVAGKHQDLKYISPEIMASVLNGKFANLIKEFVIIDCRYPYEYEGGHIKGAVNLHMEEEVEDFLLKKPIVPTDGKRVIVVFHCEFSSERGPRMCRYVRERDRLGNEYPKLHYPELYVLKGGYKEFFMKCQSYCEPPSYRPMHHEDFKEDLKKFRTKSRTWAGEKSKREMYSRLKKL

SEQ ID NO: 11022 - protein, 509 aa, Homo sapiens
VSAGRGGRGGGRGRGSGSSARPGAAMELGPEPPHRRRLLFACSPPPASQPVVKALFGASAAGGLSPVTNLTVTMDQLQGLGSDYEQPLEVKNNSNLQRMGSSESTDSGFCLDSPGPLDSKENLENPMRRIHSLPQKLLGCSPALKRSHSDSLDHDIFQLIDPDENKENLSSNERDSSEPGNFIPLFTPQSPVTATLSDEDDGFVDLLDGENLKNEEETPSCMASLWTAPLVMRTTNLDNRCKLFDSPSLCSSSTRSVLKRPERSQEESPPGSTKRRKSMSGASPKESTNPEKAHETLHQSLSLASSPKGTIENILDNDPRDLIGDFSKGYLFHTVAGKHQDLKYISPEIMASVLNGKFANLIKEFVIIDCRYPYEYEGGHIKGAVNLHMEEEVEDFLLKKPIVPTDGKRVIVVFHCEFSSERGPRMCRYVRERDRLGNEYPKLHYPELYVLKGGYKEFFMKCQSYCEPPSYRPMHHEDFKEDLKKFRTKSRTWAGEKSKREMYSRLKKL

SEQ ID NO: 11023 - protein, 375 aa, Homo sapiens
VSIIPIFLNRQCALAALRDVRRFLSEEGGHVAVFDATNTTRERRATIFNFGEQNGYKTFFVESICVDPEVIAANIVQVKLGSPDYVNRDSDEATEDFMRRIECYENSYESLDEDLDRDLSYIKIMDVGQSYVVNRVADHIQSRIVYYLMNIHVTPRSIYLCRHGESELNLKGRIGGDPGLSPRGREFAKSLAQFISDQNIKDLKVWTSQMKRTIQTAEALGVPYEQWKVLNEIDAGVCEEMTYEEIQDNYPLEFALRDQDKYRYRYPKGESYEDLVQRLEPVIMELERQENVLVICHQAVMRCLLAYFLDKAAEQLPYLKCPLHTVLKLTPVAYGCKVESIFLNVAAVNTHRDRPQNVDISRPPEEALVTVPAHQ

SEQ ID NO: 11024 - protein, 498 aa, Homo sapiens
MGGPLCTLASAVNFQRWASFPTGGRVPLGLKAELGQELQQRCAQDRDRKVCRVGLCLCPGTLCMTNCPTLIVMVGLPARGKTYISKKLTRYLNWIGVPTREFNVGQYRRDVVKTYKSFEFFLPDNEEGLKIRKQCALAALRDVRRFLSEEGGHVAVFDATNTTRERRATIFNFGEQNGYKTFFVESICVDPEVIAANIVQVKLGSPDYVNRDSDEATEDFMRRIECYENSYESLDEDLDRDLSYIKIMDVGQSYVVNRVADHIQSRIVYYLMNIHVTPRSIYLCRHGESELNLKGRIGGDPGLSPRGREFAKSLAQFISDQNIKDLKVWTSQMKRTIQTAEALGVPYEQWKVLNEIDAGVCEEMTYEEIQDNYPLEFALRDQDKYRYRYPKGESYEDLVQRLEPVIMELERQENVLVICHQAVMRCLLAYFLDKAAEQLPYLKCPLHTVLKLTPVAYGCKVESIFLNVAAVNTHRDRPQNVDISRPPEEALVTVPAHQ

SEQ ID NO: 11025 - protein, 487 aa, Homo sapiens
VARLLGWKRRSPTHPGPGMASPRELTQNPLKKIWMPYSNGRPALHACQRGVCMTNCPTLIVMVGLPARGKTYISKKLTRYLNWIGVPTREFNVGQYRRDVVKTYKSFEFFLPDNEEGLKIRKQCALAALRDVRRFLSEEGGHVAVFDATNTTRERRATIFNFGEQNGYKTFFVESICVDPEVIAANIVQVKLGSPDYVNRDSDEATEDFMRRIECYENSYESLDEDLDRDLSYIKIMDVGQSYVVNRVADHIQSRIVYYLMNIHVTPRSIYLCRHGESELNLKGRIGGDPGLSPRGREFAKSLAQFISDQNIKDLKVWTSQMKRTIQTAEALGVPYEQWKVLNEIDAGVCEEMTYEEIQDNYPLEFALRDQDKYRYRYPKGESYEDLVQRLEPVIMELERQENVLVICHQAVMRCLLAYFLDKAAEQLPYLKCPLHTVLKLTPVAYGCKVESIFLNVAAVNTHRDRPQNVDISRPPEEALVTVPAHQ

SEQ ID NO: 11026 - protein, 480 aa, Homo sapiens
VARLLGWKRRSPTHPGPGMASPRELTQNPLKKIWMPYSNGRPALHACQRGVCMTNCPTLIVMVGLPARGKTYISKKLTRYLNWIGVPTREFNVGQYRRDVVKTYKSFEFFLPDNEEGLKIRKQCALAALRDVRRFLSEEGGHVAVFDATNTTRERRATIFNFGEQNGYKTFFVESICVDPEVIAANIVQVKLGSPDYVNRDSDEATEDFMRRIECYENSYESLDEDLDRDLSYIKIMDVGQSYVVNRVADHIQSRIVYYLMNIHVTPRSIYLCRHGESELNLKGRIGGDPGLSPRGREFAKSLAQFISDQNIKDLKVWTSQMKRTIQTAEALGVPYEQWKGVCEEMTYEEIQDNYPLEFALRDQDKYRYRYPKGESYEDLVQRLEPVIMELERQENVLVICHQAVMRCLLAYFLDKAAEQLPYLKCPLHTVLKLTPVAYGCKVESIFLNVAAVNTHRDRPQNVDISRPPEEALVTVPAHQ

SEQ ID NO: 11027 - protein, 452 aa, Homo sapiens
VARLLGWKRRSPTHPGPGMASPRELTQNPLKKIWMPYSNGRPALHACQRGVCMTNCPTLIVMVGLPARGKTYISKKLTRYLNWIGVPTREFNVGQYRRDVVKTYKSFEFFLPDNEEGLKIRKQCALAALRDVRRFLSEEGGHVAVFDATNTTRERRATIFNFGEQNGYKTFFVESICVDPEVIAANIVQVKLGSPDYVNRDSDEATEDFMRRIECYENSYESLDEDLDRDLSYIKIMDVGQSYVVNRVADHIQSRIVYYLMNIHVTPRSIYLCRHGESELNLKGRIGGDPGLSPRGREFAKSLAQFISDQNIKDLKVWTSQMKRTIQTAEALGVPYEQWKVLNEIDASYEDLVQRLEPVIMELERQENVLVICHQAVMRCLLAYFLDKAAEQLPYLKCPLHTVLKLTPVAYGCKVESIFLNVAAVNTHRDRPQNVDISRPPEEALVTVPAHQ

SEQ ID NO: 11028 - protein, 548 aa, Homo sapiens
LRRGGAQGAGPRVARGGPAAGLEAAQSDSSRPRDGVPTGIDTEPPEEDLDAIQQWAARSARLPARWWASFPTGGRVPLGLKAELGQELQQRCAQDRDRKVCRVGLCLCPGTLCMTNCPTLIVMVGLPARGKTYISKKLTRYLNWIGVPTREFNVGQYRRDVVKTYKSFEFFLPDNEEGLKIRKQCALAALRDVRRFLSEEGGHVAVFDATNTTRERRATIFNFGEQNGYKTFFVESICVDPEVIAANIVQVKLGSPDYVNRDSDEATEDFMRRIECYENSYESLDEDLDRDLSYIKIMDVGQSYVVNRVADHIQSRIVYYLMNIHVTPRSIYLCRHGESELNLKGRIGGDPGLSPRGREFAKSLAQFISDQNIKDLKVWTSQMKRTIQTAEALGVPYEQWKVLNEIDAGVCEEMTYEEIQDNYPLEFALRDQDKYRYRYPKGESYEDLVQRLEPVIMELERQENVLVICHQAVMRCLLAYFLDKAAEQLPYLKCPLHTVLKLTPVAYGCKVESIFLNVAAVNTHRDRPQNVDISRPPEEALVTVPAHQ

SEQ ID NO: 11029 - protein, 117 aa, Homo sapiens
LNWIGVPTREFNVGQYRRDVVKTYKSFEFFLPDNEEGLKIRKQCALAALRDVRRFLSEEGGHVAVFDATNTTRERRATIFNFGEQNGYKVRPPWLLSLAELWHVPCPPGLLSPPAYA

SEQ ID NO: 11030 - protein, 122 aa, Homo sapiens
VARLLGWKRRSPTHPGPGMASPRELTQNPLKKIWMPYSNGRPALHACQRGVCMTNCPTLIVMVGLPARGKTYISKKLTRYLNWIGVPTREFNVGQYRRDVVKTYKSFEFFLPDNEEGLKIRK

SEQ ID NO: 11031 - protein, 106 aa, Homo sapiens
MEVLQQEVLNKHKATEGWDVRESQWCAPRPRHMVVCMTNCPTLIVMVGLPARGKTYISKKLTRYLNWIGVPTREFNVGQYRRDVVKTYKSFEFFLPDNEEGLKIRK

SEQ ID NO: 11032 - protein, 166 aa, Homo sapiens
MCPMHAPHLTLRVLACLCAASPAFTLSWVALAACLAPQQVSSGDKMEDATANGQEDSKAPDGSTLKALGLPQPDFHSLILDLGALSFVDTVCLKSLKNIFHDFREIEVEVYMAACHSPVVSQLEAGHFFDASITKKHLFASVHDAVTFALQHPRPVPDSPVSVTRL

SEQ ID NO: 11033 - protein, 177 aa, Homo sapiens
LGQVPDTDIYRDVAEYSEAKEVRGVKVFRSSATVYFANAEFYSDALKQRCGVDVDFLISQKKKLLKKQEQLKLKQLQKEEKLRKQAASPKGASVSINVNTSLEDMRSNNVEDCKMMVRLEVGKEVTAVSCRDAGSTCLMRNAMDPAAVGSRVLRRWQEEWGGWVRYSSGSVVICHRI

SEQ ID NO: 11034 - protein, 151 aa, Homo sapiens
LGQVPDTDIYRDVAEYSEAKEVRGVKVFRSSATVYFANAEFYSDALKQRCGVDVDFLISQKKKLLKKQEQLKLKQLQKEEKLRKQAGPLLSGDPHLLPPVPCPSLSPGPRLLPRPHSSSLPLSPSCSQGPCFTPLAGPGSRQHFLSHHLNQ

SEQ ID NO: 11035 - protein, 130 aa, Homo sapiens
LAWPNLNRQHCPCSCSHNLSTFIQNWKSPGLSLKTRAPGQGSVLSSSDLPRAVLTGTFAVMSVMVGSVTESLAPQALNDSMINETARDAARVQVASTLSVLVGLFQVWNSQEYVPPTTTSAPATVLSVLP

SEQ ID NO: 11036 - protein, 136 aa, Homo sapiens
LLSATQAMDLRRRDYHMERPLLNQEHLEELGRWGSAPRTHQWRTWLQCSRARAYALLLQHLPVLVWLPRYPVRDWLLGDLLSGLSVAIMQLPQGLAYALLAGLPPVFGLYSSFYPVFIYFLFGTSRHISVGKWRQA

SEQ ID NO: 11037 - protein, 39 aa, Homo sapiens
LPFFRAMMYSGELKFEKRTSSAQVEGGVHSLHSYEKRLF

SEQ ID NO: 11038 - protein, 516 aa, Homo sapiens
LAMADYLISGGTSYVPDDGLTAQQLFNCGDGLTYNDFLILPGYIDFTADQVDLTSALTKKITLKTPLVSSPMDTVTEAGMAIAMALTGGIGFIHHNCTPEFQANEVRKVKKYEQGFITDPVVLSPKDRVRDVFEAKARHGFCGIPITDTGRMGSRLVGIISSRDIDFLKEEEHDCFLEEIMTKREDLVVAPAGITLKEANEILQRSKKGKLPIVNEDDELVAIIARTDLKKNRDYPLASKDAKKQLLCGAAIGTHEDDKYRLDLLAQAGVDVVVLDSSQGNSIFQINMIKYIKDKYPNLQVIGGNVVTAAQAKNLIDAGVDALRVGMGSGSICITQEVLACGRPQATAVYKVSEYARRFGVPVIADGGIQNVGHIAKALALGASTVMMGSLLAATTEAPGEYFFSDGIRLKKYRGMGSLDAMDKHLSSQNRYFSEADKIKVAQGVSGAVQDKGSIHKFVPYLIAGIQHSCQDIGAKSLTQVRAMMYSGELKFEKRTSSAQVEGGVHSLHSYEKRLF

SEQ ID NO: 11039 - protein, 33 aa, Homo sapiens
LPFFRAMMYSGELKFEKRTSSAQVEGGVHSLHS

SEQ ID NO: 11040 - protein, 162 aa, Homo sapiens
VYKVSEYARRFGVPVIADGGIQNVGHIAKALALGASTVMMGSLLAATTEAPGEYFFSDGIRLKKYRGMGSLDAMDKHLSSQNRYFSEADKIKVAQGVSGAVQDKGSIHKFVPYLIAGIQHSCQDIGAKSLTQVRAMMYSGELKFEKRTSSAQVEGGVHSLHS

SEQ ID NO: 11041 - protein, 117 aa, Homo sapiens
MCSSISTVLACGRPQATAVYKVSEYARRFGVPVIADGGIQNVGHIAKALALGASTVMMGSLLAATTEAPGEYFFSDGIRLKKYRGMGSLDAMDKHLSSQNRYFRWDRQASYPTLILH

SEQ ID NO: 11042 - protein, 110 aa, Homo sapiens [sequence omitted]

SEQ ID NO: 11043 - protein, 78 aa, Homo sapiens
LSPQDLTSALTKKITLKTPLVSSPMDTVTEAGMAIAMALTGGIGFIHHNCTPEFQANEVRKVKVRRATIISKRSWELH

SEQ ID NO: 11044 - protein, 125 aa, Homo sapiens
LAMADYLISGGTSYVPDDGLTAQQLFNCGDGLTYNDFLILPGYIDFTADQVDLTSALTKKITLKTPLVSSPMDTVTEAGMAIAMALTGGIGFIHHNCTPEFQANEVRKVKVRRATIISKRSWELH

SEQ ID NO: 11045 - protein, 65 aa, Homo sapiens
LAMADYLISGGTSYVPDDGLTAQQLFNCGDGLTYNDFLILPGYIDFTADQVVSMIRNWVLNIKVS

SEQ ID NO: 11046 - protein, 42 aa, Homo sapiens [sequence omitted]

SEQ ID NO: 11047 - protein, 95 aa, Homo sapiens
VHSYTGTTDIHIARHPTPAHPSLSSLQPTSEEDLCPICYAHPISAVFQPCGHKSCKACINQHLMNNKDCFFCKTTIVSVEDWEKGANTSTTSSAA

SEQ ID NO: 11048 - protein, 88 aa, Homo sapiens [sequence omitted]

SEQ ID NO: 11049 - protein, 292 aa, Homo sapiens
LGPLSPAIMPIRALCTICSDFFDHSRDVAAIHCGHTFHLQCLIQWFETAPSRTCPQCRIQVGKRTIINKLFFDLAQEEENVLDAEFLKLQTVYSELDQAKLELKSAQKDLQSADKEIMSLKKKLTMLQETLNLPPVASETVDRLVLESPAPVEVNLKLRRPSFRDDIDLNATFDVDTPPARPSSSQHGYYEKLCLEKSHSPIQDVPKKICKGPRKESQLSLGGQSCAGEPDEELVGAFPIFVRNAILGQKQPKRPRSESSCSKDVVRTGFDGLGGRTKFIQPVSFSCDVELS

SEQ ID NO: 11050 - protein, 155 aa, Homo sapiens
LGPLSPAIMPIRALCTICSDFFDHSRDVAAIHCGHTFHLQCLIQWFETAPSRTCPQCRIQVGKRTIINKLFFDLAQEEENVLDAEFLKNELDNVRAQLSQKDKEKRDSQVIIDTLRDTLEERNATVVSLQQALGKAEMLCSTLKVGPQVLWVQNS

SEQ ID NO: 11051 - protein, 345 aa, Homo sapiens
VPQERLDLGVCGRLKLGRHWPLLHGLTGKHPTGKGEEQALAAAVLGLLCVQLGPGPKGEELFHSLQPLLVSVLSDSTASPAARLHCASALGLGCYVAAADIQDLVSCLACLESVFSRFYGLGGSSTSPVVPASLHGLLSAALQAWALLLTICPSTQISHILDRQLPRLPQLLSSESVNLRIAAGETIALLFELARDLEEEFVYEDMEALCSVLRTLATDSNKYRAKADRRRQRSTFRAVLHSVEGGECEEEIVRFGFEVLYMDSWARHRIYAAFKEVLGSGMHHHLQNNELLRDIFGLGPVLLLDATALKACKVPRFEKHLYNAAAFKARTKARSRVRDKRADIL

SEQ ID NO: 11052 - protein, 542 aa, Homo sapiens
VDYHSHGALRAASRRRLRAQASGISSFSLVDVGLNRMAWNSPSRRPVWQGGAPREDGGARGVWLPSSGQVSAQRTGRRLVGLEPTPTGSLTPRPPRPVPGMPRARKGNTLRKGGQRRGGGARSSAQADSGSSDDEAASEARSTASECPSLLSTTAEDSLGGDVVDEQGQQEDLEEKLKEYVDCLTDKSAKTRQGALESLRLALASRLLPDFLLERRLTLADALEKCLKKGKGEEQALAAAVLGLLCVQLGPGPKGEELFHSLQPLLVSVLSDSTASPAARLHCASALGLGCYVAAADIQDLVSCLACLESVFSRFYGLGGSSTSPVVPASLHGLLSAALQAWALLLTICPSTQISHILDRQLPRLPQLLSSESVNLRIAAGETIALLFELARDLEEEFVYEDMEALCSVLRTLATDSNKYRAKADRRRQRSTFRAVLHSVEGGECEEEIVRFGFEVLYMDSWARHRIYAAFKEVLGSGMHHHLQNNELLRDIFGLGPVLLLDATALKACKVPRFEKHLYNAAAFKARTKARSRVRDKRADIL

SEQ ID NO: 11053 - protein, 177 aa, Homo sapiens
VCLCPMKPFLHLIPQQSGGFPLSSASFTLRGVSSRAGNPGSPADRGIALPFSQQCASALGLGCYVAAADIQDLVSCLACLESVFSRFYGLGGSSTSPVVPASLHGLLSAALQAWALLLTICPSTQISHILDRQLPRLPQLLSSESVNLRIAAGETIALLFELARDLEVRGTRMGGAW

SEQ ID NO: 11054 - protein, 112 aa, Homo sapiens
LRLALASRLLPDFLLERRLTLADALEKCLKKGKGEEQALAAAVLGLLCVQLGPGPKGEELFHSLQPLLVSVLSDSTASPAARLHCASALGLGCYVAAADIQAAAPAAPALVQ

SEQ ID NO: 11055 - protein, 139 aa, Homo sapiens
MPQPSQHHCRGQPCAKTRQGALESLRLALASRLLPDFLLERRLTLADALEKCLKKGKGEEQALAAAVLGLLCVQLGPGPKGEELFHSLQPLLVSVLSDSTASPAARLHCASALGLGCYVAAADIQVRGLWAQVVEHLGL

SEQ ID NO: 11056 - protein, 189 aa, Homo sapiens
VWLPSSGQVSAQRTGRRLVGLEPTPTGSLTPRPPRPVPGMPRARKGNTLRKGGQRRGGGARSSAQADSGSSDDEAASEARSTASECPSLLSTTAEDSLGGDVVDEQGQQEDLEEKLKEYVDCLTDKSAKTRQGALESLRLALASRLLPDFLLERRLTLADALEKCLKKGWTWGCVGDLNWADTGPCCMG

SEQ ID NO: 11057 - protein, 93 aa, Homo sapiens
LEPTPTGSLTPRPPRPVPGMPRARKGNTLRKGGQRRGGGARSSAQADSGSSDDEAASEARSTASECPSLLSTTAEDSLVPRPGRVLLRACAWP

SEQ ID NO: 11058 - protein, 121 aa, Homo sapiens
VWLPSSGQVSAQRTGRRLVGLEPTPTGSLTPRPPRPVPGMPRARKGNTLRKGGQRRGGGARSSAQADSGSSDDEAASEARSTASECPSLLSTTAEDSLGESGWKFDRGLVRAPWAEDKKRC

SEQ ID NO: 11059 - protein, 44 aa, Homo sapiens
LFGRAGRLAKMVARVACGSRRLAKSQRSAPAGVSLAWSPHPPGP

SEQ ID NO: 11060 - protein, 62 aa, Homo sapiens
LYGAICPPSPSRTLEGTSAPAGLGPPLSLLQASWCLHTSGSWPRKSQQEQGMGEGRCHTTWR

SEQ ID NO: 11061 - protein, 29 aa, Homo sapiens
LVPSSRRRPAESPLRSRRCRGDMVLCVQG

SEQ ID NO: 11062 - protein, 92 aa, Homo sapiens
VGAGSATLGPGISAAASSRDRLSCPSPVPQQGALPPGATRSARLGPPLSAPRGPWMVKQQRSRGALCPRQLHPADPAWAVLRGGGGSPRSTQ

SEQ ID NO: 11063 - protein, 495 aa, Homo sapiens
LGGFSCHVSSAAAATRLVGSMSATAAARKRGKPASGAGAGAGAGKRRRKADSAGDRGKSKGGGKMNEEISSDSESESLAPRKPEEEEEEELEETAQEKKLRLAKLYLEQLRQQEEEKAEARAFEEDQVAGRLKEDVLEQRGRLQKLVAKEIQAPASADIRVLRGHQLSITCLVVTPDDSAIFSAAKDCSIIKWSVESGRKLHVIPRAKKGAEGKPPGHSSHVLCMAISSDGKYLASGDRSKLILIWEAQSCQHLYTFTGHRDAVSGLAFRRGTHQLYSTSHDRSVKVWNVAENSYVETLFGHQDAVAALDALSRECCVTAGGRDGTVRVWKIPEESQLVFYGHQGSIDCIHLINEEHMVSGADDGSVALWGLSKKRPLALQREAHGLRGEPGLEQPFWISSVAALLNTDLVATGSHSSCVRLWQCGEGFRQLDLLCDIPLVGFINSLKFSSSGDFLVAGVGQEHRLGRWWRIKEARNSVCIIPLRRVPVPPAAGS

SEQ ID NO: 11064 - protein, 151 aa, Homo sapiens
MWGCQAPLSRLPASGETPMSQSWLVSPLATRPSFTARCSHSTRHTGWRWCCFMERPLTLTRGSSWAHCSYCHRGATGPWPLTFQVAPGYVVTVLTWPGTNPTLSSILLNSHTDVVPVFKEHWSHDPFEAFKDSEGYIYARGAQDMKCVSIQ

SEQ ID NO: 11065 - protein, 336 aa, Homo sapiens
MWGCQAPLSRLPASGETPMSQSWLVSPLATRPSFTARCSHSTRHTGWRWCCFMERPLTLTRGSSWAHCSYCHRGATGPWPLTFQLTTRSAMTSKGPEEEHPSVTLFRQYLRIRTVQPKPDYGAAVAFFEETARQLGLGCQKVEVAPGYVVTVLTWPGTNPTLSSILLNSHTDVVPVFKEHWSHDPFEAFKDSEGYIYARGAQDMKCVSIQYLEAVRRLKVEGHRFPRTIHMTFVPDEEVGGHQGMELFVQRPEFHALRAGFALDEGIANPTDAFTVFYSERSPWCKYELGGRAHSTGGRLGQKGHGPMQGCTAKLRPEKALNPGPLPPSSFLSELL

SEQ ID NO: 11066 - protein, 313 aa, Homo sapiens
MTSKGPEEEHPSVTLFRQYLRIRTVQPKPDYGAAVAFFEETARQLGLGCQKVEVAPGYVVTVLTWPGTNPTLSSILLNSHTDVVPVFKEHWSHDPFEAFKDSEGYIYARGAQDMKCVSIQYLEAVRRLKVEGHRFPRTIHMTFVPDEEVGGHQGMELFVQRPEFHALRAGFALDEGIANPTDAFTVFYSERSPWWVRVTSTGRPGHASRFMEDTAAEKLHKVVNSILAFREKEWQRLQSNPHLKEGSVTSVNLTKLEGGVAYNVIPATMSASFDFRVAPDVDFKAFEEQLQSWCQAAGEGVTLEFAQVWTWDM

SEQ ID NO: 11067 - protein, 75 aa, Homo sapiens
LSSPSLTMVAPGYVVTVLTWPGTNPTLSSILLNSHTDVVPVFKEHWSHDPFEAFKDSEGYIYARGAQDMKCVSIQ

SEQ ID NO: 11068 - protein, 201 aa, Homo sapiens
LSSPSLTMVAPGYVVTVLTWPGTNPTLSSILLNSHTDVVPVFKEHWSHDPFEAFKDSEGYIYARGAQDMKCVSIQYLEAVRRLKVEGHRFPRTIHMTFVPDEEVGGHQGMELFVQRPEFHALRAGFALDEGIANPTDAFTVFYSERSPWCKYELGGRAHSTGGRLGQKGHGPMQGCTAKLRPEKALNPGPLPPSSFLSELL

SEQ ID NO: 11069 - protein, 150 aa, Homo sapiens
LSSPSLTMVAPGYVVTVLTWPGTNPTLSSILLNSHTDVVPVFKEHWSHDPFEAFKDSEGYIYARGAQDMKCVSIQYLEAVRRLKVEGHRFPRTIHMTFVPDEEVGGHQGMELFVQRPEFHALRAGFALDEGIANPTDAFTVFYSERSPWC

SEQ ID NO: 11070 - protein, 190 aa, Homo sapiens
LSSPSLTMVAPGYVVTVLTWPGTNPTLSSILLNSHTDVVPVFKEHWSHDPFEAFKDSEGYIYARGAQDMKCVSIQYLEAVRRLKVEGHRFPRTIHMTFVPDEEVGGHQGMELFVQRPEFHALRAGFALDEGIANPTDAFTVFYSERSPWWVRVTSTGRPGHASRFMEDTAAEKLVRGTPGGSLGVQEALS

SEQ ID NO: 11071 - protein, 102 aa, Homo sapiens
LSESRGEPGALSGEGRWAWALPHPAQTTYPPDHLQVAPGYVVTVLTWPGTNPTLSSILLNSHTDVVPVFKEHWSHDPFEAFKDSEGYIYARGAQDMKCVSIQ

SEQ ID NO: 11072 - protein, 217 aa, Homo sapiens
LSESRGEPGALSGEGRWAWALPHPAQTTYPPDHLQVAPGYVVTVLTWPGTNPTLSSILLNSHTDVVPVFKEHWSHDPFEAFKDSEGYIYARGAQDMKCVSIQYLEAVRRLKVEGHRFPRTIHMTFVPDEEVGGHQGMELFVQRPEFHALRAGFALDEGIANPTDAFTVFYSERSPWWVRVTSTGRPGHASRFMEDTAAEKLVRGTPGGSLGVQEALS

SEQ ID NO: 11073 - protein, 131 aa, Homo sapiens
LAVALRVDPKFLRNMRFAKKHNKKGLKKMQANNAKAMSARAEAIKALVKPKEVKPKIPKGVSRKLDRLAYIAHPKLGKRARARIAKGLRLCRPKAKAKAKAKDQTKAQAAAPASVPAQAPKRTQAPTKASE

SEQ ID NO: 11074 - protein, 23 aa, Homo sapiens
VAYCSSGIGTPSRAASHPWPSLT

SEQ ID NO: 11075 - protein, 427 aa, Homo sapiens
LRGRVLALGKPLPHPGFTHLTLALSQEDPSLERHFKGHRDAVTCVDFSINTKQLASGSMDSCLMVWHMKPQSRAYRFTGHKDAVTCVNFSPSGHLLASGSRDKTVRIWVPNVKGESTVFRAHTATVRSVHFCSDGQSFVTASDDKTVKVWATHRQKFLFSLSQHINWVRCAKFSPDGRLIVSASDDKTVKLWDKSSRECVHSYCEHGGFVTYVDFHPSGTCIAAAGMDNTVKVWDVRTHRLLQHYQLHSAAVNGLSFHPSGNYLITASSDSTLKILDLMEGRLLYTLHGHQGPATTVAFSRTGEYFASGGSDEQVMVWKSNFDIVDHGEVTKVPRPPATLASSMGNLPEVDFPVPPGRGRSVESVQSQPQEPVSVPQTLTSTLEHIVGQLDVLTQTVSILEQRLTLTEDKLKQCLENQQLIMQRATP

SEQ ID NO: 11076 - protein, 3190 aa, Homo sapiens
LDSGKVAPPSGLEGSFGWGISLRSSMEQPNSKGYSLGRTPQGPECSSAPAVQVGTHRGLEYNPGKILPGSDYGLGNPPALDPKLPHLPLPPAPPTLSDLGQPRKSPLTGTDKKYPLMKQRGFYSDILSPGTLDQLGEVCRGPRMSQNLLRQADLDKFTPRVGSFEVPEDFQERMEQQCIGSTTRLLAQTDFPLQAYEPKMQVPFQVLPGQHPRKIEIERRKQQYLSLDIEQLLFSQGIDSNKLMPRHLDHQHPQTIEQGHDPIFPIYLPLKVFDNEDFDCRTPREWINMGLEPGSLDRKPVPGKALLPTDDFLGHEDPKSQKLKYKWCEVGVLDYDEEKKLYLVHKTDEKGLVRDEMGRPILNAGVTTEGRPPLQVCQYWVPRIQLLFCAEDPCMFAQRVVQANALRKNTEALLLYNLYVDCMPSDGQHVISEQSLSKIKQWALSTPRMRKGPSVLEHLSSLAREVSLDYERSMNKINFDHVVSSKPETFSYVTLPKKEEEQVPERGLVSVPKYHFWEQKEDFTFVSLLTRPEVITALSKVRAECNKVTAMSLFHSSLSKYSHLEEFEQIQSQTFSQVQMFLKDSWISSLKVAMRSSLRDMSKGWYNLYETNWEVYLMSKLRKLMELVKYMLQDTLRFLVQDSLASFSQFISDTCCSVLNCTDDMVWGDDLINSPYRPRKNPLFIMDLVLDSSGVHYSTPLEQFEASLLNLFDKGILATHAVPQLEKLVMEDIFISGDPLLESVGLHEPLVEELRATIASAVSKAMIPLQAYAKEYRKYLELNNNDIASFLKTYQTQGLLAQEVREVVLTHLREKEILDSSLPSSIIIGPFYINTDNVKQSLSKKRKALATSVLDILAKNLHKEVDSICEEFRSISRKIYEKPNSIEELAELREWMKGIPERLVGLEERIVKVMDDYQVMDEFLYNLSSDDFNDKWIASNWPSKILGQIELVQQQHVEDEEKFRKIQIMDQNNFQEKLEGLQLVVAGFSIHVEISRAHEIANEVRRVKKQLKDCQQLAMLYNNRERIFSLPITNYDKLSRMVKEFQPYLDLWTTASDWLRWSESWMNDPLSAIDAEQLEKNVVEAFKTMHKCVKQFKDMPACQEVALDIRARIEEFKPYIPLIQGLRNPGMRIRHWETLSNQININVRPKANLTFARCLEMNLQDHIESISKVAEVAGKEYAIEQALDKMEKEWSTILFNVLPYKATDTYILKSPDEASQLLDDHIVMTQNMSFSPYKKPFEQRINSWENKLKLTQEVLEEWLNCQRSWLYLEPIFSSEDINQQLPVESKRYQTMERIWKKIMKNAYENREVINVCSDLRMLDSLRDCNKILDLVQKGLSEYLETKRSAFPRFYFLSDDELLEILSQTKDPTAVQPHLRKCFENIARLLFQEDLEITHMYSAEGEEVQLCFSIYPSSNVEDWLREVERSMKASVHDIIEKAIRAYPTMPRTQWVLNWPGQVTIAGCQTYWTMEVAEALEAGNLRSQLFPQLCQQLSDLVALVRGKLSRMQRAVLSALIVIEVHAKDVVSKLIQENVVSVNDFQWISQLRYYWTNNDLYIRAVNAEFIYGYEYLGNSGRLVITPLTDRCYLTLTGALHLKFGGAPAGPAGTGKTETTKDLGKALAIQTVVFNCSDQLDFMAMGKFFKGLASAGAWACFDEFNRIDIEVLSVVAQQITTIQKAQQQRVERFMFEGVEIPLVPSCAVFITMNPGYAGRTELPDNLKALFRPVAMMVPDYAMITEISLYSFGFNEASVLAKKITTTFKLSSEQLSSQDHYDFGMRAVKTVISAAGNLKRENPSMNEELICLRAIRDVNVPKFLQEDLKLFSGIVSDLFPTIKEEDTDYGILDEAIREACRNSNLKDVEGFLTKCIQLYETTVVRHGLMLVGPTGSGKSTCYRVLAAAMTSLKGQPSISGGMYEAVNYYVLNPKSITMGQLYGEFDLLTHEWTDGIFSSFIRAGAITSDTNKKWYMFDGPVDAIWIENMNTVLDDNKKLCLSSGEIIKLTEAMTMMFEVQDLAVASPATVSRCGMVYLEPSILGLMPFIECWLRKLPPLLKPYEEHFKALFVSFLEESISFVRSSVKEVIASTNCNLTMSLLKLLDCFFKPFLPREGLKKIPSEKLSRIVELIEPWFIFSLIWSVGATGDSSGRTSFSHWLRLKMENEQLTLLFPEEGLVFDYRLEDAGISGTNDSEDEEEEYKQVAWVKWMDSSAPFTMVPDTNYCNIIVPTMDTVQMSHLLDMLLTNKKPVLCIGPTGTGKTLTISDKLLKNLALDYISHFLTFSARTSANQTQDFIDSKLDKRRKGVFGPPLGRNFIFFIDDLNMPALETYGAQPPIELLRQWMDHGGWYDRKIIGAFKNLVDINFVCAMGPPGGGRNTVTPRLMRHFNYLSFAEMDEVSKKRIFSTILGNWLDGLLGEKSYRERVPGAPHIAHFTEPLVEATIMVYATITSQLLPTPAKSHYTFNLRDLSKVFQGMLMADPAKVEDQVQLLRLWYHENCRVFRDRLVNEEDRSWFDQLLKRCMEQWEVTFNKVCPFQPILYGDFMSPGSDVKSYELITSESKMMQVIEEYIEDYNQINTAKLKLVLFMDAMSHICRISRTLRQALGNALLLGVGGSGRSSLTRLASHMAEYECFQIELSKNYGMSEWRDDVKKVLLKAGLQNLPITFLFSDTQIKNESFLEDINNVLNSGDIPNLYTADEQDQIVSTMRPYIQEQGLQPTKANLMAAYTGRVRSNIHMVLCMSPIGEVFRARLRQFPSLVNCCTIDWFNEWPAEALKSVATVFLNEIPELESSQEEIQGLIQVCVYIHQSVSKKCIEYLAELTRHNYVTPKSYLELLHIFSILIGQKKLELKTAKNRMKSGLDKLLRTSEDVAKMQEDLESMHPLLEEAAKDTMLTMEQIKVDTAIAEETRNSVQTEEIKANEKAKKAQAIADDAQKDLDEALPALDAALASLRNLNKNDVTEVRAMQRPPPGVKLVIEAVCIMKGIKPKKVPGEKPGTKVDDYWEPGKGLLQDPGHFLESLFKFDKDNIGDVVIKAIQPYIDNEEFQPATIAKVSKACTSICQWVRAMHKYHFVAKAVEPKRQALLEAQDDLGVTQRILDEAKQRLREVEDGIATMQAKYRECITKKEELELKCEQCEQRLGRAGKVRTLLLQGLQAGPAQTGARKDQGAGGSWGGCPHPLPGNPRCHSG

SEQ ID NO: 11077 - protein, 4290 aa, Homo sapiens
LDSGKVAPPSGLEGSFGWGISLRSSMEQPNSKGYSLGRTPQGPECSSAPAVQVGTHRGLEYNPGKILPGSDYGLGNPPALDPKLPHLPLPPAPPTLSDLGQPRKSPLTGTDKKYPLMKQRGFYSDILSPGTLDQLGEVCRGPRMSQNLLRQADLDKFTPRVGSFEVPEDFQERMEQQCIGSTTRLLAQTDFPLQAYEPKMQVPFQVLPGQHPRKIEIERRKQQYLSLDIEQLLFSQGIDSNKLMPRHLDHQHPQTIEQGHDPIFPIYLPLKVFDNEDFDCRTPREWINMGLEPGSLDRKPVPGKALLPTDDFLGHEDPKSQKLKYKWCEVGVLDYDEEKKLYLVHKTDEKGLVRDEMGRPILNAGVTTEGRPPLQVCQYWVPRIQLLFCAEDPCMFAQRVVQANALRKNTEALLLYNLYVDCMPSDGQHVISEQSLSKIKQWALSTPRMRKGPSVLEHLSSLAREVSLDYERSMNKINFDHVVSSKPETFSYVTLPKKEEEQVPERGLVSVPKYHFWEQKEDFTFVSLLTRPEVITALSKVRAECNKVTAMSLFHSSLSKYSHLEEFEQIQSQTFSQVQMFLKDSWISSLKVAMRSSLRDMSKGWYNLYETNWEVYLMSKLRKLMELVKYMLQDTLRFLVQDSLASFSQFISDTCCSVLNCTDDMVWGDDLINSPYRPRKNPLFIMDLVLDSSGVHYSTPLEQFEASLLNLFDKGILATHAVPQLEKLVMEDIFISGDPLLESVGLHEPLVEELRATIASAVSKAMIPLQAYAKEYRKYLELNNNDIASFLKTYQTQGLLAQEVREVVLTHLREKEILDSSLPSSIIIGPFYINTDNVKQSLSKKRKALATSVLDILAKNLHKEVDSICEEFRSISRKIYEKPNSIEELAELREWMKGIPERLVGLEERIVKVMDDYQVMDEFLYNLSSDDFNDKWIASNWPSKILGQIELVQQQHVEDEEKFRKIQIMDQNNFQEKLEGLQLVVAGFSIHVEISRAHEIANEVRRVKKQLKDCQQLAMLYNNRERIFSLPITNYDKLSRMVKEFQPYLDLWTTASDWLRWSESWMNDPLSAIDAEQLEKNVVEAFKTMHKCVKQFKDMPACQEVALDIRARIEEFKPYIPLIQGLRNPGMRIRHWETLSNQININVRPKANLTFARCLEMNLQDHIESISKVAEVAGKEYAIEQALDKMEKEWSTILFNVLPYKATDTYILKSPDEASQLLDDHIVMTQNMSFSPYKKPFEQRINSWENKLKLTQEVLEEWLNCQRSWLYLEPIFSSEDINQQLPVESKRYQTMERIWKKIMKNAYENREVINVCSDLRMLDSLRDCNKILDLVQKGLSEYLETKRSAFPRFYFLSDDELLEILSQTKDPTAVQPHLRKCFENIARLLFQEDLEITHMYSAEGEEVQLCFSIYPSSNVEDWLREVERSMKASVHDIIEKAIRAYPTMPRTQWVLNWPGQVTIAGCQTYWTMEVAEALEAGNLRSQLFPQLCQQLSDLVALVRGKLSRMQRAVLSALIVIEVHAKDVVSKLIQENVVSVNDFQWISQLRYYWTNNDLYIRAVNAEFIYGYEYLGNSGRLVITPLTDRCYLTLTGALHLKFGGAPAGPAGTGKTETTKDLGKALAIQTVVFNCSDQLDFMAMGKFFKGLASAGAWACFDEFNRIDIEVLSVVAQQITTIQKAQQQRVERFMFEGVEIPLVPSCAVFITMNPGYAGRTELPDNLKALFRPVAMMVPDYAMITEISLYSFGFNEASVLAKKITTTFKLSSEQLSSQDHYDFGMRAVKTVISAAGNLKRENPSMNEELICLRAIRDVNVPKFLQEDLKLFSGIVSDLFPTIKEEDTDYGILDEAIREACRNSNLKDVEGFLTKCIQLYETTVVRHGLMLVGPTGSGKSTCYRVLAAAMTSLKGQPSISGGMYEAVNYYVLNPKSITMGQLYGEFDLLTHEWTDGIFSSFIRAGAITSDTNKKWYMFDGPVDAIWIENMNTVLDDNKKLCLSSGEIIKLTEAMTMMFEVQDLAVASPATVSRCGMVYLEPSILGLMPFIECWLRKLPPLLKPYEEHFKALFVSFLEESISFVRSSVKEVIASTNCNLTMSLLKLLDCFFKPFLPREGLKKIPSEKLSRIVELIEPWFIFSLIWSVGATGDSSGRTSFSHWLRLKMENEQLTLLFPEEGLVFDYRLEDAGISGTNDSEDEEEEYKQVAWVKWMDSSAPFTMVPDTNYCNIIVPTMDTVQMSHLLDMLLTNKKPVLCIGPTGTGKTLTISDKLLKNLALDYISHFLTFSARTSANQTQDFIDSKLDKRRKGVFGPPLGRNFIFFIDDLNMPALETYGAQPPIELLRQWMDHGGWYDRKIIGAFKNLVDINFVCAMGPPGGGRNTVTPRLMRHFNYLSFAEMDEVSKKRIFSTILGNWLDGLLGEKSYRERVPGAPHIAHFTEPLVEATIMVYATITSQLLPTPAKSHYTFNLRDLSKVFQGMLMADPAKVEDQVQLLRLWYHENCRVFRDRLVNEEDRSWFDQLLKRCMEQWEVTFNKVCPFQPILYGDFMSPGSDVKSYELITSESKMMQVIEEYIEDYNQINTAKLKLVLFMDAMSHICRISRTLRQALGNALLLGVGGSGRSSLTRLASHMAEYECFQIELSKNYGMSEWRDDVKKVLLKAGLQNLPITFLFSDTQIKNESFLEDINNVLNSGDIPNLYTADEQDQIVSTMRPYIQEQGLQPTKANLMAAYTGRVRSNIHMVLCMSPIGEVFRARLRQFPSLVNCCTIDWFNEWPAEALKSVATVFLNEIPELESSQEEIQGLIQVCVYIHQSVSKKCIEYLAELTRHNYVTPKSYLELLHIFSILIGQKKLELKTAKNRMKSGLDKLLRTSEDVAKMQEDLESMHPLLEEAAKDTMLTMEQIKVDTAIAEETRNSVQTEEIKANEKAKKAQAIADDAQKDLDEALPALDAALASLRNLNKNDVTEVRAMQRPPPGVKLVIEAVCIMKGIKPKKVPGEKPGTKVDDYWEPGKGLLQDPGHFLESLFKFDKDNIGDVVIKAIQPYIDNEEFQPATIAKVSKACTSICQWVRAMHKYHFVAKAVEPKRQALLEAQDDLGVTQRILDEAKQRLREVEDGIATMQAKYRECITKKEELELKCEQCEQRLGRAGKLINGLSDEKVRWQETVENLQYMLNNISGDVLVAAGFVAYLGPFTGQYRTVLYDSWVKQLRSHNVPHTSEPTLIGTLGNPVKIRSWQIAGLPNDTLSVENGVINQFSQRWTHFIDPQSQANKWIKNMEKDNGLDVFKLSDRDFLRSMENAIRFGKPCLLENVGEELDPALEPVLLKQTYKQQGNTVLKLGDTVIPYHEDFRMYITTKLPNPHYTPEISTKLTLINFTLSPSGLEDQLLGQVVAEERPDLEEAKNQLIISNAKMRQELKDIEDQILYRLSSSEGNPVDDMELIKVLEASKMKAAEIQAKVRIAEQTEKDIDLTRMEYIPVAIRTQILFFCVSDLANVDPMYQYSLEWFLNIFLSGIANSERADNLKKRISNINRYLTYSLYSNVCRSLFEKHKLMFAFLLCVRIMMNEGKINQSEWRYLLSGGSISIMTENPAPDWLSDRAWRDILALSNLPTFSSFSSDFVKHLSEFRVIFDSLEPHREPLPGIWDQYLDQFQKLLVLRCLRGDKVTNAMQDFVATNLEPRFIEPQTANLSVVFKDSNSTTPLIFVLSPGTDPAADLYKFAEEMKFSKKLSAISLGQGQGPRAEAMMRSSIERGKWVFFQNCHLAPSWMPALERLIEHINPDKVHRDFRLWLTSLPSNKFPVSILQNGSKMTIEPPRGVRANLLKSYSSLGEDFLNSCHKVMEFKSLLLSLCLFHGNALERRKFGPLGFNIPYEFTDGDLRICISQLKMFLDEYDDIPYKVLKYTAGEINYGGRVTDDWDRRCIMNILEDFYNPDVLSPEHSYSASGIYHQIPPTYDLHGYLSYIKSLPLNDMPEIFGLHDNANITFAQNETFALLGTIIQLQPKSSSAGSQGREEIVEDVTQNILLKVPEPINLQWVMAKYPVLYEESMNTVLVQEVIRYNRLLQVITQTLQDLLKALKGLVVMSSQLELMAASLYNNTVPELWSAKAYPSLKPLSSWVMDLLQRLDFLQAWIQDGIPAVFWISGFFFPQAFLTGTLQNFARKFVISIDTISFDFKVMFEAPSELTQRPQVGCYIHGLFLEGARWDPEAFQLAESQPKELYTEMAVIWLLPTPNRKAQDQDFYLCPIYKTLTRAGTLSTTGHSTNYVIAVEIPTHQPQRHWIKRGVALICALDY

SEQ ID NO: 11078 - protein, 1143 aa, Homo sapiens
LARCAPSSCKACKRARPRQGPERTRAPVGPGVAVHTPSLATPGATVGRASPRPLAQPPRAHPTGLPLQLINGLSDEKVRWQETVENLQYMLNNISGDVLVAAGFVAYLGPFTGQYRTVLYDSWVKQLRSHNVPHTSEPTLIGTLGNPVKIRSWQIAGLPNDTLSVENGVINQFSQRWTHFIDPQSQANKWIKNMEKDNGLDVFKLSDRDFLRSMENAIRFGKPCLLENVGEELDPALEPVLLKQTYKQQGNTVLKLGDTVIPYHEDFRMYITTKLPNPHYTPEISTKLTLINFTLSPSGLEDQLLGQVVAEERPDLEEAKNQLIISNAKMRQELKDIEDQILYRLSSSEGNPVDDMELIKVLEASKMKAAEIQAKVRIAEQTEKDIDLTRMEYIPVAIRTQILFFCVSDLANVDPMYQYSLEWFLNIFLSGIANSERADNLKKRISNINRYLTYSLYSNVCRSLFEKHKLMFAFLLCVRIMMNEGKINQSEWRYLLSGGSISIMTENPAPDWLSDRAWRDILALSNLPTFSSFSSDFVKHLSEFRVIFDSLEPHREPLPGIWDQYLDQFQKLLVLRCLRGDKVTNAMQDFVATNLEPRFIEPQTANLSVVFKDSNSTTPLIFVLSPGTDPAADLYKFAEEMKFSKKLSAISLGQGQGPRAEAMMRSSIERGKWVFFQNCHLAPSWMPALERLIEHINPDKVHRDFRLWLTSLPSNKFPVSILQNGSKMTIEPPRGVRANLLKSYSSLGEDFLNSCHKVMEFKSLLLSLCLFHGNALERRKFGPLGFNIPYEFTDGDLRICISQLKMFLDEYDDIPYKVLKYTAGEINYGGRVTDDWDRRCIMNILEDFYNPDVLSPEHSYSASGIYHQIPPTYDLHGYLSYIKSLPLNDMPEIFGLHDNANITFAQNETFALLGTIIQLQPKSSSAGSQGREEIVEDVTQNILLKVPEPINLQWVMAKYPVLYEESMNTVLVQEVIRYNRLLQVITQTLQDLLKALKGLVVMSSQLELMAASLYNNTVPELWSAKAYPSLKPLSSWVMDLLQRLDFLQAWIQDGIPAVFWISGFFFPQAFLTGTLQNFARKFVISIDTISFDFKVPAGIQRPSSWLSLSPRSCTQRWPLSGSCQHPTARPRTRTFTCAPSTRH

SEQ ID NO: 11079 - protein, 1212 aa, Homo sapiens
LARCAPSSCKACKRARPRQGPERTRAPVGPGVAVHTPSLATPGATVGRASPRPLAQPPRAHPTGLPLQLINGLSDEKVRWQETVENLQYMLNNISGDVLVAAGFVAYLGPFTGQYRTVLYDSWVKQLRSHNVPHTSEPTLIGTLGNPVKIRSWQIAGLPNDTLSVENGVINQFSQRWTHFIDPQSQANKWIKNMEKDNGLDVFKLSDRDFLRSMENAIRFGKPCLLENVGEELDPALEPVLLKQTYKQQGNTVLKLGDTVIPYHEDFRMYITTKLPNPHYTPEISTKLTLINFTLSPSGLEDQLLGQVVAEERPDLEEAKNQLIISNAKMRQELKDIEDQILYRLSSSEGNPVDDMELIKVLEASKMKAAEIQAKVRIAEQTEKDIDLTRMEYIPVAIRTQILFFCVSDLANVDPMYQYSLEWFLNIFLSGIANSERADNLKKRISNINRYLTYSLYSNVCRSLFEKHKLMFAFLLCVRIMMNEGKINQSEWRYLLSGGSISIMTENPAPDWLSDRAWRDILALSNLPTFSSFSSDFVKHLSEFRVIFDSLEPHREPLPGIWDQYLDQFQKLLVLRCLRGDKVTNAMQDFVATNLEPRFIEPQTANLSVVFKDSNSTTPLIFVLSPGTDPAADLYKFAEEMKFSKKLSAISLGQGQGPRAEAMMRSSIERGKWVFFQNCHLAPSWMPALERLIEHINPDKVHRDFRLWLTSLPSNKFPVSILQNGSKMTIEPPRGVRANLLKSYSSLGEDFLNSCHKVMEFKSLLLSLCLFHGNALERRKFGPLGFNIPYEFTDGDLRICISQLKMFLDEYDDIPYKVLKYTAGEINYGGRVTDDWDRRCIMNILEDFYNPDVLSPEHSYSASGIYHQIPPTYDLHGYLSYIKSLPLNDMPEIFGLHDNANITFAQNETFALLGTIIQLQPKSSSAGSQGREEIVEDVTQNILLKVPEPINLQWVMAKYPVLYEESMNTVLVQEVIRYNRLLQVITQTLQDLLKALKGLVVMSSQLELMAASLYNNTVPELWSAKAYPSLKPLSSWVMDLLQRLDFLQAWIQDGIPAVFWISGFFFPQAFLTGTLQNFARKFVISIDTISFDFKVMFEAPSELTQRPQVGCYIHGLFLEGARWDPEAFQLAESQPKELYTEMAVIWLLPTPNRKAQDQDFYLCPIYKTLTRAGTLSTTGHSTNYVIAVEIPTHQPQRHWIKRGVALICALDY

SEQ ID NO: 11080 - protein, 559 aa, Homo sapiens
VGMAGAGLRAAARRWLLCGGHGGPRAASSSPSCPGCGPPGPGAHCPGVPRSAPAQAPTSGADLSAHLWARYQDMRRLVHDLLPPEVCSLLNPAAIYANNEISLRDVEVYGFDYDYTLAQYADALHPEIFSTARDILIEHYKYPEGIRKYDYNPSFAIRGLHYDIQKSLLMKIDAFHYVQLGTAYRGLQPVPDEEVIELYGGTQHIPLYQMSGFYGKGPSIKQFMDIFSLPEMALLSCVVDYFLGHSLEFDQAHLYKDVTDAIRDVHVKGLMYQWIEQDMEKYILRGDETFAVLSRLVAHGKQLFLITNSPFSFVDKGMRHMVGPDWRQLFDVVIVQADKPSFFTDRRKPFRKLDEKGSLQWDRITRLEKGKIYRQGNLFDFLRLTEWRGPRVLYFGDHLYSDLADLMLRHGWRTGAIIPELEREIRIINTEQYMHSLTWQQALTGLLERMQTYQDAESRQVLAAWMKERQELRCITKALFNAQFGSIFRTFHNPTYFSRRLVRFSDLYMASLSCLLNYRVDFTFYPRRTPLQHEAPLWMDQLCTGCMKTPFLGDMAHIR

SEQ ID NO: 11081 - protein, 534 aa, Homo sapiens
VGMAGAGLRAAARRWLLCGGHGGPRAASSSPSCPGCGPPGPGAHCPGVPRSAPAQAPTSGADLSAHLWARYQDMRRLVHDLLPPEVCSLLNPAAIYANNEISLRDVEVYGFDYDYTLAQYADALHPEIFSTARDILIEHYKSLLMKIDAFHYVQLGTAYRGLQPVPDEEVIELYGGTQHIPLYQMSGFYGKGPSIKQFMDIFSLPEMALLSCVVDYFLGHSLEFDQAHLYKDVTDAIRDVHVKGLMYQWIEQDMEKYILRGDETFAVLSRLVAHGKQLFLITNSPFSFVDKGMRHMVGPDWRQLFDVVIVQADKPSFFTDRRKPFRKLDEKGSLQWDRITRLEKGKIYRQGNLFDFLRLTEWRGPRVLYFGDHLYSDLADLMLRHGWRTGAIIPELEREIRIINTEQYMHSLTWQQALTGLLERMQTYQDAESRQVLAAWMKERQELRCITKALFNAQFGSIFRTFHNPTYFSRRLVRFSDLYMASLSCLLNYRVDFTFYPRRTPLQHEAPLWMDQLCTGCMKTPFLGDMAHIR

SEQ ID NO: 11082 - protein, 52 aa, Homo sapiens
VRAAGAEATAAAAAGGAIAAAVAATGRGAAVGDRGRGCRRRSGWLANTWCHM

SEQ ID NO: 11083 - protein, 29 aa, Homo sapiens
VRDARQWLQFTRGASGGRLMCLCFLLQPI

SEQ ID NO: 11084 - protein, 8 aa, Homo sapiens
MKNYKIQL

SEQ ID NO: 11085 - protein, 118 aa, Homo sapiens
LLGDGELSEGSVWEAMAFASIYKLDNLVAILDINRLGQSDPAPLQHQMDIYQKRCEAFGWHAIIVDGHSVEELCKAFGQAKHQPTAIIAKTFKGRGITGQYAQAALPTFTPRPDTVAT

SEQ ID NO: 11086 - protein, 172 aa, Homo sapiens
MRYKSQDPRNPHNDRFVLSKGHAAPILYAVWAEAGFLAEAELLNLRKISSDLDGHPVPKQAFTDVATGSLGQGLGAACGMAYTGKYFDKASYRVYCLLGDGELSEGSVWEAMAFASIYKLDNLVAILDINRLGQSDPAPLQHQMDIYQKRCEAFGYVRGCGLSVVTARESGL

SEQ ID NO: 11087 - protein, 28 aa, Homo sapiens
MAYTGKYFDKASYRVYCLLGGHGLRQHL

SEQ ID NO: 11088 - protein, 23 aa, Homo sapiens
LEQNKSKGRAPASETNRLHHGNF

SEQ ID NO: 11089 - protein, 156 aa, Homo sapiens
MMGNKAKIAKCPLRTKTGHILKSTQDTCIGSEKLLQKKPVGSETSQAKGEKNGMTFSSTKDLCKQCIDKDCLHIQKEISPATPNMQKTRNTVNTSLVGKQKPHKKHITAENMKSSLVCLTQDQLQQILMTVNQGNRSLSLTENGKEAKSKIFLKFS

SEQ ID NO: 11090 - protein, 155 aa, Homo sapiens
LMGNKAKIAKCPLRTKTGHILKSTQDTCIGSEKLLQKKPVGSETSQAKGEKNGMTFSSTKDLCKQCIDKDCLHIQKEISPATPNMQKTRNTVNTSLVGKQKPHKKHITAENMKSSLVCLTQDQLQQILMTVNQGNRSLSLTENGKEAKTGHRDNS

SEQ ID NO: 11091 - protein, 148 aa, Homo sapiens
VSLHCLLDQFDKDLPVYLKKDPAYFYGYVYFRQVRDKTLKRGYFQKSLVLISKLPYIHFFHTVLKQIAPEYFEKNEPYLEAACNDVDRWPAPVPGKTLHLPIMGVVMKVRIPTCHDKPGTTQIVQLTQQVDTNISVILPTVHEVDIFR

SEQ ID NO: 11092 - protein, 98 aa, Homo sapiens
LHCVCVVGFDLELGQAVEVIYPQHSKLTDREKTNICYLSFPDSNSGCLGDTQFCFRFRQSSGRRVSLHCLLDQFDKDLPVYLKVGKVVIGKCPCERKL

SEQ ID NO: 11093 - protein, 1053 aa, Homo sapiens
MVAGLFVTHQWKPIALGDGCGPISDSAKGGVKVRPGSSLNLSSLSSGLVEPVNVVDNGDGTHTVTYTPSQEGPYMVSVKYADEEIPRSPFKVKVLPTYDASKVTASGPGLSSYGVPASLPVDFAIDARDAGEGLLAVQITDQEGKPKRAIVHDNKDGTYAVTYIPDKTGRYMIGVTYGGDDIPLSPYRIRATQTGDASKCLATGPGIASTVKTGEEVGFVVDAKTAGKGKVTCTVLTPDGTEAEADVIENEDGTYDIFYTAAKPGTYVIYVRFGGVDIPNSPFTVMVTEEAYVPVSDMNGLGFKPFDLVIPFAVRKGEITGEVHMPSGKTATPEIVDNKDGTVTVRYAPTEVGLHEMHIKYMGSHIPESPLQFYVNYPNSGSVSAYGPGLVYGVANKTATFTIVTEDAGEGGLDLAIEGPSKAEISCIDNKDGTCTVTYLPTLPGDYSILVKYNDKHIPGSPFTAKITDDSRRCSQVKLGSAADFLLDISETDLSSLTASIKAPSGRDEPCLLKRLPNNHIGISFIPREVGEHLVSIKKNGNHVANSPVSIMVVQSEIGDARRAKVYGRGLSEGRTFEMSDFIVDTRDAGYGGISLAVEGPSKVDIQTEDLEDGTCKVSYFPTVPGVYIVSTKFADEHVPGSPFTVKISGEGRVKESITRTSRAPSVATVGSICDLNLKIPEINSSDMSAHVTSPSGRVTEAEIVPMGKNSHCVRFVPQEMGVHTVSVKYRGQHVTGSPFQFTVGPLGEGGAHKVRAGGPGLERGEAGVPAEFSIWTREAGAGGLSIAVEGPSKAEITFDDHKNGSCGVSYIAQEPGNYEVSIKFNDEHIPESPYLVPVIAPSDDARRLTVMSLQESGLKVNQPASFAIRLNGAKGKIDAKVHSPSGAVEECHVSELEPDKYAVRFIPHENGVHTIDVKFNGSHVVGSPFKVRVGEPGQAGNPALVSAYGTGLEGGTTGIQSEFFINTTRAGPGTLSVTIEGPSKVKMDCQETPEGYKVMYTPMAPGNYLISVKYGGPNHIVGSPFKAKVTGNEQPPSELLSLPGELVVSDQS

SEQ ID NO: 11094 - protein, 117 aa, Homo sapiens
MSLQESGLKVNQPASFAIRLNGAKGKIDAKVHSPSGAVEECHVSELEPDKYAVRFIPHENGVHTIDVKFNGSHVVGSPFKVRVGEPGQAGNPALVSAYGTGLEGGTTGNPLFCFLKP

SEQ ID NO: 11095 - protein, 207 aa, Homo sapiens
MDCQETPEGYKVMYTPMAPGNYLISVKYGGPNHIVGSPFKAKVTGQRLVSPGSANETSSILVESVTRSSTETCYSAIPKASSDASKVTSKGAGLSKAFVGQKSSFLVDCSKAGSNMLLIGVHGPTTPCEEVSMKHVGNQQYNVTYVVKERGDYVLAVKWGRNTSLAALFMSQCLKTVFSNPGESSCGCFCCLFVIHFIQSPPACLWG

SEQ ID NO: 11096 - protein, 143 aa, Homo sapiens
LAIHACPPPSCILGQRLVSPGSANETSSILVESVTRSSTETCYSAIPKASSDASKVTSKGAGLSKAFVGQKSSFLVDCSKAGSNMLLIGVHGPTTPCEEVSMKHVGNQQYNVTYVVKERGDYVLAVKWGEEHIPGSPFHVTVP

SEQ ID NO: 11097 - protein, 24 aa, Homo sapiens
MSCLQFWRPSEHFTRPLSVSVQCL

SEQ ID NO: 11098 - protein, 203 aa, Homo sapiens
MTPSVKVEKIHPKMDGTLLKSAVGPTCPATVSSLVKPGLNCPSIPKPTLPSPGQILNGKGLPAPPTLEKKPEDNSNNRKFLNKRLSEREFDPDIHCGVIDLDTKKPCTRSLTCKTHSLTQRRAVQGRRKRFDVLLAEHKNKTREKELIRHPDSQQPPQPLRDPHPAPPRTSQEPHQNPHGVIPSESKPFVASKPKPHTPSLPR

SEQ ID NO: 11099 - protein, 119 aa, Homo sapiens
LTEREFDPDIHCGVIDLDTKKPCTRSLTCKTHSLTQRRAVQGRRKRFDVLLAEHKNKTREKELIRHPDSQQPPQPLRDPHPAPPRTSQEPHQNPHGVIPSESKPFVASKPKPHTPSLPR

SEQ ID NO: 11100 - protein, 68 aa, Homo sapiens
LSAAVPFAAMPLENLEEEGLPKNPDLRIAQLRFLLSLPEHRGDAAVRDELMAAVRDNSEARTSAESAA

SEQ ID NO: 11101 - protein, 609 aa, Homo sapiens
LESGPHREMAASADLSKSSPTPNGIPSSDPASDAMDPFHACSILKQLKTMYDEGQLTDIVVEVDHGKTFSCHRNVLAAISPYFRSMFTSGLTESTQKEVRIVGVEAESMDLVLNYAYTSRVILTEANVQALFTAASIFQIPSIQDQCAKYMISHLDPQNSIGVFIFADHYGHQELGDRSKEYIRKKFLCVTKEQEFLQLTKDQLISILDSDDLNVDREEHVYESIIRWFEHEQNEREVHLPEIFAKCIRFPLMEDTFIEKIPPQFAQAIAKSCVEKGPSNTNGCTQRLGMTASEMIICFDAAHKHSGKKQTVPCLDIVTGRVFKLCKPPNDLREVGILVSPDNDIYIAGGYRPSSSEVSIDHKAENDFWMYDHSTNRWLSKPSLLRARIGCKLVYCCGKMYAIGGRVYEGDGRNSLKSVECYDSRENCWTTVCAMPVAMEFHNAVEYKEKIYVLQGEFFLFYEPQKDYWGFLTPMTVPRIQGLAAVYKDSIYYIAGTCGNHQRMFTVEAYDIELNKWTRKKDFPCDQSINPYLKLVLFQNKLHLFVRATQVTVEEHVFRTSRKNSLYQYDDIADQWMKVYETPDRLWDLGRHFECAVAKLYPQCLQKVL

SEQ ID NO: 11102 - protein, 20 aa, Homo sapiens
LLYSLEDFHYVLTTLKCVNS

SEQ ID NO: 11103 - protein, 44 aa, Homo sapiens
LKKIYTVQTVQIFWSVYNNIPPVTSLPLRCSYHLMRGERRPLCP

SEQ ID NO: 11104 - protein, 9 aa, Homo sapiens
LEQSECQNG

SEQ ID NO: 11105 - protein, 10 aa, Homo sapiens
MGEQSECQNG

SEQ ID NO: 11106 - protein, 23 aa, Homo sapiens
MGGDRLENKTSVSVASWSECQNG

SEQ ID NO: 11107 - protein, 39 aa, Homo sapiens
LQRLFSKGSFRLCSSPAQYSGGLGGGLKRRALGRRHCSR

SEQ ID NO: 11108 - protein, 10 aa, Homo sapiens
VMFCPRRDLS

SEQ ID NO: 11109 - protein, 99 aa, Homo sapiens
VVLVCRVMTSFRLALIQLQISSIKSDNVTRACSFIREAATQGAKIVSLPECFNSPYGAKYFPEYAEKIPGESTQKLSEVAKECSIYLIGGNFLPTRLYP

SEQ ID NO: 11110 - protein, 165 aa, Homo sapiens
LSFRGAVAMKVELCSFSGYKIYPGHGRRYARTDGKVFQFLNAKCESAFLSKRNPRQINWTVLYRRKHKKGQSEEIQKKRTRRAVKFQRAITGASLADIMAKRNQKPEVRKAQREQAIRAAKEAKKAKQASKKTAMAAAKAPTKAAPKQKIVKPVKVSAPRVGGKR

SEQ ID NO: 11111 - protein, 129 aa, Homo sapiens
LSFRGAVAMKVELCSFSGYKIYPGHGRRYARTDGKVFQFLNAKCESAFLSKRNPRQINWTVLYRRKHKKGQSEEIQKKRTRRAVKFQRAITGASLADIMAKRNQKPEVRKAQREQAIRHLQRQHLSKRL

SEQ ID NO: 11112 - protein, 81 aa, Homo sapiens
LSFRGAVAMKVELCSFSGYKIYPGHGRRYARTDGKVKSRVGFTYLLVLRGGKAGLIRFRRVYSPHHHWPLEVFVDALWTGR

SEQ ID NO: 11113 - protein, 19 aa, Homo sapiens
MRLFQPLSSTAVDSLFPPR

SEQ ID NO: 11114 - protein, 174 aa, Homo sapiens
VAQVSGSSSAQPGSMIVDKLLDDSRGGEGLRDAAGGCGLMTSPLNLSYFYGASPPAAAPGACDASCSVLGPSAPGSPGSDSSDFSSASSVSSCGAVESRSRGGARAERQPVEPHMGVGRQQRGPFQGVRVKNSVKELLLHIRSHKQKASGQAVDDFKTQGVNIEQFRGKSYLYL

SEQ ID NO: 11115 - protein, 610 aa, Homo sapiens
VAQVSGSSSAQPGSMIVDKLLDDSRGGEGLRDAAGGCGLMTSPLNLSYFYGASPPAAAPGACDASCSVLGPSAPGSPGSDSSDFSSASSVSSCGAVESRSRGGARAERQPVEPHMGVGRQQRGPFQGVRVKNSVKELLLHIRSHKQKASGQAVDDFKTQGVNIEQFRELKNTVSYSGKRKGPDSLSDGPACKRPALLHSQFLTPPQTPTPGESMEDVHLNEPKQESSADLLQNIINIKNECSPVSLNTVQTSSSVQQQNDAHLHSFSMMPSSACEAMVGHEMASDSSNTSLPFSNMGNPMNTTQLGKSLFQWQVEQEESKLANISQDQFLSKDADGDTFLHIAVAQGRRALSYVLARKMNALHMLDIKEHNGQSAFQVAVAANQHLIVQDLVNIGAQVNTTDCWGRTPLHVCAEKGHSQVLQAIQKGAVGSNQFVDLEATNYDGLTPLHCAVIAHNAVVHELQRNQQPHSPEVQELLLKNKSLVDTIKCLIQMGAAVEAKDRKSGRTALHLAAEEANLELIRLFLELPSCLSFVNAKAYNGNTALHVAASLQYRLTQLDAVRLLMRKGADPSTRNLENEQPVHLVPDGPVGEQIRRILKGKSIQQRAPPY

SEQ ID NO: 11116 - protein, 732 aa, Homo sapiens
VAQVSGSSSAQPGSMIVDKLLDDSRGGEGLRDAAGGCGLMTSPLNLSYFYGASPPAAAPGACDASCSVLGPSAPGSPGSDSSDFSSASSVSSCGAVESRSRGGARAERQPVEPHMGVGRQQRGPFQGVRVKNSVKELLLHIRSHKQKASGQAVDDFKTQGVNIEQFRELKNTVSYSGKRKGPDSLSDGPACKRPALLHSQFLTPPQTPTPGESMEDVHLNEPKQESSADLLQNIINIKNECSPVSLNTVQVSWLNPVVVPQSSPAEQCQDFHGGQVFSPPQKCQPFQVRGSQQMIDQASLYQYSPQNQHVEQQPHYTHKPTLEYSPFPIPPQSPAYEPNLFDGPESQFCPNQSLVSLLGDQRESENIANPMQTSSSVQQQNDAHLHSFSMMPSSACEAMVGHEMASDSSNTSLPFSNMGNPMNTTQLGKSLFQWQVEQEESKLANISQDQFLSKDADGDTFLHIAVAQGRRALSYVLARKMNALHMLDIKEHNGQSAFQVAVAANQHLIVQDLVNIGAQVNTTDCWGRTPLHVCAEKGHSQVLQAIQKGAVGSNQFVDLEATNYDGLTPLHCAVIAHNAVVHELQRNQQPHSPEVQELLLKNKSLVDTIKCLIQMGAAVEAKDRKSGRTALHLAAEEANLELIRLFLELPSCLSFVNAKAYNGNTALHVAASLQYRLTQLDAVRLLMRKGADPSTRNLENEQPVHLVPDGPVGEQIRRILKGKSIQQRAPPY

SEQ ID NO: 11117 - protein, 75 aa, Homo sapiens
LLDYTFLLGLTPLHCAVIAHNAVVHELQRNQQPHSPEVQELLLKNKSLVDTIKCLIQMGAAVEAKVNSQKRFKMG

SEQ ID NO: 11118 - protein, 101 aa, Homo sapiens
LYTLSKFLSSFHEISPFLMSDNSFLCLQAYNGNTALHVAASLQYRLTQLDAVRLLMRKGADPSTRNLENEQPVHLVPDGPVGEQIRRILKGKSIQQRAPPY

SEQ ID NO: 11119 - protein, 26 aa, Homo sapiens
LIFQKRKKRKTKRRILIRFNFLGPMA

SEQ ID NO: 11120 - protein, 545 aa, Homo sapiens
MDSTACLKSLLLTVSQYKAVKSEANATQLLRHLEVISGQKLTRLFTSNQILTSECLSCLVELLEDPNISASLILSIIGLLSQLAVDIETRDCLQNTYNLNSVLAGVVCRSSHTDSVFLQCIQLLQKLTYNVKIFYSGANIDELITFLIDHIQSSEDELKMPCLGLLANLCRHNLSVQTHIKTLSNVKSFYRTLITLLAHSSLTVVVFALSILSSLTLNEEVGEKLFHARNIHQTFQLIFNILINGDGTLTRKYSVDLLMDLLKNPKIADYLTRYEHFSSCLHQVLGLLNGKDPDSSSKVLELLLAFCSVTQLRHMLTQMMFEQSPPGSATLGSHTKCLEPTVALLRWLSQPLDGSENCSVLALELFKEIFEDVIDAANCSSADRFVTLLLPTILDQLQFTEQNLDEALTRKKCERIAKAIEVLLTLCGDDTLKMHIAKILTTVKCTTLIEQQFTYGKIDLGFGTKVADSELCKLAADVILKTLDLINKLKPLVPGMEVSFYKILQDPRLITPLAFALTSDNREQVQSGLRILLEAAPLPDFPALV

SEQ ID NO: 11121 - protein, 111 aa, Homo sapiens
MDSTACLKSLLLTVSQYKAVKSEANATQLLRHLEVISGQKLTRLFTSNQILTSECLSCLVELLEDPNISASLILSIIGLLSQLGNAFNFSFLVFGRCMNNILKCRLSYRIS

SEQ ID NO: 11122 - protein, 182 aa, Homo sapiens
MLRGSASSTSMEKAKGKEWTSTEKSREEDQQASNQPNSIALPGTSAKRTKEKMSIKGSKVLCPKKKAEHTDNPRPQKKIPIPPLPSKLPPVNLIHRDILRAWCQQLKLSSKGQKLDAYKRLCAFAYPNQKVVCGPWEKSPCRHRWLGSPAVSCWSSLGSRKARRESECTLLASCLQFSTPAP

SEQ ID NO: 11123 - protein, 41 aa, Homo sapiens
LSWWLMQKTLSSSKSFVIVGPENPFATGTDMFCLSGLVKGG

SEQ ID NO: 11124 - protein, 67 aa, Homo sapiens
VGGNQNWRCPPSGGRSQLIDIQGVQECFHSAQERSERSPEPCLLVILVEKVEYGELLAKDSQATLCL

SEQ ID NO: 11125 - protein, 30 aa, Homo sapiens
VGKTEWEKGASEEEEAGGAAGAQVTLLPPA

SEQ ID NO: 11126 - protein, 7 aa, Homo sapiens
MERLCKW

SEQ ID NO: 11127 - protein, 32 aa, Homo sapiens
LVYLNLTQEKSRRKRGHSPKDLKEQKRWERKP

SEQ ID NO: 11128 - protein, 38 aa, Homo sapiens
LSSQTDLGSYWWGPLLVTLPHPKYKGIGPNNLPHSSKT

SEQ ID NO: 11129 - protein, 24 aa, Homo sapiens
MSLFPHHLVSSPVPAYCFANSWPC

SEQ ID NO: 11130 - protein, 47 aa, Homo sapiens
LLVVFLKIETGNMGRIHLAVLLSDEHTKLNSSFMILSNLKAKYFCLI

SEQ ID NO: 11131 - protein, 33 aa, Homo sapiens
LPITPRISSNQFEIGCFSQAAFVDNLCKKDMLE

SEQ ID NO: 11132 - protein, 29 aa, Homo sapiens
LNSLKVSQNRYHWASEDSLNCFMLDLIAS

SEQ ID NO: 11133 - protein, 13 aa, Homo sapiens
MQRRNHFRLDVRK

SEQ ID NO: 11134 - protein, 34 aa, Homo sapiens
LYISSQSSKIRNFCCVSLRMVFLKCKGEIILGLM

SEQ ID NO: 11135 - protein, 27 aa, Homo sapiens
LGSTGCQIIFLNLRIFTLEMFMLVLGS

SEQ ID NO: 11136 - protein, 12 aa, Homo sapiens
LSSFSITDMCRK

SEQ ID NO: 11137 - protein, 12 aa, Homo sapiens
LQHSEDEAKPST

SEQ ID NO: 11138 - protein, 58 aa, Homo sapiens
LGPVRRGLPGVRGSRTPSSRAVPAAPPPRPARPVASRPVPSGAASRVLMRVGGSEDIF

SEQ ID NO: 11139 - protein, 13 aa, Homo sapiens
MVCWQGVLVDWFL

SEQ ID NO: 11140 - protein, 137 aa, Homo sapiens
MVCWQDLEESLRMKLSLTKVVNGCRLGKIKNLGKTGDHTMDIPGCLLYTKTGSAPHLTHHTLHNIHGVPAMAQLTLSSLAEHHEVLTEYKEGVGKFIVCVCVECCRTSGNDCFQVHGNSEGPSARLVPVPLRWRSIL

SEQ ID NO: 11141 - protein, 51 aa, Homo sapiens
LHGLGTAAPERRGVDLRLCRPAARGVHAQGPQPKFFHLPMRPPRAAGQPVI

SEQ ID NO: 11142 - protein, 16 aa, Homo sapiens
VPSRGAAETEGQPLWD

SEQ ID NO: 11143 - protein, 22 aa, Homo sapiens
MLLLGLEGLLFMLFNALSNVFF

SEQ ID NO: 11144 - protein, 20 aa, Homo sapiens
VSLATLTHALSLESLETCPR

SEQ ID NO: 11145 - protein, 18 aa, Homo sapiens
LYWTVIYKSSSYAGWRLG

SEQ ID NO: 11146 - protein, 63 aa, Homo sapiens
LKSCSVPFKPVSVARVTGKSADEFCLLRALSEQGLSSVFWPSHWVRKTLNQQPTRYEPVRKKS

SEQ ID NO: 11147 - protein, 20 aa, Homo sapiens
MKKINFGSSLTNFDMWKKYL

SEQ ID NO: 11148 - protein, 69 aa, Homo sapiens
LLLARKMPGLVDSNPAPPESQEKKPLKPCCACPETKKARDACIIEKGEEHCGHLIEAHKECMRALGFKI

SEQ ID NO: 11149 - protein, 104 aa, Homo sapiens
LLLARKMPGLVDSNPAPPESQEKKPLKPCCACPETKKARDAWFRGRVSVDLSRSLVPGNDGERGERQASTTHSFLQIIIEKGEEHCGHLIEAHKECMRALGFKI

SEQ ID NO: 11150 - protein, 33 aa, Homo sapiens
VAAAREGVGVDARSRALRTEACTGGDVEVCSGP

SEQ ID NO: 11151 - protein, 340 aa, Homo sapiens
LYLSSTVSPGIISLSTRSLRRYGELANTPFGLFLPPCFCVPWECCCAYASGLFLELQWTGICDSTMGLSNILFVMAFLLSGAAPLKIQAYFNETADLPCQFANSQNQSLSELVVFWQDQENLVLNEVYLGKEKFDSVHSKYMGRTSFDSDSWTLRLHNLQIKDKGLYQCIIHHKKPTGMIRIHQMNSELSVLANFSQPEIVPISNITENVYINLTCSSIHGYPEPKKMSVLLRTKNSTIEYDGVMQKSQDNVTELYDVSISLSVSFPDVTSNMTIFCILETDKTRLLSSPFSIGTNTMEREESEQTKKREKIHIPERSDEAQRVFKSSKTSSCDKSDTCF

SEQ ID NO: 11152 - protein, 689 aa, Homo sapiens
VGRNCSPSELRMAAPGPLPAAALSPGAPTPRELMHGVAGVTSRAGRDREAGSVLPAGNRGARKASRRSSSRSMSRDNKFSKKDCLSIRNVVASIQTKEGLNLKLISGDVLYIWADVIVNSVPMNLQLGGGPLSRAFLQKAGPMLQKELDDRRRETEEKVGNIFMTSGCNLDCKAVLHAVAPYWNNGAETSWQIMANIIKKCLTTVEVLSFSSITFPMIGTGSLQFPKAVFAKLILSEVFEYSSSTRPITSPLQEVHFLVYTNDDEGCQAFLDEFTNWSRINPNKARIPMAGDTQGVVGTVSKPCFTAYEMKIGAITFQVATGDIATEQVDVIVNSTARTFNRKSGVSRAILEGAGQAVESECAVLAAQPHRDFIITPGGCLKCKIIIHVPGGKDVRKTVTSVLEECEQRKYTSVSLPAIGTGNAGKNPITVADNIIDAIVDFSSQHSTPSLKTVKVVIFQPELLNIFYDSMKKRDLSASLNFQSTFSMTTCNLPEHWTDMNHQLFCMVQLEPGQSEYNTIKDKFTRTCSSYAIEKIERIQNAFLWQSYQVKKRQMDIKNDHKNNERLLFHGTDADSVPYVNQHGFNRSCAGKNAVSYGKGTYFAVDASYSAKDTYSKPDSNGRKHMYVVRVLTGVFTKGRAGLVTPPPKNPHNPTDLFDSVTNNTRSPKLFVVFFDNQAYPEYLITFTA

SEQ ID NO: 11153 - protein, 494 aa, Homo sapiens
VGRNCSPSELRMAAPGPLPAAALSPGAPTPRELMHGVAGVTSRAGRDREAGSVLPAGNRGARKASRRSSSRSMSRDNKFSKKDCLSIRNVVASIQTKEGLNLKLISGDVLYIWADVIVNSVPMNLQLGGGPLSRAFLQKAGPMLQKELDDRRRETEEKVGNIFMTSGCNLDCKAVLHAVAPYWNNGAETSWQVATGDIATEQVDVIVNSTARTFNRKSGVSRAILEGAGQAVESECAVLAAQPHRDFIITPGGCLKCKIIIHVPGGKDVRKTVTSVLEECEQRKYTSVSLPAIGTGNLPEHWTDMNHQLFCMVQLEPGQSEYNTIKDKFTRTCSSYAIEKIERIQNAFLWQSYQVKKRQMDIKNDHKNNERLLFHGTDADSVPYVNQHGFNRSCAGKNAVSYGKGTYFAVDASYSAKDTYSKPDSNGRKHMYVVRVLTGVFTKGRAGLVTPPPKNPHNPTDLFDSVTNNTRSPKLFVVFFDNQAYPEYLITFTA

SEQ ID NO: 11154 - protein, 212 aa, Homo sapiens
LKICHLMVNSRDNKFSKKDCLSIRNVVASIQTKEGLNLKLISGDVLYIWADVIVNSVPMNLQLGGGPLSRAFLQKAGPMLQKELDDRRRETEEKVGNIFMTSGCNLDCKAVLHAVAPYWNNGAETSWQIMANIIKKCLTTVEVLSFSSITFPMIGTGSLQFPKAVFAKLILSEVFEYSSSTRPITSPLQEVHFLVYTNDDEGCQEALAGPKR

SEQ ID NO: 11155 - protein, 83 aa, Homo sapiens
LEAGALVLADRGVCLIDEFDKMNDQDRTSIHEAMEQQSISISKAGIVTSLQARCTVIAAANPIGAAGTLTAGAGVGHREVPPA

SEQ ID NO: 11156 - protein, 280 aa, Homo sapiens
LMEVLPCVSGGRYDPSLTFSENVDLTEPIISRFDILCVVRDTVDPVQDEMLARFVVGSHVRHHPSNKEEEGLANGSAAEPAMPNTYGVEPLPQEVLKKYIIYAKERVHPKLNQMDQDKVAKMYSDLRKESMATGSIPITVRHIESMIRMAEAHARIHLRDYVIEDDVNMAIRVMLESFIDTQKFSVMRSMRKTFARYLSFRRDNNELLLFILKQLVAEQVTYQRNRFGAQQDTIEVPEKDLVDKARQINIHNLSAFYDSELFRMNKFSHDLKRKMILQQF

SEQ ID NO: 11157 - protein, 10 aa, Homo sapiens
MVTQAPGALS

SEQ ID NO: 11158 - protein, 548 aa, Homo sapiens
LAPGRPEDAEGPEPGGPEAEAHSTPSSYPVSPASLRTCCPWARRPRGSRRNSFTLRGRVPPLPTAACGRCRLHPDPEPPPPAMEVAPEQPRWMAHPAVLNAQHPDSHHPGLAHNYMEPAQLLPPDEVDVFFNHLDSQGNPYYANPAHARARVSYSPAHARLTGGQMCRPHLLHSPGLPWLDGGKAALSAAAAHHHNPWTVSPFSKTPLHPSAAGGPGGPLSVYPGAGGGSGGGSGSSVASLTPTAAHSGSHLFGFPPTPPKEVSPDPSTTGAASPASSSAGGSAARGEDKDGVKYQVSLTESMKMESGSPLRPGLATMGTQPATHHPIPTYPSYVPAAAHDYSSGLFHPGGFLGGPASSFTPKQRSKARSCSEGRECVNCGATATPLWRRDGTGHYLCNACGLYHKMNGQNRPLIKPKRRLTTTTTLWRRNANGDPVCNACGLYYKLHNVNRPLTMKKEGIQTRNRKMSNKSKKSKKGAECFEELSKCMQEKSSPFSAAALAGHMAPVGHLPPFSHSGHILPTPTPIHPSSSLSFGHPHPSSMVTAMG

SEQ ID NO: 11159 - protein, 562 aa, Homo sapiens
LAPGRPEDAEGPEPGGPEAEAHSTPSSYPVSPASLRTCCPWARRPRGSRRNSFTLRGRVPPLPTAACGRCRLHPDPEPPPPAMEVAPEQPRWMAHPAVLNAQHPDSHHPGLAHNYMEPAQLLPPDEVDVFFNHLDSQGNPYYANPAHARARVSYSPAHARLTGGQMCRPHLLHSPGLPWLDGGKAALSAAAAHHHNPWTVSPFSKTPLHPSAAGGPGGPLSVYPGAGGGSGGGSGSSVASLTPTAAHSGSHLFGFPPTPPKEVSPDPSTTGAASPASSSAGGSAARGEDKDGVKYQVSLTESMKMESGSPLRPGLATMGTQPATHHPIPTYPSYVPAAAHDYSSGLFHPGGFLGGPASSFTPKQRSKARSCSEGRECVNCGATATPLWRRDGTGHYLCNACGLYHKMNGQNRPLIKPKRRLSAARRAGTCCANCQTTTTTLWRRNANGDPVCNACGLYYKLHNVNRPLTMKKEGIQTRNRKMSNKSKKSKKGAECFEELSKCMQEKSSPFSAAALAGHMAPVGHLPPFSHSGHILPTPTPIHPSSSLSFGHPHPSSMVTAMG

SEQ ID NO: 11160 - protein, 42 aa, Homo sapiens
VEAAAAVSRVRRDFSSLRLGLGLRPQLQPPARTRSLTPNSVP

SEQ ID NO: 11161 - protein, 180 aa, Homo sapiens
LSLDCFLPHPTLTVFVTLPHSLPLRFWVNILKNPQFVFDIDKTDHIDACLSVIAQAFIDACSISDLQLGKDSPTNKLLYAKEIPEYRKIVQRYYKQIQDMTPLSEQEMNAHLAEESRKYQNEFNTNVAMAEIYKYAKRYRPQIMAALEANPTARRTQLQHKFEQVVALMEDNIYECYSEA

SEQ ID NO: 11162 - protein, 199 aa, Homo sapiens
VKTSPHWLSSTFSTSWRSRLRRGESPTPTPYTSGRPTGGGLPLRFWVNILKNPQFVFDIDKTDHIDACLSVIAQAFIDACSISDLQLGKDSPTNKLLYAKEIPEYRKIVQRYYKQIQDMTPLSEQEMNAHLAEESRKYQNEFNTNVAMAEIYKYAKRYRPQIMAALEANPTARRTQLQHKFEQVVALMEDNIYECYSEA

SEQ ID NO: 11163 - protein, 374 aa, Homo sapiens
LFSSLLNNKHFLIVFVHALEQQKDFAVRDRCSLASLLTIALHGKLEYYTSIMKELLVDLIDASAAKNPKLMLRRTESVVEKMLTNWMSICMYSCLRETVGEPFFLLLCAIKQQINKGSIDAITGKARYTLSEEWLLRENIEAKPRNLNVSFQGCGMDSLSVRAMDTDTLTQVKEKILEAFCKNVPYSQWPRAEDVDLEWFASSTQSYILRDLDDTSVVEDGRKKLNTLAHYKIPEGASLAMSLIDKKDNTLGRVKDLDTEKYFHLVLPTDELAEPKKSHRQSHRKKVLPEIYLTRLLSTKGTLQKFLDDLFKAILSIREDKPPLAVKYFFDFLEEQAEKRGISDPDTLHIWKTNRWRPSSPVLGEHPEEPPVCL

SEQ ID NO: 11164 - protein, 170 aa, Homo sapiens
LQHRPGSDWSEMQMRFDGRLGFPGGFVDTQDRSLEDGLNRELREELGEAAAAFRVERTDYRSSHVGSGPRVVAHFYAKRLTLEELLAVEAGATRAKDHGLEVLGLVRVPLYTLRDGVGGLPTFLENSFIGSAREQLLEAALHGPMKTEMRTLVLGREGRTWECFLIGSER

SEQ ID NO: 11165 - protein, 120 aa, Homo sapiens
LLRMVKRKPTGDLELLQLDIGRVWPGTKMPGKMGNIYRTEYGLKVWRINTKHNIIYVNGSVPGHKNCLVKVKDSKLPAYKDLGKNLPFPTYFPDGDEEELPEDLYDENVCQPGAPSITFA

SEQ ID NO: 11166 - protein, 36 aa, Homo sapiens
LRKLPHGYCVHVAVAWGLPESRAAGRPEVNTHLAFC

SEQ ID NO: 11167 - protein, 32 aa, Homo sapiens
VSLSLETQAPRVWKDIHLGCLTDSPVGAMLCA

SEQ ID NO: 11168 - protein, 32 aa, Homo sapiens
LKKIYKSGTLLFRARGLYTVIACMGKNTFDVI

SEQ ID NO: 11169 - protein, 433 aa, Homo sapiens
LRHKTARGSQGRQRRTMRLILPVGLIATTLAIAPVRFDREKVFRVKPQDEKQADIIKDLAKTNELDFWYPGATHHVAANMMVDFRVSEKESQAIQSALDQNKMHYEILIHDLQEEIEKQFDVKEDIPGRHSYAKYNNWEKIVAWTEKMMDKYPEMVSRIKIGSTVEDNPLYVLKIGEKNERRKAIFTDCGIHAREWVSPAFCQWFVYQATKTYGRNKIMTKLLDRMNFYILPVFNVDGYIWSWTKNRMWRKNRSKNQNSKCIGTDLNRNFNASWNSIPNTNDPCADNYRGSAPESEKETKAVTNFIRSHLNEIKVYITFHSYSQMLLFPYGYTSKLPPNHEDLAKVAKIGTDVLSTRYETRYIYGPIESTIYPISGSSLDWAYDLGIKHTFAFELRDKGKFGFLLPESRIKPTCRETMLAVKFIAKYILKHTS

SEQ ID NO: 11170 - protein, 467 aa, Homo sapiens
MVQLYNLHPFGSQQVVPCKLEPDRFCGGGRDALFVAAGCKVEAFAVAGQELCQPRCAFSTLGRVLRLAYSEAGDYLVAIEEKNKATFLRAYVNWRNKRTENSRVCIRMIGHNVEGPFSKAFRDQMYIIEMPLSEAPLCISCCPVKGDLLVGCTNKLVLFSLKYQIINEEFSLLDFERSLIIHIDNITPVEVSFCVGYVAVMSDLEVLIVKLESGPKNGERVHHHPHKTNNRIRRTEEGISNEISQLESDDFVICQKPLELLGEKSEQSGLSVTLESTGLADEKRKYSHFQHLLYRRFAPDISSYVLSDDIKLHSLQLLPIYQTGSLTSDGKNLSQEKELLSLFCFFSLPHVGYLYMVVKSVELMSVYQYPEKSQQAVLTPQFLHVITSNNLQCFTVRCSAAAAREEDPYMDTTLKACPPVSMDVCALRIQLFIGLKAICHFKNHIILLTKAEPEAIPERRQSPKRLL

SEQ ID NO: 11171 - protein, 15 aa, Homo sapiens
MTFLSCFMCHSKVSS

SEQ ID NO: 11172 - protein, 52 aa, Homo sapiens
LVNSHPSGFSFRDNMAPSTPLLTVRGSEGLYMVNGPPHFTESTVFPRYDLFC

SEQ ID NO: 11173 - protein, 109 aa, Homo sapiens
LVNSHPSGFSFRDNMAPSTPLLTVRGSEGLYMVNGPPHFTESTVFPRESGKNCKVCIFSKDGTLFAWGNGEKLVFIYITYFVCHEYKHNWHYLNNRYLSVINKIRLLMS

SEQ ID NO: 11174 - protein, 329 aa, Homo sapiens
LVRSAMSRPSSTGPSANKPCSKQPPPQPQHTPSPAAPPAAATISAAGPGSSAVPAAAAVISGPGGGGGAGPVSPQHHELTSLFECPVCFDYVLPPILQCQAGHLVCNQCRQKLSCCPTCRGALTPSIRNLAMEKVASAVLFPCKYATTGCSLTLHHTEKPEHEDICEYRPYSCPCPGASCKWQGSLEAVMSHLMHAHKSITTLQGEDIVFLATDINLPGAVDWVMMQSCFGHHFMLVLEKQEKYEGHQQFFAIVLLIGTRKQAENFAYRLELNGNRRRLTWEATPRSIHDGVAAAIMNSDCLVFDTAIAHLFADNGNLGINVTISTCCP

SEQ ID NO: 11175 - protein, 142 aa, Homo sapiens
VALPVPARLGGRTRVQASRPRAPPGLASAAVPEAGGPGLCAPLGFGARDAAGRRAPRGVRRGGVLGTPGAAECISAVQPSACRAPSVSAARTWAGRRGVASELAARGARTALTRAAPRQAGARSSMVGSERDEPPVLHRPQR

SEQ ID NO: 11176 - protein, 13 aa, Homo sapiens
LALYLTSYTTLES

SEQ ID NO: 11177 - protein, 29 aa, Homo sapiens
LKSQFDSHSSSLFKFWLDAKPWDMNNFHV

SEQ ID NO: 11178 - protein, 1687 aa, Homo sapiens
LTMSYWNLEKRNCVQYRRHFLVDNSVFHVERCMSVMQSGTQMIKLKRGTKGLVRLFYLDEHRTRLRWRPSRKSEKAKILIDSIYKVTEGRQSEIFHRQAEGNFDPSCCFTIYHGNHMESLDLITSNPEEARTWITGLKYLMAGISDEDSLAKRQRTHDQWVKQTFEEADKNGDGLLNIEEIHQLMHKLNVNLPRRKVRQMFQEADTDENQGTLTFEEFCVFYKMMSLRRDLYLLLLSYSDKKDHLTVEELAQFLKVEQKMNNVTTDYCLDIIKKFEVSEENKVKNVLGIEGFTNFMRSPACDIFNPLHHEVYQDMDQPLCNYYIASSHNTYLTGDQLLSQSKVDMYARVLQEGCRCVEVDCWDGPDGEPVVHHGYTLTSKILFRDVVETINKHAFVKNEFPVILSIENHCSIQQQRKIAQYLKGIFGDKLDLSSVDTGECKQLPSPQSLKGKILVKGKKLPYHLGDDAEEGEVSDEDSADEIEDECKFKLHYSNGTTEHQVESFIRKKLESLLKESQIRDKEDPDSFTVRALLKATHEGLNAHLKQSPDVKESGKKSHGRSLMTNFGKHKKTTKSRSKSYSTDDEEDTQQSTGKEGGQLYRLGRRRKTMKLCRELSDLVVYTNSVAAQDIVDDGTTGNVLSFSETRAHQVVQQKSEQFMIYNQKQLTRIYPSAYRIDSSNFNPLPYWNAGCQLVALNYQSEGRMMQLNRAKFKANGNCGYVLKPQQMCKGTFNPFSGDPLPANPKKQLILKVISGQQLPKPPDSMFGDRGEIIDPFVEVEIIGLPVDCCKDQTRVVDDNGFNPVWEETLTFTVHMPEIALVRFLVWDHDPIGRDFVGQRTVTFSSLVPGYRHVYLEGLTEASIFVHITINEIYGKNRQLQGLKGLFNKNPRHSSSENNSHYVRKRSIGDRILRRTASAPAKGRKKSKMGFQEMVEIKDSVSEATRDQDGVLRRTTRSLQARPVSMPVDRNLLGALSLPVSETAKDIEGKENSLAEDKDGRRKGKASIKDPHFLNFNKKLSSSSSALLHKDTSQGDTIVSTAHMSVTGEQLGMSSPRGGRTTSNATSNCQENPCPSKSLSPKQHLAPDPVVNPTQDLHGVKIKEKGNPEDFVEGKSILSGSVLSHSNLEIKNLEGNRGKGRAATSFSLSDVSMLCSDIPDLHSTAILQESVISHLIDNVTLTNENEPGSSISALIGQFDETNNQALTVVSHLHNTSVMSGHCPLPSLGLKMPIKHGFCKGKSKSSFLCSSPELIALSSSETTKHATNTVYETTCTPISKTKPDDDLSSKAKTAALESNLPGSPNTSRGWLPKSPTKGEDWETLKSCSPASSPDLTLEDVIADPTLCFNSGESSLVEIDGESENLSLTTCEYRREGTSQLASPLKLKYNQGVVEHFQRGLRNGYCKETLRPSVPEIFNNIQDVKTQSISYLAYQGAGFVHNHFSDSDAKMFQTCVPQQSSAQDMHVPVPKQLAHLPLPALKLPSPCKSKSLGDLTSEDIACNFESKYQCISKSFVTTGIRDKKGVTVKTKSLEPIDALTEQLRKLVSFDQEDNCQVLYSKQDANQLPRALVRKLSSRSQSRVRNIASRAKEKQEANKQKVPNPSNGAGVVLRNKPSAPTPAVNRHSTGSYIAGYLKNTKGGGLEGRGIPEGACTALHYGHVDQFCSDNSVLQTEPSSDDKPEIYFLLRL

SEQ ID NO: 11179 - protein, 38 aa, Homo sapiens
LVLMLCQKSSDNELLELGKKELCAVPQAFSGGQQCVSC

SEQ ID NO: 11180 - protein, 57 aa, Homo sapiens
VDCPAATMPRKGTQPSTARRREEGPPPPSPDGASSDAEPEPPSGRTESPATAAETAR

SEQ ID NO: 11181 - protein, 334 aa, Homo sapiens
VDCPAATMPRKGTQPSTARRREEGPPPPSPDGASSDAEPEPPSGRTESPATAAETASEELDNRSLEEILNSIPPPPPPAMTNEAGAPRLMITHIVNQNFKSYAGEKILGPFHKRFSCIIGPNGSGKSNVIDSMLFVFGYRAQKIRSKKLSVLIHNSDEHKDIQSCTVEVHFQKIIDKEGDDYEVIPNSNFYVSRTACRDNTSVYHISGKKKTFKDVGNLLRSHGIDLDHNRFLILQGEVEQIAMMKPKGQTEHDEGMLEYLEDIIGCGRLNEPIKVLCRRVEILNEHRGEKLNRVKMVEKEKDALEGEKNIAIEFLTLENEIFRKKNHVCQYYM

SEQ ID NO: 11182 - protein, 60 aa, Homo sapiens
LCRRVEILNEHRGEKLNRVKMVEKEKDALEGEKNIAIEFLTLENEIFRKKNHVCQYYIET

SEQ ID NO: 11183 - protein, 85 aa, Homo sapiens
MVEKEKDALEGEKNIAIEFLTLENEIFRKKNHVCQYYIYELQKRIAEMETQKEKIHEDTKEINEKSNILSNEMKAKNKDVKDTEK

SEQ ID NO: 11184 - protein, 132 aa, Homo sapiens
LKLYFYPKYKNLFKKRFTVEQEIDLKDVLKALGITEIFIKDANLTGLSDNKEIFLSKAIHKSFLEVNEEGSEAAAVSGMIAISRMAVLYPQVIVDHPFFFLIRNRRTGTILFMGRVMHPETMNTSGHDFEEL

SEQ ID NO: 11185 - protein, 86 aa, Homo sapiens [sequence omitted]

SEQ ID NO: 11186 - protein, 129 aa, Homo sapiens
LLSRPTRKMAPKDRKPKRSTWRFNLDLTHPVEDGIFDSGNFEQFLREKVKVNGKTGNLGNVVHIERFKNKITVVSEKQFSKRYLKYLTKKYLKKNNLRDWLRVVASDKETYELRYFQISQDEDESESED

SEQ ID NO: 11187 - protein, 182 aa, Homo sapiens
MAYSRPAAHWFPGLPASALLPLSFPGGDNLTLSARDAARFDINADRAAVASSLLSRPTRKMAPQKDRKPKRSTWRFNLDLTHPVEDGIFDSGNFEQFLREKVKVNGKTGNLGNVVHIERFKNKITVVSEKQFSKRYLKYLTKKYLKKNNLRDWLRVVASDKETYELRYFQISQDEDESESED

SEQ ID NO: 11188 - protein, 72 aa, Homo sapiens
LLSRPTRKMAPQKDRKPKRSTWRFNLDLTHPVEDGIFDSGNFGTFPSEYLGFSSLVLHFFCFKIGAISTGEG

SEQ ID NO: 11189 - protein, 629 aa, Homo sapiens
MYVTMMMTDQIPLELPPLLNGEVAMMPHLVNGDAAQQVILVQVNPGETFTIRAEDGTLQCIQGPAEVPMMSPNGSIPPIHVPPGYISQVIEDSTGVRRVVVTPQSPECYPPSYPSAMSPTHHLPPYLTHHPHFIHNSHTAYYPPVTGPGDMPPQFFPQHHLPHTIYGEQEIIPFYGMSTYITREDQYSKPPHKKLKDRQIDRQNRLNSPPSSIYKSSCTTVYNGYGKGHSGGSGGGGSGSGPGIKKTERRARSSPKSNDSDLQEYELEVKRVQDILSGIEKPQVSNIQARAVVLSWAPPVGLSCGPHSGLSFPYSYEVALSDKGRDGKYKIIYSGEELECNLKDLRPATDYHVRVYAMYNSVKGSCSEPVSFTTHSCAPECPFPPKLAHRSKSSLTLQWKAPIDNGSKITNYLLEWDEGKRNSGFRQCFFGSQKHCKLTKLCPAMGYTFRLAARNDIGTSGYSQEVVCYTLGNIPQMPSAPRLVRAGITWVTLQWSKPEGCSPEEVITYTLEIQEDENDNLFHPKYTGEDLTCTVKNLKRSTQYKFRLTASNTEGKSCPSEVLVCTTSPDRPGPPTRPLVKGPVTSHGFSVKWDPPKDNGGSEILKYLLEITDGNSEGEVFGNCFIQIQ

SEQ ID NO: 11190 - protein, 45 aa, Homo sapiens
LFEPGRQRLQCGEIMPLHSSLATERDLVSKKKKKKTSVSTCYFFQ

SEQ ID NO: 11191 - protein, 38 aa, Homo sapiens
VYHSSSLQVSLRDNILKSKERRGTTKRSQFAWCSGSHL

SEQ ID NO: 11192 - protein, 11 aa, Homo sapiens
LTWKEKAITSK

SEQ ID NO: 11193 - protein, 35 aa, Homo sapiens
VRERGPQRVAAHITGTRGRSNTLSSPKTPSAWMCL

SEQ ID NO: 11194 - protein, 10 aa, Homo sapiens
LKSTLLSLPC

SEQ ID NO: 11195 - protein, 231 aa, Homo sapiens
LHTSVIFQGVTLNVYGYSGTLDCHNAFALLVRPPTEQANVLLSFQMTSDELPKENWLKMLCRHVANTICKADAENLIYTADPESFEVNTKDMDSTLSRASRAIKKTSKKVTRAFSFSKTPKRALRRALMTSHGSVEGRSPSSNDKHVMSRLSSTSSLAITHSVSTSNVIGFTKHVYVQRLNSTGGRSQYSWFQSVRHSAFRASFSEILEGNTDFSNFKKVLSKSSLTFVKN

SEQ ID NO: 11196 - protein, 38 aa, Homo sapiens
METSLMKFNGIPSPSLVSLPSFFERRSHTLSRSTTHLI

SEQ ID NO: 11197 - protein, 14 aa, Homo sapiens
VDAALLPEVGGGGS

SEQ ID NO: 11198 - protein, 16 aa, Homo sapiens
LPVMRKHGCGRFGPSL

SEQ ID NO: 11199 - protein, 224 aa, Homo sapiens
LARGGAGPGSRFPVPRQEGLQTPELRRGWGWGLRSCLHRTPPGQPVRSRLPSAPPKRRAAQTGLGRPLCPVRGEKQSWKDSERVGAVFLILPFLGAPVVSRLHCESESFKMDLILDVNIQIYPVDLGDKFRLVIASTLYEDGTLDDGEYNPTDDRPSRADQFEYVMYGKVYRIEGDETSTEAATRLSAYVSYGGLLMRLQGDANNLHGFEVDSRVYLLMKKLAF

SEQ ID NO: 11200 - protein, 199 aa, Homo sapiens
LCACATLVWPPRFQEVLLVLSGLVHARGCTYSQLWSRSHPFCCSRGPLAMAGILFEDIFDVKDIDPEGKKFDRVSRLHCESESFKMDLILDVNIQIYPVDLGDKFRLVIASTLYEDGTLDDGEYNPTDDRPSRADQFEYVMYGKVYRIEGDETSTEAATRLSAYVSYGGLLMRLQGDANNLHGFEVDSRVYLLMKKLAF

SEQ ID NO: 11201 - protein, 171 aa, Homo sapiens
LCACATLVWPPRFQEVLLVLSGLVHARGCTYSQLWSRSHPFCCSRGPLAMAGILFEDIFDVKDIDPEGKKFDRVSRLHCESESFKMDLILDVNIQIYPVDLGDKFRLVIASTLYEDGTLDDGEYNPTDDRPSSSAYVSYGGLLMRLQGDANNLHGFEVDSRVYLLMKKLAF

SEQ ID NO: 11202 - protein, 139 aa, Homo sapiens
LAIPLSLFSCFSPVSRLHCESESFKMDLILDVNIQIYPVDLGDKFRLVIASTLYEDGTLDDGEYNPTDDRPSRADQFEYVMYGKVYRIEGDETSTEAATRLSAYVSYGGLLMRLQGDANNLHGFEVDSRVYLLMKKLAF

SEQ ID NO: 11203 - protein, 31 aa, Homo sapiens
VSRLHCESESFKMDLILDVNIQIYPVDLGKY

SEQ ID NO: 11204 - protein, 33 aa, Homo sapiens
LGDKFRLVIASTLYEDGTLDDGEYNPTDDRPSR

SEQ ID NO: 11205 - protein, 78 aa, Homo sapiens
LLRITLLLLLHRADQFEYVMYGKVYRIEGDETSTEAATRLSAYVSYGGLLMRLQGDANNLHGFEVDSRVYLLMKKLAF

SEQ ID NO: 11206 - protein, 55 aa, Homo sapiens
LLSGSAPESRDGAFCFSSAYVSYGGLLMRLQGDANNLHGFEVDSRVYLLMKKLAF

SEQ ID NO: 11207 - protein, 139 aa, Homo sapiens
MLAFCRGDVVHFLLVKRDESGAIHVTKQKHLHLYYDLINFTWINSRTVVLLDSVEKLHVIDRQTQEELETVEISEVQLVYNSSHFKSLATGGNVSQALALVGEKACYQSISSYGGQIFYLGTKSVYVMMLRSWREVSSK

SEQ ID NO: 11208 - protein, 129 aa, Homo sapiens
MYDKLSENSVAKGVFLECLEPYILSDKLVGITPQVMKDLIVHFQDKKLMENVEALIVHMDITSLDIQQVVLMCWENRLYDAMIYVYNRGMNEFISPMEKLFRVIAPPLNAGKTLTGIYFLSLNFLLSCI

SEQ ID NO: 11209 - protein, 22 aa, Homo sapiens
MRWEPRIPDRTLKSMDSKMDFI

SEQ ID NO: 11210 - protein, 119 aa, Homo sapiens
LRLGVCRPPLLLGPGMYRWLVRILGTIFRFCDRSVPPARALLKRRRSDSTLFSTVDTDEIPAKRPRLDCFIHQVKNSLYNAASLFGFPFQLTTKPMVTSACNGTRNVAPSGEVINLLME

SEQ ID NO: 11211 - protein, 56 aa, Homo sapiens
LFCFGGCFGKTVYKLIFVVLVFKAKKRKTKNKNKPFGNCALCPLARAVPTYEDTAA

SEQ ID NO: 11212 - protein, 20 aa, Homo sapiens
MWSPSRASPLSLPNHVAECG

SEQ ID NO: 11213 - protein, 43 aa, Homo sapiens
LNLKYYPLSRKRGAVRTAVPHSVVLKIINHGYSWEPPGHVVAK

SEQ ID NO: 11214 - protein, 7 aa, Homo sapiens
LFLKLAL

SEQ ID NO: 11215 - protein, 598 aa, Homo sapiens
MGDRGVARLSQSLEIREPRGDLEAREKRRLAELRSWEEGAGSSLRGMSERRCPPEHREGVNDTGGSLFPQKLLNAETSQSGIRDAESTMDGFYDQQVPFMVPGKSRSEECRGRPVIDRKRKFLDTDLAHDSEELFQDLSQLQEAWLAEAQVPDDEQFVPDFQSDNLVLHAPPPTKIKRELHSPSSELSSCSHEQALGANYGEKCLYNYCAYDRKPPSGFKPLTPPTTPLSPTHQNPLFPPPQATLPTSGHAPAAGPVQGVGPAPAPHSLPEPGPQQQTFAVPRPPHQPLQMPKMMPENQYPSEQRFQRQLSEPCHPFPPQPGVPGDNRPSYHRQMSEPIVPAAPPPPQGFKQEYHDPLYEHGVPGMPGPPAHGFQSPMGIKQEPRDYCVDSEVPNCQSSYMRGGYFSSSHEGFSYEKDPRLYFDDTCVVPERLEGKVKQEPTMYREGPPYQRRGSLQLWQFLVTLLDDPANAHFIAWTGRGMEFKLIEPEEVARRWGIQKNRPAMNYDKLSRSLRYYYEKGIMQKVAGERYVYKFVCDPDALFSMAFPDNQRPFLKAESECHLSEEDTLPLTHFEDSPAYLLDMDRCSSLPYAEGFAY

SEQ ID NO: 11216 - protein, 550 aa, Homo sapiens
LRRRGRCKGRREAASGGSLFPQKLLNAETSQSGIRDAESTMDGFYDQQVPFMVPGKSRSEECRGRPVIDRKRKFLDTDLAHDSEELFQDLSQLQEAWLAEAQVPDDEQFVPDFQSDNLVLHAPPPTKIKRELHSPSSELSSCSHEQALGANYGEKCLYNYCAYDRKPPSGFKPLTPPTTPLSPTHQNPLFPPPQATLPTSGHAPAAGPVQGVGPAPAPHSLPEPGPQQQTFAVPRPPHQPLQMPKMMPENQYPSEQRFQRQLSEPCHPFPPQPGVPGDNRPSYHRQMSEPIVPAAPPPPQGFKQEYHDPLYEHGVPGMPGPPAHGFQSPMGIKQEPRDYCVDSEVPNCQSSYMRGGYFSSSHEGFSYEKDPRLYFDDTCVVPERLEGKVKQEPTMYREGPPYQRRGSLQLWQFLVTLLDDPANAHFIAWTGRGMEFKLIEPEEVARRWGIQKNRPAMNYDKLSRSLRYYYEKGIMQKVAGERYVYKFVCDPDALFSMAFPDNQRPFLKAESECHLSEEDTLPLTHFEDSPAYLLDMDRCSSLPYAEGFAY

SEQ ID NO: 11217 - protein, 165 aa, Homo sapiens
LQMPKMMPENQYPSEQRFQRQLSEPCHPFPPQPGVPGDNRPSYHRQMSEPIVPAAPPPPQGFKQEYHDPLYEHGVPGMPGPPAHGFQSPMGIKQEPRDYCVDSEVPNCQSSYMRGGYFSSSHEGKEPAFLSSSLLSPLLSSFLSLGFSFSYLPSFLFLCLTNTQA

SEQ ID NO: 11218 - protein, 126 aa, Homo sapiens
LRRRGRCKGRREAASGGSLFPQKLLNAETSQSGIRDAESTMDGFYDQQVPFMVPGKSRSEECRGRPVIDRKRKFLDTDLAHDSEELFQDLSQLQEAWLAEAQVPDDEQFVPDFQSDNRKMSCFPLS

SEQ ID NO: 11219 - protein, 37 aa, Homo sapiens
VVFRIMSGGSADYNREHGGPEGMDPDGVIEVRNGCGS

SEQ ID NO: 11220 - protein, 38 aa, Homo sapiens
VVFRIMSGGSADYNSREHGGPEGMDPDGVIEVRNGCGS

SEQ ID NO: 11221 - protein, 82 aa, Homo sapiens
VVFRIMSGGSADYNSREHGGPEGMDPDGVIESNWNEIVDNFDDMNLKESLLRGIYAYGFEKPSAIQQRAIIPCIKGKRNWHF

SEQ ID NO: 11222 - protein, 126 aa, Homo sapiens
VVFRIMSGGSADYNSREHGGPEGMDPDGVIESNWNEIVDNFDDMNLKESLLRGIYAYGFEKPSAIQQRAIIPCIKGYDVIAQAQSGTGKTATFAISILQQLEIEFKETQALVLAPTRELAQQVLIV

SEQ ID NO: 11223 - protein, 58 aa, Homo sapiens
MCILLFLGYDVIAQAQSGTGKTATFAISILQQLEIEFKETQALVLAPTRELAQQVLIV

SEQ ID NO: 11224 - protein, 70 aa, Homo sapiens
LDTLCDLYETLTITQAVIFLNTRRKVDWLTEKMHARDFTVSALARGIDVQQVSLVINYDLPTNRENYIHR

SEQ ID NO: 11225 - protein, 39 aa, Homo sapiens
MILIRLPRPPKVLGLQMSFDHPEKNGPWPADPINLPSHG

SEQ ID NO: 11226 - protein, 7 aa, Homo sapiens
MDNSANS

SEQ ID NO: 11227 - protein, 53 aa, Homo sapiens
MFKRQLISFFLQLVTTEKRFLKDSLYNEGILIVWDPSVYHSDIPKMGKLKCGE

SEQ ID NO: 11228 - protein, 93 aa, Homo sapiens
LRELGPPFPPAPQALADRDLRPRVGKKQRPGRRGVWLTLFLAMSSHKTFTIKRFLAKKQKQNRPIPQWIQMKPGSKIRYNSKRRHWRRTKLGL

SEQ ID NO: 11229 - protein, 23 aa, Homo sapiens
LSKMPQCICIFLQVKVYNLQSVY

SEQ ID NO: 11230 - protein, 46 aa, Homo sapiens
LYLQADTDLRIFIEKEHLREYFKYCICISKKIFCLKCLSVFVFFCK

SEQ ID NO: 11231 - protein, 66 aa, Homo sapiens [sequence omitted]

SEQ ID NO: 11232 - protein, 646 aa, Homo sapiens
VSSLEPIKRSSWPADPEINPEGFCILLDFMYTSRLNLREGNIMAVMATAMYLQMEHVVDTCRKFIKASEAEMVSAIKPPREEFLNSRMLMPQDIMAYRGREVVENNLPLRSAPGCESRAFAPSLYSGLSTPPASYSMYSHLPVSSLLFSDEEFRDVRMPVANPFPKERALPCDSARPVPGEYSRPTLEVSPNVCHSNIYSPKETIPEEARSDMHYSVAEGLKPAAPSARNAPYFPCDKASKEEERPSSEDEIALHFEPPNAPLNRKGLVSPQSPQKSDCQPNSPTESCSSKNACILQASGSPPAKSPTDPKACNWKKYKFIVLNSLNQNAKPEGPEQAELGRLSPRAYTAPPACQPPMEPENLDLQSPTKLSASGEDSTIPQASRLNNIVNRSMTGSPRSSSESHSPLYMHPPKCTSCGSQSPQHAEMCLHTAGPTFPEEMGETQSEYSDSSCENGAFFCNECDCRFSEEASLKRHTLQTHSDKPYKCDRCQASFRYKGNLASHKTVHTGEKPYRCNICGAQFNRPANLKTHTRIHSGEKPYKCETCGARFVQVAHLRAHVLIHTGEKPYPCEICGTRFRHLQTLKSHLRIHTGEKPYHCEKCNLHFRHKSQLRLHLRQKHGAITNTKVQYRVSATDLPPELPKAC

SEQ ID NO: 11233 - protein, 80 aa, Homo sapiens
LKTHTRIHSGEKPYKCETCGARFVQVAHLRAHVLIHTGEKPYPCEICGTRFRHLQTLKSHLRIHTGEKPYHVRKPLEAAL

SEQ ID NO: 11234 - protein, 26 aa, Homo sapiens
LGFLEVVMQEVSRKGRTPGFEQNFGL

SEQ ID NO: 11235 - protein, 286 aa, Homo sapiens
LNCQAGKQAEEMSTIGSFEGFQAVSLKQEGDDQPSETDHLSMEEEDPMPRQISRQSSVTESTLYPNPYHQPYISRKYFATRPGAIETAMEDLKGHVAETSGETIQGFWLLTKIDHWNNEKERILLVTDKTLLICKYDFIMLSCVQLQRIPLSAVYRICLGKFTFPGMSLDKRQGEGLRIYWGSPEEQSLLSRWNPWSTEVPYATFTEHPMKYTSEKFLEICKLSGFMSKLVPAIQNAHKNSTGSGRGKKLMVLTEPILIETYTGLMSFIGNRNKLGYSLARGSIGF

SEQ ID NO: 11236 - protein, 293 aa, Homo sapiens
LCRKRKKSLEDQPSQAEEMSTIGSFEGFQAVSLKQEGDDQPSETDHLSMEEEDPMPRQISRQSSVTESTLYPNPYHQPYISRKYFATRPGAIETAMEDLKGHVAETSGETIQGFWLLTKIDHWNNEKERILLVTDKTLLICKYDFIMLSCVQLQRIPLSAVYRICLGKFTFPGMSLDKRQGEGLRIYWGSPEEQSLLSRWNPWSTEVPYATFTEHPMKYTSEKFLEICKLSGFMSKLVPAIQNAHKNSTGSGRGKKLMVLTEPILIETYTGLMSFIGNRNKLGYSLARGSIGF

SEQ ID NO: 11237 - protein, 25 aa, Homo sapiens
LKYGITKQTNKQKTHVLKYSVLNMA

SEQ ID NO: 11238 - protein, 76 aa, Homo sapiens
VPVRLLRKSMRHWEGLGRGSVPLLLRATSWVIPGPGAGLGLTRGLPRGRLGACVTSPPAGCGDYVGPLWPVRSASL

SEQ ID NO: 11239 - protein, 134 aa, Homo sapiens
MPADIMEKNSSSPVAATPASVNTTPDKPKTASEHRKSSKPIMEKRRRARINESLSQLKTLILDALKKDVSGEMLLALLIKKQTLSQLLRVKPPALRGLALAGTAFSQAGGPGLIRWGPEIMLALRGREEGPPAL

SEQ ID NO: 11240 - protein, 64 aa, Homo sapiens
LLYTLIEKTMQNVKHPVTGQFLYQDSNWASKVEKLTLDNAAFPFLAYSGIPAVSFCFCEVSLFI

SEQ ID NO: 11241 - protein, 131 aa, Homo sapiens
MVTSESKNVKLTVSNVLKEIKILNIFGVIKGFVEPDHYVVVGAQRDAWGPGAAKSGVGTALLLKLAQMFSDMVLKDGFQPSRSIIFASWSAGDFGSVGATEWLEGYLSSLHLKAFTYINLDKAVLGKYPFH

SEQ ID NO: 11242 - protein, 14 aa, Homo sapiens
MMDQARSAFSNLDL

SEQ ID NO: 11243 - protein, 128 aa, Homo sapiens
LRLRRTQGSPRTPIFCGLFSSRGGFRPSVVKDCIHAVLKEELANAEYSPEEMPQLTKHLSENIKDKLKEMGFDRYKMVVQVVIGEQRGEGVFMASRCFWDADTDNYTHDVFMNDSLFCVVAAFGCFYY

SEQ ID NO: 11244 - protein, 187 aa, Homo sapiens
VRGARGLQRGGRAALLPWRRFPCCRPRPQPARPSSRATPGPRSPGMATSIGVSFSVGDGVPEAEKNAGEPENTYILRPVFQQRFRPSVVKDCIHAVLKEELANAEYSPEEMPQLTKHLSENIKDKLKEMGFDRYKMVVQVVIGEQRGEGVFMASRCFWDADTDNYTHDVFMNDSLFCVVAAFGCFYY

SEQ ID NO: 11245 - protein, 163 aa, Homo sapiens
LLPWRRFPCCRPRPQPARPSSRATPGPRSPGMATSIGVSFSVGDGVPEAEKNAGEPENTYILRPVFQQRFRPSVVKDCIHAVLKEELANAEYSPEEMPQLTKHLSENIKDKLKEMGFDRYKMVVQVVIGEQRGEGVLLECSGMISAHCNLCLPGSSDSPASAS

SEQ ID NO: 11246 - protein, 151 aa, Homo sapiens
LFLQKLRMKTEEEARTHTEIEMFLRKEQQKLEERLEFWMEKYDKDTEMKQNELNALKATKASDLAHLQDLAKMIREYEQVIIEDRIEKERSKKKVKQDLLELKSVIKLQAWWRGTMIRREIGGFKMPKDKVDSKDSKGKGKGKDKRRGKKK

SEQ ID NO: 11247 - protein, 124 aa, Homo sapiens
LQGTESPGSQLKLRMKTEEEARTHTEIEMFLRKEQQKLEERLEFWMEKYDKDTEMKQNELNALKATKASDLAHLQDLAKMLQAWWRGTMIRREIGGFKMPKDKVDSKDSKGKGKGKDKRRGKKK

SEQ ID NO: 11248 - protein, 34 aa, Homo sapiens
LFLQKLRMKTEEEARTHTEIEMFLRKEQQGYASE

SEQ ID NO: 11249 - protein, 144 aa, Homo sapiens
MFNPTRPRGGASSFSYRHLGSCGGLLGTGLLKGTMSGRLWSKAIFAGYKRGLRNQREHTALLKIEGVYARDETEFYLGKRCAYVYKAKNNTVTPGGKPNKTRVIWGKVTRAHGNSGMVRAKFRSNLPAKAIGHRIRVMLYPSRI

SEQ ID NO: 11250 - protein, 11 aa, Homo sapiens
VKGLLLKFGGK

SEQ ID NO: 11251 - protein, 84 aa, Homo sapiens
LRATRVEVTLNLYPTISACIPLLSLFKISNTVTPGGKPNKTRVIWGKVTRAHGNSGMVRAKFRSNLPAKAIGHRIRVMLYPSRI

SEQ ID NO: 11252 - protein, 414 aa, Homo sapiens
MWQSFRRSTVLNEHKKIHTGEKPYKCEECGKAFTRSTTLNEHKKIHTGEKPYKCKECGKAFRWSTSLNEHKNIHTGEKPYKCKECGKAFRQSRSLNEHKNIHTGEKPYTCEKCGKAFNQSSSLIIHRSIHSEQKLYKCEECGKAFTWSSSLNKHKRIHTGEKPYTCEECGKAFYRSSHLAKHKRIHTGEKPYTCEECGKAFNQSSTLILHKRIHSGQKPYKCEECGKAFTRSTTLNEHKKIHTGEKPYKCEECGKAFIWSASLNEHKNIHTGEKPYKCKECGKAFNQSSGLIIHRSIHSEQKLYKCEECGKAFTRSTALNEHKKIHSGEKPYKCKECGKAYNLSSTLTKHKRIHTGEKPFTCEECGKAFNWSSSLTKHKIIHTGEKSYKCEECGKVLIGPQPLLYTSDSYWQGT

SEQ ID NO: 11253 - protein, 975 aa, Homo sapiens
VFPAPWGRLPGESATVAAHGEEPLTFRDVAIEFSPEEWKCLDPAQQNLYRDVMLENYRNLVSLAMCSHFTQDFLPVQGIEDSFHKLILRRYEKCGHDNLQLRKGCKSMNVCKVQKGVYNGINKCLSNTQSKIFQCNARVKVFSKFANSNKDKTRHTGEKHFKCNECGKSFQKFSDLTQHKGIHAGEKPYTCEERGKDFGWYTDLNQHKKIHTGEKPYKCEECGKAFNRSTNLTAHKRIHNREKAYTGEDRDRAFGWSTNLNEYKKIHTGDKPYKCKECGKAFMHSSHLNKHEKIHTGEKPYKCKECGKVISSSSSFAKHKRIHTGEKPFKCLECGKAFNISTTLTKHRRIHTGEKPYTCEVCGKAFRQSANLYVHRRIHTGEKPYTCGECGKTFRQSANLYVHRRIHTGEKPYKCEDCGKAFGRYTALNQHKKIHTGEKPYKCEECGKAFNSSTNLTAHKRIHTREKPYTCEDRGRAFGLSTNLNEYKKIHTGDKPYKCKECGKAFIHSLHLNKHEKIHTGKKPYKCKQCGKVITSSSSFAKHKRIHTGEKPFECLECGKAFTSSTTLTKHRRIHTGEKPYTCEVCGKAFRQSAILYVHRRIHTGEKPYTCEECGKTFRQSANLYVHRRIHTGEKPYKCEECGKAFGRYTDLNQHKKIHTGEKLYKCEECGKDFVWYTDLNQQKKIYTGEKPYKCEECGKAFAPSTDLNQHTKILTGEQSYKCEECGKAFGWSIALNQHKKIHTGEKPYKCEECGKAFSRSRNLTTHRRVHTREKPYKCEDRGRSFGWSTNLNEYKKIHTGDKLYKCKECGKVFKQSSHLNRHEKIHTGKKPYKCKECGKVITSSSSFAKHKRIHTGEKPFKCLECGKAFTSSTTLTKHRRIHTGEKPYTCEECGKAFRQSAILYVHRRIHTGEKPYTCGECGKTFRQSANLYAHKKIHTGEKPYTCGDCGKTFRQSANLYAHKKIHTGDKTIQV

SEQ ID NO: 11254 - protein, 679 aa, Homo sapiens
VRAQTPTRRRNRQCSPKPRSPRARVAMRPLRPRAALLALLASLLAAPPVAPAEAPHLVHVDAARALWPLRRFWRSTGFCPPLPHSQADQYVLSWDQQLNLAYVGAVPHRGIKQVRTHWLLELVTTRGSTGRGLSYNFTHLDGYLDLLRENQLLPGFELMGSASGHFTDFEDKQQVFEWKDLVSSLARRYIGRYGLAHVSKWNFETWNEPDHHDFDNVSMTMQGFLNYYDACSEGLRAASPALRLGGPGDSFHTPPRSPLSWGLLRHCHDGTNFFTGEAGVRLDYISLHRKGARSSISILEQEKVVAQQIRQLFPKFADTPIYNDEADPLVGWSLPQPWRADVTYAAMVVKVIAQHQNLLLANTTSAFPYALLSNDNAFLSYHPHPFAQRTLTARFQVNNTRPPHVQLLRKPVLTAMGLLALLDEEQLWAEVSQAGTVLDSNHTVGVLASAHRPQGPADAWRAAVLIYASDDTRAHPNRSVAVTLRLRGVPPGPGLVYVTRYLDNGLCSPDGEWRRLGRPVFPTAEQFRRMRAAEDPVAAAPRPLPAGGRLTLRPALRLPSLLLVHVCARPEKPPGQVTRLRALPLTQGQLVLVWSDEHVGSKCLWTYEIQFSQDGKAYTPVSRKPSTFNLFVFSPDTGAVSGSYRVRALDYWARPGPFSDPVPYLEVPVPRGPPSPGNP

SEQ ID NO: 11255 - protein, 568 aa, Homo sapiens
LSPRNAGLVGIQPHRGSTGRGLSYNFTHLDGYLDLLRENQLLPGFELMGSASGHFTDFEDKQQVFEWKDLVSSLARRYIGRYGLAHVSKWNFETWNEPDHHDFDNVSMTMQGFLNYYDACSEGLRAASPALRLGGPGDSFHTPPRSPLSWGLLRHCHDGTNFFTGEAGVRLDYISLHRKGARSSISILEQEKVVAQQIRQLFPKFADTPIYNDEADPLVGWSLPQPWRADVTYAAMVVKVIAQHQNLLLANTTSAFPYALLSNDNAFLSYHPHPFAQRTLTARFQVNNTRPPHVQLLRKPVLTAMGLLALLDEEQLWAEVSQAGTVLDSNHTVGVLASAHRPQGPADAWRAAVLIYASDDTRAHPNRSVAVTLRLRGVPPGPGLVYVTRYLDNGLCSPDGEWRRLGRPVFPTAEQFRRMRAAEDPVAAAPRPLPAGGRLTLRPALRLPSLLLVHVCARPEKPPGQVTRLRALPLTQGQLVLVWSDEHVGSKCLWTYEIQFSQDGKAYTPVSRKPSTFNLFVFSPDTGAVSGSYRVRALDYWARPGPFSDPVPYLEVPVPRGPPSPGNP

SEQ ID NO: 11256 - protein, 89 aa, Homo sapiens
VTEITSSSPSHPANSFYYPRLKALPPIARVTLVRLRQSPRAFIPPAPVLPSRDNEIVDSASGNGHTGHMGHTAAPNPATGRPPNPNLRL

SEQ ID NO: 11257 - protein, 50 aa, Homo sapiens
LPQALPCSTLRSLPAPPPPQPRPCAARPARRRRGGRAPRRRAQTRELYHS

SEQ ID NO: 11258 - protein, 7 aa, Homo sapiens
MNFEFRN

SEQ ID NO: 11259 - protein, 742 aa, Homo sapiens
MSLQVLNDKNVSNEKNTENCDFLFSPPEVTGRSSVLRVSQKENVPPKNLAKAMKVTFQTPLRDPQTHRILSPSMASKLEAPFTQDDTLGLENSHPVWTQKENQQLIKEVDAKTTHGILQKPVEADTDLLGDASPAFGSGSSSESGPGALADLDCSSSSQSPGSSENQMVSPGKVSGSPEQAVEENLSSYSLDRRVTPASETLEDPCRTESQHKAETPHGAEEECKAETPHGAEEECRHGGVCAPAAVATSPPGAIPKEACGGAPLQGLPGEALGCPAGVGTPVPADGTQTLTCAHTSAPESTAPTNHLVAGRAMTLSPQEEVAAGQMASSSRSGPVKLEFDVSDGATSKRAPPPRRLGERSGLKPPLRKAAVRQQKAPQEVEEDDGRSGAGEDPPMPASRGSYHLDWDKMDDPNFIPFGGDTKSGCSEAQPPESPETRLGQPAAEQLHAGPATEEPGPCLSQQLHSASAEDTPVVQLAAETPTAESKERALNSASTSLPTSCPGSEPVPTHQQGQPALELKEESFRDPAEVLGTGAEVDYLEQFGTSSFKESALRKQSLYLKFDPLLRDSPGRPVPVATETSSMHGANETPSGRPREAKLVEFDFLGALDIPVPGPPPGVPAPGGPPLSTGPIVDLLQYSQKDLDAVVRTQVVAIPQNLQAALGLGQQWAGVQQPDPPSLPSLPLLVGVELQRAAGPWPVTTAQVAEGPGFHPVSPQSAAHQQPPRDSPAWAWRWPLVALQQ

SEQ ID NO: 11260 - protein, 401 aa, Homo sapiens
LRLLSLRMTPLDWKTHTRSGHRKRKQLHSASAEDTPVVQLAAETPTAESKERALNSASTSLPTSCPGSEPVPTHQQGQPALELKEESFRDPAEVLGTGAEVDYLEQFGTSSFKESALRKQSLYLKFDPLLRDSPGRPVPVATETSSMHGANETPSGRPREAKLVEFDFLGALDIPVPGPPPGVPAPGGPPLSTGPIVDLLQYSQKDLDAVVKATQEENRELRSRCEELHGKNLELGKIMDRFEEVVYQAMEEVQKQKELSKAEIQKVLKEKDQLTTDLNSMEKSFSDLFKRFEKQKEVIEGYRKNEESLKKCVEDYLARITQEGQRYQALKAHAEEKLQLANEEIAQVRSKAQAEALALQASLRKEQMRIQSLEKTVEQKTKENEELTRICDDLISKMEKI

SEQ ID NO: 11261 - protein, 401 aa, Homo sapiens
LRLLSLRMTPLDWKTHTRSGHRKRRQLHSASAEDTPVVQLAAETPTAESKERALNSASTSLPTSCPGSEPVPTHQQGQPALELKEESFRDPAEVLGTGAEVDYLEQFGTSSFKESALRKQSLYLKFDPLLRDSPGRPVPVATETSSMHGANETPSGRPREAKLVEFDFLGALDIPVPGPPPGVPAPGGPPLSTGPIVDLLQYSQKDLDAVVKATQEENRELRSRCEELHGKNLELGKIMDRFEEVVYQAMEEVQKQKELSKAEIQKVLKEKDQLTTDLNSMEKSFSDLFKRFEKQKEVIEGYRKNEESLKKCVEDYLARITQEGQRYQALKAHAEEKLQLANEEIAQVRSKAQAEALALQASLRKEQMRIQSLEKTVEQKTKENEELTRICDDLISKMEKI

SEQ ID NO: 11262 - protein, 149 aa, Homo sapiens
LGGGTHHPPRLTPTAHLSSWRSSPLPHSLGCLWHPSFRLPPHPERLLFFSQEEVQKQKELSKAEIQKVLKEKDQLTTDLNSMEKSFSDLFKRFEKQKEVIEGYRKVCLRHPGVLTSEADGLMVQASGATSCCLCTLVLGQASPCHGGMG

SEQ ID NO: 11263 - protein, 276 aa, Homo sapiens
LGWMEFSIKQSPLSVQSVVKCIKMKQAPEILGSANGKTPSCEVNRECSVFLSKAQLSSSLQEGVMQKFNGHDALPFIPADKLKDLTSRVFNGEPGAHDAKLRFESQEMKGIGTPPNTTPIKNGSPEIKLKITKTYMNGKPLFESSICGDSAADVSQSEENGQKPENKARRNRKRSIKYDSLLEQGLVEAALVSKISSPSDKKIPAKKESCPNTGRDKDHLLKYNVGDLVWSKVSGYPWWPCMVSADPLLHSYTKLKGIFKSKKFEHLKTSQIVLKD

SEQ ID NO: 11264 - protein, 487 aa, Homo sapiens
LGWMEFSIKQSPLSVQSVVKCIKMKQAPEILGSANGKTPSCEVNRECSVFLSKAQLSSSLQEGVMQKFNGHDALPFIPADKLKDLTSRVFNGEPGAHDAKLRFESQEMKGIGTPPNTTPIKNGSPEIKLKITKTYMNGKPLFESSICGDSAADVSQSEENGQKPENKARRNRKRSIKYDSLLEQGLVEAALVSKISSPSDKKIPAKKESCPNTGRDKDHLLKYNVGDLVWSKVSGYPWWPCMVSADPLLHSYTKLKGQKKSARQYHVQFFGDAPERAWIFEKSLVAFEGEGQFEKLCQESAKQAPTKAEKIKLLKPISGKLRAQWEMGIVQAEEAASMSVEERKAKFTFLYVGDQLHLNPQVAKEAGIAAESLGEMAESSGVSEEAAENPKSVREECIPMKRRRRAKLCSSAETLESHPDIGKSTPQKTAEADPRRGVGSPPGRKKTTVSMPRSRKGDAASQFLVFCQKHRDEVSTKLCFMLASFRI

SEQ ID NO: 11265 - protein, 133 aa, Homo sapiens
LVAPVQAEEDSGNVNGKKRNHTKRIQDPTEDAEAEDTPRKRLRTDKHSLRKVSDSPGDEPSESPYESADETQTEVSVSSKKSERGVTAKKEYVCQQNGIFCHWRQKQTASLVVRGAEGTAGRCLPACSAPAAV

SEQ ID NO: 11266 - protein, 144 aa, Homo sapiens
VRVAAAGSWEIERLTERLEEKEREMQQLLSQPQHEREKEVVLLRRSMAEGERARAASDVLCRSLANETHQLRRTLTATAHMCQHLAKCLDERQHAQRNVGERSPDQVGHSVSRVWGRPLCAGSIAYRPLITEVGGRPRTHFCSQ

SEQ ID NO: 11267 - protein, 171 aa, Homo sapiens
LGDVGCLGWWPLSRMASLGPRTPAPSRSRGRRAMCWVSTISFMAAEEMHWPVPMKAIGAQNLLTMPGGVAKAGYLHKKGGTQLQLLKWPLRFVIIHKRCVYYFKSSTSASPQGAFSLSGYNRVMRAAEETTSNNVFPFKIIHISKKHRTWFFSASSEEERKVTGGPRTSAR

SEQ ID NO: 11268 - protein, 137 aa, Homo sapiens
LALLKRCVLMYGSLPSFHAIMGPLQALLTDHLADCSHPQELQELCQSTLTEMESQKQLCRPLTCEKSKPVPLKLFTPRLVKVLEFGRKQGSSKEEQERKRLVSNSRPQVIHLPWPPNYRCEPQHPAKKVIFFRVIML

SEQ ID NO: 11269 - protein, 21 aa, Homo sapiens
MDGRSGSAFTCGPEPHSLPRC

SEQ ID NO: 11270 - protein, 8 aa, Homo sapiens
LNFYMTAF

SEQ ID NO: 11271 - protein, 69 aa, Homo sapiens
VRGRLGATADCRQVQGVRGRLGGGIPGHTGQITSVPLGDTTSPSRPPGGPIITVHPKEIRTFFIHFQQQ

SEQ ID NO: 11272 - protein, 28 aa, Homo sapiens
LLLMGWVFLNSLDVTLKAGSLFLIYEYV

SEQ ID NO: 11273 - protein, 50 aa, Homo sapiens
VGPASAGPGAATWFLRATALWAWELPLRNTPQGQACEVSAGHGEPPCRDH

SEQ ID NO: 11274 - protein, 115 aa, Homo sapiens
LRVMENLPAVTTEEPTPMGRGPVGPSGGGSTRDQVRTVVMRPSVSWEKAGPEEAKAPVRGGEFIPPSPPALHPTHFSTPPAPSIHPSPPCLPPGLLGLGLESALHHFSFPSPACV

SEQ ID NO: 11275 - protein, 116 aa, Homo sapiens
LRVMENLPAVTTEEPTPMGRGPVGPSGGGSTRDQVRTVVMRPSVSWEKAGPEEAKAPVRGGATVPAESLERPGPSSCFSRDASVITKLAKNEAGAFEPPCSETVPETVRWVWPWNP

SEQ ID NO: 11276 - protein, 205 aa, Homo sapiens
LRVMENLPAVTTEEPTPMGRGPVGPSGGGSTRDQVRTVVMRPSVSWEKAGPEEAKAPVRGDLTLQLLAVRRKSRLRDPGLQQTLRGQLRLLENDSREMARVLGELSARLLSIHSDQDRIVVTFKTFEEIWKFSTYHALGFTHHCLANLLMDQAFWLLLPSEEEETAIQVHVDENALRLTHESLLIQEGGLLGSPRTPSTMPWVAL

SEQ ID NO: 11277 - protein, 1339 aa, Homo sapiens
LRVMENLPAVTTEEPTPMGRGPVGPSGGGSTRDQVRTVVMRPSVSWEKAGPEEAKAPVRGDEAPPARVAGPAAGTPPCQMGVYPTDLTLQLLAVRRKSRLRDPGLQQTLRGQLRLLENDSREMARVLGELSARLLSIHSDQDRIVVTFKTFEEIWKFSTYHALGFTHHCLANLLMDQAFWLLLPSEEEETAIQVHVDENALRLTHESLLIQEGPFFVLCPDHHVRVMTGPRDAGNGPQALRQASGAPQGEAAPETDSSPPSPSVSSEEVAVAAAPEPLIPFHQWALRIPQDPIDDAMGGPVMPGNPLMAVGLASALADFQGSGPEEMTFRGGDLIEILGAQVPSLPWCVGRHAASGRVGFVRSSLISMQGPVSELESAIFLNEEEKSFFSEGCFSEEDARQLLRRMSGTDVCSVYSLDSVEEAETEQPQEKEIPPPCLSLEPQETLQKVKNVLEQCKTCPGCPQEPASWGLCAASSDVSLQDPEEPSFCLEAEDDWEDPEALSSLLLFLNAPGYKASFRGLYDVALPWLSSVFRSFSDEEELTGRLAQARGAAKKAGLLMALARLCFLLGRLCSRRLKLSQARVYFEEALGALEGSFGDLFLVVAVYANLASIYRKQKNREKCAQVVPKAMALLLGTPDHICSTEAEGELLQLALRRAVGGQSLQAEARACFLLARHHVHLKQPEEALPFLERLLLLHRDSGAPEAAWLSDCYLLLADIYSRKCLPHLVLSCVKVASLRTRGSLAGSLRSVNLVLQNAPQPHSLPAQTSHYLRQALASLTPGTGQALRGPLYTSLAQLYSHHGCHGPAITFMTQAVEASAIAGVRAIVDHLVALAWLHVLHGQSPVALDILQSVRDAVVASEDQEGVIANMVAVALKRTGRTRQAAESYYRALRVARDLGQQRNQAVGLANFGALCLHAGASRLAQHYLLEAVRLFSRLPLGECGRDFTHVLLQLGHLCTRQGPAQQGKGYYEWALLVAVEMGHVESQLRAVQRLCHFYSAVMPSEAQCVIYHELQLSLACKVADKVLEGQLLETISQLYLSLGTERAYKSALDYTKRSLGIFIDLQKKEKEAHAWLQAGKIYYILRQSELVDLYIQVAQNVALYTGDPNLGLELFEAAGDIFFDGAWEREKAVSFYRDRALPLAVTTGNRKAELRLCNKLVALLATLEEPQEGLEFAHMALALSITLGDRLNERVAYHRLAALQHRLGHGELAEHFYLKALSLCNSPLEFDEETLYYVKVYLVLGDIIFYDLKDPFDAAGYYQLALAAAVDLGNKKAQLKIYTRLATIYHNFLLDREKSLFFYQKARTFATELNVRRVNLPPLPLCGWAPWLAPSHPR

SEQ ID NO: 11278 - protein, 207 aa, Homo sapiens
LGESGARGGQGASERRETWSVWRLQRSQAFAWSPLILGTCCVADEAPPARVAGPAAGTPPCQMGVYPTDLTLQLLAVRRKSRLRDPGLQQTLRGQLRLLENDSREMARVLGELSARLLSIHSDQDRIVVTFKTFEEIWKFSTYHALGFTHHCLANLLMDQAFWLLLPSEEEETAIQVHVDENALRLTHESLLIQEAKTSLFRLQVGS

SEQ ID NO: 11279 - protein, 1322 aa, Homo sapiens
LGESGARGGQGASERRETWSVWRLQRSQAFAWSPLILGTCCVADEAPPARVAGPAAGTPPCQMGVYPTDLTLQLLAVRRKSRLRDPGLQQTLRGQLRLLENDSREMARVLGELSARLLSIHSDQDRIVVTFKTFEEIWKFSTYHALGFTHHCLANLLMDQAFWLLLPSEEEETAIQVHVDENALRLTHESLLIQEGPFFVLCPDHHVRVMTGPRDAGNGPQALRQASGAPQGEAAPETDSSPPSPSVSSEEVAVAAAPEPLIPFHQWALRIPQDPIDDAMGGPVMPGNPLMAVGLASALADFQGSGPEEMTFRGGDLIEILGAQVPSLPWCVGRHAASGRVGFVRSSLISMQGPVSELESAIFLNEEEKSFFSEGCFSEEDARQLLRRMSGTDVCSVYSLDSVEEAETEQPQEKEIPPPCLSLEPQETLQKVKNVLEQCKTCPGCPQEPASWGLCAASSDVSLQDPEEPSFCLEAEDDWEDPEALSSLLLFLNAPGYKASFRGLYDVALPWLSSVFRSFSDEEELTGRLAQARGAAKKAGLLMALARLCFLLGRLCSRRLKLSQARVYFEEALGALEGSFGDLFLVVAVYANLASIYRKQKNREKCAQVVPKAMALLLGTPDHICSTEAEGELLQLALRRAVGGQSLQAEARACFLLARHHVHLKQPEEALPFLERLLLLHRDSGAPEAAWLSDCYLLLADIYSRKCLPHLVLSCVKVASLRTRGSLAGSLRSVNLVLQNAPQPHSLPAQTSHYLRQALASLTPGTGQALRGPLYTSLAQLYSHHGCHGPAITFMTQAVEASAIAGVRAIVDHLVALAWLHVLHGQSPVALDILQSVRDAVVASEDQEGVIANMVAVALKRTGRTRQAAESYYRALRVARDLGQQRNQAVGLANFGALCLHAGASRLAQHYLLEAVRLFSRLPLGECGRDFTHVLLQLGHLCTRQGPAQQGKGYYEWALLVAVEMGHVESQLRAVQRLCHFYSAVMPSEAQCVIYHELQLSLACKVADKVLEGQLLETISQLYLSLGTERAYKSALDYTKRSLGIFIDLQKKEKEAHAWLQAGKIYYILRQSELVDLYIQVAQNVALYTGDPNLGLELFEAAGDIFFDGAWEREKAVSFYRDRALPLAVTTGNRKAELRLCNKLVALLATLEEPQEGLEFAHMALALSITLGDRLNERVAYHRLAALQHRLGHGELAEHFYLKALSLCNSPLEFDEETLYYVKVYLVLGDIIFYDLKDPFDAAGYYQLALAAAVDLGNKKAQLKIYTRLATIYHNFLLDREKSLFFYQKARTFATELNVRRVNLPPLPLCGWAPWLAPSHPR

SEQ ID NO: 11280 - protein, 177 aa, Homo sapiens
LGTCCVADEAPPARVAGPAAGTPPCQMGVYPTDLTLQLLAVRRKSRLRDPGLQQTLRGQLRLLENDSREMARVLGELSARLLSIHSDQDRIVVTFKTFEEIWKFSTYHALGFTHHCLANLLMDQAFWLLLPSEEEETAIQVHVDENALRLTHESLLIQEGGLLGSPRTPSTMPWVAL

SEQ ID NO: 11281 - protein, 791 aa, Homo sapiens
MGGPVMPGNPLMAVGLASALADFQGSGPEEMTFRGGDLIEILGAQVPSLPWCVGRHAASGRVGFVRSSLISMQGPVSELESAIFLNEEEKSFFSEGCFSEEDARQLLRRMSGTDVCSVYSLDSVEEAETEQPQEKEIPPPCLSLEPQETLQKVKNVLEQCKTCPGCPQEPASWGLCAASSDVSLQDPEEPSFCLEAEDDWEDPEALSSLLLFLNAPGYKASFRGLYDVALPWLSSVFRSFSDEEELTGRLAQARGAAKKAGLLMALARLCFLLGRLCSRRLKLSQARVYFEEALGALEGSFGDLFLVVAVYANLASIYRKQKNREKCAQVVPKAMALLLGTPDHICSTEAEGELLQLALRRAVGGQSLQAEARACFLLARHHVHLKQPEEALPFLERLLLLHRDSGAPEAAWLSDCYLLLADIYSRKCLPHLVLSCVKVASLRTRGSLAGSLRSVNLVLQNAPQPHSLPAQTSHYLRQALASLTPGTGQALRGPLYTSLAQLYSHHGCHGPAITFMTQAVEASAIAGVRAIVDHLVALAWLHVLHGQSPVALDILQSVRDAVVASEDQEGVIANMVAVALKRTGRTRQAAESYYRALRVARDLGQQRNQAVGLANFGALCLHAGASRLAQHYLLEAVRLFSRLPLGECGRDFTHVLLQLGHLCTRQGPAQQGKGYYEWALLVAVEMGHVESQLRAVQRLCHFYSAVMPSEAQCVIYHELQLSLACKVADKVLEGQLLETISQLYLSLGTERSSQPQQKQLHAFWAVLPTWWLLSSDLCLPRVFTPGLHLSP

SEQ ID NO: 11282 - protein, 845 aa, Homo sapiens
MGGPVMPGNPLMAVGLASALADFQGSGPEEMTFRGGDLIEILGAQVPSLPWCVGRHAASGRVGFVRSSLISMQGPVSELESAIFLNEEEKSFFSEGCFSEEDARQLLRRMSGTDVCSVYSLDSVEEAETEQPQEKEIPPPCLSLEPQETLQKVKNVLEQCKTCPGCPQEPASWGLCAASSDVSLQDPEEPSFCLEAEDDWEDPEALSSLLLFLNAPGYKASFRGLYDVALPWLSSVFRSFSDEEELTGRLAQARGAAKKAGLLMALARLCFLLGRLCSRRLKLSQARVYFEEALGALEGSFGDLFLVVAVYANLASIYRKQKNREKCAQVVPKAMALLLGTPDHICSTEAEGELLQLALRRAVGGQSLQAEARACFLLARHHVHLKQPEEALPFLERLLLLHRDSGAPEAAWLSDCYLLLADIYSRKCLPHLVLSCVKVASLRTRGSLAGSLRSVNLVLQNAPQPHSLPAQTSHYLRQALASLTPGTGQALRGPLYTSLAQLYSHHGCHGPAITFMTQAVEASAIAGVRAIVDHLVALAWLHVLHGQSPVALDILQSVRDAVVASEDQEGVIANMVAVALKRTGRTRQAAESYYRALRVARDLGQQRNQAVGLANFGALCLHAGASRLAQHYLLEAVRLFSRLPLGECGRDFTHVLLQLGHLCTRQGPAQQGKGYYEWALLVAVEMGHVESQLRAVQRLCHFYSAVMPSEAQCVIYHELQLSLACKVADKVLEGQLLETISQLYLSLGTERAYKSALDYTKRSLGIFIDLQKKEKEAHAWLQAGKIYYILRQSELVDLYIQVAQNVALYTGDPNLGLELFEAAGDIFFDGAWEREKAVSFYRGTG

SEQ ID NO: 11283 - protein, 136 aa, Homo sapiens
VQSVPRPTHKWGLWGPWVAGAEHGKVSFRPEKPQKGQLRAVQRLCHFYSAVMPSEAQCVIYHELQLSLACKVADKVLEGQLLETISQLYLSLGTERSSQPQQKQLHAFWAVLPTWWLLSSDLCLPRVFTPGLHLSP

SEQ ID NO: 11284 - protein, 181 aa, Homo sapiens
LWGPWVAGAEHGKVSFRPEKPQKGQLRAVQRLCHFYSAVMPSEAQCVIYHELQLSLACKVADKVLEGQLLETISQLYLSLGTERAYKSALDYTKRSLGIFIDLQKKEKEAHAWLQAGKIYYILRQSELVDLYIQVAQNVALYTGDPNLGLELFEAAGDIFFDGAWEREKAVSFYRVSWPVG

SEQ ID NO: 11285 - protein, 106 aa, Homo sapiens
VSFRPEKPQKGQLRAVQRLCHFYSAVMPSEAQCVIYHELQLSLACKVADKVLEGQLLETISQLYLSLGTERRQSQLCHLLPWGRVSRSHIPHVAHLALLEHPDLVG

SEQ ID NO: 11286 - protein, 82 aa, Homo sapiens
VSFRPEKPQKGQLRAVQRLCHFYSAVMPSEAQCVIYHELQLSLACKVADKVLEGQLLETISQLYLSLGTERPTGGGRLVPGG

SEQ ID NO: 11287 - protein, 148 aa, Homo sapiens
LQGGRQGAGGAAPGDHQPALPVPGHRATHGRRQTGSRRMTALVLTPVSDTRAYKSALDYTKRSLGIFIDLQKKEKEAHAWLQAGKIYYILRQSELVDLYIQVAQNVALYTGDPNLGLELFEAAGDIFFDGAWEREKAVSFYRVSWPVG

SEQ ID NO: 11288 - protein, 261 aa, Homo sapiens
LHTQEGRSQSHSRFICHQTHGRRQTGSRRMTALVLTPVSDTRAYKSALDYTKRSLGIFIDLQKKEKEAHAWLQAGKIYYILRQSELVDLYIQVAQNVALYTGDPNLGLELFEAAGDIFFDGAWEREKAVSFYRDRALPLAVTTGNRKAELRLCNKLVALLATLEEPQEGLEFAHMALALSITLGKPPEPLPCQDPHFARAQPPGLQGRSRNSCRIFLVSCPGRHICPAGSPVRPWGTARGPSLSAELPAWLSSASCASSPC

SEQ ID NO: 11289 - protein, 334 aa, Homo sapiens
LHTQEGRSQSHSRFICHQTHGRRQTGSRRMTALVLTPVSDTRAYKSALDYTKRSLGIFIDLQKKEKEAHAWLQAGKIYYILRQSELVDLYIQVAQNVALYTGDPNLGLELFEAAGDIFFDGAWEREKAVSFYRDRALPLAVTTGNRKAELRLCNKLVALLATLEEPQEGLEFAHMALALSITLGDRLNERVAYHRLAALQHRLGHGELAEHFYLKALSLCNSPLEFDEETLYYVKVYLVLGDIIFYDLKDPFDAAGYYQLALAAAVDLGNKKAQLKIYTRLATIYHNFLLDREKSLFFYQKARTFATELNVRRVNLPPLPLCGWAPWLAPSHPR

SEQ ID NO: 11290 - protein, 133 aa, Homo sapiens
LPVWQDRALPLAVTTGNRKAELRLCNKLVALLATLEEPQEGLEFAHMALALSITLGKPPEPLPCQDPHFARAQPPGLQGRSRNSCRIFLVSCPGRHICPAGSPVRPWGTARGPSLSAELPAWLSSASCASSPC

SEQ ID NO: 11291 - protein, 198 aa, Homo sapiens
VSLGAGKGLARTAQVTAVPGGEPGAAGVCMPAPGSHVLTPAPLACTPGDRLNERVAYHRLAALQHRLGHGELAEHFYLKALSLCNSPLEFDEETLYYVKVYLVLGDIIFYDLKDPFDAAGYYQLALAAAVDLGNKKAQLKIYTRLATIYHNFLLDREKSLFFYQKARTFATELNVRRVNLPPLPLCGWAPWLAPSHPR

SEQ ID NO: 11292 - protein, 137 aa, Homo sapiens
LQQEINYQSCPDWRKDCSNNPVSVFWKTVSRRFAEAACDVVHVMLNGSRSKIFDKNSTFGSVEVHNLQPEKVQTLEAWVIHGGREDSRDLCQDPTIKELESIISKRNIQFSCKNIYRPDKFLQCVKNPEDSSCTSEI

SEQ ID NO: 11293 - protein, 64 aa, Homo sapiens
MWWHRDSLWDRRLLQPAQVCDILKGVILVICYFMMHYVDYSMMYHLIRGQSVIKLYIIYNMLEP

SEQ ID NO: 11294 - protein, 215 aa, Homo sapiens
MGAERRLLSIKEAFRLAQQPHQNQAKLVVALSRTYRTMDDKTVFHEEFIHYLKYVMVVYKREPAVERVIEFAAKFVTSFHQSDMEDDEEEEDGGLLNYLFTFLLKSHEANSNAVRFRVCLLINKLLGSMPENAQIDDDVFDKINKAMLIRLKDKIPNVRIQAVLALSRLQDPKDDECPVVNGVCSFLNLFSDLLILLNSQYLKFFIMVYTFEEYR

SEQ ID NO: 11295 - protein, 215 aa, Homo sapiens
MYCTISKDFAKNCRAHQGCERGCQKAGLSDAVKQAMQKHLLQGWLRFSEGNILELLHRLDVENSSEVAVSVLNALFSITPLSELVGLCKNNDGRKLIPVETLTPEIALYWCALCEYLKSKGDEGEEFLEQILPEPVVYADYLLSYIQSIPVVNEEHRGDFSYIGNLMTKEFIGQQLILIIKSLDTSEEGGRRFLFYPQSQYPWFLFLLKDYSTSL

SEQ ID NO: 11296 - protein, 158 aa, Homo sapiens
MQKHLLQGWLRFSEGNILELLHRLDVENSSEVAVSVLNALFSITPLSELVGLCKNNDGRKLIPVETLTPEIALYWCALCEYLKSKGDEGEEFLEQILPEPVVYADYLLSYIQSIPVVNEEHRGDFSYIGNLMTKEFIGQQLILIIKSLDTSEEGGRYV

SEQ ID NO: 11297 - protein, 44 aa, Homo sapiens
LCPYSSQLSSLITARSKSARMSKRHRLDLGEDYPSGKKRAGTDG

SEQ ID NO: 11298 - protein, 919 aa, Homo sapiens
LLAGEKIPLLDHKMDMEYMGSGKLGQILKQIWRQNQMLKQALLGDDLCEGAGGATWMATVVFLGQELSSALHQLLEHTSGTLRSTCQQLHVLLDKENQCVSRKEIITFIDCLIKITEHLGSTAALLKKEEKEICNLCGMHDECTPQQTMSSIQDTKAADIAARGELNVIETATVSPTNGEESHYTNQVQLEKNKTHMSSALVEKENNTSLNGRVLGQEESQNKMFPDNAENEDDKQIEHMTVENINGNREETHGIIQTTETEIQETSESPREEMTTSSIICDISKKYINSTLPNDSENIKHKNNIMEKEYLDVLSDVTGPQVSCYITAPSYVLQQLECRIINHMSSLIVGDNEELVSNVITIECSDKEKRVPFPIGIAIPFTARYRGNYRDIMVKVCDINLQSSYLNPNSLEGMKGGYKGTCASVKVYKLGIFSVVSCLKKESFTVTKKGLALKSSMDSRISLNYPPGVFTSPVLVQLKIQPVDPALVAHLKAQQDTFYSVQSTSPLIHIQHPSTYPFQKPVTLFLPCSPYLDKNNLGSEIDHKRRASATINRITPSYFNRTKIASIRKPRKNASECLKLLGFRSQDSGWCGLDDVVKTIQSGLVSVELYEHLERFIVLHLSSTMDNSHLVTFVKSLEEAMLSTTACIVLSHQKDNPHRIAVLVVPSKDLSQVLKDLHLEGFGGPPEPSRHFQVREGEQLLLRFTGNIFASSNGKDYGKDYTLIFHLQRKPRLELQIKEVDEFGNYSCPHYKGTIVVYKVPKGKIVPNLNQSLVINENHSQLPICKLPLKLPKHKKLINRPQSTKRVSKDPVEALWDNLLHWLAEELSEENAESLSSTLPLRRSTIQLIKLKNPDDLTEQIHEFLCFWKKSLPTFTDKLRLLARHLRKIGRSDLAEELKFKWENKVFTEPQQCFDVAPE

SEQ ID NO: 11299 - protein, 845 aa, Homo sapiens
LPCFIRCQCRNIIWFSFVFILCVSMYVCVEIITFIDCLIKITEHLGSTAALLKKEEKEICNLCGMHDECTPQQTMSSIQDTKAADIAARGELNVIETATVSPTNGEESHYTNQVQLEKNKTHMSSALVEKENNTSLNGRVLGQEESQNKMFPDNAENEDDKQIEHMTVENINGNREETHGIIQTTETEIQETSESPREEMTTSSIICDISKKYINSTLPNDSENIKHKNNIMEKEYLDVLSDVTGPQVSCYITAPSYVLQQLECRIINHMSSLIVGDNEELVSNVITIECSDKEKRVPFPIGIAIPFTARYRGNYRDIMVKVCDINLQSSYLNPNSLEGMKGGYKGTCASVKVYKLGIFSVVSCLKKESFTVTKKGLALKSSMDSRISLNYPPGVFTSPVLVQLKIQPVDPALVAHLKAQQDTFYSVQSTSPLIHIQHPSTYPFQKPVTLFLPCSPYLDKNNLGSEIDHKRRASATINRITPSYFNRTKIASIRKPRKNASECLKLLGFRSQDSGWCGLDDVVKTIQSGLVSVELYEHLERFIVLHLSSTMDNSHLVTFVKSLEEAMLSTTACIVLSHQKDNPHRIAVLVVPSKDLSQVLKDLHLEGFGGPPEPSRHFQVREGEQLLLRFTGNIFASSNGKDYGKDYTLIFHLQRKPRLELQIKEVDEFGNYSCPHYKGTIVVYKVPKGKIVPNLNQSLVINENHSQLPICKLPLKLPKHKKLINRPQSTKRVSKDPVEALWDNLLHWLAEELSEENAESLSSTLPLRRSTIQLIKLKNPDDLTEQIHEFLCFWKKSLPTFTDKLRLLARHLRKIGRSDLAEELKFKWENKVFTEPQQCFDVAPE

SEQ ID NO: 11300 - protein, 504 aa, Homo sapiens
LRLLLGSGTIMFEIKKICCIGAGYVGGPTCSVIAHMCPEIRVTVVDVNESRINAWNSPTLPIYEPGLKEVVESCRGKNLFFSTNIDDAIKEADLVFISVNTPTKTYGMGKGRAADLKYIEACARRIVQNSNGYKIVTEKSTVPVRAAESIRRIFDANTKPNLNLQVLSNPEFLAEGTAIKDLKNPDRVLIGGDETPEGQRAVQALCAVYEHWVPREKILTTNTWSSELSKLAANAFLAQRISSINSISALCEATGADVEEVATAIGMDQRIGNKFLKASVGFGGSCFQKDVLNLVYLCEALNLPEVARYWQQVIDMNDYQRRRFASRIIDSLFNTVTDKKIAILGFAFKKDTGDTRESSSIYISKYLMDEGAHLHIYDPKVPREQIVVDLSHPGVSEDDQVSRLVTISKDPYEACDGAHAVVICTEWDMFKELDYERIHKKMLKPAFIFDGRRVLDGLHNELQTIGFQIETIGKKVSSKRIPYAPSGEIPKFSLQDPPNKKPKV

SEQ ID NO: 11301 - protein, 437 aa, Homo sapiens
LRLLLGSGTIMFEIKKICCIGAGYVGGPTCSVIAHMCPEIRVTVVDVNESRINAWNSPTLPIYEPGLKEVVESCRGKNLFFSTNIDDAIKEADLVFISVLSNPEFLAEGTAIKDLKNPDRVLIGGDETPEGQRAVQALCAVYEHWVPREKILTTNTWSSELSKLAANAFLAQRISSINSISALCEATGADVEEVATAIGMDQRIGNKFLKASVGFGGSCFQKDVLNLVYLCEALNLPEVARYWQQVIDMNDYQRRRFASRIIDSLFNTVTDKKIAILGFAFKKDTGDTRESSSIYISKYLMDEGAHLHIYDPKVPREQIVVDLSHPGVSEDDQVSRLVTISKDPYEACDGAHAVVICTEWDMFKELDYERIHKKMLKPAFIFDGRRVLDGLHNELQTIGFQIETIGKKVSSKRIPYAPSGEIPKFSLQDPPNKKPKV

SEQ ID NO: 11302 - protein, 15 aa, Homo sapiens
LEVFKADGAWMGREK

SEQ ID NO: 11303 - protein, 8 aa, Homo sapiens
MACAAAAH

SEQ ID NO: 11304 - protein, 223 aa, Homo sapiens
LLLQAGSIRGRGRGAAGNRAPGPRGSYLGGYSAGRGIYSRYHEGKGKQQEKGYELVPNLEIPTVNPVAIKPGTVAIPAIGAQYSMFPAAPAPKMIEDGKIHTVEHMISPIAVQPDPASAAAAAAAAAAAAAAVIPTVSTPPPFQGRPITPVYTVAPNVQRIPTAGIYGASYVPFAAPATATIATLQKNAAAAAAMYGGYAGYIPQAFPAAAIQVPIPDVYQTY

SEQ ID NO: 11305 - protein, 598 aa, Homo sapiens
LRAAKPCSAPAQVTEALERDSASGHPAEISNPWLTEEAALLALMERTGYSMVQENGQRKYGGPPPGWEGPHPQRGCEVFVGKIPRDVYEDELVPVFEAVGRIYELRLMMDFDGKNRGYAFVMYCHKHEAKRAVRELNNYEIRPGRLLGVCCSVDNCRLFIGGIPKMKKREEILEEIAKVTEGVLDVIVYASAADKMKNRGFAFVEYESHRAAAMARRKLMPGRIQLWGHQIAVDWAEPEIDVDEDVMETVKILYVRNLMIETTEDTIKKSFGQFNPGCVERVKKIRDYAFVHFTSREDAVHAMNNLNGTELEGSCLEVTLAKPVDKEQYSRYQKAARGGGAAEAAQQPSYVYSCDPYTLAYYGYPYNALIGPNRDYFVKAGSIRGRGRGAAGNRAPGPRGSYLGGYSAGRGIYSRYHEGKGKQQEKGYELVPNLEIPTVNPVAIKPGTVAIPAIGAQYSMFPAAPAPKMIEDGKIHTVEHMISPIAVQPDPASAAAAAAAAAAAAAAVIPTVSTPPPFQGRPITPVYTVAPNVQRIPTAGIYGASYVPFAAPATATIATLQKNAAAAAAMYGGYAGYIPQAFPAAAIQVPIPDVYQTY

SEQ ID NO: 11306 - protein, 244 aa, Homo sapiens
LGGSASCFSSSLGYFCRALREDAAQADGDQPRGERQVLSRLGVAGQWRFVDVLGLEEESLGSVPAPACALLLLFPLTAQHENFRKKQIEELKGQEVSPKVYFMKQTIGNSCGTIGLIHAVANNQDKLGFEDGSVLKQFLSETEKMSPEDRAKCFEKNEAIQAAHDAVAQEGQCRVDDKVNFHFILFNNVDGHLYELDGRMPFPVNHGASSEDTLLKDAAKVCREFTEREQGEVRFSAVALCKAA

SEQ ID NO: 11307 - protein, 16 aa, Homo sapiens
MQLKPMEINPEVSARC

SEQ ID NO: 11308 - protein, 93 aa, Homo sapiens
MSPEDRAKCFEKNEAIQAAHDAVAQEGQCRVDDKVNFHFILFNNVDGHLYELDGRMPFPVNHGASSEDTLLKVIFGMHLFLMCLTILWLNFLF

SEQ ID NO: 11309 - protein, 71 aa, Homo sapiens
MSDDKVNFHFILFNNVDGHLYELDGRMPFPVNHGASSEDTLLKDAAKVCREFTEREQGEVRFSAVALCKAA

SEQ ID NO: 11310 - protein, 9 aa, Homo sapiens
LISAVRDRR

SEQ ID NO: 11311 - protein, 64 aa, Homo sapiens
LFSSTAKYNIITFLPRFLYSQFRRAANSFFLFIALLQVKSRHKTLSNVQVLINVKPVTNPLRFM

SEQ ID NO: 11312 - protein, 56 aa, Homo sapiens
LRRRFGLLPDLVLGQSSPGFIVFASQDLFESCPPDPTGGTFEKKRAMLLLRVGTLS

SEQ ID NO: 11313 - protein, 50 aa, Homo sapiens
LGVRTRSRATSHWGRASGGPGAPVRADPWGCSRVLGYRQALQLRRIQGKT

SEQ ID NO: 11314 - protein, 55 aa, Homo sapiens
LHPGPWDSRSTGQLGSLSGGWVLLVPAVPASKNHWVCRFELVLEAVRHRNEACNS

SEQ ID NO: 11315 - protein, 16 aa, Homo sapiens
MAGVEAQPAFTLRICA

SEQ ID NO: 11316 - protein, 8 aa, Homo sapiens
LRLVTNML

SEQ ID NO: 11317 - protein, 10 aa, Homo sapiens
MTRVLHIHNV

SEQ ID NO: 11318 - protein, 70 aa, Homo sapiens
LDAFYQSLVCFFVPYFTYQGSDTDIFAFGNPLNTAALFIVLLHLVIESKSLTRCSDSHLQFQSFGRLWIT

SEQ ID NO: 11319 - protein, 41 aa, Homo sapiens
LELQVFFQGWKRDFEEVSLQARMTCFSIRDMSILLGLEELT

SEQ ID NO: 11320 - protein, 46 aa, Homo sapiens
LGDFLYFKTDSSLIKVIQSISKQSSRDHLKVHSFYNTLRLFRCWSL

SEQ ID NO: 11321 - protein, 51 aa, Homo sapiens
LSSRSSSLTSAEVQLPQFLAQVDNYRHKPLKLECPVAGISIDLSQLSLQLQ

SEQ ID NO: 11322 - protein, 42 aa, Homo sapiens
LSSRSSSLTSAEVQLPQFLAQVDNYRHKPLKLECPVAGKEMD

SEQ ID NO: 11323 - protein, 150 aa, Homo sapiens
LPRSLHLGESWNVDQSSDPIAATAMRGARGAWDFLCVLLLLLRVQTGSSQPSVSPGEPSPPSIHPGKSDLIVRVGDEIRLLCTDPGFVKWTFEILDETNENKQNEWITEKAEATNTGKYTCTNKHGLSNSIYVFVRGKCLAFCSAVLSRI

SEQ ID NO: 11324 - protein, 176 aa, Homo sapiens
LVITEYCCYGDLLNFLRRKRDSFICSKQEDHAEAALYKNLLHSKESSCSDSTNEYMDMKPGVSYVVPTKADKRRSVRIGSYIERDVTPAIMEDDELALDLEDLLSFSYQVAKGMAFLASKNCIHRDLAARNILLTHGRITKICDFGLARDIKNDSNYVVKGNVSTHSLLDSPAKDF

SEQ ID NO: 11325 - protein, 451 aa, Homo sapiens
MLPPGRQDLSSASLPGAVAALSPLRIMATAEVLNIGKKLYEGKTKEVYELLDSPGKVLLQSKDQITAGNAARKNHLEGKAAISNKITSCIFQLLQEAGIKTAFTRKCGETAFIAPQCEMIPIEWVCRRIATGSFLKRNPGVKEGYKFYPPKVELFFKDDANNDPQWSEEQLIAAKFCFAGLLIGQTEVDIMSHATQAIFEILEKSWLPQNCTLVDMKIEFGVDVTTKEIVLADVIDNDSWRLWPSGDRSQQKDKQSYRDLKEVTPEGLQMVKKNFEWVAERVELLLKSESQCRVVVLMGSTSDLGHCEKIKKACGNFGIPCELRVTSAHKGPDETLRIKAEYEGDGIPTVFVAVAGRSNGLGPVMSGNTAYPVISCPPLTPDWGVQDVWSSLRLPSGLGCSTVLSPEGSAQFAAQIFGLSNHLVWSKLRASILNTWISLKQADKKIRECNL

SEQ ID NO: 11326 - protein, 85 aa, Homo sapiens
MATAEVLNIGKKLYEGKTKEVYELLDSPGKVLLQSKDQITAGNAARKNHLEGKAAISNKITSCIFQLLQEAGKQLPQSLFSHLLW

SEQ ID NO: 11327 - protein, 122 aa, Homo sapiens
LGNIQKVSLPMLIFLGCYRRRLEERAGTMSAETASGPTEDQVEILEYNFNKVDKHPDSTTLCLIAAEAGLSEEETQGSDLISRSKIWHPESSPQREGYPHDSLPCLAFDYFSLLPPQCKEMV

SEQ ID NO: 11328 - protein, 109 aa, Homo sapiens
MRQHLTGNSLKRAGTMSAETASGPTEDQVEILEYNFNKVDKHPDSTTLCLIAAEAGLSEEETQGSDLISRSKIWHPESSPQREGYPHDSLPCLAFDYFSLLPPQCKEMV

SEQ ID NO: 11329 - protein, 62 aa, Homo sapiens
LPCSGRPRRRQPNCSQYRLPGCPRHFNPVCGSDMSTYANECTLCMKIREGGHNIKIIRNGPC

SEQ ID NO: 11330 - protein, 142 aa, Homo sapiens
LRRSSLQNMKFTSKNFRNNTIETNLMVNLGIPLGDPLQPTRVKDPETREIILMDLVRPQDTYQFFVKHGELKVYKTLDTPFFSTGKLILGPQEEKGKQHVGQDILVFYVNFGDLLCTLHETPYILSTGDSFYVPSGKTIYFT

SEQ ID NO: 11331 - protein, 309 aa, Homo sapiens
LSIYYIFVQSGIKMLSPKDILRKDLKLVHGYPMTCAFASNWEKIEQFHSRPDDIVIATYPKSGTTWVSEIIDMILNDGDIEKCKRGFITEKVPMLEMTLPGLRTSGIEQLEKNPSPRIVKTHLPTDLLPKSFWENNCKMIYLARNAKDVSVSYYHFDLMNNLQPFPGTWEEYLEKFLTGKVAYGSWFTHVKNWWKKKEEHPILFLYYEDMKENPKEEIKKIIRFLEKNLNDEILDRIIHHTSFEVMKDNPLVNYTHLPTTVMDHSKSPFMRKGTAGDWKNYFTVAQNEKFDAIYETEMSKTALQFRTEI

SEQ ID NO: 11332 - protein, 39 aa, Homo sapiens
VRAPVAASQPSLPDELWAATRLRNGHPAQEKLPVFLSQL

SEQ ID NO: 11333 - protein, 7 aa, Homo sapiens
LNGFARM

SEQ ID NO: 11334 - protein, 10 aa, Homo sapiens
LKHHIKMMGQ

SEQ ID NO: 11335 - protein, 14 aa, Homo sapiens
LCLGFSFISKWKKY

SEQ ID NO: 11336 - protein, 7 aa, Homo sapiens
LCKNLEK

SEQ ID NO: 11337 - protein, 132 aa, Homo sapiens
LELHSITMKKSGVLFLLGIILLVLIGVQGTPVVRKGRCSCISTNQGTIHLQSLKDLKQFAPSPSCEKIEIIATLKNGVQTCLNPDSADVKELIKKWEKQVSQKKKQKNGKKHQKKKVLKVRKSQRSRQKKTT

SEQ ID NO: 11338 - protein, 52 aa, Homo sapiens
LAEVDNWVSKQWKVFREVATASWVAGRSKGYHEVSRAFGKPEIVFPVGKGNH

SEQ ID NO: 11339 - protein, 519 aa, Homo sapiens
LGRIRNLGVRSLSTSLWSLTHLTALHLNDNYLSRIPPDIAKLHNLVYLDLSSNKLRSLPAELGNMVSLRELLLNNNLLRVLPYELGRLFQLQTLGLKGNPLSQDILNLYQDPDGTRKLLNFMLDNLAVHPEQLPPRPWITLKERDQILPSASFTVMCYNVLCDKYATRQLYGYCPSWALNWEYRKKGIMEEIVNCDADIISLQEVETEQYFTLFLPALKERGYDGFFSPKSRAKIMSEQERKHVDGCAIFFKTEKFTLVQKHTVEFNQVAMANSDGSEAMLNRVMTKDNIGVAVVLEVHKELFGAGMKPIHAADKQLLIVANAHMHWDPEYSDVKLIQTMMFVSEVKNILEKASSRPGSPTADPNSIPLVLCADLNSLPDSGVVEYLSNGGVADNHKDFKELRYNECLMNFSCNGKNGSSEGRITHGFQLKSAYENNLMPYTNYTFDFKGVIDYIFYSKTHMNVLGVLGPLDPQWLVENNITGCPHPHIPSDHFSLLTQLELHPPLLPLVNGVHLPNRR

SEQ ID NO: 11340 - protein, 467 aa, Homo sapiens
VCVSGVARGRDPRVACPSRFVAAAPEPRRLIGMPKEKYDPPDPRRIYTIMSAEEVANGKKSHWAELEISGRVRSLSTSLWSLTHLTALHLNDNYLSRIPPDIAKLHNLVYLDLSSNKLRSLPAELGNMVSLRELLLNNNLLRVLPYELGRLFQLQTLGLKGNPLSQDILNLYQDPDGTRKLLNFMLDNLAVHPEQLPPRPWITLKERDQILPSASFTVMCYNVLCDKYATRQLYGYCPSWALNWEYRKKGIMEEIVNCDADIISLQEVETEQYFTLFLPALKERGYDGFFSPKSRAKIMSEQERKHVDGCAIFFKTEKFTLVQKHTVEFNQVAMANSDGSEAMLNRVMTKDNIGVAVVLEVHKELFGAGMKPIHAADKQLLIVANAHMHWDPEYSDVKLIQTMMFVSEVKNILEKASSRPGSPTADPNSIPLVLCADLNSLPDSGVVEYLSNGGVADNHKDFKELRA

SEQ ID NO: 11341 - protein, 711 aa, Homo sapiens
LGSAECEAWRAAARSDGPGAATPRGRPAARRAGDLPLHAPCALQLAGGTMKKFSRMPKSEGGSGGGAAGGGAGGAGAGAGCGSGGSSVGVRVFAVGRHQVTLEESLAEGGFSTVFLVRTHGGIRCALKRMYVNNMPDLNVCKREITIMKELSGHKNIVGYLDCAVNSISDNVWEVLILMEYCRAGQVVNQMNKKLQTGFTEPEVLQIFCDTCEAVARLHQCKTPIIHRDLKVENILLNDGGNYVLCDFGSATNKFLNPQKDGVNVVEEEIKKYTTLSYRAPEMINLYGGKPITTKADIWALGCLLYKLCFFTLPFGESQVAICDGNFTIPDNSRYSRNIHCLIRFMLEPDPEHRPDIFQVSYFAFKFAKKDCPVSNINNSSIPSALPEPMTASEAAARKSQIKARITDTIGPTETSIAPRQRPKANSATTATPSVLTIQSSATPVKVLAPGEFGNHRPKGALRPGNGPEILLGQGPPQQPPQQHRVLQQLQQGDWRLQQLHLQHRHPHQQQQQQQQQQQQQQQQQQQQQQQQQQQHHHHHHHHLLQDAYMQQYQHATQQQQMLQQQFLMHSVYQPQPSASQYPTMMPQYQQAFFQQQMLAQHQPSQQQASPEYLTSPQEFSPALVSYTSSLPAQVGTIMDSSYSANRSVADKEAIANFTNQKNISNPPDMSGWNPFGEDNFSKLTEEELLDREFDLLRSSKGHLKAYFASQ

SEQ ID NO: 11342 - protein, 1210 aa, Homo sapiens
LGSAECEAWRAAARSDGPGAATPRGRPAARRAGDLPLHAPCALQLAGGTMKKFSRMPKSEGGSGGGAAGGGAGGAGAGAGCGSGGSSVGVRVFAVGRHQVTLEESLAEGGFSTVFLVRTHGGIRCALKRMYVNNMPDLNVCKREITIMKELSGHKNIVGYLDCAVNSISDNVWEVLILMEYCRAGQVVNQMNKKLQTGFTEPEVLQIFCDTCEAVARLHQCKTPIIHRDLKVENILLNDGGNYVLCDFGSATNKFLNPQKDGVNVVEEEIKKYTTLSYRAPEMINLYGGKPITTKADIWALGCLLYKLCFFTLPFGESQVAICDGNFTIPDNSRYSRNIHCLIRFMLEPDPEHRPDIFQVSYFAFKFAKKDCPVSNINNSSIPSALPEPMTASEAAARKSQIKARITDTIGPTETSIAPRQRPKANSATTATPSVLTIQSSATPVKVLAPGEFGNHRPKGALRPGNGPEILLGQGPPQQPPQQHRVLQQLQQGDWRLQQLHLQHRHPHQQQQQQQQQQQQQQQQQQQQQQQQQQQHHHHHHHHLLQDAYMQQYQHATQQQQMLQQQFLMHSVYQPQPSASQYPTMMPQYQQAFFQQQMLAQHQPSQQQASPEYLTSPQEFSPALVSYTSSLPAQVGTIMDSSYSANRSVADKEAIANFTNQKNISNPPDMSGWNPFGEDNFSKLTEEELLDREFDLLRSNRLEERASSDKNVDSLSAPHNHPPEDPFGSVPFISHSGSPEKKAEHSSINQENGTANPIKNGKTSPASKDQRTGKKTSVQGQVQKGNDESESDFESDPPSPKSSEEEEQDDEEVLQGEQGDFNDDDTEPENLGHRPLLMDSEDEEEEEKHSSDSDYEQAKAKYSDMSSVYRDRSGSGPTQDLNTILLTSAQLSSDVAVETPKQEFDVFGAVPFFAVRAQQPQQEKNEKNLPQHRFPAAGLEQEEFDVFTKAPFSKKVNVQECHAVGPEAHTIPGYPKSVDVFGSTPFQPFLTSTSKSESNEDLFGLVPFDEITGSQQQKVKQRSLQKLSSRQRRTKQDMSKSNGKRHHGTPTSTKKTLKPTYRTPERARRHKKVGRRDSQSSNEFLTISDSKENISVALTDGKDRGNVLQPEESLLDPFGAKPFHSPDLSWHPPHQGLSDIRADHNTVLPGRPRQNSLHGSFHSADVLKMDDFGAVPFTELVVQSITPHQSQQSQPVELDPFGAAPFPSKQ

SEQ ID NO: 11343 - protein, 18 aa, Homo sapiens
MPNYVSVSRNTVGEEGSS

SEQ ID NO: 11344 - protein, 24 aa, Homo sapiens
MCRRGKSNNSNNTKMIPKQGPQNN

SEQ ID NO: 11345 - protein, 21 aa, Homo sapiens
MTLKIKRNIDLQTMVCTRKFV

SEQ ID NO: 11346 - protein, 15 aa, Homo sapiens
VRRELGPPEEKSLHS

SEQ ID NO: 11347 - protein, 64 aa, Homo sapiens
VQWHNLGSPQPPPPRNDIIRIAWPSLVIPPYWQQDNCETETNSLSQRNQTLGKVEMGCRELVER

SEQ ID NO: 11348 - protein, 99 aa, Homo sapiens
LRSRGRSPTVPRSRELNCEKEARDSPATWCCSPVEGVNLQAVKDLKSLASAAALKGQVSASKWLSAQTRLPRRPRQLHPLLHHPLDVKSFPEPILGEAW

SEQ ID NO: 11349 - protein, 52 aa, Homo sapiens
VEQTHRQGARKIVRGGGKILSNQPGKHLFAQQVQENKYVTILAYSCLHFIMS

SEQ ID NO: 11350 - protein, 173 aa, Homo sapiens
LPPLHNVIKATWGVIYQPLSSPLFQNNTTVSYMCIFARTPKSLAKVEQAKSSPGLLGLQSPGCQSLNTPLSSREGSQSWERIKLTWSRELNCEKEARDSPATWCCSPVEGVNLQAVKDLKSLASAAALKGQVSASKWLSAQTRLPRRPRQLHPLLHHPLDVKSFPEPILGEAW

SEQ ID NO: 11351 - protein, 25 aa, Homo sapiens
LSKPQYPTEFQRRVSKLGEDQTNME

SEQ ID NO: 11352 - protein, 52 aa, Homo sapiens
LELTAPLSLSRNADSGEIRTGSARAGCPALCHSFSKCLVKRGKALSNHFGRA

SEQ ID NO: 11353 - protein, 13 aa, Homo sapiens
LGVQLSVTASPSA

SEQ ID NO: 11354 - protein, 737 aa, Homo sapiens
LEEPKRRQHQHLLTWKYTDTIGKRKHSIASSRFQVALFGRFYTDLIPVMEDTGIQRGIWDGDAKAVQQCLTDIFTSVYTTCDIPENAIFGPCVLSHTSLYDSIAFIALKSTDKRTVPYIFRVDTSAANGSSEGLMWLRLVQSARDKEEQNLEAYIKNGQLFYRSLRRIAKDEELLVWYGKELTELLLLCPSRSHNKMNGSSPYTCLECSQRFQFEFPYVAHLRFRCPKRLHSADISPQDEQGGGVGTKDHGGGGGGGKDQQQQQQEAPLGPGPKFCKAGPLHHYPSPSPESSNPSAAAGGSSAKPSTDFHNLARELENSRGGSSCSPAQSLSSGSGSGGGGGHQEAELSPDGIATGGGKGKRKFPEEAAEGGGGAGLVGGRGRFVERPLPASKEDLVCTPQQYRASGSYFGLEENGRLFAPPSPETGEAKRSAFVEVKKAARAASLQEEGTADGAGVASEDQDAGGGGGSSTPAAASPVGAEKLLAPRPGGPLPSRLEGGSPARGSAFTSVPQLGSAGSTSGGGGTGAGAAGGAGGGQGAASDERKSAFSQPARSFSQLSPLVLGQKLGALEPCHPADGVGPTRLYPAAADPLAVKLQGAADLNGGCGSLPSGGGGLPKQSPFLYATAFWPKSSAAAAAAAAAAAAGPLQLQLPSALTLLPPSFTSLCLPAQNWCAKCNASFRMTSDLVYHMRSHHKKEYAMEPLVKRRREEKLKCPICNESFRERHHLSRHMTSHN

SEQ ID NO: 11355 - protein, 775 aa, Homo sapiens
LHRVHLYNSLRFSVSLPPSLPPPPQSFSPHLSISLLSLQEEPKRRQHQHLLTWKYTDTIGKRKHSIASSRFQVALFGRFYTDLIPVMEDTGIQRGIWDGDAKAVQQCLTDIFTSVYTTCDIPENAIFGPCVLSHTSLYDSIAFIALKSTDKRTVPYIFRVDTSAANGSSEGLMWLRLVQSARDKEEQNLEAYIKNGQLFYRSLRRIAKDEELLVWYGKELTELLLLCPSRSHNKMNGSSPYTCLECSQRFQFEFPYVAHLRFRCPKRLHSADISPQDEQGGGVGTKDHGGGGGGGKDQQQQQQEAPLGPGPKFCKAGPLHHYPSPSPESSNPSAAAGGSSAKPSTDFHNLARELENSRGGSSCSPAQSLSSGSGSGGGGGHQEAELSPDGIATGGGKGKRKFPEEAAEGGGGAGLVGGRGRFVERPLPASKEDLVCTPQQYRASGSYFGLEENGRLFAPPSPETGEAKRSAFVEVKKAARAASLQEEGTADGAGVASEDQDAGGGGGSSTPAAASPVGAEKLLAPRPGGPLPSRLEGGSPARGSAFTSVPQLGSAGSTSGGGGTGAGAAGGAGGGQGAASDERKSAFSQPARSFSQLSPLVLGQKLGALEPCHPADGVGPTRLYPAAADPLAVKLQGAADLNGGCGSLPSGGGGLPKQSPFLYATAFWPKSSAAAAAAAAAAAAGPLQLQLPSALTLLPPSFTSLCLPAQNWCAKCNASFRMTSDLVYHMRSHHKKEYAMEPLVKRRREEKLKCPICNESFRERHHLSRHMTSHN

SEQ ID NO: 11356 - protein, 534 aa, Homo sapiens
LTRRKGQGNRSHILATDKVMCCHPSVFTWQTWETLSRLAFARAQLSRLGSPAWGISDELEESMPQTPPFSAMFDSSGYNRNLYQSAEDSCGGLYYHDNNLLSGSLEALIQHLVPNVDYYPDRTYIFTFLLSSRLFMHPYELMAKVCHLCVEHQRLSDPDSDKNQMRKIAPKILQLLTEWTETFPYDFRDERMMRNLKDLAHRIASGEETYRKNVQQMMQCLIRKLAALSQYEEVLAKISSTSTDRLTVLKTKPQSIQRDIITVCNDPYTLAQQLTHIELERLNYIGPEEFVQAFVQKDPLDNDKSCYSERKKTRNLEAYVEWFNRLSYLVATEICMPVKKKHRARMIEYFIDVARECFNIGNFNSLMAIISGMNMSPVSRLKKTWAKVKTAKFDILEHQMDPSSNFYNYRTALRGAAQRSLTAHSSREKIVIPFFSLLIKDIYFLNEGCANRLPNGHVNFEKFWELAKQVSEFMTWKQVECPFERDRKILQYLLTVPVFSEDALYLASYESEGPENHIEKDRWKSLRSSLLGRV

SEQ ID NO: 11357 - protein, 493 aa, Homo sapiens
LWARGTQPGGRGLGVHLQESMPQTPPFSAMFDSSGYNRNLYQSAEDSCGGLYYHDNNLLSGSLEALIQHLVPNVDYYPDRTYIFTFLLSSRLFMHPYELMAKVCHLCVEHQRLSDPDSDKNQMRKIAPKILQLLTEWTETFPYDFRDERMMRNLKDLAHRIASGEEQTYRKNVQQMMQCLIRKLAALSQYEEVLAKISSTSTDRLTVLKTKPQSIQRDIITVCNDPYTLAQQLTHIELERLNYIGPEEFVQAFVQKDPLDNDKSCYSERKKTRNLEAYVEWFNRLSYLVATEICMPVKKKHRARMIEYFIDVARECFNIGNFNSLMAIISGMNMSPVSRLKKTWAKVKTAKFDILEHQMDPSSNFYNYRTALRGAAQRSLTAHSSREKIVIPFFSLLIKDIYFLNEGCANRLPNGHVNFEKFWELAKQVSEFMTWKQVECPFERDRKILQYLLTVPVFSEDALYLASYESEGPENHIEKDRWKSLRSSLLGRV

SEQ ID NO: 11358 - protein, 451 aa, Homo sapiens
LWARGTQPGGRGLGVHLQESMPQTPPFSAMFDSSGYNRNLYQSAEDSCGGLYYHDNNLLSGSLEALIQHLVPNVDYYPDNQMRKIAPKILQLLTEWTETFPYDFRDERMMRNLKDLAHRIASGEETYRKNVQQMMQCLIRKLAALSQYEEVLAKISSTSTDRLTVLKTKPQSIQRDIITVCNDPYTLAQQLTHIELERLNYIGPEEFVQAFVQKDPLDNDKSCYSERKKTRNLEAYVEWFNRLSYLVATEICMPVKKKHRARMIEYFIDVARECFNIGNFNSLMAIISGMNMSPVSRLKKTWAKVKTAKFDILEHQMDPSSNFYNYRTALRGAAQRSLTAHSSREKIVIPFFSLLIKDIYFLNEGCANRLPNGHVNFEKFWELAKQVSEFMTWKQVECPFERDRKILQYLLTVPVFSEDALYLASYESEGPENHIEKDRWKSLRSSLLGRV

SEQ ID NO: 11359 - protein, 53 aa, Homo sapiens
VRFSPRPQDISCSEPCLLIGSICDDYMATLCCPHCTLCQIKRDINRRRAMRTF

SEQ ID NO: 11360 - protein, 183 aa, Homo sapiens
VWVISWRGEQPGEPKMLLRSKPALPPPLMLLLLGPLGPLSPGALPRPAQAQDVVDLDFFTQEPLHLVSPSFLSVTIDANLATDPRFLILLGSPKLRTLARGLSPAYLRFGGTKTDFLIFDPKKESTFEERSYWQSQVNQDICKYGSIPPDVEEKLRLEWPYQEQLLLREHYQKKFKNSTYSTS

SEQ ID NO: 11361 - protein, 83 aa, Homo sapiens
VRALSGTIHYHNKQYRPQKGGICVANHTSPIDVLILTTDGCYAMVGQVHGGLMGIIQRAMVKACPHVWFERSEMKDRHLVTKR

SEQ ID NO: 11362 - protein, 1030 aa, Homo sapiens
LGRVEDRVSLLIFRKSSRTQSPAFGSLSQRDRRNPEQATGRRSGMYFCWGADSRELQRRRTAGSPGAELLQAASGERHSLLLLTNHRVLSCGDNSRGQLGRRGAQRGELPEPIQALETLIVDLVSCGKEHSLAVCHKGRVFAWGAGSEGQLGIGEFKEISFTPKKIMTLNDIKIIQVSCGHYHSLALSKDSQVFSWGKNSHGQLGLGKEFPSQASPQRVRSLEGIPLAQVAAGGAHSFALSLCGTSFGWGSNSAGQLALSGRNVPVQSNKPLSVGALKNLGVVYISCGDAHTAVLTQDGKVFTFGDNRSGQLGYSPTPEKRGPQLVERIDGLVSQIDCGSYHTLAYVHTTGQVVSFGHGPSDTSKPTHPEALTENFDISCLISAEDFVDVQVKHIFAGTYANFVTTHQDTSSTRAPGKTLPEISRISQSMAEKWIAVKRRSTEHEMAKSEIRMIFSSPACLTASFLKKRGTGETTSIDVDLEMARDTFKKLTKKEWISSMITTCLEDDLLRALPCHSPHQEALSVFLLLPECPVMHDSKNWKNLVVPFAKAVCEMSKQSLQVLKKCWAFLQESSLNPLIQMLKAAIISQLLHQTKTEQDHCNVKALLGMMKELHKVNKANCRLPENTFNINELSNLLNFYIDRGRQLFRDNHLMSEKKAYMLMHETILQKKDEFPPSPRFILRVRRSRLVKDALRQLSQAEATDFCKVLVVEFINEICPESGGVSSEFFHCMFEEMTKPEYGMFMYPEMGSCMWFPAKPKPEKKRYFLFGMLCGLSLFNLNVANLPFPLALYKKLLDQKPSLEDLKELSPRLGKSLQEVLDDAADDIGDALCIRFSIHWDQNDVDLIPNGISIPVDQTNKRDYVSKYIDYIFNVSVKAVYEEFQRGFYRVCEKEILRHFYPEELMTAIIGNTDYDWKQFEQNSKYEQGYQKSHPTIQLFWKAFHKLTLDEKKKFLFFLTGRDRLHARGIQKMEIVFRCPETFSERDHPTSITCHNILSLPKYSTMERMEEALQVAINNNRGFVSPMLTQS

SEQ ID NO: 11363 - protein, 1040 aa, Homo sapiens
LSQRDRRNPEQATGRRSGMYFCWGADSRELQRRRTAGSPGAELLQAASGERHSLLLLTNHRVLSCGDNSRGQLGRRGAQRGELPEPIQALETLIVDLVSCGKEHSLAVCHKGRVFAWGAGSEGQLGIGEFKEISFTPKKIMTLNDIKIIQVSCGHYHSLALSKDSQVFSWGKNSHGQLGLGKEFPSQASPQRVRSLEGIPLAQVAAGGAHSFALSLCGTSFGWGSNSAGQLALSGRNVPVQSNKPLSVGALKNLGVVYISCGDAHTAVLTQDGKVFTFGDNRSGQLGYSPTPEKRGPQLVERIDGLVSQIDCGSYHTLAYVHTTGQVVSFGHGPSDTSKPTHPEALTENFDISCLISAEDFVDVQVKHIFAGTYANFVTTHQDTSSTRAPGKTLPEISRISQSMAEKWIAVKRRSTEHEMAKSEIRMIFSSPACLTASFLKKRGTGETTSIDVDLEMARDTFKKLTKKEWISSMITTCLEDDLLRALPCHSPHQEALSVFLLLPECPVMHDSKNWKNLVVPFAKAVCEMSKQSLQVLKKCWAFLQESSLNPLIQMLKAAIISQLLHQTKTEQDHCNVKALLGMMKELHKVNKANCRLPENTFNINELSNLLNFYIDRGRQLFRDNHLIPAETPSPVIFSDFPFIFNSLSKIKLLQADSHIKMQMSEKKAYMLMHETILQKKDEFPPSPRFILRVRRSRLVKDALRQLSQAEATDFCKVLVVEFINEICPESGGVSSEFFHCMFEEMTKPEYGMFMYPEMGSCMWFPAKPKPEKKRYFLFGMLCGLSLFNLNVANLPFPLALYKKLLDQKPSLEDLKELSPRLGKSLQEVLDDAADDIGDALCIRFSIHWDQNDVDLIPNGISIPVDQTNKRDYVSKYIDYIFNVSVKAVYEEFQRGFYRVCEKEILRHFYPEELMTAIIGNTDYDWKQFEQNSKYEQGYQKSHPTIQLFWKAFHKLTLDEKKKFLFFLTGRDRLHARGIQKMEIVFRCPETFSERDHPTSITCHNILSLPKYSTMERMEEALQVAINNNRGFVSPMLTQS

SEQ ID NO: 11364 - protein, 123 aa, Homo sapiens
LLPSRRDYVSKYIDYIFNVSVKAVYEEFQRGFYRVCEKEILRHFYPEELMTAIIGNTDYDWKQFEQNSKYEQGYQKSHPTIQLFWKAFHKLTLDEKKKFLCKYCGTRWTHNYVSFKKVQSCLE

SEQ ID NO: 11365 - protein, 54 aa, Homo sapiens
LRRTSARGPAGAIGVAPRDGAWDMRREAPATAQAVAPPRRGAGQSRLVLQRNHP

SEQ ID NO: 11366 - protein, 35 aa, Homo sapiens
LALRPAGAAAASAAPRWGQPPRSTPDCCAPPLLLA

SEQ ID NO: 11367 - protein, 1234 aa, Homo sapiens
LLQTTEMKGARLFVLLSSLWSGGIGLNNSKHSWTIPEDGNSQKTMPSASVPPNKIQSLQILPTTRVMSAEIATTPEARTSEDSLLKSTLPPSETSAPAEGVRNQTLTSTEKAEGVVKLQNLTLPTNASIKFNPGAESVVLSNSTLKFLQSFARKSNEQATSLNTVGGTGGIGGVGGTGGVGNRAPRETYLSRGDSSSSQRTDYQKSNFETTRGKNWCAYVHTRLSPTVILDNQVTYVPGGKGPCGWTGGSCPQRSQKISNPVYRMQHKIVTSLDWRCCPGYSGPKCQLRAQEQQSLIHTNQAESHTAVGRGVAEQQQQQGCGDPEVMQKMTDQVNYQAMKLTLLQKKIDNISLTVNDVRNTYSSLEGKVSEDKSREFQSLLKGLKSKSINVLIRDIVREQFKIFQNDMQETVAQLFKTVSSLSEDLESTRQIIQKVNESVVSIAAQQKFVLVQENRPTLTDIVELRNHIVNVRQEMTLTCEKPIKELEVKQTHLEGALEQEHSRSILYYESLNKTLSKLKEVHEQLLSTEQVSDQKNAPAAESVSNNVTEYMSTLHENIKKQSLMMLQMFEDLHIQESKINNLTVSLEMEKESLRGECEDMLSKCRNDFKFQLKDTEENLHVLNQTLAEVLFPMDNKMDKMSEQLNDLTYDMEILQPLLEQGASLRQTMTYEQPKEAIVIRKKIENLTSAVNSLNFIIKELTKRHNLLRNEVQGRDDALERRINEYALEMEDGLNKTMTIINNAIDFIQDNYALKETLSTIKDNSEIHHKCTSDMETILTFIPQFHRLNDSIQTLVNDNQRYNFVLQVAKTLAGIPRDEKLNQSNFQKMYQMFNETTSQVRKYQQNMSHLEEKLLLTTKISKNFETRLQDIESKVTQTLIPYYISVKKGSVVTNERDQALQLQVLNSRFKALEAKSIHLSINFFSLNKTLHEVLTMCHNASTSVSELNATIPKWIKHSLPDIQLLQKGLTEFVEPIIQIKTQAALSNLTCCIDRSLPGSLANVVKSQKQVKSLPKKINALKKPTVNLTTVLIGRTQRNTDNIIYPEEYSSCSRHPCQNGGTCINGRTSFTCACRHPFTGDNCTIKLVEENALAPDFSKGSYRYAPMVAFFASHTYGMTIPGPILFNNLDVNYGASYTPRTGKFRIPYLGVYVFKYTIESFSAHISGFLVVDGIDKLAFESENINSEIHCDRVLTGDALLELNYGQEVWLRLAKGTIPAKFPPVTTFSGYLLYRT

SEQ ID NO: 11368 - protein, 38 aa, Homo sapiens
LDSLLSQDSKYSNSCPVLVIPVDCISVKNTILPFCNSI

SEQ ID NO: 11369 - protein, 137 aa, Homo sapiens
LCIYVCVCLKFKFPVGRIHRHLKSRTTSHGRVGATAAVYSAAILEYLTAEVLELAGNASKDLKVKRITPRHLQLAIRGDEELDSLIKATIAGGGMLTSNILKNFFRGRNFLLLLISFSRRGNLSIFSMMEVWLYHEI

SEQ ID NO: 11370 - protein, 53 aa, Homo sapiens
LCIYVCVCLKFKFPVGRIHRHLKSRTTSHGRVGATAAVYSAAILEYLTAEVNG

SEQ ID NO: 11371 - protein, 34 aa, Homo sapiens
MAGGKAGKDSGKAKTKAVSRSQRAGLQWAVFIDT

SEQ ID NO: 11372 - protein, 40 aa, Homo sapiens
MVNFAETLDDSAGFCRREKNPLHRGMGVKWRRLGTRGDRI

SEQ ID NO: 11373 - protein, 2721 aa, Homo sapiens
LKCRPRRVLAIFLGPVQPDRMAEEGAVAVCVRVRPLNSREESLGETAQVYWKTDNNVIYQVDGSKSFNFDRVFHGNETTKNVYEEIAAPIIDSAIQGYNGTIFAYGQTASGKTYTMMGSEDHLGVIPRAIHDIFQKIKKFPDREFLLRVSYMEIYNETITDLLCGTQKMKPLIIREDVNRNVYVADLTEEVVYTSEMALKWITKGEKSRHYGETKMNQRSSRSHTIFRMILESREKGEPSNCEGSVKVSHLNLVDLAGSERAAQTGAAGVRLKEGCNINRSLFILGQVIKKLSDGQVGGFINYRDSKLTRILQNSLGGNAKTRIICTITPVSFDETLTALQFASTAKYMKNTPYVNEVSTDEALLKRYRKEIMDLKKQLEEVSLETRAQAMEKDQLAQLLEEKDLLQKVQNEKIENLTRMLVTSSSLTLQQELKAKRKRRVTWCLGKINKMKNSNYADQFNIPTNITTKTHKLSINLLREIDESVCSESDVFSNTLDTLSEIEWNPATKLLNQENIESELNSLRADYDNLVLDYEQLRTEKEEMELKLKEKNDLDEFEALERKTKKDQEMQLIHEISNLKNLVKHAEVYNQDLENELSSKVELLREKEDQIKKLQEYIDSQKLENIKMDLSYSLESIEDPKQMKQTLFDAETVALDAKRESAFLRSENLELKEKMKELATTYKQMENDIQLYQSQLEAKKKMQVDLEKELQSAFNEITKLTSLIDGKVPKDLLCNLELEGKITDLQKELNKEVEENEALREEVILLSELKSLPSEVERLRKEIQDKSEELHIITSEKDKLFSEVVHKESRVQGLLEEIGKTKDDLATTQSNYKSTDQEFQNFKTLHMDFEQKYKMVLEENERMNQEIVNLSKEAQKFDSSLGALKTELSYKTQELQEKTREVQERLNEMEQLKEQLENRDSTLQTVEREKTLITEKLQQTLEEVKTLTQEKDDLKQLQESLQIERDQLKSDIHDTVNMNIDTQEQLRNALESLKQHQETINTLKSKISEEVSRNLHMEENTGETKDEFQQKMVGIDKKQDLEAKNTQTLTADVKDNEIIEQQRKIFSLIQEKNELQQMLESVIAEKEQLKTDLKENIEMTIENQEELRLLGDELKKQQEIVAQEKNHAIKKEGELSRTCDRLAEVEEKLKEKSQQLQEKQQQLLNVQEEMSEMQKKINEIENLKNELKNKELTLEHMETERLELAQKLNENYEEVKSITKERKVLKELQKSFETERDHLRGYIREIEATGLQTKEELKIAHIHLKEHQETIDELRRSVSEKTAQIINTQDLEKSHTKLQEEIPVLHEEQELLPNVKEVSETQETMNELELLTEQSTTKDSTTLARIEMERLRLNEKFQESQEEIKSLTKERDNLKTIKEALEVKHDQLKEHIRETLAKIQESQSKQEQSLNMKEKDNETTKIVSEMEQFKPKDSALLRIEIEMLGLSKRLQESHDEMKSVAKEKDDLQRLQEVLQSESDQLKENIKEIVAKHLETEEELKVAHCCLKEQEETINELRVNLSEKETEISTIQKQLEAINDKLQNKIQEIYEKEEQFNIKQISEVQEKVNELKQFKEHRKAKDSALQSIESKMLELTNRLQESQEEIQIMIKEKEEMKRVQEALQIERDQLKENTKEIVAKMKESQEKEYQFLKMTAVNETQEKMCEIEHLKEQFETQKLNLENIETENIRLTQILHENLEEMRSVTKERDDLRSVEETLKVERDQLKENLRETITRDLEKQEELKIVHMHLKEHQETIDKLRGIVSEKTNEISNMQKDLEHSNDALKAQDLKIQEELRIAHMHLKEQQETIDKLRGIVSEKTDKLSNMQKDLENSNAKLQEKIQELKANEHQLITLKKDVNETQKKVSEMEQLKKQIKDQSLTLSKLEIENLNLAQKLHENLEEMKSVMKERDNLRRVEETLKLERDQLKESLQETKARDLEIQQELKTARMLSKEHKETVDKLREKISEKTIQISDIQKDLDKSKDELQKKIQELQKKELQLLRVKEDVNMSHKKINEMEQLKKQFEAQNLSMQSVRMDNFQLTKKLHESLEEIRIVAKERDELRRIKESLKMERDQFIATLREMIARDRQNHQVKPEKRLLSDGQQHLTESLREKCSRIKELLKRYSEMDDHYECLNRLSLDLEKEIEFQKELSMRVKANLSLPYLQTKHIEKLFTANQRCSMEFHRIMKKLKYVLSYVTKIKEEQHESINKFEMDFIDEVEKQKELLIKIQHLQQDCDVPSRELRDLKLNQNMDLHIEEILKDFSESEFPSIKTEFQQVLSNRKEMTQFLEEWLNTRFDIEKLKNGIQKENDRICQVNNFFNNRIIAIMNESTEFEERSATISKEWEQDLKSLKEKNEKLFKNYQTLKTSLASGAQVNPTTQDNKNPHVTSRATQLTTEKIRELENSLHEAKESAMHKESKIIKMQKELEVTNDIIAKLQAKVHESNKCLEKTKETIQVLQDKVALGAKPYKEEIEDLKMKLVKIDLEKMKNAKEFEKEISATKATVEYQKEVIRLLRENLRRSQQAQDTSVISEHTDPQPSNKPLTCGGGSGIVQNTKALILKSEHIRLEKEISKLKQQNEQLIKQKNELLSNNQHLSNEVKTWKERTLKREAHKQVTCENSPKSPKVTGTASKKKQITPSQCKERNLQDPVPKESPKSCFFDSRSKSLPSPHPVRYFDNSSLGLCPEVQNAGAESVDSQPGPWHASSGKDVPECKTQ

SEQ ID NO: 11374 - protein, 2600 aa, Homo sapiens
LKCRPRRVLAIFLGPVQPDRMAEEGAVAVCVRVRPLNSREESLGETAQVYWKTDNNVIYQVDGSKSFNFDRVFHGNETTKNVYEEIAAPIIDSAIQGYNGTIFAYGQTASGKTYTMMGSEDHLGVIPRAIHDIFQKIKKFPDREFLLRVSYMEIYNETITDLLCGTQKMKPLIIREDVNRNVYVADLTEEVVYTSEMALKWITKGEKSRHYGETKMNQRSSRSHTIFRMILESREKGEPSNCEGSVKVSHLNLVDLAGSERAAQTGAAGVRLKEGCNINRSLFILGQVIKKLSDGQVGGFINYRDSKLTRILQNSLGGNAKTRIICTITPVSFDETLTALQFASTAKYMKNTPYVNEVSTDEALLKRYRKEIMDLKKQLEEVSLETRAQAMEKDQLAQLLEEKDLLQKVQNEKIENLTRMLVTSSSLTLQQELKAKRKRRVTWCLGKINKMKNSNYADQFNIPTNITTKTHKLSINLLREIDESVCSESDVFSNTLDTLSEIEWNPATKLLNQENIESELNSLRADYDNLVLDYEQLRTEKEEMELKLKEKNDLDEFEALERKTKKDQENELSSKVELLREKEDQIKKLQEYIDSQKLENIKMDLSYSLESIEDPKQMKQTLFDAETVALDAKRESAFLRSENLELKEKMKELATTYKQMENDIQLYQSQLEAKKKMQVDLEKELQSAFNEITKLTSLIDGKVPKDLLCNLELEGKITDLQKELNKEVEENEALREEVILLSELKSLPSEVERLRKEIQDKSEELHIITSEKDKLFSEVVHKESRVQGLLEEIGKTKDDLATTQSNYKSTDQEFQNFKTLHMDFEQKYKMVLEENERMNQEIVNLSKEAQKFDSSLGALKTELSYKTQELQEKTREVQERLNEMEQLKEQLENRDSTLQTVEREKTLITEKLQQTLEEVKTLTQEKDDLKQLQESLQIERDQLKSDIHDTVNMNIDTQEQLRNALESLKQHQETINTLKSKISEEVSRNLHMEENTGETKDEFQQKMVGIDKKQDLEAKNTQTLTADVKDNEIIEQQRKIFSLIQEKNELQQMLESVIAEKEQLKTDLKENIEMTIENQEELRLLGDELKKQQEIVAQEKNHAIKKEGELSRTCDRLAEVEEKLKEKSQQLQEKQQQLLNVQEEMSEMQKKINEIENLKNELKNKELTLEHMETERLELAQKLNENYEEVKSITKERKVLKELQKSFETERDHLRGYIREIEATGLQTKEELKIAHIHLKEHQETIDELRRSVSEKTAQIINTQDLEKSHTKLQEEIPVLHEEQELLPNVKEVSETQETMNELELLTEQSTTKDSTTLARIEMERLRLNEKFQESQEEIKSLTKERDNLKTIKEALEVKHDQLKEHIRETLAKIQESQSKQEQSLNMKEKDNETTKIVSEMEQFKPKDSALLRIEIEMLGLSKRLQESHDEMKSVAKEKDDLQRLQEVLQSESDQLKENIKEIVAKHLETEEELKVAHCCLKEQEETINELRVNLSEKETEISTIQKQLEAINDKLQNKIQEIYEKEEQFNIKQISEVQEKVNELKQFKEHRKAKDSALQSIESKMLELTNRLQESQEEIQIMIKEKEEMKRVQEALQIERDQLKENTKEIVAKMKESQEKEYQFLKMTAVNETQEKMCEIEHLKEQFETQKLNLENIETENIRLTQILHENLEEMRSVTKERDDLRSVEETLKVERDQLKENLRETITRDLEKQEELKIVHMHLKEHQETIDKLRGIVSEKTNEISNMQKDLEHSNDALKAQDLKIQEELRIAHMHLKEQQETIDKLRGIVSEKTDKLSNMQKDLENSNAKLQEKIQELKANEHQLITLKKDVNETQKKVSEMEQLKKQIKDQSLTLSKLEIENLNLAQKLHENLEEMKSVMKERDNLRRVEETLKLERDQLKESLQETKARDLEIQQELKTARMLSKEHKETVDKLREKISEKTIQISDIQKDLDKSKDELQKKQDRQNHQVKPEKRLLSDGQQHLTESLREKCSRIKELLKRYSEMDDHYECLNRLSLDLEKEIEFQKELSMRVKANLSLPYLQTKHIEKLFTANQRCSMEFHRIMKKLKYVLSYVTKIKEEQHESINKFEMDFIDEVEKQKELLIKIQHLQQDCDVPSRELRDLKLNQNMDLHIEEILKDFSESEFPSIKTEFQQVLSNRKEMTQFLEEWLNTRFDIEKLKNGIQKENDRICQVNNFFNNRIIAIMNESTEFEERSATISKEWEQDLKSLKEKNEKLFKNYQTLKTSLASGAQVNPTTQDNKNPHVTSRATQLTTEKIRELENSLHEAKESAMHKESKIIKMQKELEVTNDIIAKLQAKVHESNKCLEKTKETIQVLQDKVALGAKPYKEEIEDLKMKLVKIDLEKMKNAKEFEKEISATKATVEYQKEVIRLLRENLRRSQQAQDTSVISEHTDPQPSNKPLTCGGGSGIVQNTKALILKSEHIRLEKEISKLKQQNEQLIKQKNELLSNNQHLSNEVKTWKERTLKREAHKQVTCENSPKSPKVTGTASKKKQITPSQCKERNLQDPVPKESPKSCFFDSRSKSLPSPHPVRYFDNSSLGLCPEVQNAGAESVDSQPGPWHASSGKDVPECKTQ

SEQ ID NO: 11375 - protein, 2684 aa, Homo sapiens
LKCRPRRVLAIFLGPVQPDRMAEEGAVAVCVRVRPLNSREESLGETAQVYWKTDNNVIYQVDGSKSFNFDRVFHGNETTKNVYEEIAAPIIDSAIQGYNGTIFAYGQTASGKTYTMMGSEDHLGVIPRAIHDIFQKIKKFPDREFLLRVSYMEIYNETITDLLCGTQKMKPLIIREDVNRNVYVADLTEEVVYTSEMALKWITKGEKSRHYGETKMNQRSSRSHTIFRMILESREKGEPSNCEGSVKVSHLNLVDLAGSERAAQTGAAGVRLKEGCNINRSLFILGQVIKKLSDGQVGGFINYRDSKLTRILQNSLGGNAKTRIICTITPVSFDETLTALQFASTAKYMKNTPYVNEVSTDEALLKRYRKEIMDLKKQLEEVSLETRAQAMEKDQLAQLLEEKDLLQKVQNEKIENLTRMLVTSSSLTLQQELKAKRKRRVTWCLGKINKMKNSNYADQFNIPTNITTKTHKLSINLLREIDESVCSESDVFSNTLDTLSEIEWNPATKLLNQENIESELNSLRADYDNLVLDYEQLRTEKEEMELKLKEKNDLDEFEALERKTKKDQEMQLIHEISNLKNLVKHAEVYNQDLENELSSKVELLREKEDQIKKLQEYIDSQKLENIKMDLSYSLESIEDPKQMKQTLFDAETVALDAKRESAFLRSENLELKEKMKELATTYKQMENDIQLYQSQLEAKKKMQVDLEKELQSAFNEITKLTSLIDGKVPKDLLCNLELEGKITDLQKELNKEVEENEALREEVILLSELKSLPSEVERLRKEIQDKSEELHIITSEKDKLFSEVVHKESRVQGLLEEIGKTKDDLATTQSNYKSTDQEFQNFKTLHMDFEQKYKMVLEENERMNQEIVNLSKEAQKFDSSLGALKTELSYKTQELQEKTREVQERLNEMEQLKEQLENRDSTLQTVEREKTLITEKLQQTLEEVKTLTQEKDDLKQLQESLQIERDQLKSDIHDTVNMNIDTQEQLRNALESLKQHQETINTLKSKISEEVSRNLHMEENTGETKDEFQQKMVGIDKKQDLEAKNTQTLTADVKDNEIIEQQRKIFSLIQEKNELQQMLESVIAEKEQLKTDLKENIEMTIENQEELRLLGDELKKQQEIVAQEKNHAIKKEGELSRTCDRLAEVEEKLKEKSQQLQEKQQQLLNVQEEMSEMQKKINEIENLKNELKNKELTLEHMETERLELAQKLNENYEEVKSITKERKVLKELQKSFETERDHLRGYIREIEATGLQTKEELKIAHIHLKEHQETIDELRRSVSEKTAQIINTQDLEKSHTKLQEEIPVLHEEQELLPNVKEVSETQETMNELELLTEQSTTKDSTTLARIEMERLRLNEKFQESQEEIKSLTKERDNLKTIKEALEVKHDQLKEHIRETLAKIQESQSKQEQSLNMKEKDNETTKIVSEMEQFKPKDSALLRIEIEMLGLSKRLQESHDEMKSVAKEKDDLQRLQEVLQSESDQLKENIKEIVAKHLETEEELKVAHCCLKEQEETINELRVNLSEKETEISTIQKQLEAINDKLQNKIQEIYEKEEQFNIKQISEVQEKVNELKQFKEHRKAKDSALQSIESKMLELTNRLQESQEEIQIMIKEKEEMKRVQEALQIERDQLKENTKEIVAKMKESQEKEYQFLKMTAVNETQEKMCEIEHLKEQFETQKLNLENIETENIRLTQILHENLEEMRSVTKERDDLRSVEETLKVERDQLKENLRETITRDLEKQEELKIVHMHLKEHQETIDKLRGIVSEKTNEISNMQKDLEHSNDALKAQDLKIQEELRIAHMHLKEQQETIDKLRGIVSEKTDKLSNMQKDLENSNAKLQEKIQELKANEHQLITLKKDVNETQKKVSEMEQLKKQIKDQSLTLSKLEIENLNLAQKLHENLEEMKSVMKERDNLRRVEETLKLERDQLKESLQETKARDLEIQQELKTARMLSKEHKETVDKLREKISEKTIQISDIQKDLDKSKDELQKKIQELQKKELQLLRVKEDVNMSHKKINEMEQLKKQFEAQNYLCKCEMDNFQLTKKLHESLEEIRIVAKERDELRRIKESLKMERDQFIATLREMIARDRQNHQVKPEKRLLSDGQQHLTESLREKCSRIKELLKRYSEMDDHYECLNRLSLDLEKEMEFHRIMKKLKYVLSYVTKIKEEQHESINKFEMDFIDEVEKQKELLIKIQHLQQDCDVPSRELRDLKLNQNMDLHIEEILKDFSESEFPSIKTEFQQVLSNRKEMTQFLEEWLNTRFDIEKLKNGIQKENDRICQVNNFFNNRIIAIMNESTEFEERSATISKEWEQDLKSLKEKNEKLFKNYQTLKTSLASGAQVNPTTQDNKNPHVTSRATQLTTEKIRELENSLHEAKESAMHKESKIIKMQKELEVTNDIIAKLQAKVHESNKCLEKTKETIQVLQDKVALGAKPYKEEIEDLKMKLVKIDLEKMKNAKEFEKEISATKATVEYQKEVIRLLRENLRRSQQAQDTSVISEHTDPQPSNKPLTCGGGSGIVQNTKALILKSEHIRLEKEISKLKQQNEQLIKQKNELLSNNQHLSNEVKTWKERTLKREAHKQVTCENSPKSPKVTGTASKKKQITPSQCKERNLQDPVPKESPKSCFFDSRSKSLPSPHPVRYFDNSSLGLCPEVQNAGAESVDSQPGPWHASSGKDVPECKTQ

SEQ ID NO: 11376 - protein, 107 aa, Homo sapiens
LAFRGCPPRASSLPGSPRCRRRCHTMAFVTRQFMRSVSSSSTASASAKKIIVKHVTVIGGGLMGAGIAQASLLSKLWYTPVQLPGFQEKLSTSCSVCSLKSTCNQKL

SEQ ID NO: 11377 - protein, 77 aa, Homo sapiens
LAFRGCPPRASSLPGSPRCRRRCHTMAFVTRQFMRSVSSSSTASASAKKIIVKHVTVIGGGLMGAGIAQERGWPQQQ

SEQ ID NO: 11378 - protein, 177 aa, Homo sapiens
LNAFMLYMKEMRANVVAECTLKESAAINQILGRRWHALSREEQAKYYELARKERQLHMQLYPGWSARDNYGKKKKRKREKLQESASAFHLFLLEVENEAHSQRAKPRQRPQDLFWRWKLVENPDCLHGLPSRPQRNTDINFTLRSLLETLIHKDNHCQPLFRLLQEPSSKIKHKKVF

SEQ ID NO: 11379 - protein, 40 aa, Homo sapiens
LNAFMLYMKEMRANVVAECTLKESAAINQILGRRKFMIGK

SEQ ID NO: 11380 - protein, 144 aa, Homo sapiens
LRGRARRRDPGCALSGRGTRTRPEPRTRPSSGRPLPSAGRTQGAQLFALTELAGGGVQSGEPASQAEKLEPGTKRGRTECVCRLELRAEAFGPEAPAVTPRDSAVPSTAESPRLPAKTLFLANFSFSSPPPRPPSSAPPPSLAD

SEQ ID NO: 11381 - protein, 122 aa, Homo sapiens
LQALRMVQRLTYRRRLSYNTASNKTRLSRTPGNRIVYLYTKKVGKAPKSACGVCPGRLRGVRAVRPKVLMRLSKTKKHVSRAYGGSMCAKCVRDRIKRAFLIEEQKIVVKVLKAQAQSQKAK

SEQ ID NO: 11382 - protein, 93 aa, Homo sapiens
MVQRLTYRRRLSYNTASNKTRLSRTPGNRIVYLYTKKVGKAPKSACGVCPGRLRGVSVPFTVCSLTSLELTELSSLDDGMNQGEVTTKRVQNY

SEQ ID NO: 11383 - protein, 211 aa, Homo sapiens
LAARLAAMSSASGLRRGHPAVSTVSHADADCFVCVFLSHGEGNHIYAYDAKIEIQTLTGLFKGDKCHSLVGKPKIFIIQACRGNQHDVPVIPLDVVDNQTEKLDTNITEVDAASVYTLPAGADFLMCYSVAEGYYSHRETVNGSWYIQDLCEMLGKYGSSLEFTELLTLVNRKVSQRRVDFCKDPSAIGKKQVPCFASMLTKKLHFFPKSN

SEQ ID NO: 11384 - protein, 300 aa, Homo sapiens
LAARLAAMSSASGLRRGHPAGGEENMTETDAFYKREMFDPAEKYKMDHRRRGIALIFNHERFFWHLTLPERRGTCADRDNLTRRFSDLGFEVKCFNDLKAEELLLKIHEVSTVSHADADCFVCVFLSHGEGNHIYAYDAKIEIQTLTGLFKGDKCHSLVGKPKIFIIQACRGNQHDVPVIPLDVVDNQTEKLDTNITEVDAASVYTLPAGADFLMCYSVAEGYYSHRETVNGSWYIQDLCEMLGKYGSSLEFTELLTLVNRKVSQRRVDFCKDPSAIGKKQVPCFASMLTKKLHFFPKSN

SEQ ID NO: 11385 - protein, 252 aa, Homo sapiens
VREIHEGTGLESLEGGVGPARRGLRQGGGAGRRRERREEAPEEETEAWGRQKRLRLSRALFLSPRRLEAARAREQREAAKVPRFAGAAAARRREAGLGRARSSEPRRAPRLSLLTAAAGLRLSALGSAASAPLHSTSAPSDSLPSASTPPAPVRIVSQLLATRPVPGCFSISRPPLLEYFTPCIWGQGLEKGRVERPVEKKEARPAGGGGSADCGEETPRHPFWSSPLPPRPCAHSLAGELLSDQESKSGPG

SEQ ID NO: 11386 - protein, 10 aa, Homo sapiens
LRKAMRILCS

SEQ ID NO: 11387 - protein, 340 aa, Homo sapiens
LFFFLLSKTPGKTASMAHFVQGTSRMIAAESSTEHKECAEPSTRKNLMNSLEQKIRCLEKQRKELLEVNQQWDQQFRSMKELYERKVAELKTKLDAAERFLSTREKDPHQRQRKDDRQREDDRQRDLTRDRLQREEKEKERLNEELHELKEENKLLKGKNTLANKEKEHYECEIKRLNKALQDALNIKCSFSEDCLRKSRVEFCHEEMRTEMEVLKQQVQIYEEDFKKERSDRERLNQEKEELQQINETSQSQLNRLNSQIKACQMEKEKLEKQLKQMYCPPCNCGLVFHLQDPWVPTGPGAVQKQREHPPDYQWYALDQLPPDVQHKANGLSSVKKVHP

SEQ ID NO: 11388 - protein, 154 aa, Homo sapiens
LKQQVQIYEEDFKKERSDRERLNQEKEELQQINETSQSQLNRLNSQIKACQMEKEKLEKQLKQMYCPPCNCGLVFHLQDPWVPTGPGAVQKQREHPPDYQWYALDQLPPDVQHKANDGVLLHLQSVARLVSNSWPQVILLPLAPKVLKFQVYPQ

SEQ ID NO: 11389 - protein, 188 aa, Homo sapiens
LFFFLLSKTPGKTASMAHFVQGTSRMIAAESSTEHKECAEPSTRKNLMNSLEQKIRCLEKQRKELLEVNQQWDQQFRSMKELYERKVAELKTKLDAAERFLSTREKDPHQRQRKDDRQREDDRQRDLTRDRLQREEKEKERLNEELHELKEENKLLKGKNTLANKEKEHYECEIKRLNKVSVRSSMGD

SEQ ID NO: 11390 - protein, 9 aa, Homo sapiens
LVLLHLPLT

SEQ ID NO: 11391 - protein, 433 aa, Homo sapiens
VMLGNSAPGPATREAGSALLALQQTALQEDQENINPEKAAPVQQPRTRAALAVLKSGNPRGLAQQQRPKTRRVAPLKDLPVNDEHVTVPPWKANSKQPAFTIHVDEAEKEAQKKPAESQKIEREDALAFNSAISLPGPRKPLVPLDYPMDGSFESPHTMDMSIILEDEKPVSVNEVPDYHEDIHTYLREMEVKCKPKVGYMKKQPDITNSMRAILVDWLVEVGEEYKLQNETLHLAVNYIDRFLSSMSVLRGKLQLVGTAAMLLASKFEEIYPPEVAEFVYITDDTYTKKQVLRMEHLVLKVLTFDLAAPTVNQFLTQYFLHQQPANCKVESLAMFLGELSLIDADPYLKYLPSVIAGAAFHLALYTVTGQSWPESLIRKTGYTLESLKPCLMDLHQTYLKAPQHAQQSIREKYKNSKYHGVSLLNPPETLNL

SEQ ID NO: 11392 - protein, 80 aa, Homo sapiens
LHLWASLARHAGQCLPAPFATSSALRGLELGERAGGLVGWPGLRPAATTILWPGRCEWSAGQSARCLAPQADPAVHSREQ

SEQ ID NO: 11393 - protein, 991 aa, Homo sapiens
VLREGPNGPDPCCLGAERPAPQETRVGKAGQDFKVGNLLGKGSFAGVYRAESIHTGLEVAIKMIDKKAMYKAGMVQRVQNEVKIHCQLKHPSILELYNYFEDSNYVYLVLEMCHNGEMNRYLKNRVKPFSENEARHFMHQIITGMLYLHSHGILHRDLTLSNLLLTRNMNIKIADFGLATQLKMPHEKHYTLCGTPNYISPEIATRSAHGLESDVWSLGCMFYTLLIGRPPFDTDTVKNTLNKVVLADYEMPSFLSIEAKDLIHQLLRRNPADRLSLSSVLDHPFMSRNSSTKSKDLGTVEDSIDSGHATISTAITASSSTSISGSLFDKRRLLIGQPLPNKMTVFPKNKSSTDFSSSGDGNSFYTQWGNQETSNSGRGRVIQDAEERPHSRYLRRAYSSDRSGTSNSQSQAKTYTMERCHSAEMLSVSKRSGGGENEERYSPTDNNANIFNFFKEKTSSSSGSFERPDNNQALSNHLCPGKTPFPFADPTPQTETVQQWFGNLQINAHLRKTTEYDSISPNRDFQGHPDLQKDTSKNAWTDTKVKKNSDASDNAHSVKQQNTMKYMTALHSKPEIIQQECVFGSDPLSEQSKTRGMEPPWGYQNRTLRSITSPLVAHRLKPIRQKTKKAVVSILDSEEVCVELVKEYASQEYVKEVLQISSDGNTITIYYPNGGRGFPLADRPPSPTDNISRYSFDNLPEKYWRKYQYASRFVQLVRSKSPKITYFTRYAKCILMENSPGADFEVWFYDGVKIHKTEDFIQVIEKTGKSYTLKSESEVNSLKEEIKMYMDHANEGHRICLALESIISEEERKTRSAPFFPIIIGRKPGSTSSPKALSPPPSVDSNYPTRERASFNRMVMHSAASPTQAPILNPSMVTNEGLGLTTTASGTDISSNSLKDCLPKSAQLLKSVFVKNVGWATQLTSGAVWVQFNDGSQLVVQAGVSSISYTSPNGQTTRYGENEKLPDYIKQKLQCLSSILLMFSNPTPNFH

SEQ ID NO: 11394 - protein, 133 aa, Homo sapiens
VSILDSEEVCVELVKEYASQEYVKEVLQISSDGNTITIYYPNGGRGFPLADRPPSPTDNISRYSFDNLPEKYWRKYQYASRFVQLVRSKSPKITYFTRYAKCILMENSPGADFEVWFYDGKYHLEMVICSFSL

SEQ ID NO: 11395 - protein, 265 aa, Homo sapiens
MIININLGIFLKRIREQFSDFFFLGVKIHKTEDFIQVIEKTGKSYTLKSESEVNSLKEEIKMYMDHANEGHRICLALESIISEEERKTRSAPFFPIIIGRKPGSTSSPKALSPPPSVDSNYPTRERASFNRMVMHSAASPTQAPILNPSMVTNEGLGLTTTASGTDISSNSLKDCLPKSAQLLKSVFVKNVGWATQLTSGAVWVQFNDGSQLVVQAGVSSISYTSPNGQTTRYGENEKLPDYIKQKLQCLSSILLMFSNPTPNFH

SEQ ID NO: 11396 - protein, 58 aa, Homo sapiens
VLGSVTRVGKPSASAILAASVGLFSYHVNRRRRPVVGEAAAALSEKGKKTTRKKEVSG

SEQ ID NO: 11397 - protein, 40 aa, Homo sapiens
VRSTNSSVRKMAGNSILLAAVSILSACQQNKTVWSFILYS

SEQ ID NO: 11398 - protein, 87 aa, Homo sapiens
VRSTNSSVRKMAGNSILLAAVSILSACQQSYFALQVGKARLKYKVTPPAVTGSPEFERVFRAHFCYLSGSGVHIWPSPILLGIFRSC

SEQ ID NO: 11399 - protein, 60 aa, Homo sapiens
LLAAVSILSACQQSYFALQVGKARLKYKVTPPAVTGSPEFERVFRAQWTWTSHQRHFKVH

SEQ ID NO: 11400 - protein, 1153 aa, Homo sapiens
VDKKSSSKIVCPGSRMGDFAAPAAAANGSSICINSSLNSSLGGAGIGVNNTPNSTPAAPSSNHPAAGGCGGSGGPGGGSAAVPKHSTVVERLRQRIEGCRRHHVNCENRYQQAQVEQLELERRDTVSLYQRTLEQRAKKSGAGTGKQQHPSKPQQDAEAASAEQRNHTLIMLQETVKRKLEGARSPLNGDQQNGACDGNFSPTSKRIRKDISAGMEAINNLPSNMPLPSASPLHQLDLKPSLPLQNSGTHTPGLLEDLSKNGRLPEIKLPVNGCSDLEDSFTILQSKDLKQEPLDDPTCIDTSETSLSNQNKLFSDINLNDQEWQELIDELANTVPEDDIQDLFNEDFEEKKEPEFSQPATETPLSQESASVKSDPSHSPFAHVSMGSPQARPSSSGPPFSTVSTATSLPSVASTPAAPNPASSPANCAVQSPQTPNQAHTPGQAPPRPGNGYLLNPAAVTVAGSASGPVAVPSSDMSPAEQLKQMAAQQQQRAKLMQQKQQQQQQQQQQQQQQQQQQQQQQQQQHSNQTSNWSPLGPPSSPYGAAFTAEKPNSPMMYPQAFNNQNPIVPPMANNLQKTTMNNYLPQNHMNMINQQPNNLGTNSLNKQHNILTYGNTKPLTHFNADLSQRMTPPVANPNKNPLMPYIQQQQQQQQQQQQQQQQQQPPPPQLQAPRAHLSEDQKRLLLMKQKGVMNQPMAYAALPSHGQEQHPVGLPRTTGPMQSSVPPGSGGMVSGASPAGPGFLGSQPQAAIMKQMLIDQRAQLIEQQKQQFLREQRQQQQQQQQQILAEQQLQQSHLPRQHLQPQRNPYPVQQVNQFQGSPQDIAAVRSQAALQSMRTSRLMAQNAGMMGIGPSQNPGTMATAAAQSEMGLAPYSTTPTSQPGMYNMSTGMTQMLQHPNQSGMSITHNQAQGPRQPASGQGVGMVSGFGQSMLVNSAITQQHPQMKGPVGQALPRPQAPPRLQSLMGTVQQGAQSWQQRSLQGMPGRTSGELGPFNNGASYPLQAGQPRLTKQHFPQGLSQSVVDANTGTVRTLNPAAMGRQMMPSLPGQQGTSQARPMVMSGLSQGVPGMPAFSQPPAQQQIPSGSFAPSSQSQAYERNAPQDVSYNYSGDGAGGSFPGLPDGADLVDSIIKGGPGDEWMQELDELFGNP

SEQ ID NO: 11401 - protein, 44 aa, Homo sapiens
LSFYSLKKGNKNHPKISPPVFFAPSGSPFPSMCLRLPRVPLKLF

SEQ ID NO: 11402 - protein, 14 aa, Homo sapiens
MDYKKKASKERISP

SEQ ID NO: 11403 - protein, 44 aa, Homo sapiens
MRCGVSVCRACPHWRHMLVCVHGVCFSVCREKMLANHRKSPGIY

SEQ ID NO: 11404 - protein, 55 aa, Homo sapiens
LIIVMVAGAAAAAAAQPSVRCCSLRGVLQRTSPIYFCSRLGLSMCLLPPARGFDI

SEQ ID NO: 11405 - protein, 24 aa, Homo sapiens
MEEEEEVEEREEEEEAAAAAAASS

SEQ ID NO: 11406 - protein, 27 aa, Homo sapiens
LCIMLVYENVQMYCRDFMIRIAYIYET

SEQ ID NO: 11407 - protein, 8 aa, Homo sapiens
MVAKWLAP

SEQ ID NO: 11408 - protein, 16 aa, Homo sapiens
MSEVSWAMPVLKWESC

SEQ ID NO: 11409 - protein, 56 aa, Homo sapiens
MQYFKCFIKIRAALFPQSTGQIIIRFEPVSYQNIRIPRQKLGEVSWAMPVLKWESC

SEQ ID NO: 11410 - protein, 59 aa, Homo sapiens
LLSHLFKCLQDGWPSARHHMSFLTAARWFEPVSYQNIRIPRQKLGEVSWAMPVLKWESC

SEQ ID NO: 11411 - protein, 20 aa, Homo sapiens
LTSVTRLAPPTLVDVIPAVR

SEQ ID NO: 11412 - protein, 42 aa, Homo sapiens
VKARADLASVLPSARGSFSPEELDILSPSYGRQVNENCYCQP

SEQ ID NO: 11413 - protein, 41 aa, Homo sapiens
VKARADLASVLPSARGSFSPELDILSPSYGRQVNENCYCQP

SEQ ID NO: 11414 - protein, 1122 aa, Homo sapiens
LACSRTSNMEAAVGVPDGGDQGGAGPREDATPMDAYLRKLGLYRKLVAKDGSCLFRAVAEQVLHSQSRHVEVRMACIHYLRENREKFEAFIEGSFEEYLKRLENPQEWVGQVEISALSLMYRKDFIIYREPNVSPSQVTENNFPEKVLLCFSNGNHYDIVYPIKYKESSAMCQSLLYELLYEKVFKTDVSKIVMELDTLEVADEDNSEISDSEDDSCKSKTAAAAADVNGFKPLSGNEQLKNNGNSTSLPLSRKVLKSLNPAVYRNVEYEIWLKSKQAQQKRDYSIAAGLQYEVGDKCQVRLDHNGKFLNADVQGIHSENGPVLVEELGKKHTSKNLKAPPPESWNTVSGKKMKKPSTSGQNFHSDVDYRGPKNPSKPIKAPSALPPRLQHPSGVRQHAFSSHSSGSQSQKFSSEHKNLSRTPSQIIRKPDRERVEDFDHTSRESNYFGLSPEERREKQAIEESRLLYEIQNRDEQAFPALSSSSVNQSASQSSNPCVQRKSSHVGDRKGSRRRMDTEERKDKDSIHGHSQLDKRPEPSTLENITDDKYATVSSPSKSKKLECPSPAEQKPAEHVSLSNPAPLLVSPEVHLTPAVPSLPATVPAWPSEPTTFGPTGVPAPIPVLSVTQTLTTGPDSAVSQAHLTPSPVPVSIQAVNQPLMPLPQTLSLYQDPLYPGFPCNEKGDRAIVPPYSLCQTGEDLPKDKNILRFFFNLGVKAYSCPMWAPHSYLYPLHQAYLAACRMYPKVPVPVYPHNPWFQEAPAAQNESDCTCTDAHFPMQTEASVNGQMPQPEIGPPTFSSPLVIPPSQVSESHGQLSYQADLESETPGQLLHADYEESLSGKNMFPQPSFGPNPFLGPVPIAPPFFPHVWYGYPFQGFIENPVMRQNIVLPSDEKGELDLSLENLDLSKDCGSVSTVDEFPEARGEHVHSLPEASVSSKPDEGRTEQSSQTRKADTALASIPPVAEGKAHPPTQILNRERETVPVELEPKRTIQSLKEKTEKVKDPKTAADVVSPGANSVDSRVQRPKEESSEDENEVSNILRSGRSKQFYNQTYGSRKYKSDWGYSGRGGYQHVRSEESWKGQPSRSRDEGYQYHRNVRGRPFRGDRRRSGMGDGHRGQHT

SEQ ID NO: 11415 - protein, 165 aa, Homo sapiens
LSCLQTSEMSSSWNEFRREKMHQSAMYELCQGMHQISLQFVRLQLTFEEYTIMKVLLLLSTIPKDGLKSQAAFEEMRTNYIKELRKMVTKCPNNSGQSWQRFYQLTKLLDSMHDLVSDLLEFCFYTFRESHALKVEFPAMLVEIISDQLPKVESGNAKPLYFHRK

SEQ ID NO: 11416 - protein, 1003 aa, Homo sapiens
LQQVDGERRTPAEAAMETKGYHSLPEGLDMERRWGQVSQAVERSSLGPTERTDENNYMEIVNVSCVSGAIPNNSTQGSSKEKQELLPCLQQDNNRPGILTSDIKTELESKELSATVAESMGLYMDSVRDADYSYEQQNQQGSMSPAKIYQNVEQLVKFYKGNGHRPSTLSCVNTPLRSFMSDSGSSVNGGVMRAVVKSPIMCHEKSPSVCSPLNMTSSVCSPAGINSVSSTTASFGSFPVHSPITQGTPLTCSPNVENRGSRSHSPAHASNVGSPLSSPLSSMKSSISSPPSHCSVKSPVSSPNNVTLRSSVSSPANINNSRCSVSSPSNTNNRSTLSSPAASTVGSICSPVNNAFSYTASGTSAGSSTLRDVVPSPDTQEKGAQEVPFPKTEEVESAISNGVTGQLNIVQYIKPEPDGAFSSSCLGGNSKINSDSSFSVPIKQESTKHSCSGTSFKGNPTVNPFPFMDGSYFSFMDDKDYYSLSGILGPPVPGFDGNCEGSGFPVGIKQEPDDGSYYPEASIPSSAIVGVNSGGQSFHYRIGAQGTISLSRSARDQSFQHLSSFPPVNTLVESWKSHGDLSSRRSDGYPVLEYIPENVSSSTLRSVSTGSSRPSKICLVCGDEASGCHYGVVTCGSCKVFFKRAVEGKCSWQHNYLCAGRNDCIIDKIRRKNCPACRLQKCLQAGMNLGARKSKKLGKLKGIHEEQPQQQQPPPPPPPPQSPEEGTTYIAPAKEPSVNTALVPQLSTISRALTPSPVMVLENIEPEIVYAGYDSSKPDTAENLLSTLNRLAGKQMIQVVKWAKVLPGFKNLPLEDQITLIQYSWMCLSSFALSWRSYKHTNSQFLYFAPDLVFNEEKMHQSAMYELCQGMHQISLQFVRLQLTFEEYTIMKVLLLLSTIPKDGLKSQAAFEEMRTNYIKELRKMVTKCPNNSGQSWQRFYQLTKLLDSMHDLVSDLLEFCFYTFRESHALKVEFPAMLVEIISDQLPKVESGNAKPLYFHRK

SEQ ID NO: 11417 - protein, 999 aa, Homo sapiens
LQQVDGERRTPAEAAMETKGYHSLPEGLDMERRWGQVSQAVERSSLGPTERTDENNYMEIVNVSCVSGAIPNNSTQGSSKEKQELLPCLQQDNNRPGILTSDIKTELESKELSATVAESMGLYMDSVRDADYSYEQQNQQGSMSPAKIYQNVEQLVKFYKGNGHRPSTLSCVNTPLRSFMSDSGSSVNGGVMRAVVKSPIMCHEKSPSVCSPLNMTSSVCSPAGINSVSSTTASFGSFPVHSPITQGTPLTCSPNVENRGSRSHSPAHASNVGSPLSSPLSSMKSSISSPPSHCSVKSPVSSPNNVTLRSSVSSPANINNSRCSVSSPSNTNNRSTLSSPAASTVGSICSPVNNAFSYTASGTSAGSSTLRDVVPSPDTQEKGAQEVPFPKTEEVESAISNGVTGQLNIVQYIKPEPDGAFSSSCLGGNSKINSDSSFSVPIKQESTKHSCSGTSFKGNPTVNPFPFMDGSYFSFMDDKDYYSLSGILGPPVPGFDGNCEGSGFPVGIKQEPDDGSYYPEASIPSSAIVGVNSGGQSFHYRIGAQGTISLSRSARDQSFQHLSSFPPVNTLVESWKSHGDLSSRRSDGYPVLEYIPENVSSSTLRSVSTGSSRPSKICLVCGDEASGCHYGVVTCGSCKVFFKRAVEGQHNYLCAGRNDCIIDKIRRKNCPACRLQKCLQAGMNLGARKSKKLGKLKGIHEEQPQQQQPPPPPPPPQSPEEGTTYIAPAKEPSVNTALVPQLSTISRALTPSPVMVLENIEPEIVYAGYDSSKPDTAENLLSTLNRLAGKQMIQVVKWAKVLPGFKNLPLEDQITLIQYSWMCLSSFALSWRSYKHTNSQFLYFAPDLVFNEEKMHQSAMYELCQGMHQISLQFVRLQLTFEEYTIMKVLLLLSTIPKDGLKSQAAFEEMRTNYIKELRKMVTKCPNNSGQSWQRFYQLTKLLDSMHDLVSDLLEFCFYTFRESHALKVEFPAMLVEIISDQLPKVESGNAKPLYFHRK

SEQ ID NO: 11418 - protein, 882 aa, Homo sapiens
LQQVDGERRTPAEAAMETKGYHSLPEGLDMERRWGQVSQAVERSSLGPTERTDENNYMEIVNVSCVSGAIPNNSTQGSSKEKQELLPCLQQDNNRPGILTSDIKTELESKELSATVAESMGLYMDSVRDADYSYEQQNQQGSMSPAKIYQNVEQLVKFYKGNGHRPSTLSCVNTPLRSFMSDSGSSVNGGVMRAVVKSPIMCHEKSPSVCSPLNMTSSVCSPAGINSVSSTTASFGSFPVHSPITQGTPLTCSPNVENRGSRSHSPAHASNVGSPLSSPLSSMKSSISSPPSHCSVKSPVSSPNNVTLRSSVSSPANINNSRCSVSSPSNTNNRSTLSSPAASTVGSICSPVNNAFSYTASGTSAGSSTLRDVVPSPDTQEKGAQEVPFPKTEEVESAISNGVTGQLNIVQYIKPEPDGAFSSSCLGGNSKINSDSSFSVPIKQESTKHSCSGTSFKGNPTVNPFPFMDGSYFSFMDDKDYYSLSGILGPPVPGFDGNCEGSGFPVGIKQEPDDGSYYPEASIPSSAIVGVNSGGQSFHYRIGAQGTISLSRSARDQSFQHLSSFPPVNTLVESWKSHGDLSSRRSDGYPVLEYIPENVSSSTLRSVSTGSSRPSKICLVCGDEASGCHYGVVTCGSCKVFFKRAVEGQHNYLCAGRNDCIIDKIRRKNCPACRLQKCLQAGMNLGGFKNLPLEDQITLIQYSWMCLSSFALSWRSYKHTNSQFLYFAPDLVFNEEKMHQSAMYELCQGMHQISLQFVRLQLTFEEYTIMKVLLLLSTIPKDGLKSQAAFEEMRTNYIKELRKMVTKCPNNSGQSWQRFYQLTKLLDSMHDLVSDLLEFCFYTFRESHALKVEFPAMLVEIISDQLPKVESGNAKPLYFHRK

SEQ ID NO: 11419 - protein, 1042 aa, Homo sapiens
LLYPPSAGRLPLPGLSSSPSSPPISQYWTCWWRRQQRRRESSRSPSPAPASPPCPRKAMETKGYHSLPEGLDMERRWGQVSQAVERSSLGPTERTDENNYMEIVNVSCVSGAIPNNSTQGSSKEKQELLPCLQQDNNRPGILTSDIKTELESKELSATVAESMGLYMDSVRDADYSYEQQNQQGSMSPAKIYQNVEQLVKFYKGNGHRPSTLSCVNTPLRSFMSDSGSSVNGGVMRAVVKSPIMCHEKSPSVCSPLNMTSSVCSPAGINSVSSTTASFGSFPVHSPITQGTPLTCSPNVENRGSRSHSPAHASNVGSPLSSPLSSMKSSISSPPSHCSVKSPVSSPNNVTLRSSVSSPANINNSRCSVSSPSNTNNRSTLSSPAASTVGSICSPVNNAFSYTASGTSAGSSTLRDVVPSPDTQEKGAQEVPFPKTEEVESAISNGVTGQLNIVQYIKPEPDGAFSSSCLGGNSKINSDSSFSVPIKQESTKHSCSGTSFKGNPTVNPFPFMDGSYFSFMDDKDYYSLSGILGPPVPGFDGNCEGSGFPVGIKQEPDDGSYYPEASIPSSAIVGVNSGGQSFHYRIGAQGTISLSRSARDQSFQHLSSFPPVNTLVESWKSHGDLSSRRSDGYPVLEYIPENVSSSTLRSVSTGSSRPSKICLVCGDEASGCHYGVVTCGSCKVFFKRAVEGQHNYLCAGRNDCIIDKIRRKNCPACRLQKCLQAGMNLGARKSKKLGKLKGIHEEQPQQQQPPPPPPPPQSPEEGTTYIAPAKEPSVNTALVPQLSTISRALTPSPVMVLENIEPEIVYAGYDSSKPDTAENLLSTLNRLAGKQMIQVVKWAKVLPGFKNLPLEDQITLIQYSWMCLSSFALSWRSYKHTNSQFLYFAPDLVFNEEKMHQSAMYELCQGMHQISLQFVRLQLTFEEYTIMKVLLLLSTIPKDGLKSQAAFEEMRTNYIKELRKMVTKCPNNSGQSWQRFYQLTKLLDSMHDLVSDLLEFCFYTFRESHALKVEFPAMLVEIISDQLPKVESGNAKPLYFHRK

SEQ ID NO: 11420 - protein, 721 aa, Homo sapiens
LQQVDGERRTPAEAAMETKGYHSLPEGLDMERRWGQVSQAVERSSLGPTERTDENNYMEIVNVSCVSGAIPNNSTQGSSKEKQELLPCLQQDNNRPGILTSDIKTELESKELSATVAESMGLYMDSVRDADYSYEQQNQQGSMSPAKIYQNVEQLVKFYKGNGHRPSTLSCVNTPLRSFMSDSGSSVNGGVMRAVVKSPIMCHEKSPSVCSPLNMTSSVCSPAGINSVSSTTASFGSFPVHSPITQGTPLTCSPNVENRGSRSHSPAHASNVGSPLSSPLSSMKSSISSPPSHCSVKSPVSSPNNVTLRSSVSSPANINNSRCSVSSPSNTNNRSTLSSPAASTVGSICSPVNNAFSYTASGTSAGSSTLRDVVPSPDTQEKGAQEVPFPKTEEVESAISNGVTGQLNIVQYIKPEPDGAFSSSCLGGNSKINSDSSFSVPIKQESTKHSCSGTSFKGNPTVNPFPFMDGSYFSFMDDKDYYSLSGILGPPVPGFDGNCEGSGFPVGIKQEPDDGSYYPEASIPSSAIVGVNSGGQSFHYRIGAQGTISLSRSARDQSFQHLSSFPPVNTLVESWKSHGDLSSRRSDGYPVLEYIPENVSSSTLRSVSTGSSRPSKICLVCGDEASGCHYGVVTCGSCKVFFKRAVEGQHNYLCAGRNDCIIDKIRRKNCPACRLQKCLQAGMNLGERRCISLPCMNYARGCTKSAFSSFDCSSPLKNTPS

SEQ ID NO: 11421 - protein, 231 aa, Homo sapiens
VPAIEAAVSYGVPPTPLTGQHNYLCAGRNDCIIDKIRRKNCPACRLQKCLQAGMNLGARKSKKLGKLKGIHEEQPQQQQPPPPPPPPQSPEEGTTYIAPAKEPSVNTALVPQLSTISRALTPSPVMVLENIEPEIVYAGYDSSKPDTAENLLSTLNRLAGKQMIQVVKWAKVLPGFKNLPLEDQITLIQYSWMCLSSFALSWRSYKHTNSQFLYFAPDLVFNELLARVREG

SEQ ID NO: 11422 - protein, 115 aa, Homo sapiens
LVPQLSTISRALTPSPVMVLENIEPEIVYAGYDSSKPDTAENLLSTLNRLAGKQMIQVVKWAKVLPGFKNLPLEDQITLIQYSWMCLSSFALSWRSYKHTNSQFLYFAPDLVFNE

SEQ ID NO: 11423 - protein, 174 aa, Homo sapiens
LSAEEKRTRMMEIFSETKDVFQLKDLEKIAPKEKGITAMSVKEVLQSLVDDGMVDCERIGTSNYYWAFPSKALHARKHKLEVLESQLSEGSQKHASLQKSIEKAKIGRCETEERTRLAKELSSLRDQREQLKAEVEKYKDCDPQVVEEIRQANKVAKEAANRWTGMYYNNADKL

SEQ ID NO: 11424 - protein, 133 aa, Homo sapiens
LRRADHEVTFPHPHMKCKMELSEGSQKHASLQKSIEKAKIGRCETEERTRLAKELSSLRDQREQLKAEVEKYKDCDPQVVEEIRQANKVAKEAANRWTDNIFAIKSWAKRKFGFEENKIDRTFGIPEDFDYID

SEQ ID NO: 11425 - protein, 168 aa, Homo sapiens
LGLECGAAPWPRGRHHGGPPPAPPNRSPKAPKGKSAGREKKVIHPYSRKAAQITREAHKQEKKEKLKNEKALRLNLVGEKLQWFQNHLDPQKKRYSKKDACELIERYLNRFSSELEQIELHNSIRDRQGRRHCSRETVIKQTMERERQQFEGYGLGVLTDFLFSFYMT

SEQ ID NO: 11426 - protein, 212 aa, Homo sapiens
LLRGHEDVTMPKAPKGKSAGREKKVIHPYSRKAAQITREAHKQEKKEKLKNEKALRLNLVGEKLQWFQNHLDPQKKRYSKKDACELIERYLNRFSSELEQIELHNSIRDRQGRRHCSRETVIKQTMERERQQFEGYGLEIPDILNASNLKTFREWDFDLKKLPNIKMRKICANDAIPKTCKRKTIITVDQDLGELELNDESSDSDEEMTAVA

SEQ ID NO: 11427 - protein, 76 aa, Homo sapiens
LKEIPDILNASNLKTFREWDFDLKKLPNIKMRKICANDAIPKTCKRKTIITVDQDLGELELNDESSDSDEEMTAVA

SEQ ID NO: 11428 - protein, 85 aa, Homo sapiens
LPHGDKLLSFPEIPDILNASNLKTFREWDFDLKKLPNIKMRKICANDAIPKTCKRKTIITVDQDLGELELNDESSDSDEEMTAVA

SEQ ID NO: 11429 - protein, 44 aa, Homo sapiens
LAHPAPPPSQARQVPRLEHLASPRCRWPAVISRPFRIIRLSAEI

SEQ ID NO: 11430 - protein, 39 aa, Homo sapiens
LGADARAGRDAGSGTRDGAEGDWSEGGPRLRIIRLSAEI

SEQ ID NO: 11431 - protein, 100 aa, Homo sapiens
MGFAGLVSHLHYHEPSNLVFVSFLVNGLFHDLCQPTRKGSKHFSQDVMEKLVLVLAHLFGRRYFPPKFQDAHFEFYQSKVNCVILIKFSNVKPLNRSYLK

SEQ ID NO: 11432 - protein, 157 aa, Homo sapiens
VLSVLKHSLLSFKRRRAMETLKLYFLFSLQLLIKEDYLNKKGNPKKFAGLASYLHGHEPSNLVFVNFLKRGLFHNLCKPAWKGSQQFSQDVMEKLVLVLANLFGRKYIPAKFQNANLSFSQSKTQQQNNNKQTEPKKMCIRTWECRRSLFLSSNPSE

SEQ ID NO: 11433 - protein, 107 aa, Homo sapiens
LEKTETKSHPHTECHSYVFAIDEVLEKVRKTQKRITKKNPKKAEKLERKKVYRAEYINFLENLKILEISEDCTYADVKALHTEITRNKDSVRQRIINIIRYSCDILS

SEQ ID NO: 11434 - protein, 97 aa, Homo sapiens
MGSKDHAVFFREMTQLILNEMPKAGYSSILNDFVESNFFVIDGDSLLVTCLGVKSFKWGQNLHFFYLVECYLVDLLSNGGQFTIVFFKMEFRSFCTG

SEQ ID NO: 11435 - protein, 849 aa, Homo sapiens
LHNTPDIQIHCEGGDLHTLIIAEAFEDDTGRYTCLATNPSGSDTTSAEVFIEGASSTDSDSESLAFKSRAGAMPQAQKKTTSVSLTIGSSSPKTGVTTAVIQPLSVPVQQVHSPTSYLCRPDGTTTAYFPPVFTKELQNTAVAEGQVVVLECRVRGAPPLQVQWFRQGSEIQDSPDFRILQKKPRSTAEPEEICTLVIAETFPEDAGIFTCSARNDYGSATSTAQLVVTSANTENCSYESMGESNNDHFQHFPPPPPILETSSLELASKKPSEIQQVNNPELGLSRAALQMQFNAAERETNGVHPSRGVNGLINGKANSNKSLPTPAVLLSPTKEPPPLLAKPKLGFPKKASRTARIASDEEIQGTKDAVIQDLERKLRFKEDLLNNGQPRLTYEERMARRLLGADSATVFNIQEPEEETANQEYKVSSCEQRLISEIEYRLERSPVDESGDEVQYGDVPVENGMAPFFEMKLKHYKIFEGMPVTFTCRVAGNPKPKIYWFKDGKQISPKSDHYTIQRDLDGTCSLHTTASTLDDDGNYTIMAANPQGRISCTGRLMVQAVNQRGRSPRSPSGHPHVRRPRSRSRDSGDENEPIQERFFRPHFLQAPGDLTVQEGKLCRMDCKVSGLPTPDLSWQLDGKPVRPDSAHKMLVRENGVHSLIIEPVTSRDAGIYTCIATNRAGQNSFSLELVVAAKEAHKPPVFIEKLQNTGVADGYPVRLECRVLGVPPPQIFWKKENESLTHSTDRVSMHQDNHGYICLLIQGATKEDAGWYTVSAKNEAGIVSCTARLDVYTQWHQQSQSTKPKKVRPSASRYAALSDQGLDIKAAFQPEANPSHLTLNTALVESEDL

SEQ ID NO: 11436 - protein, 750 aa, Homo sapiens
LQLPLAPDAESGSSGRRPGEPRDPLKLQQLQNQIRLEQEAGARQPPPAPRSAPPSPPFPPPPAFPELAACTPPASPEPMSALASRSAPAMQSSGSFNYARPKQFIAAQNLGPASGHGTPASSPSSSSLPSPMSPTPRQFGRAPVPPFAQPFGAEPEAPWGSSSPSPPPPPPPVFSPTAAFPVPDVFPLPPPPPPLPSPGQASHCSSPATRFGHSQTPAAFLSALLPSQPPPAAVNALGLPKGVTPAGFPKKASRTARIASDEEIQGTKDAVIQDLERKLRFKEDLLNNGQPRLTYEERMARRLLGADSATVFNIQEPEEETANQEYKVSSCEQRLISEIEYRLERSPVDESGDEVQYGDVPVENGMAPFFEMKLKHYKIFEGMPVTFTCRVAGNPKPKIYWFKDGKQISPKSDHYTIQRDLDGTCSLHTTASTLDDDGNYTIMAANPQGRISCTGRLMVQAVNQRGRSPRSPSGHPHVRRPRSRSRDSGDENEPIQERFFRPHFLQAPGDLTVQEGKLCRMDCKVSGLPTPDLSWQLDGKPVRPDSAHKMLVRENGVHSLIIEPVTSRDAGIYTCIATNRAGQNSFSLELVVAAKEAHKPPVFIEKLQNTGVADGYPVRLECRVLGVPPPQIFWKKENESLTHSTDRVSMHQDNHGYICLLIQGATKEDAGWYTVSAKNEAGIVSCTARLDVYTQWHQQSQSTKPKKVRPSASRYAALSDQGLDIKAAFQPEANPSHLTLNTALVESEDL

SEQ ID NO: 11437 - protein, 429 aa, Homo sapiens
LIQEYKVSSCEQRLISEIEYRLERSPVDESGDEVQYGDVPVENGMAPFFEMKLKHYKIFEGMPVTFTCRVAGNPKPKIYWFKDGKQISPKSDHYTIQRDLDGTCSLHTTASTLDDDGNYTIMAANPQGRISCTGRLMVQAVNQRGRSPRSPSGHPHVRRPRSRSRDSGDENEPIQERFFRPHFLQAPGDLTVQEGKLCRMDCKVSGLPTPDLSWQLDGKPVRPDSAHKMLVRENGVHSLIIEPVTSRDAGIYTCIATNRAGQNSFSLELVVAAKEAHKPPVFIEKLQNTGVADGYPVRLECRVLGVPPPQIFWKKENESLTHSTDRVSMHQDNHGYICLLIQGATKEDAGWYTVSAKNEAGIVSCTARLDVYTQWHQQSQSTKPKKVRPSASRYAALSDQGLDIKAAFQPEANPSHLTLNTALVESEDL

SEQ ID NO: 11438 - protein, 67 aa, Homo sapiens
LSNDTGCFIFLTIFQDIAAYRAKGKSEAGKKGPGRPTGSKKKNEPEDEEEEEEEEDEDEEEEDEDEE

SEQ ID NO: 11439 - protein, 237 aa, Homo sapiens [sequence omitted]

SEQ ID NO: 11440 - protein, 70 aa, Homo sapiens
LLLPFRSAFFLFCSEHRPKIKSEHPGLSIGDTAKKLGEMWSEQSAKDKQPYEQKAAKLKEKYEKVQCHLF

SEQ ID NO: 11441 - protein, 127 aa, Homo sapiens
VREASPLGPAALRDSEEKLAPGGRGSVNMGKGDPNKPRGKMSSYAFFVQTCREEHKKKHPDSSVNFAEFSKKCSERWKTMSAKEKSKFEDMAKSDKARYDREMKNYVPPKGDKKGKKKDPNAPKRPP

SEQ ID NO: 11442 - protein, 625 aa, Homo sapiens
LHSGILTRPCNRWATVPATEMVEGPGCTLNGEKIRARVLPGQAVTGVRGSALRSLQGRALRLAASTVVVSPQAAALNNDSSQNVLSLFNGYVYSGVETLGKELFMYFGPKALRIHFGMKGFIMINPLEYKYKNGASPVLEVQLTKDLICFFDSSVELRNSMESQQRIRMMKELDVCSPEFSFLRAESEVKKQKGRMLGDVLMDQNVLPGVGNIIKNEALFDSGLHPAVKVCQLTDEQIHHLMKMIRDFSILFYRCRKAGLALSKHYKVYKRPNCGQCHCRITVCRFGDNNRMTYFCPHCQKENPQHVDICKLPTRNTIISWTSSRVDHVMDSVARKSEEHWTCVVCTLINKPSSKACDACLTSRPIDSVLKSEENSTVFSHLMKYPCNTFGKPHTEVKINRKTAFGTTTLVLTDFSNKSSTLERKTKQNQILDEEFQNSPPASVCLNDIQHPSKKTTNDITQPSSKVNISPTISSESKLFSPAHKKPKTAQYSSPELKSCNPGYSNSELQINMTDGPRTLNPDSPRCSKHNRLCILRVVGKDGENKGRQFYACPLPREAQCGFFEWADLSFPFCNHGKRSTMKTVLKIGPNNGKNFFVCPLGKEKQCNFFQWAENGPGIKIIPGC

SEQ ID NO: 11443 - protein, 68 aa, Homo sapiens
VPATEMVEGPGCTLNGEKIRARVLPGQAVTGVRGSALRSLQGRALRLAASTVVVSPQDSFRNERLHHD

SEQ ID NO: 11444 - protein, 137 aa, Homo sapiens
LWSPRRIHFGMKGFIMINPLEYKYKNGASPVLEVQLTKDLICFFDSSVELRNSMESQQRIRMMKELDVCSPEFSFLRAESEVKKQKGRMLGDVLMDQNVLPGVGNIIKNEALFDSGLHPAVKIQCSRVKKILLSLAT

SEQ ID NO: 11445 - protein, 147 aa, Homo sapiens
VLKSEENSTVFSHLMKYPCNTFGKPHTEVKINRKTAFGTTTLVLTDFSNKSSTLERKTKQNQILDEEFQNSPPASVCLNDIQHPSKKTTNDITQPSSKVNISPTISSESKLFSPAHKKPKTAQYSSPELKSCNPGYSNRYDAFNLGL

SEQ ID NO: 11446 - protein, 742 aa, Homo sapiens
LWNSEWAVEVFSETTQIEDPRKQWRGEQEKMLKDYLSVAQDALRTQKELYHVKEQRLALALDEYVRLNDAYKEKSSSHTSLFSGSSSSTKYDPDILKAEISTTRLRVKKLKRELSQMKQELLYKEQGFETLQQIDKKMSGGQSGYELSEAKAILTELKSIRKAISSGEKEKQDLMQSLAKLQERFHLDQNIGRSEPDLRCSPVNSHLCLSRQTLDAGSQTSISGDIGVRSRSNLAEKVRLSLQYEEAKRSMANLKIELSKLDSEAWPGALDIEKEKLMLINEKEELLKELQFVTPQKRTQDELERLEAERQRLEEELLSVRGTPSRALAERLRLEERRKELLQKLEETTKLTTYLHSQLKSLSASTLSMSSGSSLGSLASSRGSLNTSSRGSLNSLSSTELYYSSQSDQIDVDYQYKLDFLLQEKSGYIPSGPITTIHENEVVKSPSQPGQSGLCGVAAAATGHTPPLAEAPKSVASLSSRSSLSSLSPPGSPLVLEGTFPMSSSHDASLHQFTADFEDCELSSHFADISLIENQILLDSDSGGASQSLSEDKDLNECAREPLYEGTADVEKSLPKRRVIHLLGEKTTCVSAAVSDESVAGDSGVYEAFVKQPSEMEDVTYSEEDVAIVETAQVQIGLRYNAKSSSFMVIIAQLRNLHAFLIPHTSKVYFRVAVLPSSTDVSCLFRTKVHPPTESILFNDVFRVAISQTALQQKTLRKNFTFVTAITHGVCLPLPVPMPSFA

SEQ ID NO: 11447 - protein, 439 aa, Homo sapiens
LFGAARGLAGASSRSRAESGTMAPRGRRRPRPHRSEGARRSKNTLERTHSMKDKAGQKCKPIDVFDFPDNSDVSSIGRLGENEKDEETYETFDPPLHSTAIYADEEEFSKHCGLSLSSTPPGKEAKRSSDTSGNEASEIESVKISAKKPGRKLRPISDDSESIEESDTRRKVKSAEKISTQRHEVIRTTASSELSEKPAESVTSKKTGPLSAQPSVEKENLAIESQSKTQKKGKISHDKRKKSRSKAIGSDTSDIVHIWCPEGMKTSDIKELNIVLPEFEKTHLEHQQRIESKVCKAAIATFYVNVKEQFIKMLKESQMLTNLKRKNAKMISDIEKKRQRMIEVQDELLRLEPQLKQLQTKYDELKERKSSLRNAAYFLSNLKQLYQDYSDVQAQEPNVKETYDSSSLPALLFKARTLLGAESHLRNINHQLEKLLDQG

SEQ ID NO: 11448 - protein, 341 aa, Homo sapiens
LFGAARGLAGASSRSRAESGTMAPRGRRRPRPHRSEGARRSKNTLERTHSMKDKAGQKCKPIDVFDFPDNSDVSSIGRLGENEKDEETYETFDPPLHSTAIYADEEEFSKHCGLSLSSTPPGKEAKRSSDTSGNEASEIESVKISAKKPGRKLRPISDDSESIEESDTRRKVKSAEKISTQRHEVIRTTASSELSEKPAESVTSKKTGPLSAQPSVEKENLAIESQSKTQKKGKISHDKRKKSRSKAIGSDTSDIVHIWCPEGMKTSDIKELNIVLPEFEKTHLEHQQRIESKVCKAAIATFYVNVKEQFIKMLKESQMLTNLKRKNAKVRATAETTTNKI

SEQ ID NO: 11449 - protein, 91 aa, Homo sapiens
LCTGIRNTSDIVHIWCPEGMKTSDIKELNIVLPEFEKTHLEHQQRIESKVCKAAIATFYVNVKEQFIKMLKESQMLTNLKRKNAKMKKLSH

SEQ ID NO: 11450 - protein, 41 aa, Homo sapiens
LSSLFQKTQKKGKISHDKRKKSRSKAIGSAEIGEPARQQLE

SEQ ID NO: 11451 - protein, 118 aa, Homo sapiens [sequence omitted]

SEQ ID NO: 11452 - protein, 147 aa, Homo sapiens
MVASHPYFIETAMGKNIGAQSNDDSEYVRAVYRMSEMIFRRIKMPWLWLDLWYLMFKEGWEHKKSLQILHTFTNSVIAERANEMNANEDCRGDGRGSAPSKNKRRAFLDLLLSVTDDEGNRLSHEDIREEVDTFMFEVLYIVRFRYH

SEQ ID NO: 11453 - protein, 29 aa, Homo sapiens
LRLSMQKSMQNHAAVFRVGSVLQEGHSGI

SEQ ID NO: 11454 - protein, 610 aa, Homo sapiens
LSGRSYAEDDDPAGGVHVRGPEAEEAPAETSLNGFALVVSAEGTIFYASATIVDYLGFHQTDVMHQNIYDYIHVDDRQDFCRQLHWAMDPPQVVFGQPPPLETGDDAILGRLLRAQEWGTGTPTEYSAFLTRCFICRVRCLLDSTSGFLTMQFQGKLKFLFGQKKKAPSGAMLPPRLSLFCIAAPVLLPSAAEMKMRSALLRAKPRADTAATADAKVKATTSLCESELHGKPNYSAGRSSRESGVLVLREQTDAGRWAQVPARAPCLCLRGGPDLVLDPKGGSGDREEEQHRMLSRASGVTGRRETPGPTKPLPWTAGKHSEDGARPRLQPSKNDPPSLRPMPRGSCLPCPCVQGTFRNSPISHPPSPSPSAYSSRTSRPMRDVGEDQVHPPLCHFPQRSLQHQLPQPGAQRFATRGYPMEDMKLQGVPMPPGDLCGPTLLLDVSIKMEKDSGCEGAADGCVPSQVWLGASDRSHPATFPTRMHLKTEPDSRQQVYISHLGHGVRGAQPHGRATAGRSRELTPFHPAHCACLEPTDGLPQSEPPHQLCARGRGEQSCTCRAAEAAPVVKREPLDSPQWATHSQGMVPGMLPKSALATLVPPQASGCTFLP

SEQ ID NO: 11455 - protein, 629 aa, Homo sapiens
VQRLERSRLNWKRSRPAWEAALAPGWCRAGGPCGPSGLLVGNAHPAVQPRSGCRVQARNGRGCCAAGAPTVAMRGRGMPTDVMHQNIYDYIHVDDRQDFCRQLHWAMDPPQVVFGQPPPLETGDDAILGRLLRAQEWGTGTPTEYSAFLTRCFICRVRCLLDSTSGFLTMQFQGKLKFLFGQKKKAPSGAMLPPRLSLFCIAAPVLLPSAAEMKMRSALLRAKPRADTAATADAKVKATTSLCESELHGKPNYSAGRSSRESGVLVLREQTDAGRWAQVPARAPCLCLRGGPDLVLDPKGGSGDREEEQHRMLSRASGVTGRRETPGPTKPLPWTAGKHSEDGARPRLQPSKNDPPSLRPMPRGSCLPCPCVQGTFRNSPISHPPSPSPSAYSSRTSRPMRDVGEDQVHPPLCHFPQRSLQHQLPQPGAQRFATRGYPMEDMKLQGVPMPPGDLCGPTLLLDVSIKMEKDSGCEGAADGCVPSQVWLGASDRSHPATFPTRMHLKTEPDSRQQVYISHLGHGVRGAQPHGRATAGRSRELTPFHPAHCACLEPTDGLPQSEPPHQLCARGRGEQSCTCRAAEAAPVVKREPLDSPQWATHSQGMVPGMLPKSALATLVPPQASGCTFLP

SEQ ID NO: 11456 - protein, 101 aa, Homo sapiens
VSPQRMTAEAHRRVVVEYLRAVMQKRISFRSPEERKEGAEKMVREAEQLRFLFRKLASGFGEDVDGYCDTIVAVAEVIKLTDPSLLYLEVSTLVSKYPDIR

SEQ ID NO: 11457 - protein, 157 aa, Homo sapiens
VSPQRMTAEAHRRVVVEYLRAVMQKRISFRSPEERKEGAEKMVREAEQLRFLFRKLASGFGEDVDGYCDTIVAVAEVIKLTDPSLLYLEVSTLVSKYPDIRDDHIGALLAVRGDASRDMKQTIMETLEQGPAQASPSYVPLFKDIVVPSLNVAKLLK

SEQ ID NO: 11458 - protein, 1146 aa, Homo sapiens
LLRTWEALAPATPAMPRAPRCRAVRSLLRSHYREVLPLATFVRRLGPQGWRLVQRGDPAAFRALVAQCLVCVPWDARPPPAAPSFRQVSCLKELVARVLQRLCERGAKNVLAFGFALLDGARGGPPEAFTTSVRSYLPNTVTDALRGSGAWGLLLRRVGDDVLVHLLARCALFVLVAPSCAYQVCGPPLYQLGAATQARPPPHASGPRRRLGCERAWNHSVREAGVPLGLPAPGARRRGGSASRSLPLPKRPRRGAAPEPERTPVGQGSWAHPGRTRGPSDRGFCVVSPARPAEEATSLEGALSGTRHSHPSVGRQHHAGPPSTSRPPRPWDTPCPPVYAETKHFLYSSGDKEQLRPSFLLSSLRPSLTGARRLVETIFLGSRPWMPGTPRRLPRLPQRYWQMRPLFLELLGNHAQCPYGVLLKTHCPLRAAVTPAAGVCAREKPQGSVAAPEEEDTDPRRLVQLLRQHSSPWQVYGFVRACLRRLVPPGLWGSRHNERRFLRNTKKFISLGKHAKLSLQELTWKMSVRDCAWLRRSPGVGCVPAAEHRLREEILAKFLHWLMSVYVVELLRSFFYVTETTFQKNRLFFYRKSVWSKLQSIGIRQHLKRVQLRELSEAEVRQHREARPALLTSRLRFIPKPDGLRPIVNMDYVVGARTFRREKRAERLTSRVKALFSVLNYERARRPGLLGASVLGLDDIHRAWRTFVLRVRAQDPPPELYFVKVDVTGAYDTIPQDRLTEVIASIIKPQNTYCVRRYAVVQKAAHGHVRKAFKSHVSTLTDLQPYMRQFVAHLQETSPLRDAVVIEQSSSLNEASSGLFDVFLRFMCHHAVRIRGKSYVQCQGIPQGSILSTLLCSLCYGDMENKLFAGIRRDGLLLRLVDDFLLVTPHLTHAKTFLRTLVRGVPEYGCVVNLRKTVVNFPVEDEALGGTAFVQMPAHGLFPWCGLLLDTRTLEVQSDYSSYARTSIRASLTFNRGFKAGRNMRRKLFGVLRLKCHSLFLDLQVNSLQTVCTNIYKILLLQAYRFHACVLQLPFHQQVWKNPTFFLRVISDTASLCYSILKAKNAGMSLGAKGAAGPLPSEAVQWLCHQAFLLKLTRHRVTYVPLLGSLRTAQTQLSRKLPGTTLTALEAAANPALPSDFKTILD

SEQ ID NO: 11459 - protein, 135 aa, Homo sapiens
LGGSNSGCCTMASMGTLAFDEYGRPFLIIKDQDRKSRLMGLEALKSHIMAAKAVANTMRTSLGPNGLDKMMVDKDGDVTVTNDGATILSMMDVDHQIAKLMVELSKSQDDEIGDGTTGVVGKKRQNILSHLRDVI

SEQ ID NO: 11460 - protein, 64 aa, Homo sapiens
MASMGTLAFDEYGRPFLIIKDQDRKSRLMGLEALKSHIMAAKAVANTMRTSLGPNGKSPPFRVF

SEQ ID NO: 11461 - protein, 262 aa, Homo sapiens
VLSEWQLVRISPEARGGAARRDSPAWSLLRRAMPLPDTMFCAQQIHIPPELPDILKQFTKAAIRTQPADVLRWSAGYFSALSRGDPLPVKDRMEMPTATQKTDTGLTQGLLKVLHKQCHHKRYVELTDLEQKWKNLCLPKEKFKALLQLDPCENKIKWINFLALGCSMLGGSLNTALKHLCEILTDDPEGGPARIPFKTFSYVYRYLARLDSDVSPLETESYLASLKENIDARKNGMIGLSDFFFPKRKLLESIENSEDVGH

SEQ ID NO: 11462 - protein, 303 aa, Homo sapiens
VLSEWQLVRISPEARGGAGKSPANPAPTSGTGWEAALAASPALLAGPPRRSRQPPFFLAARRDSPAWSLLRRAMPLPDTMFCAQQIHIPPELPDILKQFTKAAIRTQPADVLRWSAGYFSALSRGDPLPVKDRMEMPTATQKTDTGLTQGLLKVLHKQCHHKRYVELTDLEQKWKNLCLPKEKFKALLQLDPCENKIKWINFLALGCSMLGGSLNTALKHLCEILTDDPEGGPARIPFKTFSYVYRYLARLDSDVSPLETESYLASLKENIDARKNGMIGLSDFFFPKRKLLESIENSEDVGH

SEQ ID NO: 11463 - protein, 305 aa, Homo sapiens
VLSEWQLVRISPEARGGAGKSPANPAPTSGTGWEAALAASPALLAGPPRRSRQPPFFLAARRDSPAWSLLRRAMPLPDTMFCAQQIHIPPELPDILKQFTKAAIRTQPADVLRWSAGYFSALSRGDPLPVKDRMEMPTATQKTDTGLTQGLLKVLHKQCHHKRYVELTDLEQKWKNLCLPKEKFKALLQLDPCENKIKWINFLALGCSMLGGSLNTALKHLCEILTDDPEGGPARIPFKTFSYVYRYLARLDSDVSPLETESYLASLKENMVLSWLSTTRIWREESLMIHRSAMLGSEHGRARRG

SEQ ID NO: 11464 - protein, 224 aa, Homo sapiens
LVRISPEARGGAARRDSPAWSLLRRAMPLPDTMFCAQQIHIPPELPDILKQFTKAAIRTQPADVLRWSAGYFSALSRGDPLPVKDRMEMPTATQKTDTGLTQGLLKVLHKQCHHKRYVELTDLEQKWKNLCLPKEKFKALLQLDPCENKIKWINFLALGCSMLGGSLNTALKHLCEILTDDPEGGPARIPFKTFSYVYRYLARLDSDVSPLETESYLASLKENM

SEQ ID NO: 11465 - protein, 70 aa, Homo sapiens
MFEEKASSPSGKMGGEEKPIGAGEEKQKEGGKKKNKEGSGDGGRAESLQLFYWRLFRKLPEGRSTKEQPF

SEQ ID NO: 11466 - protein, 198 aa, Homo sapiens [sequence omitted]

SEQ ID NO: 11467 - protein, 114 aa, Homo sapiens
VKTTGAAPPRAPSPAPAQTPPPASLPCGAQGGRAPPPSNPANGRPGSARFASASARETWRRRKVCTEGGKARAELQARQPERKMNSPRPEPLAEWTPSRPQVARSGLSGSRKLQ

SEQ ID NO: 11468 - protein, 10 aa, Homo sapiens
LAVSRLSRTR

SEQ ID NO: 11469 - protein, 15 aa, Homo sapiens
LEAGPGHLRADPGGS

SEQ ID NO: 11470 - protein, 43 aa, Homo sapiens
LRPAARRMLPHYDRGLWSQLDGCEDLPSVFLLDRRMVEVWLLS

SEQ ID NO: 11471 - protein, 20 aa, Homo sapiens
MTEDCGHNLMAAKTYPPFFY

SEQ ID NO: 11472 - protein, 27 aa, Homo sapiens
LAAVITSRALSYLAHSRGPDIRKALFQ

SEQ ID NO: 11473 - protein, 111 aa, Homo sapiens
LCRRCGSKAYHLQKSTCGKCGYPAKRKRKYNWSAKAKRRNTTGTGRMRHLKIVYRRFRVSLCCPGLSVVARSRLSAASVSPASGMDSVKEQHLNPRGQLLQHPVHLKNVND

SEQ ID NO: 11474 - protein, 97 aa, Homo sapiens
LTKGTSSFGKRRNKTHTLCRRCGSKAYHLQKSTCGKCGYPAKRKRKYNWSAKAKRRNTTGTGRMRHLKIVYRRFRHGFREGTTPKPKRAAVAASSSS

SEQ ID NO: 11475 - protein, 78 aa, Homo sapiens [sequence omitted]

SEQ ID NO: 11476 - protein, 90 aa, Homo sapiens
LVQKSLARMLLNDFLNDQNRDKNSIYSGLEAFGDVKLEDTYFDRDVEKAFMKASSELFSQKTKASLLVSNQNGNMYTSSVYGSLASVLAQ

SEQ ID NO: 11477 - protein, 44 aa, Homo sapiens
LIFPSELEESDLPSRKLGSQKIGNSYQHGKPIENSGDWLLVSST

SEQ ID NO: 11478 - protein, 85 aa, Homo sapiens
LEERQVPGVELYYLFLCSDGTPERTSRFVTGSSRGEANVSLKTSAAAFGTSDLPSRKLGSQKIGNSYQHGKPIENSGDWLLVSST

SEQ ID NO: 11479 - protein, 761 aa, Homo sapiens
VRGGWGGVEIAAASFPGIYLMGMCSRQERIQKDIDVVIQKSRAEKDCLFADFRYSDSTFTFTYVGGPRSVSYSVHVSEDYPDNTYVSSSENDEDVLVTTEPIPVIFHRIATELRKTNDINCCLSIKSKLQKENGEESRQNSTVEEDSEGDNDSEEFYYGGQVNYDGELHKHPQLEADLSAVREIYGPHAVSLREYGAIDDVDIDLHIDVSFLDEEIAVAWEVIRTEPIIVRLHCSLTQYLNGPVPTVDVFQISTKERFGLGHQLKKIMQTFVTQQWKQSKEKSNCLHNKKLSEKKVKSPLHLFSTLRRSPSYPPPGCGKSKSKLKSEQDGISKTHKLLRRTCSSTVKTDDVCVTKSHRTFGRSLSSDPRAEQAMTAIKSHKLLNRPCPAAVKSEECLTLKSHRLLTRSCSGDPRCEHNTNLKPHKLLSRSYSSNLRMEELYGLKNHKLLSKSYSSAPKSSKTELFKEPNAEGRRLSLTSGLIGILTPSSSSSSQLAPNGAKCIPVRDRGFLVQTIEFAEQRIPVLNEYCVVCDEPHVFQNGPMLRPTVCERELCVFAFQTLGVMNEAADEIATGAQKKNYDRVMKALDSITSIREMTQAPYLEIKKQMDKQDPLAHPLLQWVISSNRSHIVKLPVNRQLKFMHTPHQFLLLSSPPAKESNFRAAKKLFGSTFAFHGSHIENWHSILRNGLVVASNTRLQLHGAMYGSGIYLSPMSSISFGYSGMNKKQKVSAKDEPASSSKSSNTSQKTKKRTAIPIPAKP

SEQ ID NO: 11480 - protein, 874 aa, Homo sapiens
VRGGWGGVEIAAASFPGIYLMGMCSRQERIQKDIDVVIQKSRAEKDCLFADFRYSDSTFTFTYVGGPRSVSYSVHVSEDYPDNTYVSSSENDEDVLVTTEPIPVIFHRIATELRKTNDINCCLSIKSKLQKENGEESRQNSTVEEDSEGDNDSEEFYYGGQVNYDGELHKHPQLEADLSAVREIYGPHAVSLREYGAIDDVDIDLHIDVSFLDEEIAVAWEVIRTEPIIVRLHCSLTQYLNGPVPTVDVFQISTKERFGLGHQLKKIMQTFVTQQWKQSKEKSNCLHNKKLSEKKVKSPLHLFSTLRRSPSYPPPGCGKSKSKLKSEQDGISKTHKLLRRTCSSTVKTDDVCVTKSHRTFGRSLSSDPRAEQAMTAIKSHKLLNRPCPAAVKSEECLTLKSHRLLTRSCSGDPRCEHNTNLKPHKLLSRSYSSNLRMEELYGLKNHKLLSKSYSSAPKSSKTELFKEPNAEGRRLSLTSGLIGILTPSSSSSSQLAPNGAKCIPVRDRGFLVQTIEFAEQRIPVLNEYCVVCDEPHVFQNGPMLRPTVCERELCVFAFQTLGVMNEAADEIATGAQVVDLLVSMCRSALESPRKVVIFEPYPSVVDPNDPQMLAFNPRKKNYDRVMKALDSITSIREMTQAPYLEIKKQMDKQDPLAHPLLQWVISSNRSHIVKLPVNRQLKFMHTPHQFLLLSSPPAKESNFRAAKKLFGSTFAFHGSHIENWHSILRNGLVVASNTRLQLHGAMYGSGIYLSPMSSISFGYSGMNKKQKVSAKDEPASSSKSSNTSQSQKKGQQSQFLQSRNLKCIALCEVITSSDLHKHGEIWVVPNTDHVCTRFFFVYEDGQVGDANINTQEGGIHKEILRVIGNQTATG

SEQ ID NO: 11481 - protein, 832 aa, Homo sapiens
VRGGWGGVEIAAASFPGIYLMGMCSRQERIQKDIDVVIQKSRAEKDCLFADFRYSDSTFTFTYVGGPRSVSYSVHVSEDYPDNTYVSSSENDEDVLVTTEPIPVIFHRIATELRKTNDINCCLSIKSKLQKENGEESRQNSTVEEDSEGDNDSEEFYYGGQVNYDGELHKHPQLEADLSAVREIYGPHAVSLREYGAIDDVDIDLHIDVSFLDEEIAVAWEVIRTEPIIVRLHCSLTQYLNGPVPTVDVFQISTKERFGLGHQLKKIMQTFVTQQWKQSKEKSNCLHNKKLSEKKVKSPLHLFSTLRRSPSYPPPGCGKSKSKLKSEQDGISKTHKLLRRTCSSTVKTDDVCVTKSHRTFGRSLSSDPRAEQAMTAIKSHKLLNRPCPAAVKSEECLTLKSHRLLTRSCSGDPRCEHNTNLKPHKLLSRSYSSNLRMEELYGLKNHKLLSKSYSSAPKSSKTELFKEPNAEGRRLSLTSGLIGILTPSSSSSSQLAPNGAKCIPVRDRGFLVQTIEFAEQRIPVLNEYCVVCDEPHVFQNGPMLRPTVCERELCVFAFQTLGVMNEAADEIATGAQKKNYDRVMKALDSITSIREMTQAPYLEIKKQMDKQDPLAHPLLQWVISSNRSHIVKLPVNRQLKFMHTPHQFLLLSSPPAKESNFRAAKKLFGSTFAFHGSHIENWHSILRNGLVVASNTRLQLHGAMYGSGIYLSPMSSISFGYSGMNKKQKVSAKDEPASSSKSSNTSQSQKKGQQSQFLQSRNLKCIALCEVITSSDLHKHGEIWVVPNTDHVCTRFFFVYEDGQVGDANINTQEGGIHKEILRVIGNQTATG

SEQ ID NO: 11482 - protein, 778 aa, Homo sapiens
LRRTACLQISDTLTPPLLLPTLAAPEVYPTQYMYLKITQESRQNSTVEEDSEGDNDSEEFYYGGQVNYDGELHKHPQLEADLSAVREIYGPHAVSLREYGAIDDVDIDLHIDVSFLDEEIAVAWEVIRTEPIIVRLHCSLTQYLNGPVPTVDVFQISTKERFGLGHQLKKIMQTFVTQQWKQSKEKSNCLHNKKLSEKKVKSPLHLFSTLRRSPSYPPPGCGKSKSKLKSEQDGISKTHKLLRRTCSSTVKTDDVCVTKSHRTFGRSLSSDPRAEQAMTAIKSHKLLNRPCPAAVKSEECLTLKSHRLLTRSCSGDPRCEHNTNLKPHKLLSRSYSSNLRMEELYGLKNHKLLSKSYSSAPKSSKTELFKEPNAEGRRLSLTSGLIGILTPSSSSSSQLAPNGAKCIPVRDRGFLVQTIEFAEQRIPVLNEYCVVCDEPHVFQNGPMLRPTVCERELCVFAFQTLGVMNEAADEIATGAQVVDLLVSMCRSALESPRKVVIFEPYPSVVDPNDPQMLAFNPRKKNYDRVMKALDSITSIREMTQAPYLEIKKQMDKQDPLAHPLLQWVISSNRSHIVKLPVNRQLKFMHTPHQFLLLSSPPAKESNFRAAKKLFGSTFAFHGSHIENWHSILRNGLVVASNTRLQLHGAMYGSGIYLSPMSSISFGYSGMNKKQKVSAKDEPASSSKSSNTSQSQKKGQQSQFLQSRNLKCIALCEVITSSDLHKHGEIWVVPNTDHVCTRFFFVYEDGQVGDANINTQEGGIHKEILRVIGNQTATG

SEQ ID NO: 11483 - protein, 646 aa, Homo sapiens
VEEDSEGDNDSEEFYYGGQVNYDGELHKHPQLEADLSAVREIYGPHAVSLREYGAIDDVDIDLHIDVSFLDEEIAVAWEVIRTEPIIVRLHCSLTQYLNGPVPTVDVFQISTKERFGLGHQLKKIMQTFVTQQWKQSKEKSNCLHNKKLSEKKVKSPLHLFSTLRRSPSYPPPGCGKSKSKLKSEQDGISKTHKLLRRTCSSTVKTDDVCVTKSHRTFGRSLSSDPRAEQAMTAIKSHKLLNRPCPAAVKSEECLTLKSHRLLTRSCSGDPRCEHNTNLKPHKLLSRSYSSNLRMEELYGLKNHKLLSKSYSSAPKSSKTELFKEPNAEGRRLSLTSGLIGILTPSSSSSSQLAPNGAKCIPVRDRGFLVQTIEFAEQRIPVLNEYCVVCDEPHVFQNGPMLRPTVCERELCVFAFQTLGVMNEAADEIATGAQKKNYDRVMKALDSITSIREMTQAPYLEIKKQMDKQDPLAHPLLQWVISSNRSHIVKLPVNRQLKFMHTPHQFLLLSSPPAKESNFRAAKKLFGSTFAFHGSHIENWHSILRNGLVVASNTRLQLHGAMYGSGIYLSPMSSISFGYSGMNKKQKVSAKDEPASSSKSSNTSQSQKKGQQSQFLQSRNLKCIALCEDFNEKRYIKSEWTRIPLE

SEQ ID NO: 11484 - protein, 633 aa, Homo sapiens
LGSNSNRTYNCSTTLFTYTVFKWPRIMQTFVTQQWKQSKEKSNCLHNKKLSEKKVKSPLHLFSTLRRSPSYPPPGCGKSKSKLKSEQDGISKTHKLLRRTCSSTVKTDDVCVTKSHRTFGRSLSSDPRAEQAMTAIKSHKLLNRPCPAAVKSEECLTLKSHRLLTRSCSGDPRCEHNTNLKPHKLLSRSYSSNLRMEELYGLKNHKLLSKSYSSAPKSSKTELFKEPNAEGRRLSLTSGLIGILTPSSSSSSQLAPNGAKCIPVRDRGFLVQTIEFAEQRIPVLNEYCVVCDEPHVFQNGPMLRPTVCERELCVFAFQTLGVMNEAADEIATGAQVVDLLVSMCRSALESPRKVVIFEPYPSVVDPNDPQMLAFNPRKKNYDRVMKALDSITSIREMTQAPYLEIKKQMDKQDPLAHPLLQWVISSNRSHIVKLPVNRQLKFMHTPHQFLLLSSPPAKESNFRAAKKLFGSTFAFHGSHIENWHSILRNGLVVASNTRLQLHGAMYGSGIYLSPMSSISFGYSGMNKKQKVSAKDEPASSSKSSNTSQSQKKGQQSQFLQSRNLKCIALCEVITSSDLHKHGEIWVVPNTDHVCTRFFFVYEDGQVGDANINTQEGGIHKEILRVIGNQTATG

SEQ ID NO: 11485 - protein, 48 aa, Homo sapiens
LAHRAASLEAVSYAIDTLKAKVPIWKKEIYEESSTWKGNKECFWASNS

SEQ ID NO: 11486 - protein, 71 aa, Homo sapiens
LWCNIPICSLVPVSEASIIIAVSSAHRAASLEAVSYAIDTLKAKVPIWKKEIYEESSTWKGNKECFWASNS

SEQ ID NO: 11487 - protein, 12 aa, Homo sapiens
LMWDSSHNEELL

SEQ ID NO: 11488 - protein, 107 aa, Homo sapiens
LPRLAHERLGTNRVFAGAVRGGPRAPLLAVGAPPGLSPPSAALLLRLGGAVARGRRQPRPGLENQGPRPPSRSSVHRPCRAARAETMFDKTRLPYVALDVLCVLLDL

SEQ ID NO: 11489 - protein, 12 aa, Homo sapiens
MLQFSGSMVVLR

SEQ ID NO: 11490 - protein, 116 aa, Homo sapiens
LGLGPAAQLKSRIVVFPLASLCESWLAALCTPSLEADPRRQAGETVPPRGRPPREHSLRPRCTAGLGNMKEQPSCAGTGHPSMAGGGLPETGQRDPGGAGLVSGPARDPTDQALRQ

SEQ ID NO: 11491 - protein, 452 aa, Homo sapiens
VWNETVELFRAKMPLRKHRCRFKSYEHCFTAAEAVDWLHELLRCSQNFGPEVTRKQTVQLLKKFLKNHVIEDIKGKWGEEDFEDNRHLYRFPPSSPLKPYPKKPPNQKDVIKFPEWNDLPPGTSQENIPVRPVVMNSEMWYKRHSIAIGEVPACRLVHRRQLTEANVEEIWKSMTLSYLQKILGLDSLEEVLDVKLVNSKFIIHNVYSVSKQGVVILDDKSKELPHWVLSAMKCLANWPNCSDLKQPMYLGFEKDVFKTIADYYGHLKEPLLTFHLFDAFVSVLGLLQKEKVAVEAFQICCLLLPPENRRKLQLLMRMMARICLNKEMPPLCDGFGTRTLMVQTFSRCILCSKDEVDLDELLAARLVTFLMDNYQEILKVPLALQTSIEERVAHLRRVQFQKSYPEVYQERFPTPESAALLFPEKPKPKPQLLMWALKKPFQPFQRTRSFRM

SEQ ID NO: 11492 - protein, 99 aa, Homo sapiens
LRAWIRRTRKTPPTMEEILKNEKHREEIKIKSQDFYEKEKLLSKETSEELLPPPVQTQIKGHASAPYFGKEEPSVAPSSTGKTFQPGSWMPRDGKSHNQ

SEQ ID NO: 11493 - protein, 94 aa, Homo sapiens
MKQGIFQQNGKEILKNEKHREEIKIKSQDFYEKEKLLSKETSEELLPPPVQTQIKGHASAPYFGKEEPSVAPSSTGKTFQPGSWMPRDGKSHNQ

SEQ ID NO: 11494 - protein, 106 aa, Homo sapiens
LSSFLYTAKAWIRRTRKTPPTMEEILKNEKHREEIKIKSQDFYEKEKLLSKETSEELLPPPVQTQIKGHASAPYFGKEEPSVAPSSTGKTFQPGSWMPRDGKSHNQ

SEQ ID NO: 11495 - protein, 78 aa, Homo sapiens
VPSFSGSVDDPLPAIPLTEDVLITLGKEEFQKLRQDLEMVLSTKESKNEKLKEDLERYCLYCFSMSKGNNGGWMNSNR

SEQ ID NO: 11496 - protein, 727 aa, Homo sapiens
LPPASPPHAEGPRARRRQPLSAPMIARCLLAVRSLRRVGGSRILLRMTLGREVMSPLQAMSSYTVAGRNVLRWDLSPEQIKTRTEELIVQTKQVYDAVGMLGIEEVTYENCLQALADVEVKYIVERTMLDFPQHVSSDKEVRAASTEADKRLSRFDIEMSMRGDIFERIVHLQETCDLGKIKPEARRYLEKSIKMGKRNGLHLPEQVQNEIKSMKKRMSELCIDFNKNLNEDDTFLVFSKAELGALPDDFIDSLEKTDDDKYKITLKYPHYFPVMKKCCIPETRRRMEMAFNTRCKEENTIILQQLLPLRTKVAKLLGYSTHADFVLEMNTAKSTSRVTAFLDDLSQKLKPLGEAEREFILNLKKKECKDRGFEYDGKINAWDLYYYMTQTEELKYSIDQEFLKEYFPIEVVTEGLLNTYQELLGLSFEQMTDAHVWNKSVTLYTVKDKATGEVLGQFYLDLYPREGKYNHAACFGLQPGCLLPDGSRMMAVAALVVNFSQPVAGRPSLLRHDEVRTYFHEFGHVMHQICAQTDFARFSGTNVETDFVEVPSQMLENWVWDVDSLRRLSKHYKDGSPIADDLLEKLVASRLVNTGLLTLRQIVLSKVDQSLHTNTSLDAASEYAKYCSEILGVAATPGTNMPATFGHLAGGYDGQYYGYLWSEVFSMDMFYSCFKKEGIMNPEVGMKYRNLILKPGGSLDGMDMLHNFLKREPNQKAFLMSRGLHAP

SEQ ID NO: 11497 - protein, 610 aa, Homo sapiens
LCEASAVERTMLDFPQHVSSDKEVRAASTEADKRLSRFDIEMSMRGDIFERIVHLQETCDLGKIKPEARRYLEKSIKMGKRNGLHLPEQVQNEIKSMKKRMSELCIDFNKNLNEDDTFLVFSKAELGALPDDFIDSLEKTDDDKYKITLKYPHYFPVMKKCCIPETRRRMEMAFNTRCKEENTIILQQLLPLRTKVAKLLGYSTHADFVLEMNTAKSTSRVTAFLDDLSQKLKPLGEAEREFILNLKKKECKDRGFEYDGKINAWDLYYYMTQTEELKYSIDQEFLKEYFPIEVVTEGLLNTYQELLGLSFEQMTDAHVWNKSVTLYTVKDKATGEVLGQFYLDLYPREGKYNHAACFGLQPGCLLPDGSRMMAVAALVVNFSQPVAGRPSLLRHDEVRTYFHEFGHVMHQICAQTDFARFSGTNVETDFVEVPSQMLENWVWDVDSLRRLSKHYKDGSPIADDLLEKLVASRLVNTGLLTLRQIVLSKVDQSLHTNTSLDAASEYAKYCSEILGVAATPGTNMPATFGHLAGGYDGQYYGYLWSEVFSMDMFYSCFKKEGIMNPEVGMKYRNLILKPGGSLDGMDMLHNFLKREPNQKAFLMSRGLHAP

SEQ ID NO: 11498 - protein, 739 aa, Homo sapiens
LYNQAQLLHGSRFANMSAEGYQYRALYDYKKEREEDIDLHLGDILTVNKGSLVALGFSDGQEARPEEIGWLNGYNETTGERGDFPGTYVEYIGRKKISPPTPKPRPPRPLPVAPGSSKTEADVEQQALTLPDLAEQFAPPDIAPPLLIKLVEAIEKKGLECSTLYRTQSSSNLAELRQLLDCDTPSVDLEMIDVHVLADAFKRYLLDLPNPVIPAAVYSEMISLAPEVQSSEEYIQLLKKLIRSPSIPHQYWLTLQYLLKHFFKLSQTSSKNLLNARVLSEIFSPMLFRFSAASSDNTENLIKVIEILISTEWNERQPAPALPPKPPKPTTVANNGMNNNMSLQDAEWYWGDISREEVNEKLRDTADGTFLVRDASTKMHGDYTLTLRKGGNNKLIKIFHRDGKYGFSDPLTFSSVVELINHYRNESLAQYNPKLDVKLLYPVSKYQQDQVVKEDNIEAVGKKLHEYNTQFQEKSREYDRLYEEYTRTSQEIQMKRTAIEAFNETIKIFEEQCQTQERYSKEYIEKFKREGNEKEIQRIMHNYDKLKSRISEIIDSRRRLEEDLKKQAAEYREIDKRMNSIKPDLIQLRKTRDQYLMWLTQKGVRQKKLNEWLGNENTEDQYSLVEDDEDLPHHDEKTWNVGSSNRNKAENLLRGKRDGTFLVRESSKQGCYACSVVVDGEVKHCVINKTATGYGFAEPYNLYSSLKELVLHYQHTSLVQHNDSLNVTLAYPVYAQQRR

SEQ ID NO: 11499 - protein, 41 aa, Homo sapiens
MRFLMRRTNVLCASPNNFLNDSYSLKKEQNFSRCLFTDTWK

SEQ ID NO: 11500 - protein, 503 aa, Homo sapiens
VGRRDEPSRAKRSWATVHARRVLAAPPLLRALSAPDTSTACREQAGGRCGGLAHLVEEQLWGFFFFHCRIQAFQRETVEMHNLQTLPPKPPKPTTVANNGMNNNMSLQDAEWYWGDISREEVNEKLRDTADGTFLVRDASTKMHGDYTLTLRKGGNNKLIKIFHRDGKYGFSDPLTFSSVVELINHYRNESLAQYNPKLDVKLLYPVSKYQQDQVVKEDNIEAVGKKLHEYNTQFQEKSREYDRLYEEYTRTSQEIQMKRTAIEAFNETIKIFEEQCQTQERYSKEYIEKFKREGNEKEIQRIMHNYDKLKSRISEIIDSRRRLEEDLKKQAAEYREIDKRMNSIKPDLIQLRKTRDQYLMWLTQKGVRQKKLNEWLGNENTEDQYSLVEDDEDLPHHDEKTWNVGSSNRNKAENLLRGKRDGTFLVRESSKQGCYACSVVVDGEVKHCVINKTATGYGFAEPYNLYSSLKELVLHYQHTSLVQHNDSLNVTLAYPVYAQQRR

SEQ ID NO: 11501 - protein, 113 aa, Homo sapiens
LSSAKETLAQMYNTVWNMEDLDLEYAKTDINCGTDLMFYIEMDPPALPPKPPKPTTVANNGMNNNMSLQDAEWYWGDISREEVNEKLRDTADGTFLVRDASTKMHGDYTLTLR

SEQ ID NO: 11502 - protein, 464 aa, Homo sapiens
LSSAKETLAQMYNTVWNMEDLDLEYAKTDINCGTDLMFYIEMDPPALPPKPPKPTTVANNGMNNNMSLQDAEWYWGDISREEVNEKLRDTADGTFLVRDASTKMHGDYTLTLRKGGNNKLIKIFHRDGKYGFSDPLTFSSVVELINHYRNESLAQYNPKLDVKLLYPVSKYQQDQVVKEDNIEAVGKKLHEYNTQFQEKSREYDRLYEEYTRTSQEIQMKRTAIEAFNETIKIFEEQCQTQERYSKEYIEKFKREGNEKEIQRIMHNYDKLKSRISEIIDSRRRLEEDLKKQAAEYREIDKRMNSIKPDLIQLRKTRDQYLMWLTQKGVRQKKLNEWLGNENTEDQYSLVEDDEDLPHHDEKTWNVGSSNRNKAENLLRGKRDGTFLVRESSKQGCYACSVVVDGEVKHCVINKTATGYGFAEPYNLYSSLKELVLHYQHTSLVQHNDSLNVTLAYPVYAQQRR

SEQ ID NO: 11503 - protein, 431 aa, Homo sapiens
LGLRTTFSFSSAALPPKPPKPTTVANNGMNNNMSLQDAEWYWGDISREEVNEKLRDTADGTFLVRDASTKMHGDYTLTLRKGGNNKLIKIFHRDGKYGFSDPLTFSSVVELINHYRNESLAQYNPKLDVKLLYPVSKYQQDQVVKEDNIEAVGKKLHEYNTQFQEKSREYDRLYEEYTRTSQEIQMKRTAIEAFNETIKIFEEQCQTQERYSKEYIEKFKREGNEKEIQRIMHNYDKLKSRISEIIDSRRRLEEDLKKQAAEYREIDKRMNSIKPDLIQLRKTRDQYLMWLTQKGVRQKKLNEWLGNENTEDQYSLVEDDEDLPHHDEKTWNVGSSNRNKAENLLRGKRDGTFLVRESSKQGCYACSVVVDGEVKHCVINKTATGYGFAEPYNLYSSLKELVLHYQHTSLVQHNDSLNVTLAYPVYAQQRR

SEQ ID NO: 11504 - protein, 282 aa, Homo sapiens
LWSLNLKMSIVLCFHFREEVNEKLRDTADGTFLVRDASTKMHGDYTLTLRKGGNNKLIKIFHRDGKYGFSDPLTFSSVVELINHYRNESLAQYNPKLDVKLLYPVSKYQQDQVVKEDNIEAVGKKLHEYNTQFQEKSREYDRLYEEYTRTSQEIQMKRTAIEAFNETIKIFEEQCQTQERYSKEYIEKFKREGNEKEIQRIMHNYDKLKSRISEIIDSRRRLEEDLKKQAAEYREIDKRMNSIKPDLIQLRKTRDQYLMWLTQKGVRQKKLNEWLGNENTEE

SEQ ID NO: 11505 - protein, 464 aa, Homo sapiens
LLVSAGCRSLAGRASGVLLLPAELLPGEEEAMALRVTRNSKINAENKAKINMAGAKRVPTAPAATSKPGLRPRTALGDIGNKVSEQLQAKMPMKKEAKPSATGKVIDKKLPKPLEKVPMLVPVPVSEPVPEPEPEPEPEPVKEEKLSPEPILVDTASPSPMETSGCAPAEEDLCQAFSDVILAVNDVDAEDGADPNLCSEYVKDIYAYLRQLEEEQAVRPKYLLGREVTGNMRAILIDWLVQVQMKFRLLQETMYMTVSIIDRFMQNNCVPKKMLQLVGVTAMFIASKYEEMYPPEIGDFAFVTDNTYTKHQIRQMEMKILRALNFGLGRPLPLHFLRRASKIGEVDVEQHTLAKYLMELTMLDYDMVHFPPSQIAAGAFCLALKILDNGEWTPTLQHYLSYTEESLLPVMQHLAKNVVMVNQGLTKHMTVKNKYATSKHAKISTLPQLNSALVQDLAKAVAKV

SEQ ID NO: 11506 - protein, 56 aa, Homo sapiens
MVMQHLAKNVVMVNQGLTKHMTVKNKYATSKHAKISTLPQLNSALVQDLAKAVAKV

SEQ ID NO: 11507 - protein, 184 aa, Homo sapiens
VSEAPEAVAAGTMLLPNILLTGTPGVGKTTLGKELASKSGLKYINVGDLAREEQLYDGYDEEYDCPILDEDRVVDELDNQMREGGVIVDYHGCDFFPERWFHIVFVLRTDTNVLYERLETRGYNEKKLTDNIQCEIFQVLYEEATASYKEEIVHQLPSNKPEELENNVDQILKWIEQWIKDHNS

SEQ ID NO: 11508 - protein, 188 aa, Homo sapiens
LPDPKYRPELCPPSNFATEMCHRKPGTPGVGKTTLGKELASKSGLKYINVGDLAREEQLYDGYDEEYDCPILDEDRVVDELDNQMREGGVIVDYHGCDFFPERWFHIVFVLRTDTNVLYERLETRGYNEKKLTDNIQCEIFQVLYEEATASYKEEIVHQLPSNKPEELENNVDQILKWIEQWIKDHNS

SEQ ID NO: 11509 - protein, 77 aa, Homo sapiens
LREAREGTRNVNSVGLRLRGGAGGGGERSADPALQLGNLLSLSESGTPGVGKTTLGKELASKSGLKYINVGDLAREV

SEQ ID NO: 11510 - protein, 102 aa, Homo sapiens
LGWGRLGAQSALGIGRPGGGPSLPSSEAGRGPRGGCQRPGSRPSRALREAREGTRNVNSVGLRLRGGAGGGTPGVGKTTLGKELASKSGLKYINVGDLAREV

SEQ ID NO: 11511 - protein, 49 aa, Homo sapiens
LGWGRLGAQSALGIGRPGTPGVGKTTLGKELASKSGLKYINVGDLAREV

SEQ ID NO: 11512 - protein, 53 aa, Homo sapiens
VSEAPEAVAAGTMLLPNILLTGTPGVGKTTLGKELASKSGLKYINVGDLAREV

SEQ ID NO: 11513 - protein, 57 aa, Homo sapiens
LPDPKYRPELCPPSNFATEMCHRKPGTPGVGKTTLGKELASKSGLKYINVGDLAREV

SEQ ID NO: 11514 - protein, 25 aa, Homo sapiens
VCGRVMKKRRRRERGGGGGGAVKLR

SEQ ID NO: 11515 - protein, 555 aa, Homo sapiens
LRPVATAQRLFTDVLLHAGNRTFPCHRAVLAACSRYFEAMFSGGLKESQDSEVNFDNSIHPEVLELLLDYAYSSRVIINEENAESLLEAGDMLEFQDIRDACAEFLEKNLHPTNCLGMLLLSDAHQCTKLYELSWRMCLSNFQTIRKNEDFLQLPQDMVVQLLSSEELETEDERLVYESAINWISYDLKKRYCYLPELLQTVRLALLPAIYLMENVAMEELITKQRKSKEIVEEAIRCKLKILQNDGVVTSLCARPRKTGHALFLLGGQTFMCDKLYLVDQKAKEIIPKADIPSPRKEFSACAIGCKVYITGGRGSENGVSKDVWVYDTLHEEWSKAAPMLVARFGHGSAELKHCLYVVGGHTAATGCLPASPSVSLKQVEHYDPTINKWTMVAPLREGVSNAAVVSAKLKLFAFGGTSVSHDKLPKVQCYDQCENRWTVPATCPQPWRYTAAAVLGNQIFIMGGDTEFSACSAYKFNSETYQWTKVGDVTAKRMSCHAVASGNKLYVVGGYFGIQRCKTLDCYDPTLDVWNSITTVPYSLIPTAFVSTWKHLPS

SEQ ID NO: 11516 - protein, 119 aa, Homo sapiens
MPQNEYIELHRKRYGYRLDYHEKKRKKESREAHERSKKAKKMIGLKAKLYHKQRHAEKIQMKKTIKMHEKRNTKQKNDEKTPQGAVPAYLLDREGQSRAKVLSNMIKQKRKEKAVSNNN

SEQ ID NO: 11517 - protein, 184 aa, Homo sapiens
MPQNEYIELHRKRYGYRLDYHEKKRKKESREAHERSKKAKKMIGLKAKLYHKQRHAEKIQMKKTIKMHEKRNTKQKNDEKTPQGAVPAYLLDREGQSRAKVLSNMIKQKRKEKAGKWEVPLPKVRAQGETEVLKVIRTGKRKKKAWKRMVTKVCFVGDGFTRKPPKYERFIRPMQFENLSRTVL

SEQ ID NO: 11518 - protein, 25 aa, Homo sapiens
MLYTTSTIFTASIMIVRHLIPSKLP

SEQ ID NO: 11519 - protein, 28 aa, Homo sapiens
MLRMKSGMKLTVRVSMNRSLWKLERVWK

SEQ ID NO: 11520 - protein, 7 aa, Homo sapiens
LEDPRIL

SEQ ID NO: 11521 - protein, 12 aa, Homo sapiens
MISASHKDPRIL

SEQ ID NO: 11522 - protein, 557 aa, Homo sapiens
LAMERPAPGEVVMSQAIQPAHATARGELSAGQLLKWIDTTACLAAEKHAGVSCVTASVDDIQFEETARVGQVITIKAKVTRAFSTSMEISIKVMVQDMLTGIEKLVSVAFSTFVAKPVGKEKIHLKPVTLLTEQDHVEHNLAAERRKVRLQHEDTFNNLMKESSKFDDLIFDEEEGAVSTRGTSVQSIELVLPPHANHHGNTFGGQIMAWMETVATISASRLCWAHPFLKSVDMFKFRGPSTVGDRLVFTAIVNNTFQTCVEVGVRVEAFDCQEWAEGRGRHINSAFLIYNAADDKENLITFPRIQPISKDDFRRYRGAIARKRIRLGRKYVISHKEEVPLCIHWDISKQASLSDSNVEALKKLAAKRGWEVTSTVEKIKIYTLEEHDVLSVWVEKHVGSPAHLAYRLLSDFTKRPLWDPHFVSCEVIDWVSEDDQLYHITCPILNDDKPKDLVVLVSRRKPLKDGNTYTVAVKSVILPSVPPSPQYIRSEIICAGFLIHAIDSNSCIVSYFNHMSASILPYFAGNLGGWSKSIEETAASCIQFLENPPDDGFVSTF

SEQ ID NO: 11523 - protein, 103 aa, Homo sapiens
LVLMAGNKGRGRAAYTFNIEAVGFSKGEKLPDVVLKPPPLFPDTDYKPVPLKTGEGEEYMLALKQELRETMKRMPYFIETPEERQETGVLLFCSHWSHIPGFK

SEQ ID NO: 11524 - protein, 226 aa, Homo sapiens
LVLMAGNKGRGRAAYTFNIEAVGFSKGEKLPDVVLKPPPLFPDTDYKPVPLKTGEGEEYMLALKQELRETMKRMPYFIETPEERQDIERYSKRYMKVYKEEWIPDWRRLPREMMPRNKCKKAGPKPKKAKDAGKGTPLTNTEDVLKKMEELEKRGDGEKSDEENEEKEGSKEKSKEGDDDDDDDAAEQEEYDEEEQEEENDYINSYFEDGDDFGADSDDNMDEATY

SEQ ID NO: 11525 - protein, 74 aa, Homo sapiens
LVGARIPRGKVITTARGSSTGELEGHASSRLPPQPCGWGQSSDCLLKIDVYFLELFNFVANLDKHGTNPAGRSR

SEQ ID NO: 11526 - protein, 114 aa, Homo sapiens
LGRLTLDKALDMTYYLQHETSSPALLEGLSYLESFYHMMDRRNISDISENLKRYLLQYFKPVIDRQSWSDKGSVWDRMLRSALLKLACDLNHAPCIQKAAELFSQWMESSGKLK

SEQ ID NO: 11527 - protein, 101 aa, Homo sapiens
MRIATTLAAEAAALPARHHRLLCLFPSLSPGPCIDLARAAPHCACQLSHALRLSTAGRQGQTSRGKRKQPAQTGTARVLFDQHWNWKLGFEEVKSKYNIVF

SEQ ID NO: 11528 - protein, 213 aa, Homo sapiens
LCRLVLKMEVDINGESRSTLTTLPFPGAEANSPGKAEAEKPRCSSTPCSPMRRTVSGYQILHMDSNYLVGFTTGEELLKLAQKCTGGEESKAEAMPSLRSKQLDAGLARSSRLYKTRSRYYQPYEIPAVNGRRRRRMPSSGDKCTKSLPYEPYKALHGPLPLCLLKGKRAHSKSLDYLNLDKMIKEPADTEVLQYQLQHLTLRGDRVFARNNT

SEQ ID NO: 11529 - protein, 111 aa, Homo sapiens
LCLQLWQRTVPLDTLKGLGTCFPSGPELRGAGIAAAMERASERRTASALFAGFRALGLFSNDIPHVVRFSALKRRFYVTTCVGKSFHTYDVQKLSLVAVSKYGLYSEFMHI

SEQ ID NO: 11530 - protein, 163 aa, Homo sapiens
LLSPAHRRAGRLSSTVESGVRCLVARRSCFHVLASPQVKKDVTVWRKPSEEFNGYLYKAQGVIDDLVYSIIDHIRPGPCRLDWDSLMTSLDILENFEENCCVMRYTTAGQLWNIISPREFVDFSYTVGYKEGLLSCGNNLNMLCFFSVWFKYLCFLGWMSLSL

SEQ ID NO: 11531 - protein, 28 aa, Homo sapiens
MWCQKRRKLNALQPFPALKFDTFGVGAA

SEQ ID NO: 11532 - protein, 30 aa, Homo sapiens
LLGGDLRAQARELRTEVGSMLFPGTVVGCW

SEQ ID NO: 11533 - protein, 35 aa, Homo sapiens
LLGGDLRAQARELRTEVGSMLFPGPRVAKDGCSFI

SEQ ID NO: 11534 - protein, 34 aa, Homo sapiens
MHCSCCGSSSWRPNGWRFPAASWTISAGYVRITS

SEQ ID NO: 11535 - protein, 48 aa, Homo sapiens
MHCSCCGSSSWRPNGWRFPAASWTISAGTTSSGVPSKIRLGISKRKSK

SEQ ID NO: 11536 - protein, 623 aa, Homo sapiens
LPLPRPAPPRLNPGPRLAFRPRPAPQSRPSRTPAPLHPRISAPPCIPTPPYISAPPCIPAKPAAQGAVCRGQGAPATNPQAPVAAAARVARRVNMAALTTVVVAAAATAVAGAVAGAGAATGTGVGATPAPQQSDGCFSTSGGIRPFHLQNWKQKVNQTKKAEFVRTAEKFKNQVINMEKDKHSHFYNQKSDFRIEHSMLEELENKLIHSRKTERAKIQQQLAKIHNNVKKLQHQLKDVKPTPDFVEKLREMMEEIENAINTFKEEQRLIYEELIKEEKTTNNELSAISRKIDTWALGNSETEKAFRAISSKVPVDKVTPSTLPEEVLDFEKFLQQTGGRQGAWDDYDHQNFVKVRNKHKGKPTFMEEVLEHLPGKTQDEVQQHEKWYQKFLALEERKKESIQIWKTKKQQKREEIFKLKEKADNTPVLFHNKQEDNQKQKEEQRKKQKLAVEAWKKQKSIEMSMKCASQLKEEEEKEKKHQKERQRQFKLKLLLESYTQQKKEQEEFLRLEKEIREKAEKAEKRKNAADEISRFQERDLHKLELKILDRQAKEDEKSQKQRRLAKLKEKVENNVSRDPSRLYKPTKGWEERTKKIGPTGSGPLLHIPHRAIPTWRQGIQRRV

SEQ ID NO: 11537 - protein, 136 aa, Homo sapiens
LAVEAWKKQKSIEMSMKCASQLKEEEEKEKKHQKERQRQFKLKLLLESYTQQKKEQEEFLRLEKEIREKAEKAEKRKNAADEISRFQERDLHKLELKILDRQAKEDEKSQKQRRLAKLKEKVLCTEIIFIVIILIP

SEQ ID NO: 11538 - protein, 512 aa, Homo sapiens
VPSGRGRVCPMGSPGRGAGLYFSSSQGLGLIPSPGLSMWRLPRALCVHAAKTSKLSGPWSRPAAFMSTLLINQPQYAWLKELGLREENEGVYNGSWGGRGEVITTYCPANNEPIARVRQASVADYEETVKKAREAWKIWADIPAPKRGEIVRQIGDALREKIQVLGSLVSLEMGKILVEGVGEVQEYVDICDYAVGLSRMIGGPILPSERSGHALIEQWNPVGLVGIITAFNFPVAVYGWNNAIAMICGNVCLWKGAPTTSLISVAVTKIIAKVLEDNKLPGAICSLTCGGADIGTAMAKDERVNLLSFTGSTQVGKQVGLMVQERFGRSLLELGGNNAIIAFEDADLSLVVPSALFAAVGTAGQRCTTARRLVMDRPGNYVEPTIVTGLGHDASIAHTETFAPILYVFKFKNEEEVFAWNNEVKQGLSSSIFTKDLGRIFRWLGPKGSDCGIVNVNIPTSGAEIGGAFGGEKHTGGGRESGSDAWKQYMRRSTCTINYSKDLPLAQGIKFQ

SEQ ID NO: 11539 - protein, 457 aa, Homo sapiens
LKELGLREENEGVYNGSWGGRGEVITTYCPANNEPIARVRQASVADYEETVKKAREAWKIWADIPAPKRGEIVRQIGDALREKIQVLGSLVSLEMGKILVEGVGEVQEYVDICDYAVGLSRMIGGPILPSERSGHALIEQWNPVGLVGIITAFNFPVAVYGWNNAIAMICGNVCLWKGAPTTSLISVAVTKIIAKVLEDNKLPGAICSLTCGGADIGTAMAKDERVNLLSFTGSTQVGKQVGLMVQERFGRSLLELGGNNAIIAFEDADLSLVVPSALFAAVGTAGQRCTTARRLFIHESIHDEVVNRLKKAYAQIRVGNPWDPNVLYGPLHTKQAVSMFLGAVEEAKKEGGTVVYGGKVMDRPGNYVEPTIVTGLGHDASIAHTETFAPILYVFKFKNEEEVFAWNNEVKQGLSSSIFTKDLGRIFRWLGPKGSDCGIVNVNIPTSGAEIGGAFGT

SEQ ID NO: 11540 - protein, 192 aa, Homo sapiens
VRRRGPRHLRPPRLASSPPLPALLPPPAAPCSLRGNKVLRAGDGGGANPAGPPVTLVLHFPACVCEWVCVFSYKGYFAIDRLIRSSPPRAFALCAVIELPPSQVLLRSSKRQRLDVSAGRRFVPSVPASPPAVPSLSRSRSRPRRPAVSAARHGDCDPRAAADGQPRWRPHHAAEPHAPVAAPGEGGAARAQ

SEQ ID NO: 11541 - protein, 119 aa, Homo sapiens
VLRAGDGGGANPAGPPVTLVLHFPACVCEWVLLRSSKRQRLDVSAGRRFVPSVPASPPAVPSLSRSRSRPRRPAVSAARHGDCDPRAAADGQPRWRPHHAAEPHAPVAAPGEGGAARAQ

SEQ ID NO: 11542 - protein, 32 aa, Homo sapiens
VLRAGDGGGANPAGPPVTLVLHFPACVCEWLC

SEQ ID NO: 11543 - protein, 18 aa, Homo sapiens
VGVCVFLQRVFRDRSIDS

SEQ ID NO: 11544 - protein, 7 aa, Homo sapiens
VGASPFL

SEQ ID NO: 11545 - protein, 360 aa, Homo sapiens
LCLRSPLRPLPSPPYHGPARGLAAPLSPPPAMATATPVPPRMGSRAGGPTTPLSPTRLSRLQEKEELRELNDRLAVYIDKVRSLETENSALQLQVTEREEVRGRELTGLKALYETELADARRALDDTARERAKLQIELGKCKAEHDQLLLNYAKKESDLNGAQIKLREYEAALNSKDAALATALGDKKSLEGDLEDLKDQIAQLEASLAAAKKQLADETLLKVDLENRCQSLTEDLEFRKSMYEEEINETRRKHETRLVEVDSGRQIEYEYKLAQALHEMREQHDAQVRLYKEELEQTYHAKLENARLSSEMNTSTVNSAREELMESRMRIESLSSQLSNLQKECLLLSHISFIMLPIRP

SEQ ID NO: 11546 - protein, 418 aa, Homo sapiens
LCLRSPLRPLPSPPYHGPARGLAAPLSPPPAMATATPVPPRMGSRAGGPTTPLSPTRLSRLQEKEELRELNDRLAVYIDKVRSLETENSALQLQVTEREEVRGRELTGLKALYETELADARRALDDTARERAKLQIELGKCKAEHDQLLLNYAKKESDLNGAQIKLREYEAALNSKDAALATALGDKKSLEGDLEDLKDQIAQLEASLAAAKKQLADETLLKVDLENRCQSLTEDLEFRKSMYEEEINETRRKHETRLVEVDSGRQIEYEYKLAQALHEMREQHDAQVRLYKEELEQTYHAKLENARLSSEMNTSTVNSAREELMESRMRIESLSSQLSNLQKESRACLERIQELEDLLAKEKDNSRRMLTDKEREMAEIRDQMQQQLNDYEQLLDVKLALDMEISAYRKLLEGEEER

SEQ ID NO: 11547 - protein, 617 aa, Homo sapiens
LCLRSPLRPLPSPPYHGPARGLAAPLSPPPAMATATPVPPRMGSRAGGPTTPLSPTRLSRLQEKEELRELNDRLAVYIDKVRSLETENSALQLQVTEREEVRGRELTGLKALYETELADARRALDDTARERAKLQIELGKCKAEHDQLLLNYAKKESDLNGAQIKLREYEAALNSKDAALATALGDKKSLEGDLEDLKDQIAQLEASLAAAKKQLADETLLKVDLENRCQSLTEDLEFRKSMYEEEINETRRKHETRLVEVDSGRQIEYEYKLAQALHEMREQHDAQVRLYKEELEQTYHAKLENARLSSEMNTSTVNSAREELMESRMRIESLSSQLSNLQKESRACLERIQELEDLLAKEKDNSRRMLTDKEREMAEIRDQMQQQLNDYEQLLDVKLALDMEISAYRKLLEGEEERLKLSPSPSSRVTVSRASSSRSVRTTRGKRKRVDVEESEASSSVSISHSASATGNVCIEEIDVDGKFIRLKNTSEQDQPMGGWEMIRKIGDTSVSYKYTSRYVLKAGQTVTIWAANAGVTASPPTDLIWKNQNSWGTGEDVKVILKNSQGEEVAQRSTVFKTTIPEEEEEEEEAAGVVVEEELFHQQGTPRASNRSCAIM

SEQ ID NO: 11548 - protein, 45 aa, Homo sapiens [sequence omitted]

SEQ ID NO: 11549 - protein, 90 aa, Homo sapiens
LNAYRHTIVKLKNHNFPNLQFLSIVHLYNGPYCMSKLLGHLMIVGKKCAADLGLNKGYRMVVNEGSDGGQSVYHVHLHVLGGRQMHWPPG

SEQ ID NO: 11550 - protein, 159 aa, Homo sapiens
LRRLGCALSRRTLCGFLPSSEPLLWPPRGREAEMADEIAKAQVARPGGDTIFGKIIRKEIPAKIIFEDDRCLAFHDISPQAPTHFLVIPKKHISQISVAEDDDESLLGHLMIVGKKCAADLGLNKGYRMVVNEGSDGGQSVYHVHLHVLGGRQMHWPPG

SEQ ID NO: 11551 - protein, 18 aa, Homo sapiens
MFILELTKSKGEFAEILI

SEQ ID NO: 11552 - protein, 680 aa, Homo sapiens
LEKMQTQEILRILRLPELGDLGQFFRSLSATTLDSGGARRSVIGSGPQLLTHYYDDARTMYQVFRRGLSISGNGPCLGFRKPKQPYQWLSYQEVADRAEFLGSGLLQHNCKACTDQFIGVFAQNRPEWIIVELACYTYSMVVVPLYDTLGPGAIRYIINTGLSCQEGASATASTQADISTVIVDKPQKAVLLLEHVERKETPGLKLIILMDPFEEALKERGQKCGVVIKSMQAVEDCGQENHQAPVPPQPDDLSIVCFTSGTTGNPKGAMLTHGNVVADFSGFLKVTEKVIFPRQDDVLISFLPLAHMFERVIQSVVYCHGGRVGFFQGDIRLLSDDMKALCPTIFPVVPRLLNRMYDKIFSQANTPLKRWLLEFAAKRKQAEVRSGIIRNDSIWDELFFNKIQASLGGCVRMIVTGAAPASPTVLGFLRAALGCQVYEGYGQTECTAGCTFTTPGDWTSGHVGAPLPCNHIKLVDVEELNYWACKGEGEICVRGPNVFKGYLKDPDRTKEALDSDGWLHTGDIGKWLPAGTLKIIDRKKHIFKLAQGEYVAPEKIENIYIRSQPVAQIYVHGDSLKAFLVGIVVPDPEVMPSWAQKRGIEGTYADLCTNKDLKKAILEDMVRLGKESGLHSFEQVKAIHIHSDMFSVQNGLLTPTLKAKRPELREYFKKQIEELYSISM

SEQ ID NO: 11553 - protein, 668 aa, Homo sapiens
LVRSAAGPLPRPGAWRFRHRGQCGASPRPGRPGCRAGKFVLSLLEKMQTQEILRILRLPELGDLGQFFRSLSATTLDSGGARRSVIGSGPQLLTHYYDDARTMYQVFRRGLSISGNGPCLGFRKPKQPYQWLSYQEVADRAEFLGSGLLQHNCKACTDQFIGVFAQNRPEWIIVELACYTYSMVVVPLYDTLGPGAIRYIINTADISTVIVDKPQKAVLLLEHVERKETPGLKLIILMDPFEEALKERGQKCGVVIKSMQAVEDCGQENHQAPVPPQPDDLSIVCFTSGTTGNPKGAMLTHGNVVADFSGFLKVTEGDIRLLSDDMKALCPTIFPVVPRLLNRMYDKIFSQANTPLKRWLLEFAAKRKQAEVRSGIIRNDSIWDELFFNKIQASLGGCVRMIVTGAAPASPTVLGFLRAALGCQVYEGYGQTECTAGCTFTTPGDWTSGHVGAPLPCNHIKLVDVEELNYWACKGEGEICVRGPNVFKGYLKDPDRTKEALDSDGWLHTGDIGKWLPAGTLKIIDRKKHIFKLAQGEYVAPEKIENIYIRSQPVAQIYVHGDSLKAFLVGIVVPDPEVMPSWAQKRGIEGTYADLCTNKDLKKAILEDMVRLGKESGLHSFEQVKAIHIHSDMFSVQNGLLTPTLKAKRPELREYFKKQIEELYSISM

SEQ ID NO: 11554 - protein, 651 aa, Homo sapiens
LVRSAAGPLPRPGAWRFRHREFVLSLLEKMQTQEILRILRLPELGDLGQFFRSLSATTLDSGGARRSVIGSGPQLLTHYYDDARTMYQVFRRGLSISGNGPCLGFRKPKQPYQWLSYQEVADRAEFLGSGLLQHNCKACTDQFIGVFAQNRPEWIIVELACYTYSMVVVPLYDTLGPGAIRYIINTADISTVIVDKPQKAVLLLEHVERKETPGLKLIILMDPFEEALKERGQKCGVVIKSMQAVEDCGQENHQAPVPPQPDDLSIVCFTSGTTGNPKGAMLTHGNVVADFSGFLKVTEGDIRLLSDDMKALCPTIFPVVPRLLNRMYDKIFSQANTPLKRWLLEFAAKRKQAEVRSGIIRNDSIWDELFFNKIQASLGGCVRMIVTGAAPASPTVLGFLRAALGCQVYEGYGQTECTAGCTFTTPGDWTSGHVGAPLPCNHIKLVDVEELNYWACKGEGEICVRGPNVFKGYLKDPDRTKEALDSDGWLHTGDIGKWLPAGTLKIIDRKKHIFKLAQGEYVAPEKIENIYIRSQPVAQIYVHGDSLKAFLVGIVVPDPEVMPSWAQKRGIEGTYADLCTNKDLKKAILEDMVRLGKESGLHSFEQVKAIHIHSDMFSVQNGLLTPTLKAKRPELREYFKKQIEELYSISM

SEQ ID NO: 11555 - protein, 65 aa, Homo sapiens
MCSERPSLSQGTAVFWYNLLRSGEGDYRTRHAACPVLVGCKWVSNKWFHERGQEFLRPCGSTEVD

SEQ ID NO: 11556 - protein, 206 aa, Homo sapiens
VSVVLSSQAFGHLWARVSSGRNAKVGLGLSCFLPRQSCGDSSPDTFSDGLSSSTLPDDHSSYTVPGYMQDLEVEQALTPGELVQVWQETPQVSGMTLSLGGMVLAHGGPLVQAAGLVGGRSMSCKLRKHTTLTCGFCCSPALSPCAVSSTLPDWHIPVEVVPDSTSDLYNFQVSPMPSTSEGWCSWGLACLLDCLGPVKGFLREKR

SEQ ID NO: 11557 - protein, 195 aa, Homo sapiens
LFKPASRWVSKPDVRGKKGKSAFSQTCLAGQAWVSDSAPKSVVSDLTQPYVYVCIVQEEMIFQIPWKHAAKHGWDINKDACLFRSWAIHTGRYKAGEKEPDPKTWKANFRCAMNSLPDIEEVKDQSRNKGSSAVRVYRMLPPLTKNQRKGIQGLWVLGKPSGREGRRRSAGAGEPAPRLTARLPHRKKVEVQPRC

SEQ ID NO: 11558 - protein, 44 aa, Homo sapiens
LRPLSRSRPEQRSRLQYPLEGLRRSRGHRKPLSSLGPRGLLSTR

SEQ ID NO: 11559 - protein, 143 aa, Homo sapiens
MAVPPTYADLGKSARDVFTKGYGFGLIKLDLKTKSENGLEFTSSGSANTETTKVTGSLETKYRWTEYGLTFTEKWNTDNTLGTEITVEDQLARGLKLTFDSSFSPNTGYLLEGGSTKCRPVLGVQCTQVTGHTWFLSSGDVVL

SEQ ID NO: 11560 - protein, 257 aa, Homo sapiens
LEDGLKAPECTSGMYKETVYSAFNLLMHYPPPSGAGQHPQPQPPLHKANQPPHGVPQLSLYEHFNSPHPTPAPADISQKQVHRPLQTPDLSGFYSLTSGSMGQLPHTVSWPSPPLYPLSPSCGYRQHFPAPTAAPGAPYPRFTHPSLMLGSGVPGHPAAIPHPAIVPPSGKQELQPFDRNLKTQAESKAEKEAKKPTIKKPLNAFMLYMKEMRAKVIAECTLKESAAINQILGRRVRPWAGGLAGMLPDHLQPGAAC

SEQ ID NO: 11561 - protein, 292 aa, Homo sapiens
LTNPPPSGDRIGQGLKAPECTSGMYKETVYSAFNLLMHYPPPSGAGQHPQPQPPLHKANQPPHGVPQLSLYEHFNSPHPTPAPADISQKQVHRPLQTPDLSGFYSLTSGSMGQLPHTVSWFTHPSLMLGSGVPGHPAAIPHPAIVPPSGKQELQPFDRNLKTQAESKAEKEAKKPTIKKPLNAFMLYMKEMRAKVIAECTLKESAAINQILGRRWHALSREEQAKYYELARKERQLHMQLYPGWSARDNYGKKKRRSREKHQESTTETNWPRELKDGNGQESLSMSSSSSPA

SEQ ID NO: 11562 - protein, 291 aa, Homo sapiens
LTNPPPSGDRIGQGLKAPECTSGMYKETVYSAFNLLMHYPPPSGAGQHPQPQPPLHKANQPPHGVPQLSLYEHFNSPHPTPAPADISQKQVHRPLQTPDLSGFYSLTSGSMGQLPHTVSWFTHPSLMLGSGVPGHPAAIPHPAIVPPSGKQELQPFDRNLKTQAESKAEKEAKKPTIKKPLNAFMLYMKEMRAKVIAECTLKESAAINQILGRRWHALSREEQAKYYELARKERQLHMQLYPGWSARDNYGKKKRRSREKHQESTTDPGSPKKCRARFGLNQQTDWCGPCR

SEQ ID NO: 11563 - protein, 106 aa, Homo sapiens
LKAPECTSGMYKETVYSAFNLLMHYPPPSGAGQHPQPQPPLHKANQPPHGVPQLSLYEHFNSPHPTPAPADISQKQVHRPLQTPDLSGFYSLTSGSMGQLPHTVSW

SEQ ID NO: 11564 - protein, 66 aa, Homo sapiens
LLMHYPPPSGAGQHPQPQPPLHKANQPPHGVPQLSLYEHFNSPHPTPAPADISQKQGTSLGWGGAQ

SEQ ID NO: 11565 - protein, 157 aa, Homo sapiens
LLTAISPNHRPSPPLYPLSPSCGYRQHFPAPTAAPGAPYPRFTHPSLMLGSGVPGHPAAIPHPAIVPPSGKQELQPFDRNLKTQAESKAEKEAKKPTIKKPLNAFMLYMKEMRAKVIAECTLKESAAINQILGRRVRPWAGGLAGMLPDHLQPGAAC

SEQ ID NO: 11566 - protein, 216 aa, Homo sapiens
LPQKRTSPHPILHSRICSHMSCYPTFDWATWAEGEKGVWKSPPSIQTGDQIGVREELLNALHSSLARPAIKKHQHPKGKKKRRSREKHQESTTDPGSPKKCRARFGLNQQTDWCGPCRRKKKCIRYLPGEGRCPSPVPSDDSALGCPGSPAPQDSPSYHLLPRFPTELLTSPAEPAPTSPGLSTALSLPTPGPPQAPRSTLQSTQVQQQESQRQVA

SEQ ID NO: 11567 - protein, 49 aa, Homo sapiens
LARLRNAVLALASTSRRIGVVRAGGKRNAFGTYPEKAAAPAPFLPMTVL

SEQ ID NO: 11568 - protein, 28 aa, Homo sapiens
LPGGKRNAFGTYPEKAAAPAPFLPMTVL

SEQ ID NO: 11569 - protein, 113 aa, Homo sapiens
LGAERPASTGRARARGQGRGAGRHGRGGRTLGAAKGCDERRAVHCGKPAARTGSSSLGSGAGRRGRARAARAGSEEAGGPARSAERKGASGQEGSGRDTLQLPPPPPSRRCAH

SEQ ID NO: 11570 - protein, 545 aa, Homo sapiens
LPGGLLWGTALLPRGEVLDSLVSNVNIELLNALRYHMVGRRVLTDELKHGMTLTSMYQNSNIQIHHYPNGIVTVNCARLLKADHHATNGVVHLIDKVISTITNNIQQIIEIEDTFETLRAAVAASGLNTMLEGNGQYTLLAPTNEAFEKIPSETLNRILGDPEALRDLLNNHILKSAMCAEAIVAGLSVETLEGTTLEVGCSGDMLTINGKAIISNKDILATNGVIHYIDELLIPDSAKTLFELAAESDVSTAIDLFRQAGLGNHLSGSERLTLLAPLNSVFKDGTPPIDAHTRNLLRNHIIKDQLASKYLYHGQTLETLGGKKLRVFVYRNSLCIENSCIAAHDKRGRYGTLFTMDRVLTPPMGTVMDVLKGDNRFSMLVAAIQSAGLTETLNREGVYTVFAPTNEAFRALPPRERSRLLGDAKELANILKYHIGDEILVSGGIGALVRLKSLQGDKLEVSLKNNVVSVNKEPVAEPDIMATNGVVHVITNVLQPPANRPQERGDELADSALEIFKQASAFSRASQRSVRLAPVYQKLLERMKH

SEQ ID NO: 11571 - protein, 240 aa, Homo sapiens
VCIFCGECQSLQGALHLLSSPQAAVAASGLNTMLEGNGQYTLLAPTNEAFEKIPSETLNRILGDPEALRDLLNNHILKSAMCAEAIVAGLSVETLEGTTLEVGCSGDMLTINGKAIISNKDILATNGVIHYIDELLIPDSAKTLFELAAESDVSTAIDLFRQAGLGNHLSGSERLTLLAPLNSVFKDGTPPIDAHTRNLLRNHIIKDQLASKYLYHGQTLETLGGKKLRVFVYRNVSSGS

SEQ ID NO: 11572 - protein, 7 aa, Homo sapiens
LCMTFHL

SEQ ID NO: 11573 - protein, 342 aa, Homo sapiens
LVFEAVISWINYEKETRLEHMAKLMEHVRLPLLPRDYLVQTVEEEALIKNNNTCKDFLIEAMKYHLLPLDQRLLIKNPRTKPRTPVSLPKVMIVVGGQAPKAIRSVECYDFEEDRWDQIAELPSRRCRAGVVFMAGHVYAVGGFNGSLRVRTVDVYDGVKDQWTSIASMQERRSTLGAAVLNDLLYAVGGFDGSTGKLYAVGGYDGASRQCLSTVEQYNPATNEWIYVADMSTRRSGAGVGVLSGQLYATGGHDGPLVRKSVEVYDPGTNTWKQVADMNMCRRNAGVCAVNGLLYVVGGDDGSCNLASVEYYNPVTDKWTLLPTNMSTGRSYAGVAVIHKSL

SEQ ID NO: 11574 - protein, 527 aa, Homo sapiens
LKSECPSESVPIQPVYKKIWGDMSESKAKKIEIKDVDGQTLSKLIDYIYTAEIEVTEENVQVLLPAASLLQLMDVRQNCCDFLQSQLHPTNCLGIRAFADVHTCTDLLQQANAYAEQHFPEVMLGEEFLSLSLDQVCSLISSDKLTVSSEEKVFEAVISWINYEKETRLEHMAKLMEHVRLPLLPRDYLVQTVEEEALIKNNNTCKDFLIEAMKYHLLPLDQRLLIKNPRTKPRTPVSLPKVMIVVGGQAPKAIRSVECYDFEEDRWDQIAELPSRRCRAGVVFMAGHVYAVGGFNGSLRVRTVDVYDGVKDQWTSIASMQERRSTLGAAVLNDLLYAVGGFDGSTGLASVEAYSYKTNEWFFVAPMNTRRSSVGVGVVEGKLYAVGGYDGASRQCLSTVEQYNPATNEWIYVADMSTRRSGAGVGVLSGQLYATGGHDGPLVRKSVEVYDPGTNTWKQVADMNMCRRNAGVCAVNGLLYVVGGDDGSCNLASVEYYNPVTDKWTLLPTNMSTGRSYAGVAVIHKSL

SEQ ID NO: 11575 - protein, 593 aa, Homo sapiens
LAGPHTMEGESVKLSSQTLIQAGDDEKNQRTITVNPAHMGKAFKVMNELRSKQLLCDVMIVAEDVEIEAHRVVLAACSPYFCAMFTGDMSESKAKKIEIKDVDGQTLSKLIDYIYTAEIEVTEENVQVLLPAASLLQLMDVRQNCCDFLQSQLHPTNCLGIRAFADVHTCTDLLQQANAYAEQHFPEVMLGEEFLSLSLDQVCSLISSDKLTVSSEEKVFEAVISWINYEKETRLEHMAKLMEHVRLPLLPRDYLVQTVEEEALIKNNNTCKDFLIEAMKYHLLPLDQRLLIKNPRTKPRTPVSLPKVMIVVGGQAPKAIRSVECYDFEEDRWDQIAELPSRRCRAGVVFMAGHVYAVGGFNGSLRVRTVDVYDGVKDQWTSIASMQERRSTLGAAVLNDLLYAVGGFDGSTGLASVEAYSYKTNEWFFVAPMNTRRSSVGVGVVEGKLYAVGGYDGASRQCLSTVEQYNPATNEWIYVADMSTRRSGAGVGVLSGQLYATGGHDGPLVRKSVEVYDPGTNTWKQVADMNMCRRNAGVCAVNGLLYVVGGDDGSCNLASVEYYNPVTDKWTLLPTNMSTGRSYAGVAVIHKSL

SEQ ID NO: 11576 - protein, 17 aa, Homo sapiens
VAPATAGPKLCRGLNQR

SEQ ID NO: 11577 - protein, 138 aa, Homo sapiens
MSQGILSPPAGLLSDDDVVVSPMFESTAADLGSVVRKNLLSDCSVVSTSLEDKQQVPSEDSMEKVKVYLRVRPLLPSELERQEDQGCVRIENVETLVLQAPKDSFALKSNERGIGQATHRFTFSQVWRVLVCEQKTNM

SEQ ID NO: 11578 - protein, 413 aa, Homo sapiens
LRFCFSPGENSKTMSTELFSSTREEGSSGSGPSFRSNQRKMLNLLLERDTSFTVCPDVPRTPVGKFLGDSANLSILSGSPGFFRTSGSAFSWDDNGNLVDSEMKYLGSPITTVPKLDKNPNLGEDQAEEISDELMEFSLKDQEAKVSRSGLYRSPSMPENLNRPRLKQVEKFKDNTIPDKVKKKYFSGQGKLRKGLCLKKTVSLCDITITQMLEEDSNQGHLIGDFSKVCALPTVSGKHQDLKYVNPETVAALLSGKFQGLIEKFYVIDCRYPYEYLGGHIQGALNLYSQEELFNFFLKKPIVPLDTQKRIIIVFHCEFSSERGPRMCRCLREEDRSLNQYPALYYPELYILKGGYRDFFPEYMELCEPQSYCPMHHQDHKTELLRCRSQSKVQEGERQLREQIALLVKDMSP

SEQ ID NO: 11579 - protein, 551 aa, Homo sapiens
MEGAAPCRVSLKVSLGQRCWERAWRFDLGMGVVSSLTSHPLQNIAESGRPQLEAHLETRGGGHVGRRFCFSPGENSKTMSTELFSSTREEGSSGSGPSFRSNQRKMLNLLLERDTSFTVCPDVPRTPVGKFLGDSANLSILSGGTPKRCLDLSNLSSGEITATQLTTSADLDETGHLDSSGLQEVHLAGMNHDQHLMKCSPAQLLCSTPNGLDRGHRKRDAMCSSSANKENDNGNLVDSEMKYLGSPITTVPKLDKNPNLGEDQAEEISDELMEFSLKDQEAKVSRSGLYRSPSMPENLNRPRLKQVEKFKDNTIPDKVKKKYFSGQGKLRKGLCLKKTVSLCDITITQMLEEDSNQGHLIGDFSKVCALPTVSGKHQDLKYVNPETVAALLSGKFQGLIEKFYVIDCRYPYEYLGGHIQGALNLYSQEELFNFFLKKPIVPLDTQKRIIIVFHCEFSSERGPRMCRCLREEDRSLNQYPALYYPELYILKGGYRDFFPEYMELCEPQSYCPMHHQDHKTELLRCRSQSKVQEGERQLREQIALLVKDMSP

SEQ ID NO: 11580 - protein, 53 aa, Homo sapiens
LAFCSGKTLSPTLAYPVGRQSCNLVNYLLSPRFPFILLKSSPVSDPYLLSLLL

SEQ ID NO: 11581 - protein, 7 aa, Homo sapiens
VFPAPRM

SEQ ID NO: 11582 - protein, 39 aa, Homo sapiens
MEVLRAKSSLSTGVEGLLANNPFCPLPLPQLLFPLTSAA

SEQ ID NO: 11583 - protein, 26 aa, Homo sapiens
VMRLADGLTCAIVRDMLTSSLKGGRE

SEQ ID NO: 11584 - protein, 174 aa, Homo sapiens
LYLCDNKFHTEALTALLSDDSKFGFIVIDGSGALFGTLQGNTREVLHKFTVDLPKKHGRGGQSALRFARLRMEKRHNYVRKVAETAVQLFISGDKVNVAGLVLAGSADFKTELSQSDMFDQRLQSKVLKLVDISYGGENGFNQAIELSTEVLSNVKFIQEKKLIGIGEMQLLIL

SEQ ID NO: 11585 - protein, 125 aa, Homo sapiens
LYLCDNKFHTEALTALLSDDSKFGFIVIDGSGALFGTLQGNTREVLHKFTVDLPKKHGRGGQSALRFARLRMEKRHNYVRKVAETAVQLFISGDKVNVAGLVLAGSADFKTELSQSDMFDQVSKK

SEQ ID NO: 11586 - protein, 30 aa, Homo sapiens
MADDPSAADRNVEIWKIKKLIKSLEAARGR

SEQ ID NO: 11587 - protein, 29 aa, Homo sapiens
MADDPSAADRNVEIWKIKKLIKSLEAARG

SEQ ID NO: 11588 - protein, 32 aa, Homo sapiens
MVKNAEKYAEEDRRKKVITSCLLNFNLSKAQS

SEQ ID NO: 11589 - protein, 52 aa, Homo sapiens
VFVWTGEGRRRAKRTSSGGAALPVEIRGGRQDSLAAVPAAVHWVKNDNQHQP

SEQ ID NO: 11590 - protein, 33 aa, Homo sapiens
LLCAAILPPSSSLRALGPGWESTPSPLDSNKTQ

SEQ ID NO: 11591 - protein, 76 aa, Homo sapiens [sequence omitted]

SEQ ID NO: 11592 - protein, 146 aa, Homo sapiens
LSSSPEALPPSPSLFQMWQNLAKAETKLHTSNSGGRRELSELVYTDVLDRSCSRNWQDYGVREVDQVKRLTGPGLSEGPEPSISVMVTGGPWPTRLSRTCLHYLGEFGEDQIYEAHQQGRGALEALLCGGPQGACSEKVSATREEL

SEQ ID NO: 11593 - protein, 160 aa, Homo sapiens
MMRRCTQPTCPLTCAVMPAELWLTSPSLFQMWQNLAKAETKLHTSNSGGRRELSELVYTDVLDRSCSRNWQDYGVREVDQVKRLTGPGLSEGPEPSISVMVTGGPWPTRLSRTCLHYLGEFGEDQIYEAHQQGRGALEALLCGGPQGACSEKVSATREEL

SEQ ID NO: 11594 - protein, 113 aa, Homo sapiens
MMRRCTQPTCPLTCAVMPAELWLTSYGVREVDQVKRLTGPGLSEGPEPSISVMVTGGPWPTRLSRTCLHYLGEFGEDQIYEAHQQGRGALEALLCGGPQGACSEKVSATREEL

SEQ ID NO: 11595 - protein, 11 aa, Homo sapiens
LAYQVMPGAWG

SEQ ID NO: 11596 - protein, 95 aa, Homo sapiens
LSSSPEALPPSPSLFQMWQNLAKAETKLHTSNSGGRRELSELVYTDVLDRSCSRNWQDYGVREVDQVKRLTGPGLSEGPEPSISVMVTGGPWPTR

SEQ ID NO: 11597 - protein, 78 aa, Homo sapiens
LPLGRCALDEGPQCPGLTYHFSISFPSPIPIPESFGGWGRGHATASQVLPAQTALLPLYFPQRLCSYPPHLPLTEQQS

SEQ ID NO: 11598 - protein, 264 aa, Homo sapiens
VGRAFGGAAPPGLLYNESALDSPFSGTHTLRGPMTWVSLLNQVGDRVSRNNFLGFPASELQARIRTYNQHYNNLLRGAVSQRLYILLPLDCGVPDNLSMADPNIRFLDKLPQQTGDHAGIKDRVYSNSIYELLENGQRAGTCVLEYATPLQTLFAMSQYSQAGFSREDRLEQAKLFCRTLEDILADAPESQNNCRLIAYQEPADDSSFSLSQEVLRHLRQEEKEEVTVGSLKTSAVPSTSTMSQEPELLISGMEKPLPLRTDFS

SEQ ID NO: 11599 - protein, 106 aa, Homo sapiens
VGLAMAKEGSSQEQVGKPWRRRRSSLGVLDGGPPATSCCPQGLAPAEISAVCEKGNFNVAHGLAWSYYIGYLRLILPAWSTVVTRSQLTATSASQVQVILLPEPLE

SEQ ID NO: 11600 - protein, 33 aa, Homo sapiens
LFIFHSSLLGHTFQKKNLHPGNQKKNMRRGIIV

SEQ ID NO: 11601 - protein, 9 aa, Homo sapiens
MLRKCLRPP

SEQ ID NO: 11602 - protein, 31 aa, Homo sapiens
VWVDSEVHCGKELVAAVLLLETRLLVTAKER

SEQ ID NO: 11603 - protein, 113 aa, Homo sapiens
MWNNFFKHIDIHPENTHILDGNAVDLQAECDAFEEKIKAAGGIELFVGGIGPDGHIAFNEPGSSLVSRTRVKTLAMDTILANARFFDGELTKVPTMALTVGVGTVMDAREVRA

SEQ ID NO: 11604 - protein, 56 aa, Homo sapiens
LRAVSCLAFSSYCPTAWFHVTNRKARGSHPATSQLHFPLTVAHFHPTTKLPQVFFV

SEQ ID NO: 11605 - protein, 39 aa, Homo sapiens
LICTRTRMTVTLKHPVLLLCCPRKCLAGVGSTALHCTIH

SEQ ID NO: 11606 - protein, 46 aa, Homo sapiens
LVRTPSELRWKTWLVLFSLVEPVSRHHTSSEAQLDNDLSKMAHVES

SEQ ID NO: 11607 - protein, 61 aa, Homo sapiens
LGSKALPEKRLGTTKAFLSRKGVKTNPFLWSFGTHPLRAEMEDMASSFQPCGACQSPSYLE

SEQ ID NO: 11608 - protein, 57 aa, Homo sapiens
LLSTCLMDVCRVLSKSPPQCLVCSVVMGKERRNHPWFSQLGCVAIPQHCFSQLLGKN

SEQ ID NO: 11609 - protein, 24 aa, Homo sapiens
LGFFSSDSAAHCHSLLCIVMCLYL

SEQ ID NO: 11610 - protein, 32 aa, Homo sapiens
LGASNLKEHNFPPYQQEDFNSKEERQHLPLAE

SEQ ID NO: 11611 - protein, 33 aa, Homo sapiens
MDLGATAQCTSPFQLHQLTLGGVLLTTPSFGSY

SEQ ID NO: 11612 - protein, 33 aa, Homo sapiens
LQLLECLPSPSFSLPPSAPPPFLFSIVFGSHRS

SEQ ID NO: 11613 - protein, 23 aa, Homo sapiens
LPRLQDLHRRGAMLVTLQLLKGP

SEQ ID NO: 11614 - protein, 30 aa, Homo sapiens
LPRLQDLHRRGAMLVTLQLLKPACIERFAA

SEQ ID NO: 11615 - protein, 44 aa, Homo sapiens
LKVRLHNTRRVGAGGRGCECRRDKAPAFPPSFLVVPGLTSQRRG

SEQ ID NO: 11616 - protein, 77 aa, Homo sapiens
LPCISQPAVAAYARRRFFLSLRSRDGLNSLPFCLSLDGQRGAGSGLGIPTPSPWRGGSSPSDLCSAAAFYAMQLPCS

SEQ ID NO: 11617 - protein, 104 aa, Homo sapiens
VESLMKKMKENPLEHKTISPYTMEGYLYVQEKRHFGTSWVKHYCTYQRDSKQITMVPFDQKSGGKGGEDESVILKSCTRRKTDSIEKRFCFDVEAVDREETQEN

SEQ ID NO: 11618 - protein, 53 aa, Homo sapiens
MSGFENLNTDFYQTSYSIDDQSQQSYDYGGSGGPYSNMLAMTIRSKADLSLQT

SEQ ID NO: 11619 - protein, 513 aa, Homo sapiens
LEDEMLLSLPALHLQTSEHHPFFQLPHRRLGPWCSPTGSPAPLSCETGCGEGSWILVCRLLVPTQVSLLSMEEDIDTRKINNSFLRDHSYATEADIISTVEFNHTGELLATGDKGGRVVIFQREQESKNQVHRRGEYNVYSTFQSHEPEFDYLKSLEIEEKINKIRWLPQQNAAYFLLSTNDKTVKLWKVSERDKRPEGYNLKDEEGRLRDPATITTLRVPVLRPMDLMVEATPRRVFANAHTYHINSISVNSDYETYMSADDLRINLWNFEITNQSFNIVDIKPANMEELTEVITAAEFHPHHCNTFVYSSSKGTIRLCDMRASALCDRHTKFFEEPEDPSNRSFFSEIISSISDVKFSHSGRYIMTRDYLTVKVWDLNMENRPIETYQVHDYLRSKLCSLYENDCIFDKFECVWNGSDSVIMTGSYNNFFRMFDRNTKRDVTLEASRENSKPRAILKPRKVCVGGKRRKDEISVDSLDFSKKILHTAWHPSENIIAVAATNNLYIFQDKVN

SEQ ID NO: 11620 - protein, 59 aa, Homo sapiens
LGGDRVTLGAWAATLTDPVPPSRCRSFGASARDPFPRVLCAVKKRLPGTGGILCWLELE

SEQ ID NO: 11621 - protein, 109 aa, Homo sapiens
LCSYSCPSGPHIATPRRGSERGCRDSAPCVAGRGRGAGAPSAPGMRARALASTSLLLLSRLEPPLADSGERECASHPPRPAAGPSASGNVSGAACTLLRPWTHHMMVLR

SEQ ID NO: 11622 - protein, 33 aa, Homo sapiens
MGPLHVHIHLLEDVTPIPSDSTRRKGGRRGRRL

SEQ ID NO: 11623 - protein, 119 aa, Homo sapiens
MKVKADRDESSPYAAMLAAQDVAQRCKELGITALHIKLRATGGNRTKTPGPGAQSALRALARSGMKIGRIGKCPPLANAWVYFEALAPKSTCCAQWMCSGWSGHFWQLSLLREAARGTL

SEQ ID NO: 11624 - protein, 118 aa, Homo sapiens
LRPCVRLRPEASAARGFCCEPETMAKPAQGAKYRGSIHDFPGFDPNQDAEALYTAMKGFGSDKEAILDIITSRSNRQRQEVCQSYKSLYGKDLIADLKYELTGKFERLIVGGLSDVGT

SEQ ID NO: 11625 - protein, 287 aa, Homo sapiens
LGAPELGSGVREPPEEDGLQTQQAEQLQTPEKAITVQLCASEEAERHQKDITRILQQHEEEKKKWAQQVEKERELELRDRLDEQQRVLEGKNEEALQVLRASYEQEKEALTHSFREASSTQQETIDRLTSQLEAFQAKMKRVEESILSRNYKKHIQDYGSPSQFWEQELESLHFVIEMKNERIHELDRRLILMETVKEKNLILEEKITTLQQENEDLHVRSRNQVVLSRQLSEDLLLTREALEKEVQLRRQLQQEKEELLYRVLGANASPAFPLAPVTPTEVSFLAT

SEQ ID NO: 11626 - protein, 32 aa, Homo sapiens
LRAAQERPSFLCPAAVLSNGLDIFDSFPPRLN

SEQ ID NO: 11627 - protein, 41 aa, Homo sapiens
VCGRSCVRGLYYPRCCGAELVPLQLSRVGLDIFDSFPPRLN

SEQ ID NO: 11628 - protein, 42 aa, Homo sapiens
MFFPRPHCVSGTVRSHFSAFHLILAVSWRGLDIFDSFPPRLN

SEQ ID NO: 11629 - protein, 174 aa, Homo sapiens
LWSRQLEEVPSPFGELKLCLTEVSSDFSSASSMFSHLPFDCVLLLLLLLLTRSSEVEYRAEVGQNAYLPCFYTPAAPGNLVPVCWGKGACPVFECGNVVLRTDERDVNYWTSRYWLNGDFRKGDVSLTIENVTLADSGIYCCRIQIPGIMNDEKFNLKLVIKPGEWTFACHLYE

SEQ ID NO: 11630 - protein, 10 aa, Homo sapiens
LETKEPSMME

SEQ ID NO: 11631 - protein, 9 aa, Homo sapiens
LQILRSETC

SEQ ID NO: 11632 - protein, 29 aa, Homo sapiens
MPHRASCGFSSLSPSHQEVDSSEMTAPQP

SEQ ID NO: 11633 - protein, 13 aa, Homo sapiens
MCYPLPQGLVPGK

SEQ ID NO: 11634 - protein, 10 aa, Homo sapiens
VLLGCSWVWK

SEQ ID NO: 11635 - protein, 17 aa, Homo sapiens
LLDRTVFAKHLEMFAGR

SEQ ID NO: 11636 - protein, 9 aa, Homo sapiens
LLWPCPGLG

SEQ ID NO: 11637 - protein, 8 aa, Homo sapiens
LAASPPDS

SEQ ID NO: 11638 - protein, 57 aa, Homo sapiens
LSSLDTAEDPWPWNPEEACLAASELLPPSSRNLHISKNLPVDSVPPRLPWKPRGTMI

SEQ ID NO: 11639 - protein, 286 aa, Homo sapiens
LRACERRALRAAATMPGGAGAARLCLLAFALQPLRPRAAREPGWTRGSEEGSPKLQHELIIPQWKTSESPVREKHPLKAELRVMAEGRELILDLEKNEQLFAPSYTETHYTSSGNPQTTTRKLEDHCFYHGTVRETELSSVTLSTCRGIRGLITVSSNLSYVIEPLPDSKGQHLIYRSEHLKPPPGNCGFEHSKPTTRDWALQFTQQTKKRPRRMKREDLNSMKYVELYLVADYLEFQKNRRDQDATKHKLIEIANYVDKVRPVLPILEHPDCSRGLGSVDPREHV

SEQ ID NO: 11640 - protein, 166 aa, Homo sapiens
MDRVMSTALCSSGKPIGLKEEPGFDGRVVVYPSNQTLKDYLSWRQADCHINNLYNTVFWALIQQSGLTPVQAQGRLQGTLAADKNEILFSEFNINYNNELPMYRKGTVLIWQKVDEVMTKEIKLPTEMEGKKMAVTRTRTKPVPLHCDIIGDAFWKEHPEILDEDS

SEQ ID NO: 11641 - protein, 51 aa, Homo sapiens
VETGEAVSFSVTSLTGQHGGEVRELWGSRGSVKWFEGYRYSGSRVCWPSSS

SEQ ID NO: 11642 - protein, 25 aa, Homo sapiens
VRRVRSPRPQMNAAVKTCNNPEWLL

SEQ ID NO: 11643 - protein, 194 aa, Homo sapiens
LENGEPGTRVVAKDGLKLGSGPSIKALDGRSQVSTPRFGKTFDAPPALPKATRKALGTVNRATEKSVKTKGPLKQKQPSFSAKKMTEKTVKAKSSVPASDDAYPEIEKFFPFNPLDFESFDLPEEHQIAHLPLSGVPLMILDEERELEKLFQLGPPSPVKMPSPPWESNLLQSPSSILSTLDVELPPVCCDIDI

SEQ ID NO: 11644 - protein, 53 aa, Homo sapiens [sequence omitted]

SEQ ID NO: 11645 - protein, 101 aa, Homo sapiens
MATLIYVDKENGEPGTRVVAKDGLKLGSGPSIKALDGRSQVSTPRFGKTFDAPPALPKATRKALGTVNRATEKSVKTKGPLKQKQPSFSAKKVSVGYKDTV

SEQ ID NO: 11646 - protein, 139 aa, Homo sapiens [sequence omitted]

SEQ ID NO: 11647 - protein, 41 aa, Homo sapiens
MAPAGPIGVVNPGPEGMPKGGQDGQETVAQRGGGEQRLNWK

SEQ ID NO: 11648 - protein, 130 aa, Homo sapiens
MIFPPSSRDQRELIECDNDSLAGTAEASGSFLRSAVKEDEKHGYALLLVPLFLYLISTSFYKYIRATLSLCISNKAKRGCNYTLLQSSVSPGNRNAKALKASLFADMVSWVPWAKSFCCPPLSPSKLGPF

SEQ ID NO: 11649 - protein, 731 aa, Homo sapiens
VIIRIQLSRSASHLQFLELAVNMSFPKAPLKRFNDPSGCAPSPGAYDVKTLEVLKGPVSFQKSQRFKQQKESKQNLNVDKDTTLPASARKVKSSESKIRVLLQERGAQDRRIQDLETELEKMEARLNAALREKTSLSANNATLEKQLIELTRTNELLKSKFSENGNQKNLRILSLELMKLRNKRETKMRGMMAKQEGMEMKLQVTQRSLEESQGKIAQLEGKLVSIEKEKIDEKSETEKLLEYIEEISCASDQVEKYKLDIAQLEENLKEKNDEILSLKQSLEENIVILSKQVEDLNVKCQLLEKEKEDHVNRNREHNENLNAEMQNLKQKFILEQQEREKLQQKELQIDSLLQQEKELSSSLHQKLCSFQEEMVKEKNLFEEELKQTLDELDKLQQKEEQAERLVKQLEEEAKSRAEELKLLEEKLKGKEAELEKSSAAHTQATLLLQEKYDSMVQSLEDVTAQFESYKALTASEIEDLKLENSSLQEKAAKAGKNAEDVQHQILATESSNQEYVRMLLDLQTKSALKETEIKEITVSFLQKITDLQNQLKQQEEDFRKQLEDEEGRKAEKENTTAELTEEINKWRLLYEELYNKTKPFQLQLDAFEVEKQALLNEHGAAQEQLNKIRDSYAKLLGHQNLKQKIKHVVKLKDENSQLKSEVSKLRCQLAKKKQSETKLQEELNKVLGIKHFDPSKAFHHESKENFALKTPLKEGNTNCYRAPMECQESWK

SEQ ID NO: 11650 - protein, 747 aa, Homo sapiens
VIIRIQLSRSASHLQFLELAVNMSFPKAPLKRFNDPSGCAPSPGAYDVKTLEVLKGPVSFQKSQRFKQQKESKQNLNVDKDTTLPASARKVKSSESKKESQKNDKDLKILEKEIRVLLQERGAQDRRIQDLETELEKMEARLNAALREKTSLSANNATLEKQLIELTRTNELLKSKFSENGNQKNLRILSLELMKLRNKRETKMRGMMAKQEGMEMKLQVTQRSLEESQGKIAQLEGKLVSIEKEKIDEKSETEKLLEYIEEISCASDQVEKYKLDIAQLEENLKEKNDEILSLKQSLEENIVILSKQVEDLNVKCQLLEKEKEDHVNRNREHNENLNAEMQNLKQKFILEQQEREKLQQKELQIDSLLQQEKELSSSLHQKLCSFQEEMVKEKNLFEEELKQTLDELDKLQQKEEQAERLVKQLEEEAKSRAEELKLLEEKLKGKEAELEKSSAAHTQATLLLQEKYDSMVQSLEDVTAQFESYKALTASEIEDLKLENSSLQEKAAKAGKNAEDVQHQILATESSNQEYVRMLLDLQTKSALKETEIKEITVSFLQKITDLQNQLKQQEEDFRKQLEDEEGRKAEKENTTAELTEEINKWRLLYEELYNKTKPFQLQLDAFEVEKQALLNEHGAAQEQLNKIRDSYAKLLGHQNLKQKIKHVVKLKDENSQLKSEVSKLRCQLAKKKQSETKLQEELNKVLGIKHFDPSKAFHHESKENFALKTPLKEGNTNCYRAPMECQESWK

SEQ ID NO: 11651 - protein, 105 aa, Homo sapiens
LELAVNMSFPKAPLKRFNDPSGCAPSPGAYDVKTLEVLKGPVSFQKSQRFKQQKESKQNLNVDKDTTLPASARKVKSSESKVRSFYMPAGLSSVSSKTSESIVFD

SEQ ID NO: 11652 - protein, 154 aa, Homo sapiens
LELAVNMSFPKAPLKRFNDPSGCAPSPGAYDVKTLEVLKGPVSFQKSQRFKQQKESKQNLNVDKDTTLPASARKVKSSESKIRVLLQERGAQDRRIQDLETELEKMEARLNAALREKTSLSANNATLEKQLIELTRTNELLKSKVSEPHDNIYN

SEQ ID NO: 11653 - protein, 730 aa, Homo sapiens
LELAVNMSFPKAPLKRFNDPSGCAPSPGAYDVKTLEVLKGPVSFQKSQRFKQQKESKQNLNVDKDTTLPASARKVKSSESKESQKNDKDLKILEKEIRVLLQERGAQDRRIQDLETELEKMEARLNAALREKTSLSANNATLEKQLIELTRTNELLKSKFSENGNQKNLRILSLELMKLRNKRETKMRGMMAKQEGMEMKLQVTQRSLEESQGKIAQLEGKLVSIEKEKIDEKSETEKLLEYIEEISCASDQVEKYKLDIAQLEENLKEKNDEILSLKQSLEENIVILSKQVEDLNVKCQLLEKEKEDHVNRNREHNENLNAEMQNLKQKFILEQQEREKLQQKELQIDSLLQQEKELSSSLHQKLCSFQEEMVKEKNLFEEELKQTLDELDKLQQKEEQAERLVKQLEEEAKSRAEELKLLEEKLKGKEAELEKSSAAHTQATLLLQEKYDSMVQSLEDVTAQFESYKALTASEIEDLKLENSSLQEKAAKAGKNAEDVQHQILATESSNQEYVRMLLDLQTKSALKETEIKEITVSFLQKITDLQNQLKQQEEDFRKQLEDEEGRKAEKENTTAELTEEINKWRLLYEELYNKTKPFQLQLDAFEVEKQALLNEHGAAQEQLNKIRDSYAKLLGHQNLKQKIKHVVKLKDENSQLKSEVSKLRCQLAKKKQSETKLQEELNKVLGIKHFDPSKAFHHESKENFALKTPLKEGNTNCYRAPMECQESWK

SEQ ID NO: 11654 - protein, 147 aa, Homo sapiens
MDVLVSECSARLLQQEEEIKSLTAEIDRLKNCGCLGASPNLEQLQEENLKLKYRLNILRKSLQAERNKPTKNMINIISRLQEVFGHAIKAAYPDLENPPLLVTPSQQAKFGDYQCNSAMGISQVMYCHDSWLFDFFKYYYHHCHLQK

SEQ ID NO: 11655 - protein, 205 aa, Homo sapiens
MDVLVSECSARLLQQEEEIKSLTAEIDRLKNCGCLGASPNLEQLQEENLKLKYRLNILRKSLQAERNKPTKNMINIISRLQEVFGHAIKAAYPDLENPPLLVTPSQQAKFGDYQCNSAMGISQMLKTKEQKVNPREIAENITKHLPDNECIEKVEIAGPGFINVHLRKDFVSEQLTSLLVNGVQLPALGENKKVYVHSSINILVS

SEQ ID NO: 11656 - protein, 95 aa, Homo sapiens
MIIYSLIGVRLNHVGDWGTQFGMLIAHLQDKFPDYLTVSPPIGDLQVFYKESKKRFDTEEEFKKRAYQCVVLLQGKNPDITKAWKLICDVSRQVK

SEQ ID NO: 11657 - protein, 36 aa, Homo sapiens
MLIAHLQDKFPDYLTVSPPIGDLQVFYKVRCGGSCP

SEQ ID NO: 11658 - protein, 113 aa, Homo sapiens [sequence omitted]

SEQ ID NO: 11659 - protein, 350 aa, Homo sapiens
MEADIITNLRCRLKEAEEERLKAAQYGLQLVESQNELQNQLDKCRNEMMTMTESYEQEKYTLQREVELKSRMLESLSCECEAIKQQQKMHLEKLEEQLSRSHGQEVNELKTKIEKLKVELDEARLSEKQLKHQVDHQKELLSCKSEELRVMSERVQESMSSEMLALQIELTEMESMKTTLKEEVNELQYRQEQLELLITNLMRQVDRLKEEKEEREKEAVSYYNALEKARVANQDLQVQLDQALQQALDPNSKGNSLFAEVEDRRAAMERQLISMKVKYQSLKKQNVFNREQMQRMKGFQTVLPHFLRLSPVWEVFLYKFSHVYFSFLTVFVGVTFNLPMLHMSQTIFRD

SEQ ID NO: 11660 - protein, 354 aa, Homo sapiens
VSRSRQVLGVPALADVLEVLPNVWIFMQPLPPPQTNHEEPSRSRNHKTAKLPAPSIDRSTKPPLDRSLAPFDREPFTLGKKPPFSDKPSIPAGRSLGEHLPKIQKPPLPPTTERHERSSPLPGKKPPVPKHGWGPDRRENDEDDVHQRPLPQPALLPMSSNTFPSRSTKPSPMNPLPSSHMPGAFSESNSSFPQSASLPPYFSQGPSNRPPIRAEGRNFPLPLPNKPRPPSPAEEENSLNEEWYVSYITRPEAEAALRKINQDGTFLVRDSSKKTTTNPYVLMVLYKDKVYNIQIRYQKESQVYLLGTGLRGKEDFLSVSDIIDYFRKMPLLLIDGKNRGSRYQCTLTHAAGYP

SEQ ID NO: 11661 - protein, 589 aa, Homo sapiens
LGSGYARKDIGSNRGVPQGSWELEEPRTPPSSGFELLCPWVKRPCSACELLPGRAAMALRNVPFRSEVLGWDPDSLADYFKKLNYKDCEKAVKKYHIDGARFLNLTENDIQKFPKLRVPILSKLSQEINKNEERRSIFTRKPQVPRFPEETESHEEDNGGWSSFEEDDYESPNDDQDGEDDGDYESPNEEEEAPVEDDADYEPPPSNDEEALQNSILPAKPFPNSNSMYIDRPPSGKTPQQPPVPPQRPMAALPPPPAGRNHSPLPPPQTNHEEPSRSRNHKTAKLPAPSIDRSTKPPLDRSLAPFDREPFTLGKKPPFSDKPSIPAGRSLGEHLPKIQKPPLPPTTERHERSSPLPGKKPPVPKHGWGPDRRENDEDDVHQRPLPQPALLPMSSNTFPSRSTKPSPMNPLPSSHMPGAFSESNSSFPQSASLPPYFSQGPSNRPPIRAEGRNFPLPLPNKPRPPSPAEEENSLNEEWYVSYITRPEAEAALRKINQDGTFLVRDSSKKTTTNPYVLMVLYKDKVYNIQIRYQKESQVYLLGTGLRGKEDFLSVSDIIDYFRKMPLLLIDGKNRGSRYQCTLTHAAGYP

SEQ ID NO: 11662 - protein, 589 aa, Homo sapiens
LGSGYARKDIGSNRGVPQGSWELEEPRTPPSSGFELLCPWVKRPCSACELLPGRAAMALRNVPFRSEVLGWDPDSLADYFKKLNYKDCEKAVKKYHIDGARFLNLTENDIQKFPKLRVPILSKLSQEINKNEERRSIFTRKPQVPRFPEETESHEEDNGGWSSFEEDDYESPNDDQDGEDDGDYESPNEEEEAPVEDDADYEPPPSNDEEALQNSILPAKPFPNSNSMYIDRPPSGKTPQQPPVPPQRPMAALPPPPAGRNHSPLPPPQTNHEEPSRSRNHKTAKLPAPSIDRSTKPPLDRSLAPFDREPFTLGKKPPFSDKPSIPAGRSLGEHLPKIQKPPLPPTTERHERSSPLPGKKPPVPKHGWGPDRRENVSTKLHQRPLPQPALLPMSSNTFPSRSTKPSPMNPLPSSHMPGAFSESNSSFPQSASLPPYFSQGPSNRPPIRAEGRNFPLPLPNKPRPPSPAEEENSLNEEWYVSYITRPEAEAALRKINQDGTFLVRDSSKKTTTNPYVLMVLYKDKVYNIQIRYQKESQVYLLGTGLRGKEDFLSVSDIIDYFRKMPLLLIDGKNRGSRYQCTLTHAAGYP

SEQ ID NO: 11663 - protein, 28 aa, Homo sapiens
MDMDVCRQNMKMRKSEQIQTGFGSAGSC

SEQ ID NO: 11664 - protein, 15 aa, Homo sapiens
VAESRTGSSDRRLLR

SEQ ID NO: 11665 - protein, 232 aa, Homo sapiens
LEEPRTPPSSGFELLCPWVKRPCSACELLPGRAAMALRNVPFRSEVLGWDPDSLADYFKKLNYKDCEKAVKKYHIDGARFLNLTENDIQKFPKLRVPILSKLSQEINKNEERRSIFTRKPQVPRFPEETESHEEDNGGWSSFEEDDYESPNDDQDGEDDGDYESPNEEEEAPVEDDADYEPPPSNDEEALQNSILPAKPFPNSNSMYIGKGPFPDFLARAAQRQARHCCMEG

SEQ ID NO: 11666 - protein, 248 aa, Homo sapiens
LEEPRTPPSSGFELLCPWVKRPCSACELLPGRAAMALRNVPFRSEVLGWDPDSLADYFKKLNYKDCEKAVKKYHIDGARFLNLTENDIQKFPKLRVPILSKLSQEINKNEERRSIFTRKPQVPRFPEETESHEEDNGGWSSFVSMVWAVLAPLQQCPGQLCDKEPGWSQVKRGSNMMPAHPPRAQKRCSAQGQTGNSFGFGSHALSVSATQLCYWSTKAATDNEQTNRLGFAPINLHLQTQRVGCTWP

SEQ ID NO: 11667 - protein, 141 aa, Homo sapiens
LGSGYARKDIGSNRGVPQGSWELEEPRTPPSSGFELLCPWVKRPCSACELLPGRAAMALRNVPFRSEVLGWDPDSLADYFKKLNYKDCEKAVKKYHIDGARFLNLTENDIQKFPKLRVPILSKLSQEINKNEERRSIFTRK

SEQ ID NO: 11668 - protein, 119 aa, Homo sapiens
LGSGYARKDIGSNRGVPQGSWELEEPRTPPSSGFELLCPWVKRPCSACELLPGRAAMALRNVPFRSEVLGWDPDSLADYFKKLNYKDCEKAVKKYHIDGARFLNLTENDIQKFPKLRVP

SEQ ID NO: 11669 - protein, 11 aa, Homo sapiens
LPMGEAPMLSL

SEQ ID NO: 11670 - protein, 14 aa, Homo sapiens
LGVGRAKNASELWI

SEQ ID NO: 11671 - protein, 43 aa, Homo sapiens
LHIVEAEAMNYEGSPIKVTLATLKMSVQPTVRALTYFGCCVKV

SEQ ID NO: 11672 - protein, 228 aa, Homo sapiens
LGCVCDAGRRGSRGNREEAEEPGAPRDAPLSVQKRLLVRRRETRGSSFSSKSAALPLAPRTDKEHRRADHAGGAEAGHGHGSGHPGRWRPAGAAGGASGAMPAAGLPLLLRFQRRPHRRLCQRALQHHRAAPGQGRHGPGAHRAQRRAPRPPAGRRLPRRGVAGRAQRRPGRRQARRHPGPGGRRALPRGARRASLLPQRRIRSVFGFLPGAVQQTVDPHGAQPSPEY

SEQ ID NO: 11673 - protein, 49 aa, Homo sapiens
LASHDYILKIVPTVYEDKSGKQRYSYQYTVANKVRGRWLGRAVCGGALC

SEQ ID NO: 11674 - protein, 162 aa, Homo sapiens
VEAGVFSDSELYRPRVTMKFNPFVTSDRSKNRKRHFNAPSHVRRKIMSSPLSKELRQKYNVRSMPIRKDDEVQVVRGHYKGQQIGKVVQVYRKKYVIYIERVQREKANGTTVHVGIHPSKVVITRLKLDKDRKKILERKAKSRQVGKEKGKYKEELIEKMQE

SEQ ID NO: 11675 - protein, 465 aa, Homo sapiens
LNWKHSGETCCLLWKSSSILELKVKLERNLQTRKKRSLESDSQDLGLEMPQPSVSGMDPPFGDAFRSHTFSEQTLMSTDLLANSSDPDFMYELDREMNYQQNPRDNFLSLEDCKDIENLESFTDVLDNEGALTSNWEQWDTYCEDLTKYTKLTSCDIWGTKEVDYLGLDDFSSPYQDEEVISKTPTLAQLNSEDSQSVSDSLYYPDSLFSVKQNPLPSSFPGKKITSRAAAPVCSSKTLQAEVPLSDCVQKASKPTSSTQIMVKTNMYHNEKVNFHVECKDYVKKAKVKINPVQQSRPLLSQIHTDAAKENTCYCGAVAKRQEKKGMEPLQGHATPALPFKETQELLLSPLPQEGPGSLAAGESSSLSASTSVSDSSQKKEEHNYSLFVSDNLGEQPTKCSPEEDEEDEEDVDDEDHDEGFGSEHELSENEEEEEEEEDYEDDKDDDISDTFSEPGIIMLASLPD

SEQ ID NO: 11676 - protein, 529 aa, Homo sapiens
LNWKHSGETCCLLWKSSSILELKVKLERNLQTRKKRSLESDSQDLGLEMPQPSVSGMDPPFGDAFRSHTFSEQTLMSTDLLANSSDPDFMYELDREMNYQQNPRDNFLSLEDCKDIENLESFTDVLDNEGALTSNWEQWDTYCEDLTKYTKLTSCDIWGTKEVDYLGLDDFSSPYQDEEVISKTPTLAQLNSEDSQSVSDSLYYPDSLFSVKQNPLPSSFPGKKITSRAAAPVCSSKTLQAEVPLSDCVQKASKPTSSTQIMVKTNMYHNEKVNFHVECKDYVKKAKVKINPVQQSRPLLSQIHTDAAKENTCYCGAVAKRQEKKGMEPLQGHATPALPFKETQELLLSPLPQEGPGSLAAGESSSLSASTSVSDSSQKKEEHNYSLFVSDNLGEQPTKCSPEEDEEDEEDVDDEDHDEGFGSEHELSENEEEEEEEEDYEDDKDDDISDTFSEPGYENDSVEDLKEVTSISSRKRGKRRYFWEYSEQLTPSQQERMLRPSEWNRDTLPSNMYQKNGLHHGKRGLQSDI

SEQ ID NO: 11677 - protein, 687 aa, Homo sapiens
LNWKHSGETCCLLWKSSSILELKVKLERNLQTRKKRSLESDSQDLGLEMPQPSVSGMDPPFGDAFRSHTFSEQTLMSTDLLANSSDPDFMYELDREMNYQQNPRDNFLSLEDCKDIENLESFTDVLDNEGALTSNWEQWDTYCEDLTKYTKLTSCDIWGTKEVDYLGLDDFSSPYQDEEVISKTPTLAQLNSEDSQSVSDSLYYPDSLFSVKQNPLPSSFPGKKITSRAAAPVCSSKTLQAEVPLSDCVQKASKPTSSTQIMVKTNMYHNEKVNFHVECKDYVKKAKVKINPVQQSRPLLSQIHTDAAKENTCYCGAVAKRQEKKGMEPLQGHATPALPFKETQELLLSPLPQEGPGSLAAGESSSLSASTSVSDSSQKKEEHNYSLFVSDNLGEQPTKCSPEEDEEDEEDVDDEDHDEGFGSEHELSENEEEEEEEEDYEDDKDDDISDTFSEPGYENDSVEDLKEVTSISSRKRGKRRYFWEYSEQLTPSQQERMLRPSEWNRDTLPSNMYQKNGLHHGKYAVKKSRRTDVEDLTPNPKKLLQIGNELRKLNKVISDLTPVSELPLTARPRSRKEKNKLASRACRLKKKAQYEANKVKLWGLNTEYDNLLFVINSIKQEIVNRVQNPRDERGPNMGQKLEILIKDTLGLPVAGQTSEFVNQVLEKTAEGNPTGGLVGLRIPTSKV

SEQ ID NO: 11678 - protein, 138 aa, Homo sapiens
LFIGKYAVKKSRRTDVEDLTPNPKKLLQIGNELRKLNKVISDLTPVSELPLTARPRSRKEKNKLASRACRLKKKAQYEANKVKLWGLNTEYDNLLFVINSIKQEIVNRVQNPRDERGPNMGQKLEILIKDTLGKKNAR

SEQ ID NO: 11679 - protein, 40 aa, Homo sapiens
VAGEAFPVAAEAALSGTCEQRGRQPGGSVRDHVWRTTTKH

SEQ ID NO: 11680 - protein, 55 aa, Homo sapiens
MSGELPPNINIKEPRWDQSTFIGRANHFFTVTDPRNILLTNEQLESARKIVHDYR

SEQ ID NO: 11681 - protein, 145 aa, Homo sapiens
MSGELPPNINIKEPRWDQSTFIGRANHFFTVTDPRNILLTNEQLESARKIVHDYRQGIVPPGLTENELWRAKYIYDSAFHPDTGEKMILIGRMSAQVPMNMTITGCMMTFYRTTPAVLFWQWINQSFNAVVNYTNRSGDAPLTVK

SEQ ID NO: 11682 - protein, 96 aa, Homo sapiens
LGTAYVSATTGAVATALGLNALTKHVSPLIGRFVPFAAVAAANCINIPLMRQRELKVGIPVTDENGNRLGESANAAKQAITQVVVSRILMAAPGMG

SEQ ID NO: 11683 - protein, 63 aa, Homo sapiens
MSAPIQVGLVGFCLVFATPLCCALFPQKRYKNLGLTRLPRLVSNSWPQEILLVQPHKAPRLQV

SEQ ID NO: 11684 - protein, 31 aa, Homo sapiens
LPLQSWCSHAGEKNPVQPGFSQLRKPFKDPH

SEQ ID NO: 11685 - protein, 18 aa, Homo sapiens
LQIKEISAVNWENTKALG

SEQ ID NO: 11686 - protein, 32 aa, Homo sapiens
LEGKSSFTPLPKVSHRPLQHAFPAGSLYTFRL

SEQ ID NO: 11687 - protein, 34 aa, Homo sapiens
LVRSETTVPATYMSFLVILIDLFGFQKDTVIMCV

SEQ ID NO: 11688 - protein, 27 aa, Homo sapiens
LASRPCFSLFFIHIHSQHLRRCCLIYF

SEQ ID NO: 11689 - protein, 122 aa, Homo sapiens
VGQKSRPPREPQTESLGSESPSHSWRGSQGKESREEVGSPLQPQKSRRINRGPPGVIERKPALSCTTCSSNLLSCCKSLWGLRFLQRHMGGPSEELSGEPLSEEPQKRPPQKAVRTLPSEAV

SEQ ID NO: 11690 - protein, 74 aa, Homo sapiens
VVSAMPKAKGKTRRQKFGYSVNRKRLNRNARRKAAPRIECRVARLPRFFAEEEDGGGVTGLHHSCPRLRRPPDQ

SEQ ID NO: 11691 - protein, 29 aa, Homo sapiens
MLDGRQRRGSNAEWQDFLDSLQKRKMEVE

SEQ ID NO: 11692 - protein, 182 aa, Homo sapiens
VVSAMPKAKGKTRRQKFGYSVNRKRLNRNARRKAAPRIECSHIRHAWDHAKSVRQNLAEMGLAVDPNRAVPLRKRKVKAMEVDIEERPKELVRKPYVLNDLEAEASLPEKKGNTLSRDLIDYVRYMVENHGEDYKAMARDEKNYYQDTPKQIRSKINVYKRFYPAEWQDFLDSLQKRKMEVE

SEQ ID NO: 11693 - protein, 154 aa, Homo sapiens
VVSAMPKAKGKTRRQKFGYSVNRKRLNRNARRKAAPRIECSHIRHAWDHAKSVRQNLAEMGLAVDPNRAVPLRKRKVKAMEVDIEERPKELVRKPYVLNDLEAEASLPEKKGNTLSRDLIDYVRYMVENHGEDYKVSGSGPVGWLGRRPGPFAA

SEQ ID NO: 11694 - protein, 146 aa, Homo sapiens
VVSAMPKAKGKTRRQKFGYSVNRKRLNRNARRKAAPRIECSHIRHAWDHAKSVRQNLAEMGLAVDPNRAVPLRKRKVKAMEVDIEERPKELVRKPYVLNGGCGPYIPLGHCPALWEAGKGPKMSSFCRWRNQVSEGRSELVQSSQS

SEQ ID NO: 11695 - protein, 99 aa, Homo sapiens
VVSAMPKAKGKTRRQKFGYSVNRKRLNRNARRKAAPRIECSHIRHAWDHAKSVRQNLAEMGLAVDPNRAVPLRKRKILLVSRALFSAGEGHGGGHRGEA

SEQ ID NO: 11696 - protein, 40 aa, Homo sapiens
VVSAMPKAKGKTRRQKFGYSVNRKRLNRNARRKAAPRIEW

SEQ ID NO: 11697 - protein, 27 aa, Homo sapiens
MTFTGRLRSESRFSPAAVARTWRLPAL

SEQ ID NO: 11698 - protein, 155 aa, Homo sapiens
MAPISSLSLQTIGAAFVAKVMSVGDRTVTLGIWDTAGSERYEAMSRIYYRGAKAAIVCYDLTDSSSFERAKFWVKELRSLEEGCQIYLCGTKSDLLEEDRRRRRVDFHDVQDYADSSCSSALWGVGVCGCLGGSKKIGTALAARARCSRRSSWPP

SEQ ID NO: 11699 - protein, 184 aa, Homo sapiens
MSGQRVDVKVVMLGKEYVGKTSLVERYVHDRFLVGPYQNTIGAAFVAKVMSVGDRTVTLGIWDTAGSERYEAMSRIYYRGAKAAIVCYDLTDSSSFERAKFWVKELRSLEEGCQIYLCGTKSDLLEEDRRRRRVDFHDVQDYADSSCSSALWGVGVCGCLGGSKKIGTALAARARCSRRSSWPP

SEQ ID NO: 11700 - protein, 86 aa, Homo sapiens
VVLGCSPSPHAADPSPLLLWDPQKLEDQEQRARQLKERLRSKQQSLQRQLEQLRGLAGAAERERLRADSLDSSGLSSERSDSDQGP

SEQ ID NO: 11701 - protein, 158 aa, Homo sapiens
LALAGQCTMNWRSAGESQSCPDSASPQGPLPSGLPSPAIPVAGKVGLALPSRPLPHRRAQLKRCLERLKQQMPLGADCARYTTLSLLRRARMHIQKLEDQEQRARQLKERLRSKQQSLQRQLEQLRGLAGAAERERLRADSLDSSGLSSERSDSDQGP

SEQ ID NO: 11702 - protein, 194 aa, Homo sapiens
LALAGQCTMNWRSAGESQSCPDSASPQGPLPSGLPSPAIPVAGKVGLALPSRPLPHRRAQLKRCLERLKQQMPLGADCARYTTLSLLRRARMHIQKLEDQEQRARQLKERLRSKQQSLQRQLEQLRGLAGAAERERLRADSLDSSGLSSERSDSDQEELEVDVESLVFGGEAELLRGFVAGQEHSYSHGGGAWL

SEQ ID NO: 11703 - protein, 59 aa, Homo sapiens
MEPLASNIQVLLQAAEFLERREREAEHGYASLCPHRSPGPIHRRKKRPPQAPGAQDSGR

SEQ ID NO: 11704 - protein, 24 aa, Homo sapiens
MEPLASNIQVLLQAAEFLERRERA

SEQ ID NO: 11705 - protein, 182 aa, Homo sapiens
LSVRPGPARSMAGVSFSGHRLELLAAYEEVIREESAADWALYTYEDGSDDLKLAASGEGGLQELSGHFENQKVMYGFCSVKDSQAALPKYVLINWVGEDVPDARKCACASHVAKVAEFFQVRVRGQRSWGWGQPPGSACWGGDGGRMVPPEHCRLLAEGCRRDRERQQRGRHRRGCHRAAAL

SEQ ID NO: 11706 - protein, 83 aa, Homo sapiens
LSVRPGPARSMAGVSFSGHRLELLAAYEEVIREESAADWALYTYEDGSDDLKLAASGGRNSSHSLAAFSTPSSWLFSSPPTWL

SEQ ID NO: 11707 - protein, 323 aa, Homo sapiens
LLGEAALPIPTPVGPGIQLGSFHAPSHLPWGQQDPGWGVGPCQEAQPCRALNGRSCSQVPRTEAPAPASSTPQEPWPGPTAPSPTSRPPWAVDPAFAERYAPDKTSTVLTRHSQPATPTPLQSRTSIVQAAAGGVPGGGSNNGKTPVCHQCHKVIRGRYLVALGHAYHPEEFVCSQCGKVLEEGGFFEEKGAIFCPPCYDVRYAPSCAKCKKKITGEIMHALKMTWHVHCFTCAACKTPIRNRAFYMEEGVPYCERDYEKMFGTKCHGCDFKIDAGDRFLEALGFSWHDTCFVCAICQINLEGKTFYSKKDRPLCKSHAFSHV

SEQ ID NO: 11708 - protein, 135 aa, Homo sapiens [sequence omitted]

SEQ ID NO: 11709 - protein, 158 aa, Homo sapiens
LTGVCLQRARTDEVPAGGSRSEAEDEDDEDYVPYVPLRQRRQLLLQKLLQRRRKGAAEEEQQDSGSEPRGDEDDIPLGPQSNVSLLDQHQHLKEKAEARKESAKEKQLKEEEKILESVAEGRGMVVARIVRRWTESSPPSPRHVISQGIWLLRSRSQP

SEQ ID NO: 11710 - protein, 160 aa, Homo sapiens
MEESEPERKRARTDEVPAGGSRSEAEDEDDEDYVPYVPLRQRRQLLLQKLLQRRRKGAAEEEQQDSGSEPRGDEDDIPLGPQSNVSLLDQHQHLKEKAEARKESAKEKQLKEEEKILESVAEGRGMVVARIVRRWTESSPPSPRHVISQGIWLLRSRSQP

SEQ ID NO: 11711 - protein, 17 aa, Homo sapiens
LEVMPKAVDRVGSPPWD

SEQ ID NO: 11712 - protein, 56 aa, Homo sapiens
VGSRAAAAKEEETQLEQLRGLTGARPQQRELECGRACGAFPCGWGRAGPAASSAAR

SEQ ID NO: 11713 - protein, 40 aa, Homo sapiens
VRPSLRRLPLRVGTSGPRGVIGGEVSGGRRAGALAGAAPA

SEQ ID NO: 11714 - protein, 12 aa, Homo sapiens
LPTSSACPSSVS

SEQ ID NO: 11715 - protein, 23 aa, Homo sapiens
LQTLFAGYTDNLVRVWQVTIGTR

SEQ ID NO: 11716 - protein, 25 aa, Homo sapiens
LEAETLFAGYTDNLVRVWQVTIGTR

SEQ ID NO: 11717 - protein, 152 aa, Homo sapiens
LVLESLAFKEAWGNGGKVRIDSDRILRWAELTSGRGHSVLIYLTCVQDGQAMLWDLNEGKHLYTLDGGDIINALCFSPNRYWLCAATGPSIKIWDLEGKIIVDELKQEVISTSSKAEPPQCTSLAWSADGQTLFAGYTDNLVRVWQVTIGTR

SEQ ID NO: 11718 - protein, 239 aa, Homo sapiens [sequence omitted]

SEQ ID NO: 11719 - protein, 305 aa, Homo sapiens
LQGGGRRGCGASFSKPSSAILVAAATHALAAAMTEQMTLRGTLKGHNGWVTQIATTPQFPDMILSASRGSWDGTLRLWDLTTGTTTRRFVGHTKDVLSVAFSSDNRQIVSGSRDKTIKLWNTLGVCKYTVQDESHSEWVSCVRFSPNSSNPIIVSCGWDKLVKVWNLANCKLKTNHIGHTGYLNTVTVSPDGSLCASGGKDGQAMLWDLNEGKHLYTLDGGDIINALCFSPNRYWLCAATGPSIKIWDLEGKIIVDELKQEVISTSSKAEPPQCTSLAWSADGQTLFAGYTDNLVRVWQVTIGTR

SEQ ID NO: 11720 - protein, 395 aa, Homo sapiens
MPCNFPLPFALHGAAILSRNVSWGSPFCMVERVFPVPAGGFSLSLSLQGGGRRGCGASFSKPSSAILVAAATHALAAAMTEQMTLRGTLKGHNGWVTQIATTPQFPDMILSASRDKTIIMWKLTRDETNYGIPQRALRGHSHFVSDVVISSDGQFALSGSWDGTLRLWDLTTGTTTRRFVGHTKDVLSVAFSSDNRQIVSGSRDKTIKLWNTLGVCKYTVQDESHSEWVSCVRFSPNSSNPIIVSCGWDKLVKVWNLANCKLKTNHIGHTGYLNTVTVSPDGSLCASGGKDGQAMLWDLNEGKHLYTLDGGDIINALCFSPNRYWLCAATGPSIKIWDLEGKIIVDELKQEVISTSSKAEPPQCTSLAWSADGQTLFAGYTDNLVRVWQVTIGTR

SEQ ID NO: 11721 - protein, 221 aa, Homo sapiens
MILSASRDKTIIMWKLTRDETNYGIPQRALRGHSHFVSDVVISSDGQFALSGSWDGTLRLWDLTTGTTTRRFVGHTKDVLSVAFSSDNRQIVSGSRDKTIKLWNTLGVCKYTVQDESHSEWVSCVRFSPNSSNPIIVSCGWDKLVKVWNLANCKLKTNHIGHTGYLNTVTVSPDGSLCASGGKVFGDKASPTQWKTASWKEHLASVSNVKWQTLAKMVLGG

SEQ ID NO: 11722 - protein, 106 aa, Homo sapiens
LSPRLECSSAISAHCKLCFPGSRHSPASASRVAGTTGACHQDESHSEWVSCVRFSPNSSNPIIVSCGWDKLVKVSVKPRQGLYQSGCAPRWSYTPSPVESFADALS

SEQ ID NO: 11723 - protein, 110 aa, Homo sapiens
VCANTLSRLECSSAISAHCKLCFPGSRHSPASASRVAGTTGACHQDESHSEWVSCVRFSPNSSNPIIVSCGWDKLVKVSVKPRQGLYQSGCAPRWSYTPSPVESFADALS

SEQ ID NO: 11724 - protein, 167 aa, Homo sapiens
MWKLTRDETNYGIPQRALRGHSHFVSDVVISSDGQFALSGSWDGTLRLWDLTTGTTTRRFVGHTKDVLSVAFSSDNRQIVSGSRDKTIKLWNTLGVCKYTVQDESHSEWVSCVRFSPNSSNPIIVSCGWDKLVKVSVKPRQGLYQSGCAPRWSYTPSPVESFADALS

SEQ ID NO: 11725 - protein, 69 aa, Homo sapiens
MRVFAKSENDKLLPLRGTTTRRFVGHTKDVLSVAFSSDNRQIVSGSRDKTIKLWNTLGVCKYTVQAGVQ

SEQ ID NO: 11726 - protein, 46 aa, Homo sapiens
LGWNPAPLGSHNIVSGSRDKTIKLWNTLGVCKYTVQSHSVAQAGVQ

SEQ ID NO: 11727 - protein, 179 aa, Homo sapiens
LQGGGRRGCGASFSKPSSAILVAAATHALAAAMTEQMTLRGTLKGHNGWVTQIATTPQFPDMILSASRDKTIIMWKLTRDETNYGIPQRALRGHSHFVSDVVISSDGQFALSGSWDGTLRLWDLTTGTTTRRFVGHTKDVLSVAFSSDNRQIVSGSRDKTIKLWNTLGVCKYTVQAGVQ

SEQ ID NO: 11728 - protein, 185 aa, Homo sapiens
LQGGGRRGCGASFSKPSSAILVAAATHALAAAMTEQMTLRGTLKGHNGWVTQIATTPQFPDMILSASRDKTIIMWKLTRDETNYGIPQRALRGHSHFVSDVVISSDGQFALSGSWDGTLRLWDLTTGTTTRRFVGHTKDVLSVAFSSDNRQIVSGSRDKTIKLWNTLGVCKYTVQSHSVAQAGVQ

SEQ ID NO: 11729 - protein, 208 aa, Homo sapiens
LQGGGRRGCGASFSKPSSAILVAAATHALAAAMTEQMTLRGTLKGHNGWVTQIATTPQFPDMILSASRDKTIIMWKLTRDETNYGIPQRALRGHSHFVSDVVISSDGQFALSGSWDGTLRLWDLTTGTTTRRFVGHTKDVLSVAFSSDNRQIVSGSRDKTIKLWNTLGVCKYTVQSHSCPSWSAVAQSRLTATSASRAQGILVPQSPE

SEQ ID NO: 11730 - protein, 177 aa, Homo sapiens
LQGGGRRGCGASFSKPSSAILVAAATHALAAAMTEQMTLRGTLKGHNGWVTQIATTPQFPDMILSASRDKTIIMWKLTRDETNYGIPQRALRGHSHFVSDVVISSDGQFALSGSWDGTLRLWDLTTGTTTRRFVGHTKDVLSVAFSSDNRQIVSGSRDKTIKLWNTLGVCKYTVQVK

SEQ ID NO: 11731 - protein, 148 aa, Homo sapiens
LQGGGRRGCGASFSKPSSAILVAAATHALAAAMTEQMTLRGTLKGHNGWVTQIATTPQFPDMILSASRDKTIIMWKLTRDETNYGIPQRALRGHSHFVSDVVISSDGQFALSGSWDGTLRLWDLTTQGHHHEAICGPYQGCAECGLLL

SEQ ID NO: 11732 - protein, 103 aa, Homo sapiens
LQGGGRRGCGASFSKPSSAILVAAATHALAAAMTEQMTLRGTLKGHNGWVTQIATTPQFPDMILSASRDKTIIMWKLTRDETNYGIPQRAPPRGDLWAIPRMC

SEQ ID NO: 11733 - protein, 143 aa, Homo sapiens
LQGGGRRGCGASFSKPSSAILVAAATHALAAAMTEQMTLRGTLKGHNGWVTQIATTPQFPDMILSASRDKTIIMWKLTRDETNYGIPQRALRGHSHFVSDVVISSDGQFALSGSWDGTLRLWDLTTQVAAHLALGPWEESGQK

SEQ ID NO: 11734 - protein, 71 aa, Homo sapiens
LQGGGRRGCGASFSKPSSAILVAAATHALAAAMTEQMTLRGTLKGHNGWVTQIATTPQFPDMILSASRGTD

SEQ ID NO: 11735 - protein, 442 aa, Homo sapiens
LGPTAALSSESRASAEQSGRRTPGAGADGTRGMNLEGGGRGGEFGMSAVSCGNGKLRQWLIDQIDSGKYPGLVWENEEKSIFRIPWKHAGKQDYNREEDAALFKAWALFKGKFREGIDKPDPPTWKTRLRCALNKSNDFEELVERSQLDISDPYKVYRIVPEGAKKGAKQLTLEDPQMSMSHPYTMTTPYPSLPAQQVHNYMMPPLDRSWRDYVPDQPHPEIPYQCPMTFGPRGHHWQGPACENGCQVTGTFYACAPPESQAPGVPTEPSIRSAEALAFSDCRLHICLYYREILVKELTTSSPEGCRISHGHTYDASNLDQVLFPYPEDNGQRKNIEKLLSHLERGVVLWMAPDGLYAKRLCQSRIYWDGPLALCNDRPNKLERDQTCKLFDTQQFLSELQAFAHHGRSLPRFQVTLCFGEEFPDPQRQRKLITAHVLRSLA

SEQ ID NO: 11736 - protein, 151 aa, Homo sapiens
LFKGKFREGIDKPDPPTWKTRLRCALNKSNDFEELVERSQLDISDPYKVYRIVPEGAKKGAKQLTLEDPQMSMSHPYTMTTPYPSLPAQQVHNYMMPPLDRSWRDYVPDQPHPEIPYQCPMTFGPRGHHWQGPACENGKEDTSAGNRRANC

SEQ ID NO: 11737 - protein, 48 aa, Homo sapiens
LVEPLLARQLYYFAQQNSGHFLRGYDLPEHISNPEDYHRSIRHSSIQE

SEQ ID NO: 11738 - protein, 83 aa, Homo sapiens
LYDFKIHFKIYFASQQKVECCRKSCFCREFSGMAWHILKHFSVSRSRKRRQLPRHTERLTDTRFGKLCRHLWSSYCPKLYSCA

SEQ ID NO: 11739 - protein, 65 aa, Homo sapiens
LAAAREETSTAALERGSHAAAEDFLQGDCTKAKQKLNWKPRVAFDELVREMVHADVELMRTNPNA

SEQ ID NO: 11740 - protein, 62 aa, Homo sapiens
VQTFSRIQTASALEGSAEKDFLQGDCTKAKQKLNWKPRVAFDELVREMVHADVELMRTNPNA

SEQ ID NO: 11741 - protein, 22 aa, Homo sapiens
MAMAYLAWRLARRSCPRSLVSR

SEQ ID NO: 11742 - protein, 155 aa, Homo sapiens
VAGWWICRSRFPVARGGHCWLLNGLQGGYPRQGLWIGRGYIRLSRSFPSQSGGLRRRSPVMDYRRLLMSRVVPGQFDDADSSDSENRDLKTVKEKDDILFEDLQDNVNENGEGEIEDEEEEGYDDDDDDWDWDEGVGKLAKGYVWNGGSNPQLVP

SEQ ID NO: 11743 - protein, 20 aa, Homo sapiens
MVCKADIHAKAFGSAVGTSV

SEQ ID NO: 11744 - protein, 99 aa, Homo sapiens
MLRSHVLVMSFIGKDDMPAPLLKNVQLSESKARELYLQVIQYMRRMYQDARLVHADLSEFNMLYHGGGVYIIDVSQSVEHDHPHALEFLRKDCANVNGE

SEQ ID NO: 11745 - protein, 68 aa, Homo sapiens
MEIASQRTKEERSSQDHVDEEVFKRAYIPRTLNEVKNYERDMDIIMKLKEEDMAMNAQQDNVSSLVCI

SEQ ID NO: 11746 - protein, 15 aa, Homo sapiens
LHSMEGRAPQCLMLS

SEQ ID NO: 11747 - protein, 40 aa, Homo sapiens
MDGLQISRWKRGMARPASYGSTLRRVPGCILCLPNSASWV

SEQ ID NO: 11748 - protein, 82 aa, Homo sapiens
LELMSRPAAAAAAAAAALSFVSRAVWARAGVPGTPPPPSFPQDSSLLALGPNGARLPGGRSAHRARLPLLLPDHLVSTRNEI

SEQ ID NO: 11749 - protein, 81 aa, Homo sapiens
MSRPAAAAAAAAAALSFVSRAVWARAGVPGTPPPPSFPQDSSLLALGPNGARLPGGRSAHRARLPLLLPDHLVSTRVCLHY

SEQ ID NO: 11750 - protein, 317 aa, Homo sapiens
LVGQSPRVSWLGIGKNVICDRTATPLDAFRMTSAAHYYPKLMSIMGNVLRFLPAFVRMKQLIEEGYVGEPLVCEVQVHGGSLLGKKYNWSCDDLMGGGGLHSVGTYIIDLLTFLTGQKAVKVHGLLKTFVKQTDHIKGIRQITSDDFCTFQMVLEGGVCCTVTLNFNVPGEFKQDVTVVGSAGRLLAVGTDLYGQRNSAPEQELLVQDATPVSNSLLPEKAFSDIPSPYLRGTIKMMQAVRQAFQDQDDRRTWDGRPLTMAATFDDCLYALCVVDTIKRSSQTGEWQNIAIMTEEPELSPAYLISEAMRRSRMSLYC

SEQ ID NO: 11751 - protein, 31 aa, Homo sapiens
MVLHCDESTWYSFPKKLDHFLREKEIDVLFS

SEQ ID NO: 11752 - protein, 95 aa, Homo sapiens
VRLSGQPPKSTRAGGRRAGGVAGWDRGSHLPKMQDGSRAAAVQPFLPHHGLHLPAPAQRAPGHPAGPGEFCGMPACCSVCCFLVSHLLTSWYNQL

SEQ ID NO: 11753 - protein, 70 aa, Homo sapiens
LEELLPLPAPFLQKGGGNIHLFMPVCCMQAFWLPTLQQNNCTNSLVPIPPTESPGATVFFALHCRRGTKC

SEQ ID NO: 11754 - protein, 482 aa, Homo sapiens
VGARRAEAMVQQTNNAENTEALLAGESSDSGAGLELGIASSPTPGSTASTGGKADDPSWCKTPSGHIKRPMNAFMVWSQIERRKIMEQSPDMHNAEISKRLGKRWKLLKDSDKIPFIREAERLRLKHMADYPDYKYRPRKKVKSGNANSSSSAAASSKPGEKGDKVGGSGGGGHGGGGGGGSSNAGGGGGGASGGGANSKPAQKKSCGSKVAGGAGGGVSKPHAKLILAGGGGGGKAAAAAAASFAAEQAGAAALLPLGAAADHHSLYKARTPSASASASSAASASAALAAPGKHLAEKKVKRVYLFGGLGTSSSPVGGVGAGADPSDPLGLYEEEGAGCSPDAPSLSGRSSAASSPAAGRSPADHRGYASLRAASPAPSSAPSHASSSASSHSSSSSSSGSSSSDDEFEDDLLDLNPSSNFESMSLGSFSSSSALDRDLDFNFEPGSGSHFEFPDYCTPEVSEMISGDWLESSISNLVFTY

SEQ ID NO: 11755 - protein, 42 aa, Homo sapiens
VSHHAWSYIPFHSCRVPSGDYRCVNTQHVPVGDFLDGEDFQV

SEQ ID NO: 11756 - protein, 56 aa, Homo sapiens
VQDSKIYFLPFPAELPETSKIYWWSHSIILICGDLDLDLKVSEKIFSSDLRVNFTS

SEQ ID NO: 11757 - protein, 15 aa, Homo sapiens
MCAFFSVTKSSLGYY

SEQ ID NO: 11758 - protein, 16 aa, Homo sapiens
MGRREPARFDAFSIRQ

SEQ ID NO: 11759 - protein, 73 aa, Homo sapiens
LSCSCRLPPGLRRGAPDPGIVRLRPAKEGPAGGAPAGVSCLAAGRGDLEDRVKLQKTWGGMAREDAKDWGRGS

SEQ ID NO: 11760 - protein, 60 aa, Homo sapiens
LLLPSPAWASPWCTRSRNRASAPCERRTCWRSSGRGLLPRSWARGLGGQGEAAEDLGWDG

SEQ ID NO: 11761 - protein, 126 aa, Homo sapiens
VHPAQAVPRDLVWGDNPWRDVVAFYLRVELKMDKQAQIKFWEFTFLKLGSRSWPVLNKSNRVDICGNVRFTRSQDKMLFDNGLEERVKEWFRANSRKNNLIHTWRRTQELNQMGLWCLGRKLTKRQ

SEQ ID NO: 11762 - protein, 19 aa, Homo sapiens
MGRLDFFRRLQRRTVSPCF

SEQ ID NO: 11763 - protein, 37 aa, Homo sapiens
MLHCLIFQSPSYKELYYWYNHHGEEVGMWGRDDRNRE

SEQ ID NO: 11764 - protein, 39 aa, Homo sapiens
MHSVQAPRKRTNGRGHMCKQDGSLESLRLNHECSALSSL

SEQ ID NO: 11765 - protein, 41 aa, Homo sapiens
LQSAPGTPATVGISVGELWPFARCCSHSYVRSLRGLSVSTQ

SEQ ID NO: 11766 - protein, 258 aa, Homo sapiens
LQSAPGTPATVGISVGELWPFARCCSHSYVRSLRGLSVSTHLLCFTIYIMNPSMKQKQEEIKENIKNSSVPRRTLKMIQPSASGSLVGRENELSAGLSKRKHRNDHLTSTTSSPGVIVPESSENKNLGGVTQESFDLMIKENPSSQYWKEVAEKRRKALYEALKENEKLHKEIEQKDNEIARLKKENKELAEVAEHVQYMAELIERLNGEPLDNFESLDNQEFDSEEETVEDSLVEDSEIGTCAEGTVSSSTDAKPCI

SEQ ID NO: 11767 - protein, 232 aa, Homo sapiens
LKPRPTLTAAGPRPGLLCFTIYIMNPSMKQKQEEIKENIKNSSVPRRTLKMIQPSASGSLVGRENELSAGLSKRKHRNDHLTSTTSSPGVIVPESSENKNLGGVTQESFDLMIKENPSSQYWKEVAEKRRKALYEALKENEKLHKEIEQKDNEIARLKKENKELAEVAEHVQYMAELIERLNGEPLDNFESLDNQEFDSEEETVEDSLVEDSEIGTCAEGTVSSSTDAKPCI

SEQ ID NO: 11768 - protein, 221 aa, Homo sapiens
LQRGLLCFTIYIMNPSMKQKQEEIKENIKNSSVPRRTLKMIQPSASGSLVGRENELSAGLSKRKHRNDHLTSTTSSPGVIVPESSENKNLGGVTQESFDLMIKENPSSQYWKEVAEKRRKALYEALKENEKLHKEIEQKDNEIARLKKENKELAEVAEHVQYMAELIERLNGEPLDNFESLDNQEFDSEEETVEDSLVEDSEIGTCAEGTVSSSTDAKPCI

SEQ ID NO: 11769 - protein, 25 aa, Homo sapiens
LHWCGGFYMPENPECAPDMTRSRRR

SEQ ID NO: 11770 - protein, 501 aa, Homo sapiens
MDENNGLLLLELNPPNPWDLQPRSPEELAFGEVQITYLTHACMDLKLGDKRMVFDPWLIGPAFARGWWLLHEPPSDWLERLCQADLIYISHLHSDHLSYPTLKKLAGRRPDIPIYVGNTERPVFWNLNQSGVQLTNINVVPFGIWQQVDKNLRFMILMDGVHPEMDTCIIVEYKGHKILNIVDCTRPNGGRLPMKVALMMSDFAGGASGFPMTFSGGKFTEEWKAQFIKTERKKLLNYKARLVKNLQPRIYCPFAGYFVESHPSDKYIKETNTKNDPNELNNLIKKNSDVITWTPRPGATLDLGRMLKDRTDSKGIIEPPEGTKIYKDSWDFEPYLEILNAALGDEIFLHSSWIKEYFTWAGFKDYNLVVRMIETDEDFNPFPGGYDYLVDFLDLSFPKERPQREHPYEEIHSRVDVIRHVVKNGLLWDELYIGFQTRLQRDPDIYHHLFWNHFQIKLPLTPPNWKSFLMCCEQNGPVILQFSTERTNEPNRNKFSVENKA

SEQ ID NO: 11771 - protein, 186 aa, Homo sapiens
LNYKARLVKNLQPRIYCPFAGYFVESHPSDKYIKETNTKNDPNELNNLIKKNSDVITWTPRPGATLDLGRMLKDRTDSKGIIEPPEGTKIYKDSWDFEPYLEILNAALGDEIFLHSSWIKEYFTWAGFKDYNLVVRIHSRVDVIRHVVKNGLLWDELYIGFQTRLQRDPDIYHHLYRSRFSHIRIP

SEQ ID NO: 11772 - protein, 258 aa, Homo sapiens
LPMKVALMMSDFAGGASGFPMTFSGGKFTEEWKAQFIKTERKKLLNYKARLVKNLQPRIYCPFAGYFVESHPSDKYIKETNTKNDPNELNNLIKKNSDVITWTPRPGATLDLGRMLKDRTDSKGIIEPPEGTKIYKDSWDFEPYLEILNAALGDEIFLHSSWIKEYFTWAGFKDYNLVVRMIETDEDFNPFPGGYDYLVDFLDLSFPKERPQREHPYEEIHSRVDVIRHVVKNGLLWDELYIGFQTRLQRDPDIYHHL

SEQ ID NO: 11773 - protein, 33 aa, Homo sapiens
LNYKARLVKNLQPRIYCPFAGYFVESHPSDKYG

SEQ ID NO: 11774 - protein, 103 aa, Homo sapiens
LTNALGEQMSNRNDMSNCCSFKIPRQRNRQTMGSIEQTTEILLCLSPVEVASLKEGINFFRNKSTGKDYVLYKNKSRLRACKNMCKHQGGLFIKDIEDLAGSC

SEQ ID NO: 11775 - protein, 81 aa, Homo sapiens
LFGPCLLGMEQSIEQTTEILLCLSPVEVASLKEGINFFRNKSTGKDYVLYKNKSRLRACKNMCKHQGGLFIKDIEDLAGSC

SEQ ID NO: 11776 - protein, 103 aa, Homo sapiens
LTNALGEQMSNRNDMSNCCSFKIPRQRNRQTMGSIEQTTEILLCLSPVEVASLKEGINFFRNKSTGKDYVLYKNKSRLRACKNMCKHQGGLFIKDIEDLAGSF

SEQ ID NO: 11777 - protein, 134 aa, Homo sapiens
LLTSGLLWKITTTARKEVKVPVFLARVNRSPLLILPLSCQVPPLVKVTHHVTSSVTTLRCRALNYYPQNITMKWLKDKQPMDAKEFEPKDVLPNGDGTYQGWITLAVPPGEEQRYTCQVEHPGLDQPLIVIWGM

SEQ ID NO: 11778 - protein, 210 aa, Homo sapiens
LVLGDGGNRDLFLWLQLTRLGIFPESHTLQVILGCEMQEDNSTEGYWKYGYDGQDHLEFCPDTLDWRAAEPRAWPTKLEWERHKIRARQNRAYLERDCPAQLQQLLELGRGVLDQQVPPLVKVTHHVTSSVTTLRCRALNYYPQNITMKWLKDKQPMDAKEFEPKDVLPNGDGTYQGWITLAVPPGEEQRYTCQVEHPGLDQPLIVIWGM

SEQ ID NO: 11779 - protein, 21 aa, Homo sapiens
LRPPDRGISETSNNPLESFTV

SEQ ID NO: 11780 - protein, 134 aa, Homo sapiens
LWTKCLFIMPEPAKSAPAPKKGSKKAVTKAQKKDGKKRKRSRKESYSVYVYKVLKQVHPDTGISSKAMGIMNSFVNDIFERIAGEASRLAHYNKRSTITSREIQTAVRLLLPGELAKHAVSEGTKAVTKYTSSK

SEQ ID NO: 11781 - protein, 36 aa, Homo sapiens
LLLFQSNWELLSVEAKTKLRSPVIWVMVYVKHQRNL

SEQ ID NO: 11782 - protein, 27 aa, Homo sapiens
MLGLKGEDTEGQNFWQRKDLLRSPYLS

SEQ ID NO: 11783 - protein, 15 aa, Homo sapiens
LAYHEWKMALFKPGE

SEQ ID NO: 11784 - protein, 146 aa, Homo sapiens
LTELPSSCFFPPIFRQLLPVMPEPSKSAPAPKKGSKKAVTKAQKKDGKKRKRSRKESYSVYVYKVLKQVHPDTGISSKAMGIMNSFVNDIFERIAGEASRLAHYNKRSTITSREIQTAVRLLLPGELAKHAVSEGTKAVTKYTSSK

SEQ ID NO: 11785 - protein, 186 aa, Homo sapiens
LTELPSSCFFPPIFRQLLPVMPEPSKSAPAPKKGSKKAVTKAQKKDGKKRKRSRKESYSVYVYKVLKQVHPDTGISSKAMGIMNSFVNDIFERIAGEASRLAHYNKRSTITSREIQTAVRLLLPGELAKHAVSEGTKAVTKYTSSKKRKRRFTESIKKAHGFRKLKIWLKLRVSNQSPDDIYIARD

SEQ ID NO: 11786 - protein, 101 aa, Homo sapiens
VHRLLRKGNYAERVGAGAPVYLAAVLEYLTAEILELAGNAARDNKKTRIIPRHLQLAIRNDEELNKLLGKVTIAQGGVLPNIQAVLLPKKTESHHKAKGKA

SEQ ID NO: 11787 - protein, 176 aa, Homo sapiens
LSLVSGPLSAEMAPNASCLCVHVRSEEWDLMTFDANPYDSVKKIKEHVRSKTKVPVQDQVLLLGSKILKPRRSLSSYGIDKEKTIHLTLKVVKPSDEELPLFLVESGDEAKRHLLQVRRSSSVAQVKAMIETKTGIIPETQIVTCNGKRLEDGKMMADYGIRKGNLLFLACYCIGG

SEQ ID NO: 11788 - protein, 158 aa, Homo sapiens
VRVHVRSEEWDLMTFDANPYDSVKKIKEHVRSKTKVPVQDQVLLLGSKILKPRRSLSSYGIDKEKTIHLTLKVVKPSDEELPLFLVESGDEAKRHLLQVRRSSSVAQVKAMIETKTGIIPETQIVTCNGKRLEDGKMMADYGIRKGNLLFLACYCIGG

SEQ ID NO: 11789 - protein, 28 aa, Homo sapiens
MCLCSCRHNVRRWGDHPTPMSTMTLFPR

SEQ ID NO: 11790 - protein, 287 aa, Homo sapiens
LRSWLWCFPAREEKSNFFKAFIETQQREGVRLPPCLAETEGGSWLRNAAAADVLRNLPEVEWREPQHCCPPTPRKRKQNPRVPLPHYPPNPAAAIAADTMPKRKKQNHHQPPTQQQPPLPEREETGDEEDGSPIGPPSLLGPPPMANGKPGDPKSALHRGPPGSRGPLIPPLLSLPPPPWGRGPIRRGLGPRSSPYGRGWWGVNAEPPFPGPGHGGPTRGSFHKEQRNPRRLKSWSLIKNTCPPKDDPQVMEDKSDRPVCRHFAKKGHCRYEDLCAFYHPGVNGPPL

SEQ ID NO: 11791 - protein, 185 aa, Homo sapiens
VPLPHYPPNPAAAIAADTMPKRKKQNHHQPPTQQQPPLPEREETGDEEDGSPIALHRGPPGSRGPLIPPLLSLPPPPWGRGPIRRGLGPRSSPYGRGWWGVNAEPPFPGPGHGGPTRGSFHKEQRNPRRLKSWSLIKNTCPPKDDPQVMEDKSDRPVCRHFAKKGHCRYEDLCAFYHPGVNGPPL

SEQ ID NO: 11792 - protein, 89 aa, Homo sapiens
MPKRKKQNHHQPPTQQQPPLPEREETGDEEDGSPIGPPSLLGPPPMANGKPGDPKSAPNWIPPTCPSSVEWINKLLCMHAMGLHCNENE

SEQ ID NO: 11793 - protein, 177 aa, Homo sapiens
LGCALKTGVSLCMLFFNKKNFFNHGLSGFSCPLDTFLCLSLSLSPALHRGPPGSRGPLIPPLLSLPPPPWGRGPIRRGLGPRSSPYGRGWWGVNAEPPFPGPGHGGPTRGSFHKEQRNPRRLKSWSLIKNTCPPKDDPQVMEDKSDRPVCRHFAKKGHCRYEDLCAFYHPGVNGPPL

SEQ ID NO: 11794 - protein, 52 aa, Homo sapiens
LRPAEKKNYLFSCPIHTLRRAKKLNFNHEGNRAHPGWSVWQPDRCQVLGGDQ

SEQ ID NO: 11795 - protein, 457 aa, Homo sapiens
LQAGQQEDPVLKIRRSWARWLTLVIPALWEAKFWEVISDEHGIDPTGTYHGDSDLQLDRISVYYNEATGGKYVPRAILVDLEPGTMDSVRSGPFGQIFRPDNFVFGQSGAGNNWAKGHYTEGAELVDSVLDVVRKEAESCDCLQGFQLTHSLGGGTGSGMGTLLISKIREEYPDRIMNTFSVVPSPKVSDTVVEPYNATLSVHQLVENTDETYCIDNEALYDICFRTLKLTTPTYGDLNHLVSATMSGVTTCLRFPGQLNADLRKLAVNMVPFPRLHFFMPGFAPLTSRGSQQYRALTVPELTQQVFDAKNMMAACDPRHGRYLTVAAVFRGRMSMKEVDEQMLNVQNKNSSYFVEWIPNNVKTAVCDIPPRGLKMAVTFIGNSTAIQELFKRISEQFTAMFRRKAFLHWYTGEGMDEMEFTEAESNMNDLVSEYQQYQDATAEEEEDFGEEAEEEA

SEQ ID NO: 11796 - protein, 30 aa, Homo sapiens
VASSDLVNMGISVVSYTLKDIHDDQVKLGN

SEQ ID NO: 11797 - protein, 40 aa, Homo sapiens
MFFTCGPNEAMVVSGFCRSPPVMVAGGRVFVLPCIQQIQR

SEQ ID NO: 11798 - protein, 128 aa, Homo sapiens
MFFTCGPNEAMVVSGFCRSPPVMVAGGRVFVLPCIQQIQRISLNTLTLNVKSEKVYTRHGVPISVTGIAQVKLSEPFPHSPLPHHPLSQTLRHLLATVFSTLACREVPLLVSSFPGTPRHLPPPPFFP

SEQ ID NO: 11799 - protein, 37 aa, Homo sapiens
LPPFLTAPHLAGFCRSPPVMVAGGRVFVLPCIQQIQR

SEQ ID NO: 11800 - protein, 35 aa, Homo sapiens
LNSEHYSGDATRCLRRDRGAQRPRRIETEAQPSWG

SEQ ID NO: 11801 - protein, 147 aa, Homo sapiens
LALHSARLTMCHSRSCHPTMTILQAPTPAPSTIPGPRRGSGPEIFTFDPLPEPAAAPAGRPSASRGHRKRSRRVLYPRVVSIAEVGIRGVRCPGVTGERPDSRGLDLTCLLFCLPLGPAPAASRGTEPSQKASLSAAHHRLLPDPDG

SEQ ID NO: 11802 - protein, 77 aa, Homo sapiens
LPARRGRAPPGPGFLAVKQMQQRRLLPRSPRGPGIRRTGWHCLKRRLLGDCAARIGGSPNILRSEDPAQVRCHRTCS

SEQ ID NO: 11803 - protein, 76 aa, Homo sapiens
LASPPRGKPTTKGPRKSLHGPALSVRILIYTPSVAPIKVCSDSRARWLTSVIPALWETMAGGSLEVRSSRPAWPTW

SEQ ID NO: 11804 - protein, 37 aa, Homo sapiens
LCGTEMQDFFTPLLCDFKSLWHLFLQRHLNVSAFLLA

SEQ ID NO: 11805 - protein, 132 aa, Homo sapiens
MLLRMSEHRNEALGNYLEMRLKSSFLRGLGSWKSNPLRLGGWTILLTLTMGQGEPGGPQGDPWVPHELLLPSLCDSSHASSWGSGSITCAWRGGDSSSHPLVSGHILSNSPVAAVMCSSMGTHLSPFKGTLL

SEQ ID NO: 11806 - protein, 28 aa, Homo sapiens
LRSGRLRAMGGGRRPYDVFFSKGERFAQ

SEQ ID NO: 11807 - protein, 51 aa, Homo sapiens
LPHLLGLPVLRALDYRPAVSCPLPGPRSLLHLLPGSPACLGLGLGSPHDTT

SEQ ID NO: 11808 - protein, 24 aa, Homo sapiens
LPGRFSSSHILTHGSTLSPLERTP

SEQ ID NO: 11809 - protein, 189 aa, Homo sapiens
VAALPPIVDSLPLPGFQKLPEEEPETDLSPGLPAAHLIGAPLKGQGLGWETTKEQAFLTSGTQFSDAEGLALPQDGLYYLYCLVGYRGRAPPGGGDPQGRSVTLRSSLYRAGGAYGPGTPELLLEGAETVTPVLDPARRQGYGPLWYTSVGFGGLVQLRRGERVYVNISHPDMVDFARGKTFFGAVMVG

SEQ ID NO: 11810 - protein, 182 aa, Homo sapiens
VCGKSQPGFQKLPEEEPETDLSPGLPAAHLIGAPLKGQGLGWETTKEQAFLTSGTQFSDAEGLALPQDGLYYLYCLVGYRGRAPPGGGDPQGRSVTLRSSLYRAGGAYGPGTPELLLEGAETVTPVLDPARRQGYGPLWYTSVGFGGLVQLRRGERVYVNISHPDMVDFARGKTFFGAVMVG

SEQ ID NO: 11811 - protein, 11 aa, Homo sapiens
VMRNLRQVTSP

SEQ ID NO: 11812 - protein, 47 aa, Homo sapiens
MFWGLAVRNGKCPAQGWHIREAPQPGNDYNRGPLTSQMRNLRQVTSP

SEQ ID NO: 11813 - protein, 16 aa, Homo sapiens
MFWGLAMRNLRQVTSP

SEQ ID NO: 11814 - protein, 45 aa, Homo sapiens
MTPPWQLPFPARPTHTLFWLLGELGSLNTVIHPINYYLTPEWVEG

SEQ ID NO: 11815 - protein, 38 aa, Homo sapiens
LTSPPAASVLSPQGGKHLMLEVPGSCGPWQVMCESRVS

SEQ ID NO: 11816 - protein, 32 aa, Homo sapiens
LTSPPAASVLSPQGGKHLMLEVPGSCGPWQVM

SEQ ID NO: 11817 - protein, 136 aa, Homo sapiens [sequence omitted]

SEQ ID NO: 11818 - protein, 208 aa, Homo sapiens
LSSGGGAPAEITARQEWGWPLEVDGVRKALQDLGLRIVEIGDENATLDGTDVLFTGREFFVGLSKWTNHRGAEIVADTFRDFAVSTVPVSGPSHLRGLCGMGGPRTVVAGSSDAAQKAVRAMAVLTDHPYASLTLPDDAAADCLFLRPGLPGVPPFLLHRGGGDLPNSQEALQKLSDVTLVPVSCSELEKAGAGLSSLCLVLSTRPHS

SEQ ID NO: 11819 - protein, 53 aa, Homo sapiens
MSSPTQGPALKARAPSPRGLKTGTPFSTNSVLGGWGPSRDHSATGVGVAAGDR

SEQ ID NO: 11820 - protein, 680 aa, Homo sapiens
LPRSPVAEVLSALHSARHPTPASSVNRCFRTALTFCIRRASKLMASLGANPRRTPQGPRPGAASSGFPSPAPVPGPREAEEEEVEEEEELAEIHLCVLWNSGYLGIAYYDTSDSTIHFMPDAPDHESLKLLQRVLDEINPQSVVTSAKQDENMTRFLGKLASQEHREPKRPEIIFLPSVDFGLEISKQRLLSGNYSFIPDAMTATEKILFLSSIIPFDCLLTVRALGGLLKFLGRRRIGVELEDYNVSVPILGFKKFMLTHLVNIDQDTYSVLQIFKSESHPSVYKVASGLKEGLSLFGILNRCHCKWGEKLLRLWFTRPTHDLGELSSRLDVIQFFLLPQNLDMAQMLHRLLGHIKNVPLILKRMKLSHTKVSDWQVLYKTVYSALGLRDACRSLPQSIQLFRDIAQEFSDDLHHIASLIGKVVDFEGSLAENRFTVLPNIDPEIDEKKRRLMGLPSFLTEVARKELENLDSRIPSCSVIYIPLIGFLLSIPRLPSMVEASDFEINGLDFMFLSEEKLHYRSARTKELDALLGDLHCEIRDQETLLMYQLQCQVLARAAVLTRVLDLASRLDVLLALASAARDYGYSRPRYSPQVLGVRIQNGRHPLMELCARTFVPNSTECGGDKGRVKVITGPNSSGKSIYLKQLRIHLPWPLHLHDRPQPGGESSEQCHCTVAGPY

SEQ ID NO: 11821 - protein, 53 aa, Homo sapiens
LGRGGGGIAAAAAPALRETAEREGGRVLGGQPPTIPTAMGPTSHSHLPSIGRG

SEQ ID NO: 11822 - protein, 26 aa, Homo sapiens
MEAERPQEEEDGEQNGHILASGPPSG

SEQ ID NO: 11823 - protein, 145 aa, Homo sapiens
LTTTAFPFVSVMSWKKALRIPGDLRVATVTLMLAMLSSLLAEGRDSPVEPTVTISPSRTEALNHHNLLVCSVTDFYPGQIKVRWFRNDQEETAGVVSTPLIRNGDWTFQILVMLEMTPQRGDVYTCHVEHPSLQSPITVEWRLLH

SEQ ID NO: 11824 - protein, 144 aa, Homo sapiens [sequence omitted]

SEQ ID NO: 11825 - protein, 85 aa, Homo sapiens [sequence omitted]

SEQ ID NO: 11826 - protein, 111 aa, Homo sapiens
LSLFGTLDSRELEGTDLISRGWVSPHHSFGGSRDPGNIVFCSVSGDHLPRLGLLGQARTHGPWKSWSRGLNSRHLYRAEHDHIPAAAAGAQPGLHRSRWLRGPCGKHLSVG

SEQ ID NO: 11827 - protein, 188 aa, Homo sapiens
MNRTKELRCYRCYHFCGCYPTPGPSLKVSCWLSDSCQELQRRGIILCSYGVTSPIAVFGRPGRLRNRRHFERRLVPMKWLKKCLDTAPTPMWPDDLQNHTFLHTVYCQDGSPSVGLSEAYDEDQLFFFDFSQNTRVPRLPEFADWAQEQGDAPAILFDKEFCEWMIQQIGPKLDGKIPVSRGQEFSGE

SEQ ID NO: 11828 - protein, 54 aa, Homo sapiens
LLQMLPLLWLLPHSWAVPEGFLLAERFLPRASKKRDYFMQLWGHFSHCCLWEAW

SEQ ID NO: 11829 - protein, 43 aa, Homo sapiens
LCVLLQVTKYLNRRGLRRDLNSSCPTNSISAFLLTSCENYSSG

SEQ ID NO: 11830 - protein, 128 aa, Homo sapiens
MSLVIPEKFQHILRVLNTNIDGRRKIAFAITAIKGVGRRYAHVVLRKADIDLTKRAGELTEDEVERVITIMQNPRQYKIPDWFLNRQKDVKDGKYSQVLANGLDNKLREDLERLKKIRAHRGLRHFWG

SEQ ID NO: 11831 - protein, 299 aa, Homo sapiens
VYPVRWSHLVPVTLLPHGCFGQHWSSRSGQSERFTGWGVVSWDFHFSLILPISCHCRVLGSVGVPTPLVSCDRPSTGGDEAPTTPAPLLTRLAQHMKWPSVSSLDSALESSPSLHSPADPSHLSPPASSPRPSRGHRRSASCGSPLSGGAEEASGGTGYGGEGSGPGASDCRIIRVQMELGEDGSVYKSILVTSQDKAPSVISRVLKKNNRDSAVASEYELVQLLPGERELTIPASANVFYAMDGASHDFLLRQRRRSSTATPGVTSGPSASGTPPSEGGGGSFPRIKATGRKIARALF

SEQ ID NO: 11832 - protein, 793 aa, Homo sapiens
VRSISGTGSGINPPTSPAPAKQKRQGACRAGCGFGWRRTLRLALGCGDSDDWSLRAERGESGWWPLEFKSGGCGAGLVAAGAVRVLYPASRAGERTRVPGSPAPSSLPLHSPGACGTEVDMDPQRSPLLEVKGNIELKRPLIKAPSQLPLSGSRLKRRPDQMEDGLEPEKKRTRGLGATTKITTSHPRVPSLTTVPQTQGQTTAQKVSKKTGPRCSTAIATGLKNQKPVPAVPVQKSGTSGVPPMAGGKKPSKRPAWDLKGQLCDLNAELKRCRERTQTLDQENQQLQDQLRDAQQQVKALGTERTTLEGHLAKVQAQAEQGQQELKNLRACVLELEERLSTQEGLVQELQKKQVELQEERRGLMSQLEEKERRLQTSEAALSSSQAEVASLRQETVAQAALLTEREERLHGLEMERRRLHNQLQELKGNIRVFCRVRPVLPGEPTPPPGLLLFPSGPGGPSDPPTRLSLSRSDERRGTLSGAPAPPTRHDFSFDRVFPPGSGQDEVFEEIAMLVQSALDGYPVCIFAYGQTGSGKTFTMEGGPGGDPQLEGLIPRALRHLFSVAQELSGQGWTYSFVASYVEIYNETVRDLLATGTRKGQGGECEIRRAGPGSEELTVTNARYVPVSCEKEVDALLHLARQNRAVARTAQNERSSRSHSVFQLQISGEHSSRGLQCGAPLSLVDLAGSERLDPGLALGPGERERLRETQAINSSLSTLGLVIMALSNKESHVPYRNSKLTYLLQNSLGGSAKMLMFVNISPLEENVSESLNSLRFASKVNQCVIGTAQANRK

SEQ ID NO: 11833 - protein, 598 aa, Homo sapiens
LSLSGLMSRSRASIHRGSIPAMSYAPFRDVRGPSMHRTQYVHSPYDRPGWNPRFCIISGNQLLMLDEDEIHPLLIRDRRSESSRNKLLRRTVSVPVEGRPHGEHEYHLGRSRRKSVPGGKQYSMEGAPAAPFRPSQGFLSRRLKSSIKRTKSQPKLDRTSSFRQILPRFRSADHDRARLMQSFKESHSHESLLSPSSAAEALELNLDEDSIIKPVHSSILGQEFCFEVTTSSGTKCFACRSAAERDKWIENLQRAVKPNKDNSRRVDNVLKLWIIEARELPPKKRYYCELCLDDMLYARTTSKPRSASGDTVFWGEHFEFNNLPAVRALRLHLYRDSDKKRKKDKAGYVGLVTVPVATLAGRHFTEQWYPVTLPTGSGGSGGMGSGGGGGSGGGSGGKGKGGCPAVRLKARYQTMSILPMELYKEFAEYVTNHYRMLCAVLEPALNVKGKEEVASALVHILQSTGKAKDFLSDMAMSEVDRFMEREHLIFRENTLATKAIEEYMRLIGQKYLKDAIGEFIRALYESEENCEVDPIKCTASSLAEHQANLRMCCELALCKVVNSHCLPSCSCGPSFPVSLTPVSTPSPPTTPLSMFPGS

SEQ ID NO: 11834 - protein, 128 aa, Homo sapiens
LGLRAGAISGAGAAPRRPSQPSLFHLLLREGKMSESSSKSSQPLASKQEKDGTEKRGRGRPRKQPPKEPSEVPTPKRPRGRPKGSKNKGAAKTRKTTTTPGRKPRGRPKKLEKEEEEGISQESSEEEQ

SEQ ID NO: 11835 - protein, 166 aa, Homo sapiens
LGLRAGAISGAGAAPRRHPHLLPAAAAAEPGRSSAPSTAAPGNPERAPQAGGRARASQPSLFHLLLREGKMSESSSKSSQPLASKQEKDGTEKRGRGRPRKQPPKEPSEVPTPKRPRGRPKGSKNKGAAKTRKTTTTPGRKPRGRPKKLEKEEEEGISQESSEEEQ

SEQ ID NO: 11836 - protein, 27 aa, Homo sapiens
MSSKVSRDTLYEAVREVLHGNQRKRRK

SEQ ID NO: 11837 - protein, 58 aa, Homo sapiens
MSSKVSRDTLYEAVREVLHGNQRKRRKFLETVELQISLKNYDPQKDKRFSGTVRLAPF

SEQ ID NO: 11838 - protein, 173 aa, Homo sapiens
LAAGECERSGLKSTPRPKFSVCVLGDQQHCDEAKAVDIPHMDIEALKKLNKNKKLVKKLAKKYDAFLASESLIKQIPRILGPGLNKAGKFPSLLTHNENMVAKVDEVKSTIKFQMKKVLCLAVAVGHVKMTDDELVYNIHLAVNFLVSLLKKNWQNVRALYIKSTMGKPQRLY

SEQ ID NO: 11839 - protein, 108 aa, Homo sapiens
MYFISWTKAKESWEMDTKEKLEQAAIVKEKGTVYFKVCESLCNPFHLKEFIQVLVNCADIPYSEFCQHCLVRISCNFYKSVIFNMKNGEKTIMWKKKKVQIPLLHILL

SEQ ID NO: 11840 - protein, 38 aa, Homo sapiens
VTESASPRGDRYRRHGHGDGAAGRGAPGAERPPSRFST

SEQ ID NO: 11841 - protein, 325 aa, Homo sapiens
VASSPPPVMQEGELAISPISPVAAMPPLGTHVQARCEAQINLLGEGGICKLPGRLRIQPALWSREDVLHWLRWAEQEYSLPCTAEHGFEMNGRALCILTKDDFRHRAPSSGDVLYELLQYIKTQRRALVCGPFFGGIFRLKTPTQHSPVPPEEVTGPSQMDTRRGHLLQPPDPGLTSNFGHLDDPGLARWTPGKEESLNLCHCAELGCRTQGVCSFPAMPQAPIDGRIADCRLLWDYVYQLLLDTRYEPYIKWEDKDAKIFRVVDPNGLARLWGNHKNRVNMTYEKMSRALRHYYKLNIIKKEPGQKLLFRNGLQLIFIFIWSFQ

SEQ ID NO: 11842 - protein, 270 aa, Homo sapiens
VASSPPPVMQEGELAISPISPVAAMPPLGTHVQARCEAQINLLGEGGICKLPGRLRDVLYELLQYIKTQRRALVCGPFFGGIFRLKTPTQHSPVPPEEVTGPSQMDTRRGHLLQPPDPGLTSNFGHLDDPGLARWTPGKEESLNLCHCAELGCRTQGVCSFPAMPQAPIDGRIADCRLLWDYVYQLLLDTRYEPYIKWEDKDAKIFRVVDPNGLARLWGNHKNRVNMTYEKMSRALRHYYKLNIIKKEPGQKLLFRNGLQLIFIFIWSFQ

SEQ ID NO: 11843 - protein, 315 aa, Homo sapiens
LQAARKTPHPARTVEQGGRAALAALGRAGVLSAMHRGARVRDERTRPLHPHQGRLPAPCAQLRSGKRTGFPLSGNPGDVLYELLQYIKTQRRALVCGPFFGGIFRLKTPTQHSPVPPEEVTGPSQMDTRRGHLLQPPDPGLTSNFGHLDDPGLARWTPGKEESLNLCHCAELGCRTQGVCSFPAMPQAPIDGRIADCRLLWDYVYQLLLDTRYEPYIKWEDKDAKIFRVVDPNGLARLWGNHKNRVNMTYEKMSRALRHYYKLNIIKKEPGQKLLFRFLKTPGKMVQDKHSHLEPLESQEQDRIEFKDKRPEISP

SEQ ID NO: 11844 - protein, 349 aa, Homo sapiens
VASSPPPVMQEGELAISPISPVAAMPPLGTHVQARCEAQINLLGEGGICKLPGRLRIQPALWSREDVLHWLRWAEQEYSLPCTAEHGFEMNGRALCILTKDDFRHRAPSSGDVLYELLQYIKTQRRALVCGPFFGGIFRLKTPTQHSPVPPEEVTGPSQMDTRRGHLLQPPDPGLTSNFGHLDDPGLARWTPGKEESLNLCHCAELGCRTQGVCSFPAMPQAPIDGRIADCRLLWDYVYQLLLDTRYEPYIKWEDKDAKIFRVVDPNGLARLWGNHKNRVNMTYEKMSRALRHYYKLNIIKKEPGQKLLFRFLKTPGKMVQDKHSHLEPLESQEQDRIEFKDKRPEISP

SEQ ID NO: 11845 - protein, 272 aa, Homo sapiens
VASSPPPVMQEGELAISPISPVAAMPPLGTHVQARCEAQINLLGEGGICKLPGRLRIQPALWSREDVLHWLRWAEQEYSLPCTAEHGFEMNGRALCILTKDDFRHRAPSSGDVLYELLQYIKTQRRALVCGPFFGGIFRLKTPTQHSPVPPEDCRLLWDYVYQLLLDTRYEPYIKWEDKDAKIFRVVDPNGLARLWGNHKNRVNMTYEKMSRALRHYYKLNIIKKEPGQKLLFRFLKTPGKMVQDKHSHLEPLESQEQDRIEFKDKRPEISP

SEQ ID NO: 11846 - protein, 294 aa, Homo sapiens
VASSPPPVMQEGELAISPISPVAAMPPLGTHVQARCEAQINLLGEGGICKLPGRLRDVLYELLQYIKTQRRALVCGPFFGGIFRLKTPTQHSPVPPEEVTGPSQMDTRRGHLLQPPDPGLTSNFGHLDDPGLARWTPGKEESLNLCHCAELGCRTQGVCSFPAMPQAPIDGRIADCRLLWDYVYQLLLDTRYEPYIKWEDKDAKIFRVVDPNGLARLWGNHKNRVNMTYEKMSRALRHYYKLNIIKKEPGQKLLFRFLKTPGKMVQDKHSHLEPLESQEQDRIEFKDKRPEISP

SEQ ID NO: 11847 - protein, 325 aa, Homo sapiens
LRGAGLGPQQPQPGERSRQKAGGFLTSTCNAGIQPALWSREDVLHWLRWAEQEYSLPCTAEHGFEMNGRALCILTKDDFRHRAPSSGDVLYELLQYIKTQRRALVCGPFFGGIFRLKTPTQHSPVPPEEVTGPSQMDTRRGHLLQPPDPGLTSNFGHLDDPGLARWTPGKEESLNLCHCAELGCRTQGVCSFPAMPQAPIDGRIADCRLLWDYVYQLLLDTRYEPYIKWEDKDAKIFRVVDPNGLARLWGNHKNRVNMTYEKMSRALRHYYKLNIIKKEPGQKLLFRFLKTPGKMVQDKHSHLEPLESQEQDRIEFKDKRPEISP

SEQ ID NO: 11848 - protein, 270 aa, Homo sapiens
LRGAGLGPQQPQPGERSRQKAGGFLTSTCNAGDVLYELLQYIKTQRRALVCGPFFGGIFRLKTPTQHSPVPPEEVTGPSQMDTRRGHLLQPPDPGLTSNFGHLDDPGLARWTPGKEESLNLCHCAELGCRTQGVCSFPAMPQAPIDGRIADCRLLWDYVYQLLLDTRYEPYIKWEDKDAKIFRVVDPNGLARLWGNHKNRVNMTYEKMSRALRHYYKLNIIKKEPGQKLLFRFLKTPGKMVQDKHSHLEPLESQEQDRIEFKDKRPEISP

SEQ ID NO: 11849 - protein, 21 aa, Homo sapiens
VRELVGVGPEESGKTHRSVWI

SEQ ID NO: 11850 - protein, 181 aa, Homo sapiens
LPVFSCCNHRDFFCSGAMSEPAGDVRQNPCGSKACRRLFGPVDSEQLSRDCDALMAGCIQEARERWNFDFVTETPLEGDFAWERVRGLGLPKLYLPTGPRRGRDELGGGRRPGTSPALLQGTAEEDHVDLSLSCTLVPRSGEQAEGSPGGPGDSQGRKRRQTSMTDFYHSKRRLIFSKRKP

SEQ ID NO: 11851 - protein, 184 aa, Homo sapiens
LWSRSWARIRRGTEALRGGAMSEPAGDVRQNPCGSKACRRLFGPVDSEQLSRDCDALMAGCIQEARERWNFDFVTETPLEGDFAWERVRGLGLPKLYLPTGPRRGRDELGGGRRPGTSPALLQGTAEEDHVDLSLSCTLVPRSGEQAEGSPGGPGDSQGRKRRQTSMTDFYHSKRRLIFSKRKP

SEQ ID NO: 11852 - protein, 231 aa, Homo sapiens
LWSRSWARIRRGTEALRGGERAAADNRGPRAGGPEPSQACPRVSLRVREDACSRVCAAFTGVSAAGAMSEPAGDVRQNPCGSKACRRLFGPVDSEQLSRDCDALMAGCIQEARERWNFDFVTETPLEGDFAWERVRGLGLPKLYLPTGPRRGRDELGGGRRPGTSPALLQGTAEEDHVDLSLSCTLVPRSGEQAEGSPGGPGDSQGRKRRQTSMTDFYHSKRRLIFSKRKP

SEQ ID NO: 11853 - protein, 173 aa, Homo sapiens
VRERRQTTGDPGPAAQSRAKRARVCPCVSARMRVRGCVLRSQVFLRQGDAQPEWKQFWRASSALQETDSSLLPPAVRGSAHAPPTPRVISWRPAPPPGPGGNSTQAFPRSGAGRREPPRLLLGSSEINPYAITTPSKEHSLGSTVFTELLLEIKIWLKSKAGRPIKEAIFNCF

SEQ ID NO: 11854 - protein, 179 aa, Homo sapiens
VQSLSPGVKPEQAGAMSEPAGDVRQNPCGSKACRRLFGPVDSEQLSRDCDALMAGCIQEARERWNFDFVTETPLEGDFAWERVRGLGLPKLYLPTGPRRGRDELGGGRRPGTSPALLQGTAEEDHVDLSLSCTLVPRSGEQAEGSPGGPGDSQGRKRRQTSMTDFYHSKRRLIFSKRKP

SEQ ID NO: 11855 - protein, 61 aa, Homo sapiens
VFSFSSLPEVGWAGFMPATSSSPLVRWVVPSGGVWLLPIAVTGGYEIHPLSWTLRPEFFFI

SEQ ID NO: 11856 - protein, 7 aa, Homo sapiens
LGRVTLK

SEQ ID NO: 11857 - protein, 13 aa, Homo sapiens
LVPSWLLIPPSVL

SEQ ID NO: 11858 - protein, 34 aa, Homo sapiens
LEQTTPPALMAPLTCTGEPVSVLSLFPLWLPCTF

SEQ ID NO: 11859 - protein, 11 aa, Homo sapiens
LISSGTRSQTF

SEQ ID NO: 11860 - protein, 10 aa, Homo sapiens
LALTLSPWRH

SEQ ID NO: 11861 - protein, 22 aa, Homo sapiens
LYCSVSFTAPPTMLNIQQVLNK

SEQ ID NO: 11862 - protein, 205 aa, Homo sapiens
LAQTQINFTVAIDFTASNGNPSQSTSLHYMSPYQLNAYALALTAVGEIIQHYDSDKMFPALGFGAKLPPDGRVSHEFPLNGNQENPSCCGIDGILEAYHRSLRTVQLYGPTNFAPVVTHVARNAAAVQDGSQYSVLLIITDGVISDMAQTKEAIVNAQPGFLCSLSLSALPLPTPFSVFLCLSMFTLPFLSCPPLPVLPLISPSF

SEQ ID NO: 11863 - protein, 86 aa, Homo sapiens
LAAKTSSHGFFRTLFFKCDLRCTRLMPSKGWRYCPVLAMKVPRHGKPLSPGQIKMTFSMHMQACHQEQSTEGQHSFCASSWLPSRS

SEQ ID NO: 11864 - protein, 63 aa, Homo sapiens
MEPLKIPRRYCPVLAMKVPRHGKPLSPGQIKMTFSMHMQACHQEQSTEGQHSFCASSWLPSRS

SEQ ID NO: 11865 - protein, 1089 aa, Homo sapiens
LAADHNEDLGHLSADAPWPAVTMAPRKRSHHGLGFLCCFGGSDIPEINLRDNHPLQFMEFSSPIPNAEELNIRFAELVDELDLTDKNREAMFALPPEKKWQIYCSKKKEQEDPNKLATSWPDYYIDRINSMAAMQSLYAFDEEETEMRNQVVEDLKTALRTQPMRFVTRFIELEGLTCLLNFLRSMDHATCESRIHTSLIGCIKALMNNSQGRAHVLAQPEAISTIAQSLRTENSKTKVAVLEILGAVCLVPGGHKKVLQAMLHYQVYAAERTRFQTLLNELDRSLGRYRDEVNLKTAIMSFINAVLNAGAGEDNLEFRLHLRYEFLMLGIQPVIDKLRQHENAILDKHLDFFEMVRNEDDLELARRFDMVHIDTKSASQMFELIHKKLKYTEAYPCLLSVLHHCLQMPYKRNGGYFQQWQLLDRILQQIVLQDERGVDPDLAPLENFNVKNIVNMLINENEVKQWRDQAEKFRKEHMELVSRLERKERECETKTLEKEEMMRTLNKMKDKLARESQELRQARGQVAELVAQLSELSTGPVSSPPPPGGPLTLSSSMTTNDLPPPPPPLPFACCPPPPPPPLPPGGPPTPPGAPPCLGMGLPLPQDPYPSSDVPLRKKRVPQPSHPLKSFNWVKLNEERVPGTVWNEIDDMQVFRILDLEDFEKMFSAYQRHQKELGSTEDIYLASRKVKELSVIDGRRAQNCIILLSKLKLSNEEIRQAILKMDEQEDLAKDMLEQLLKFIPEKSDIDLLEEHKHEIERMARADRFLYEMSRIDHYQQRLQALFFKKKFQERLAEAKPKVEAILLASRELVRSKRLRQMLEVILAIGNFMNKGQRGGAYGFRVASLNKIADTKSSIDRNISLLHYLIMILEKHFPDILNMPSELQHLPEAAKVNLAELEKEVGNLRRGLRAVEVLEYQRRQVREPSDKFVPVMSDFITVSSFSFSELEDQLNEARDKFAKALMHFGEHDSKMQPDEFFGIFDTFLQAFSEARQDLEAMRRRKEEEERRARMEAMLKEQRERERWQRQRKVLAAGSSLEEGGEFDDLVSALRSGEVFDKDLCKLKRSRKRSGSQALEVTRERAINRLNY

SEQ ID NO: 11866 - protein, 1090 aa, Homo sapiens
LAADHNEDLGHLSADAPWPAVTMAPRKRSHHGLGFLCCFGGSDIPEINLRDNHPLQFMEFSSPIPNAEELNIRFAELVDELDLTDKNREAMFALPPEKKWQIYCSKKKEQEDPNKLATSWPDYYIDRINSMAAMQSLYAFDEEETEMRNQVVEDLKTALRTQPMRFVTRFIELEGLTCLLNFLRSMDHATCESRIHTSLIGCIKALMNNSQGRAHVLAQPEAISTIAQSLRTENSKTKVAVLEILGAVCLVPGGHKKVLQAMLHYQVYAAERTRFQTLLNELDRSLGRYRDEVNLKTAIMSFINAVLNAGAGEDNLEFRLHLRYEFLMLGIQPVIDKLRQHENAILDKHLDFFEMVRNEDDLELARRFDMVHIDTKSASQMFELIHKKLKYTEAYPCLLSVLHHCLQMPYKRNGGYFQQWQLLDRILQQIVLQDERGVDPDLAPLENFNVKNIVNMLINENEVKQWRDQAEKFRKEHMELVSRLERKERECETKTLEKEEMMRTLNKMKDKLARESQELRQARGQVAELVAQLSELSTGPVSSPPPPGGPLTLSSSMTTNDLPPPPPPLPFACCPPPPPPPLPPGGPPTPPGAPPCLGMGLPLPQDPYPSSDVPLRKKRVPQPSHPLKSFNWVKLNEERVPGTVWNEIDDMQVFRILDLEDFEKMFSAYQRHQKELGSTEDIYLASRKVKELSVIDGRRAQNCIILLSKLKLSNEEIRQAILKMDEQEDLAKDMLEQLLKFIPEKSDIDLLEEHKHEIERMARADRFLYEMSRIDHYQQRLQALFFKKKFQERLAEAKPKVEAILLASRELVRSKRLRQMLEVILAIGNFMNKGQRGGAYGFRVASLNKIADTKSSIDRNISLLHYLIMILEKHFPDILNMPSELQHLPEAAKVNLAELEKEVGNLRRGLRAVEVELEYQRRQVREPSDKFVPVMSDFITVSSFSFSELEDQLNEARDKFAKALMHFGEHDSKMQPDEFFGIFDTFLQAFSEARQDLEAMRRRKEEEERRARMEAMLKEQRERERWQRQRKVLAAGSSLEEGGEFDDLVSALRSGEVFDKDLCKLKRSRKRSGSQALEVTRERAINRLNY

SEQ ID NO: 11867 - protein, 35 aa, Homo sapiens
MPPVSPTPRPAQRGLRGRDNLLLLSLPFPEHRGKP

SEQ ID NO: 11868 - protein, 12 aa, Homo sapiens
LFRAAVVSGDLV

SEQ ID NO: 11869 - protein, 8 aa, Homo sapiens
LSLKFLRL

SEQ ID NO: 11870 - protein, 108 aa, Homo sapiens
LSADAPWPAVTMAPRKRSHHGLGFLCCFGGSDIPEINLRDNHPLQFMEFSSPIPNAEELNIRFAELVDELDLTDKNREAMFALPPEKKWQIYCSKKKPCSRCWRNNSE

SEQ ID NO: 11871 - protein, 143 aa, Homo sapiens
LSADAPWPAVTMAPRKRSHHGLGFLCCFGGSDIPEINLRDNHPLQFMEFSSPIPNAEELNIRFAELVDELDLTDKNREAMFALPPEKKWQIYCSKKKVPSLTPLATSQGSWHGVALAALACSCIHLMFITCQPCSRCWRNNSE

SEQ ID NO: 11872 - protein, 665 aa, Homo sapiens
LSADAPWPAVTMAPRKRSHHGLGFLCCFGGSDIPEINLRDNHPLQFMEFSSPIPNAEELNIRFAELVDELDLTDKNREAMFALPPEKKWQIYCSKKKEQEDPNKLATSWPDYYIDRINSMAAMQSLYAFDEEETEMRNQVVEDLKTALRTQPMRFVTRFIELEGLTCLLNFLRSMDHATCESRIHTSLIGCIKALMNNSQGRAHVLAQPEAISTIAQSLRTENSKTKVAVLEILGAVCLVPGGHKKVLQAMLHYQVYAAERTRFQTLLNELDRSLGRYRDEVNLKTAIMSFINAVLNAGAGEDNLEFRLHLRYEFLMLGIQPVIDKLRQHENAILDKHLDFFEMVRNEDDLELARRFDMVHIDTKSASQMFELIHKKLKYTEAYPCLLSVLHHCLQMPYKRNGGYFQQWQLLDRILQQIVLQDERGVDPDLAPLENFNVKNIVNMLINENEVKQWRDQAEKFRKEHMELVSRLERKERECETKTLEKEEMMRTLNKMKDKLARESQELRQARGQVAELVAQLSELSTGPVSSPPPPGGPLTLSSSMTTNDLPPPPPPLPFACCPPPPPPPLPPGGPPTPPGAPPCLGMGLPLPQDPYPSSDVPLRKKRVPQPSHPLKSFNWVKLNEVSIWEGAGGPILLQQGSQPQGPPAPCLQISTLGPFFGGG

SEQ ID NO: 11873 - protein, 1088 aa, Homo sapiens
LSADAPWPAVTMAPRKRSHHGLGFLCCFGGSDIPEINLRDNHPLQFMEFSSPIPNAEELNIRFAELVDELDLTDKNREAMFALPPEKKWQIYCSKKKEQEDPNKLATSWPDYYIDRINSMAAMQSLYAFDEEETEMRNQVVEDLKTALRTQPMRFVTRFIELEGLTCLLNFLRSMDHATCESRIHTSLIGCIKALMNNSQGRAHVLAQPEAISTIAQSLRTENSKTKVAVLEILGAVCLVPGGHKKVLQAMLHYQVYAAERTRFQTLLNELDRSLGRYRDEVNLKTAIMSFINAVLNAGAGEDNLEFRLHLRYEFLMLGIQPVIDKLRQHENAILDKHLDFFEMVRNEDDLELARRFDMVHIDTKSASQMFELIHKKLKYTEAYPCLLSVLHHCLQMPYKRNGGYFQQWQLLDRILQQIVLQDERGVDPDLAPLENFNVKNIVNMLINENEVKQWRDQAEKFRKEHMELVSRLERKERECETKTLEKEEMMRTLNKMKDKLARESQELRQARGQVAELVAQLSELSTGPVSSPPPPGGPLTLSSSMTTNDLPPPPPPLPFACCPPPPPPPLPPGGPPTPPGAPPCLGMGLPLPQDPYPSSDVPLRKKRVPQPSHPLKSFNWVKLNEERVPGTVWNEIDDMQVFRILDLEDFEKMFSAYQRHQELITNPSQQKELGSTEDIYLASRKVKELSVIDGRRAQNCIILLSKLKLSNEEIRQAILKMDEQEDLAKDMLEQLLKFIPEKSDIDLLEEHKHEIERMARADRFLYEMSRIDHYQQRLQALFFKKKFQERLAEAKPKVEAILLASRELVRSKRLRQMLEVILAIGNFMNKGQRGGAYGFRVASLNKIADTKSSIDRNISLLHYLIMILEKHFPDILNMPSELQHLPEAAKVNLAELEKEVGNLRRGLRAVEVELEYQRRQVREPSDKFVPVMSDFITVSSFSFSELEDQLNEARDKFAKALMHFGEHDSKMQPDEFFGIFDTFLQAFSEARQDLEAMRRRKEEEERRARMEAMLKEQRERERWQRQRKVLAAGSSLEEGGEFDDLVSALRSGEVFDKDLCKLKRSRKRSGSQALEVTRERAINRLNY

SEQ ID NO: 11874 - protein, 8 aa, Homo sapiens
LLTPPGLQ

SEQ ID NO: 11875 - protein, 165 aa, Homo sapiens
VGQGAWWYTGKGVTICKVYTESYANICLLMALICRFVTRFIELEGLTCLLNFLRSMDHATCESRIHTSLIGCIKALMNNSQGRAHVLAQPEAISTIAQSLRTENSKTKVAVLEILGAVCLVPGGHKKVLQAMLHYQVYAAERTRFQVRGQAGGGMPAGWGRGCHM

SEQ ID NO: 11876 - protein, 91 aa, Homo sapiens
LTCWLQKELGSTEDIYLASRKVKELSVIDGRRAQNCIILLSKYVQKKVVELDAWGTKGVEERSGGSLGPLPLCCPLGGAGIDLELSLGNLP

SEQ ID NO: 11877 - protein, 11 aa, Homo sapiens
LHHPSFQVEAF

SEQ ID NO: 11878 - protein, 392 aa, Homo sapiens
LSWIEVGFCLRLKLSNEEIRQAILKMDEQEDLAKDMLEQLLKFIPEKSDIDLLEEHKHEIERMARADRFLYEMSRIDHYQQRLQALFFKKKFQERLAEAKPKVEAILLASRELVRSKRLRQMLEVILAIGNFMNKGQRGGAYGFRVASLNKIADTKSSIDRNISLLHYLIMILEKHFPDILNMPSELQHLPEAAKVNLAELEKEVGNLRRGLRAVEVELEYQRRQVREPSDKFVPVMSDFITVSSFSFSELEDQLNEARDKFAKALMHFGEHDSKMQPDEFFGIFDTFLQAFSEARQDLEAMRRRKEEEERRARMEAMLKEQRERERWQRQRKVLAAGSSLEEGGEFDDLVSALRSGEVFDKDLCKLKRSRKRSGSQALEVTRERAINRLNY

SEQ ID NO: 11879 - protein, 12 aa, Homo sapiens
LERSTALSRVPV

SEQ ID NO: 11880 - protein, 73 aa, Homo sapiens
LGRWGWRRKADILWGAHHLKVPRRKAERGATPFLVPNLVLQPNLQGVPSGPPIHCHLPFCPSHAGLGGWDGCI

SEQ ID NO: 11881 - protein, 464 aa, Homo sapiens
LGVHRASASWPFFSPHVRSFPATFSRKMPKFKAARGVGGQEKHAPLADQILAGNAVRAGVREKRRGRGTGEAEEEYVGPRLSRRILQQARQQQEELEAEHGTGDKPAAPRERTTRLGPRMPQDGSDDEDEEWPTLEKAATMTAAGHHAEVVVDPEDERAIEMFMNKNPPARRTLADIIMEKLTEKQTEVETVMSEVSGFPMPQLDPRVLEVYRGVREVLSKYRSGKLPKAFKIIPALSNWEQILYVTEPEAWTAAAMYQATRIFASNLKERMAQRFYNLVLLPRVRDDVAEYKRLNFHLYMALKKALFKPGAWFKGILIPLCESGTCTLREAIIVGSIITKCSIPVLHSSAAMLKIAEMEYSGANSIFLRLLLDKKYALPYRVLDALVFHFLGFRTEKRELPVLWHQCLLTLVQRYKADLATDQKEALLELLRLQPHPQLSPEIRRELQSAVPRDVEDVPITVE

SEQ ID NO: 11882 - protein, 155 aa, Homo sapiens
VRSFPATFSRKMPKFKAARGVGGQEKHAPLADQILAGNAVRAGVREKRRGRGTGEAEEEYVGPRLSRRILQQARQQQEELEAEHGTGDKPAAPRERTTRLGPRMPQDGSDDEDEEWPTLEKAATMTAAGHHAEVVVDPEDERAIEMFMNKNPPAR

SEQ ID NO: 11883 - protein, 154 aa, Homo sapiens
LPWDSRARTPALPVRCPSMELLCCEGTRHAPRAGPDPRLLGDQRVLQSLLRLEERYVPRASYFQCVQREIKPHMRKMLAYWMLEDWEVLVLGKLKWDLAAVIAHDFLAFILHRLSLPRDRQALVKKHAQTFLALCATGKSPMHIFAKLEKSEDL

SEQ ID NO: 11884 - protein, 110 aa, Homo sapiens
VETGSVRMPAGGERCNPLLAAGGCDHPHSPKAGSGGGGTERLRPQSVLRGGHLTRSVSRFPPPPGLLRRARLENPGLGRPRPGAGSCVFRGVLAGKAMGVARALFRPTGK

SEQ ID NO: 11885 - protein, 65 aa, Homo sapiens
VETGSVRMPAGGERCNPLLAAGGCDHPHSPKAGSGGGGTERLRPQSVLRGGHLTRSCSYRFKNHF

SEQ ID NO: 11886 - protein, 71 aa, Homo sapiens
VRDGYQMCGLEAAKVLELMKSCLLVAAREGDAHPLGALPVGTLINNVESEPGRGAQYIRAAGMGKGVAWVL

SEQ ID NO: 11887 - protein, 371 aa, Homo sapiens
LPRRRSRATRTHARDRTSSLVERLKMAASQAVEEMRSRVVLGEFGVRNVHTTDFPGNYSGYDDAWDQDRFEKNFRVDVVHMDENSLEFDMVGIDAAIANAFRRILLAEVPTMAVEKVLVYNNTSIVQDEILAHRLGLIPIHADPRLFEYRNQGDEEGTEIDTLQFRLQVRCTRNPHAAKDSSDPNELYVNHKVYTRHMTWIPLGNQADLFPEGTIRPVHDDILIAQLRPGQEIDLLMHCVKGIGKDHAKFSPVATASYRLLPDITLLEPVEGEAAEELSRCFSPGVIEVQEVQGKKVARVANPRLDTFSREIFRNEKLKKVVRLARVRDHYIFSVESTGVLPPDVLVSEAIKVLMGKCRRFLDELDAVQMD

SEQ ID NO: 11888 - protein, 72 aa, Homo sapiens
VYTRHMTWIPLGNQADLFPEGTIRPVHDDILIAQLRPGQEIDLLMHCVKGIGENPVCLPGKGDSSVAVGQAD

SEQ ID NO: 11889 - protein, 147 aa, Homo sapiens
VYTRHMTWIPLGNQADLFPEGTIRPVHDDILIAQLRPGQEIDLLMHCVKGIGKDHAKFSPVATASYRLLPDITLLEPVEGEAAEELSRCFSPGVIEVQEVQGKKVARVANPRLDTFSREIFRNEKLKKVVRLARVRDHYICEYEVVR

SEQ ID NO: 11890 - protein, 97 aa, Homo sapiens
LLPSGKLEKGIKKHGLFSLGKKVARVANPRLDTFSREIFRNEKLKKVVRLARVRDHYIFSVESTGVLPPDVLVSEAIKVLMGKCRRFLDELDAVQMD

SEQ ID NO: 11891 - protein, 45 aa, Homo sapiens
VSLWSPVSVESTGVLPPDVLVSEAIKVLMGKCRRFLDELDAVQMD

SEQ ID NO: 11892 - protein, 161 aa, Homo sapiens
LREAPCGPKAQLSPQVLSGTLLADAVTWLFTSVLKGLQMHGQHDGCMASLVHLAFQIYEALRPRYLEIRAVMEQIPEIQKDSLDQFDCKLLNPSLQKVADKRRKDQFKRLIAGCIGKPLGEQFRKEVHIKNLPSLFKKTKPMLETEVLDNDGGGLATIFEP

SEQ ID NO: 11893 - protein, 80 aa, Homo sapiens
VALGMAMDQVNALCEQLVKAVTVMMDPNSTQRYRLEALKFCEEFKEKCPICVPCGLRLAEKTQVAIVRHFGLQILEHVVK

SEQ ID NO: 11894 - protein, 247 aa, Homo sapiens
LRSGVMMPLAEAGALAQGGGPSATEWACILRRKTPRHKQPTLLMVRASRRSGKTSAVLKAGRQSVSGRKNSTSKDLVTLGASSLREERGHPLHPRHRKAVHLRTRGRTRGWVQTLARMSRRTRGPVERAAAAAAAAAGGDAGHAPFPPPPAADGARAPRSPGQVTPRGLRLRLPRRESLLRGLCRPLRPLLGFRESDSAKPASLRLLQHTPSARRNYRIAGARLMRSNYPPPLSSAALRGAGPTRRN

SEQ ID NO: 11895 - protein, 106 aa, Homo sapiens
VMMPLAEAGALAQGGGPSATEWACILRRLLRKEGVDGGLFSPEDPQAQAAHLTDGQSIQKKWQDFSCPQSRKTECFWQKEQHKQRSGNPRCLQFEGGERTPPPPQT

SEQ ID NO: 11896 - protein, 180 aa, Homo sapiens
VGLHSAEDLVTLGASSLREERGHPLHPRHRKAVHLRTRGRTRGWVQTLARMSRRTRGPVERAAAAAAAAAGGDAGHAPFPPPPAADGARAPRSPGQVTPRGLRLRLPRRESLLRGLCRPLRPLLGFRESDSAKPASLRLLQHTPSARRNYRIAGARLMRSNYPPPLSSAALRGAGPTRRN

SEQ ID NO: 11897 - protein, 754 aa, Homo sapiens
LTRGRRGQPIPPQPSIPSLRIGLVPASLGQMPEEVHHGEEEVETFAFQAEIAQLMSLIINTFYSNKEIFLRELISNASDALDKIRYESLTDPSKLDSGKELKIDIIPNPQERTLTLVDTGIGMTKADLINNLGTIAKSGTKAFMEALQAGADISMIGQFGVGFYSAYLVAEKVVVITKHNDDEQYAWESSAGGSFTVRADHGEPIGRGTKVILHLKEDQTEYLEERRVKEVVKKHSQFIGYPITLYLEKEREKEISDDEAEEEKGEKEEEDKDDEEKPKIEDVGSDEEDDSGKDKKKKTKKIKEKYIDQEELNKTKPIWTRNPDDITQEEYGEFYKSLTNDWEDHLAVKHFSVEGQLEFRALLFIPRRAPFDLFENKKKKNNIKLYVRRVFIMDSCDELIPEYLNFIRGVVDSEDLPLNISREMLQQSKILKVIRKNIVKKCLELFSELAEDKENYKKFYEAFSKNLKLGIHEDSTNRRRLSELLRYHTSQSGDEMTSLSEYVSRMKETQKSIYYITGESKEQVANSAFVERVRKRGFEVVYMTEPIDEYCVQQLKEFDGKSLVSVTKEGLELPEDEEEKKKMEESKAKFENLCKLMKEILDKKVEKVTISNRLVSSPCCIVTSTYGWTANMERIMKAQALRDNSTMGYMMAKKHLEINPDHPIVETLRQKAEADKNDKAVKDLVVLLFETALLSSGFSLEDPQTHSNRIYRMIKLGLGIDEDEVAAEEPNAAVPDEIPPLEGDEDASRMEEVD

SEQ ID NO: 11898 - protein, 212 aa, Homo sapiens
LPTVTAGWTWPALRTLSSLRAGPSEPHSPGRRPPRAGRPLCQADPQPGKAARRSLEPDPAQTGPRPARAAGMSEARKGPDEAEESQYDSGIESLRSLRSLPESTSAPASGPSDGSPQPCTHPPGPVKEPQEKEDADGERADSTYGSSSLTYTLSLLGGPEAEDPAPRLPLPHVGALSPQQLEALTYISEDGDTQHSIWLYIWTNRAQFGHWC

SEQ ID NO: 11899 - protein, 17 aa, Homo sapiens
MVNLRRSLPATETNRVI

SEQ ID NO: 11900 - protein, 79 aa, Homo sapiens
MVNLRRSLPATETNRVSECSLTTVYAVIFKAASSIYNRGYKFYLKKKGGTMASNSLFSTVTPCQQNFFWGEELKSRGVS

SEQ ID NO: 11901 - protein, 118 aa, Homo sapiens
MTQCSEERLIELDQYLDKDHYTLIDQSPVAAILPKEGKFDEVYEALTHAHPNLTVYKKEDVPERWHYKYNSRIQPIIAVADEGWHILQNKSDDFLCEYVTVFLSILHYFLLKYNSLNT

SEQ ID NO: 11902 - protein, 77 aa, Homo sapiens
MLPRSPPLPRGNLWWREEFGSFRAGVESSWEPPRDFGGGSSLAAGMAGTVVLDDVELREAQRDYLDFLDDEASEQCL

SEQ ID NO: 11903 - protein, 137 aa, Homo sapiens
LPPESRIDMYVEGTLDLLELLIMHPFLKPDDQQKEVVNMAQKAIIRYFPVFEKILRGHGQSFLVGNQLSLADVILLQTILALEEKIPNILSAFPFLQEYTVKLSNIPTIKRFLEPGSKKKPPPDEIYVRTVYNIFRP

SEQ ID NO: 11904 - protein, 5184 aa, Homo sapiens
LKGERKNIVSGIKMHSSSYSYRSSDSVFSNTTSTRTSLDSNENLLLVHCGPTLINSCISFGSESFDGHRLEMLQQIANRVQRDSVICEDKLILAGNALQSDSKRLESGVQFQNEAEIAGYILECENLLRQHVIDVQILIDGKYYQADQLVQRVAKLRDEIMALRNECSSVYSKGRILTTEQTKLMISGITQSLNSGFAQTLHPSLTSGLTQSLTPSLTSSSMTSGLSSGMTSRLTPSVTPAYTPGFPSGLVPNFSSGVEPNSLQTLKLMQIRKPLLKSSLLDQNLTEEEINMKFVQDLLNWVDEMQVQLDRTEWGSDLPSVESHLENHKNVHRAIEEFESSLKEAKISEIQMTAPLKLTYAEKLHRLESQYAKLLNTSRNQERHLDTLHNFVSRATNELIWLNEKEEEEVAYDWSERNTNIARKKDYHAELMRELDQKEENIKSVQEIAEQLLLENHPARLTIEAYRAAMQTQWSWILQLCQCVEQHIKENTAYFEFFNDAKEATDYLRNLKDAIQRKYSCDRSSSIHKLEDLVQESMEEKEELLQYKSTIANLMGKAKTIIQLKPRNSDCPLKTSIPIKAICDYRQIEITIYKDDECVLANNSHRAKWKVISPTGNEAMVPSVCFTVPPPNKEAVDLANRIEQQYQNVLTLWHESHINMKSVVSWHYLINEIDRIRASNVASIKTMLPGEHQQVLSNLQSRFEDFLEDSQESQVFSGSDITQLEKEVNVCKQYYQELLKSAEREEQEESVYNLYISEVRNIRLRLENCEDRLIRQIRTPLERDDLHESVFRITEQEKLKKELERLKDDLGTITNKCEEFFSQAAASSSVPTLRSELNVVLQNMNQVYSMSSTYIDKLKTVNLVLKNTQAAEALVKLYETKLCEEEAVIADKNNIENLISTLKQWRSEVDEKRQVFHALEDELQKAKAISDEMFKTYKERDLDFDWHKEKADQLVERWQNVHVQIDNRLRDLEGIGKSLKYYRDTYHPLDDWIQQVETTQRKIQENQPENSKTLATQLNQQKMLVSEIEMKQSKMDECQKYAEQYSATVKDYELQTMTYRAMVDSQQKSPVKRRRMQSSADLIIQEFMDLRTRYTALVTLMTQYIKFAGDSLKRLEEEEKSLEEEKKEHVEKAKELQKWVSNISKTLKDAEKAGKPPFSKQKISSEEISTKKEQLSEALQTIQLFLAKHGDKMTDEERNELEKQVKTLQESYNLLFSESLKQLQESQTSGDVKVEEKIVAERQQEYKEKLQGICDLLTQTENRLIGHQEAFMIGDGTVELKKYQSKQEELQKDMQGSAQALAEVVKNTENFLKENGEKLSQEDKALIEQKLNEAKIKCEQLNLKAEQSKKELDKVVTTAIKEETEKVAAVKQLEESKTKIENLLDWLSNVDKDSERAGTKHKQVIEQNGTHFQEGDGKSAIGEEDEVNGNLLETDVDGQVGTTQENLNQQYQKVKAQHEKIISQHQAVIIATQSAQVLLEKQGQYLSPEEKEKLQKNMKELKVHYETALAESEKKMKLTHSLQEELEKFDADYTEFEHWLQQSEQELENLEAGADDINGLMTKLKRQKSFSEDVISHKGDLRYITISGNRVLEAAKSCSKRDGGKVDTSATHREVQRKLDHATDRFRSLYSKCNVLGNNLKDLVDKYQHYEDASCGLLAGLQACEATASKHLSEPIAVDPKNLQRQLEETKALQGQISSQQVAVEKLKKTAEVLLDARGSLLPAKNDIQKTLDDIVGRYEDLSKSVNERNEKLQITLTRSLSVQDGLDEMLDWMGNVESSLKEQGQVPLNSTALQDIISKNIMLEQDIAGRQSSINAMNEKVKKFMETTDPSTASSLQAKMKDLSARFSEASHKHKETLAKMEELKTKVELFENLSEKLQTFLETKTQALTEVDVPGKDVTELSQYMQESTSEFLEHKKHLEVLHSLLKEISSHGLPSDKALVLEKTNNLSKKFKEMEDTIKEKKEAVTSCQEQLDAFQVLVKSLKSWIKETTKKVPIVQPSFGAEDLGKSLEDTKKLQEKWSLKTPEIQKVNNSGISLCNLISAVTTPAKAIAAVKSGGAVLNGEGTATNTEEFWANKGLTSIKKDMTDISHGYEDLGLLLKDKIAELNTKLSKLQKAQEESSAMMQWLQKMNKTATKWQQTPAPTDTEAVKTQVEQNKSFEAELKQNVNKVQELKDKLTELLEENPDTPEAPRWKQMLTEIDSKWQELNQLTIDRQQKLEESSNNLTQFQTVEAQLKQWLVEKELMVSVLGPLSIDPNMLNTQRQQVQILLQEFATRKPQYEQLTAAGQGILSRPGEDPSLRGIVKEQLAAVTQKWDSLTGQLSDRCDWIDQAIVKSTQYQSLLRSLSDKLSDLDNKLSSSLAVSTHPDAMNQQLETAQKMKQEIQQEKKQIKVAQALCEDLSALVKEEYLKAELSRQLEGILKSFKDVEQKAENHVQHLQSACASSHQFQQMSRDFQAWLDTKKEEQNKSHPISAKLDVLESLIKDHKDFSKTLTAQSHMYEKTIAEGENLLLKTQGSEKAALQLQLNTIKTNWDTFNKQVKERENKLKESLEKALKYKEQVETLWPWIDKCQNNLEEIKFCLDPAEGENSIAKLKSLQKEMDQHFGMVELLNNTANSLLSVCEIDKEVVTDENKSLIQKVDMVTEQLHSKKFCLENMTQKFKEFQEVSKESKRQLQCAKEQLDIHDSLGSQAYSNKYLTMLQTQQKSLQALKHQVDLAKRLAQDLVVEASDSKGTSDVLLQVETIAQEHSTLSQQVDEKCSFLETKLQGIGHFQNTIREMFSQFAEFDDELDSMAPVGRDAETLQKQKETIKAFLKKLEALMASNDNANKTCKMMLATEETSPDLVGIKRDLEALSKQCNKLLDRAQAREEQVEGTIKRLEEFYSKLKEFSILLQKAEEHEESQGPVGMETETINQQLNMFKVFQKEEIEPLQGKQQDVNWLGQGLIQSAAKSTSTQGLEHDLDDVNARWKTLNKKVAQRAAQLQEALLHCGRFQDALESLLSWMVDTEELVANQKPPSAEFKVVKAQIQEQKLLQRLLDDRKSTVEVIKREGEKIATTAEPADKVKILKQLSLLDSRWEALLNKAETRNRQLEGISVVAQQFHETLEPLNEWLTTIEKRLVNCEPIGTQASKLEEQIAQHKALEDDIINHNKHLHQAVSIGQSLKVLSSREDKDMVQSKLDFSQVWYIEIQEKSHSRSELLQQALCNAKIFGEDEVELMNWLNEVHDKLSKLSVQDYSTEGLWKQQSELRVLQEDILLRKQNVDQALLNGLELLKQTTGDEVLIIQDKLEAIKARYKDITKLSTDVAKTLEQALQLARRLHSTHEELCTWLDKVEVELLSYETQVLKGEEASQAQMRPKELKKEAKNNKALLDSLNEVSSALLELVPWRAREGLEKMVAEDNERYRLVSDTITQKVEEIDAAILRSQQFDQAADAELSWITETEKKLMSLGDIRLEQDQTSAQLQVQKTFTMEILRHKDIIDDLVKSGHKIMTACSEEEKQSMKKKLDKVLKNYDTICQINSERYLQLERAQSLVNQFWETYEELWPWLTETQSIISQLPAPALEYETLRQQQEEHRQLRELIAEHKPHIDKMNKTGPQLLELSPGEGFSIQEKYVAADTLYSQIKEDVKKRAVALDEAISQSTQFHDKIDQILESLERIVERLRQPPSISAEVEKIKEQISENKNVSVDMEKLQPLYETLKQRGEEMIARSGGTDKDISAKAVQDKLDQMVFIWENIHTLVEEREAKLLDVMELAEKFWCDHMSLIVTIKDTQDFIRDLEDPGIDPSVVKQQQEAAETIREEIDGLQEELDIVINLGSELIAACGEPDKPIVKKSIDELNSAWDSLNKAWKDRIDKLEEAMQAAVQYQDGLQAVFDWVDIAGGKLASMSPIGTDLETVKQQIEELKQFKSEAYQQQIEMERLNHQAELLLKKVTEESDKHTVQDPLMELKLIWDSLEERIINRQHKLEGALLALGQFQHALDELLAWLTHTEGLLSEQKPVGGDPKAIEIELAKHHVLQNDVLAHQSTVEAVNKAGNDLIESSAGEEASNLQNKLEVLNQRWQNVLEKTEQRKQQLDGALRQAKGFHGEIEDLQQWLTDTERHLLASKPLGGLPETAKEQLNVHMEVCAAFEAKEETYKSLMQKGQQMLARCPKSAETNIDQDINNLKEKWESVETKLNERKTKLEEALNLAMEFHNSLQDFINWLTQAEQTLNVASRPSLILDTVLFQIDEHKVFANEVNSHREQIIELDKTGTHLKYFSQKQDVVLIKNLLISVQSRWEKVVQRLVERGRSLDDARKRAKQFHEAWSKLMEWLEESEKSLDSELEIANDPDKIKTQLAQHKEFQKSLGAKHSVYDTTNRTGRSLKEKTSLADDNLKLDDMLSELRDKWDTICGKSVERQNKLEEALLFSGQFTDALQALIDWLYRVEPQLAEDQPVHGDIDLVMNLIDNHKAFQKELGKRTSSVQALKRSARELIEGSRDDSSWVKVQMQELSTRWETVCALSISKQTRLEAALRQAEEFHSVVHALLEWLAEAEQTLRFHGVLPDDEDALRTLIDQHKEFMKKLEEKRAELNKATTMGDTVLAICHPDSITTIKHWITIIRARFEEVLAWAKQHQQRLASALAGLIAKQELLEALLAWLQWAETTLTDKDKEVIPQEIEEVKALIAEHQTFMEEMTRKQPDVDKVTKTYKRRAADPSSLQSHIPVLDKGRAGRKRFPASSLYPSGSQTQIETKNPRVNLLVSKWQQVWLLALERRRKLNDALDRLEELREFANFDFDIWRKKYMRWMNHKKSRVMDFFRRIDKDQDGKITRQEFIDGILSSKFPTSRLEMSAVADIFDRDGDGYIDYYEFVAALHPNKDAYKPITDADKIEDEVTRQVAKCKCAKRFQVEQIGDNKYRFFLGNQFGDSQQLRLVRILRSTVMVRVGGGWMALDEFLVKNDPCRAKGRTNMELREKFILADGASQGMAAFRPRGRRSRPSSRGASPNRSTSVSSQAAQAASPQVPATTTPKILHPLTRNYGKPWLTNSKMSTPCKAAECSDFPVPSAEGTPIQGSKLRLPGYLSGKGFHSGEDSGLITTAAARVRTQFADSKKTPSRPGSRAGSKAGSRASSRRGSDASDFDISEIQSVCSDVETVPQTHRPTPRAGSRPSTAKPSKIPTPQRKSPASKLDKSSKR

SEQ ID NO: 11905 - protein, 5571 aa, Homo sapiens
LVAGPQATHFFRANLHVLKLPVYCFYDWRLGQEKMSSGNASYRCSMSSSADFSDEDDFSQKSGSASPAPGDTLPWNLPKHERSKRKIQGGSVLDPAERAVLRIADERDKVQKKTFTKWINQHLMKVRKHVNDLYEDLRDGHNLISLLEVLSGDTLPREKGRMRFHRLQNVQIALDYLKRRQVKLVNIRNDDITDGNPKLTLGLIWTIILHFQISDIHVTGESEDMSAKERLLLWTQQATEGYAGIRCENFTTCWRDGKLFNAIIHKYRPDLIDMNTVAVQSNLANLEHAFYVAEKIGVIRLLDPEDVDVSSPDEKSVITYVSSLYDAFPKVPEGGEGIGANDVEVKWIEYQNMVNYLIQWIRHHVTTMSERTFPNNPVELKALYNQYLQFKETEIPPKETEKSKIKRLYKLLEIWIEFGRIKLLQGYHPNDIEKEWGKLIIAMLEREKALRPEVERLEMLQQIANRVQRDSVICEDKLILAGNALQSDSKRLESGVQFQNEAEIAGYILECENLLRQHVIDVQILIDGKYYQADQLVQRVAKLRDEIMALRNECSSVYSKGRILTTEQTKLMISGITQSLNSGFAQTLHPSLTSGLTQSLTPSLTSSSMTSGLSSGMTSRLTPSVTPAYTPGFPSGLVPNFSSGVEPNSLQTLKLMQIRKPLLKSSLLDQNLTEEEINMKFVQDLLNWVDEMQVQLDRTEWGSDLPSVESHLENHKNVHRAIEEFESSLKEAKISEIQMTAPLKLTYAEKLHRLESQYAKLLNTSRNQERHLDTLHNFVSRATNELIWLNEKEEEEVAYDWSERNTNIARKKDYHAELMRELDQKEENIKSVQEIAEQLLLENHPARLTIEAYRAAMQTQWSWILQLCQCVEQHIKENTAYFEFFNDAKEATDYLRNLKDAIQRKYSCDRSSSIHKLEDLVQESMEEKEELLQYKSTIANLMGKAKTIIQLKPRNSDCPLKTSIPIKAICDYRQIEITIYKDDECVLANNSHRAKWKVISPTGNEAMVPSVCFTVPPPNKEAVDLANRIEQQYQNVLTLWHESHINMKSVVSWHYLINEIDRIRASNVASIKTMLPGEHQQVLSNLQSRFEDFLEDSQESQVFSGSDITQLEKEVNVCKQYYQELLKSAEREEQEESVYNLYISEVRNIRLRLENCEDRLIRQIRTPLERDDLHESVFRITEQEKLKKELERLKDDLGTITNKCEEFFSQAAASSSVPTLRSELNVVLQNMNQVYSMSSTYIDKLKTVNLVLKNTQAAEALVKLYETKLCEEEAVIADKNNIENLISTLKQWRSEVDEKRQVFHALEDELQKAKAISDEMFKTYKERDLDFDWHKEKADQLVERWQNVHVQIDNRLRDLEGIGKSLKYYRDTYHPLDDWIQQVETTQRKIQENQPENSKTLATQLNQQKMLVSEIEMKQSKMDECQKYAEQYSATVKDYELQTMTYRAMVDSQQKSPVKRRRMQSSADLIIQEFMDLRTRYTALVTLMTQYIKFAGDSLKRLEEEEKSLEEEKKEHVEKAKELQKWVSNISKTLKDAEKAGKPPFSKQKISSEEISTKKEQLSEALQTIQLFLAKHGDKMTDEERNELEKQVKTLQESYNLLFSESLKQLQESQTSGDVKVEEKIVAERQQEYKEKLQGICDLLTQTENRLIGHQEAFMIGDGTVELKKYQSKQEELQKDMQGSAQALAEVVKNTENFLKENGEKLSQEDKALIEQKLNEAKIKCEQLNLKAEQSKKELDKVVTTAIKEETEKVAAVKQLEESKTKIENLLDWLSNVDKDSERAGTKHKQVIEQNGTHFQEGDGKSAIGEEDEVNGNLLETDVDGQVGTTQENLNQQYQKVKAQHEKIISQHQAVIIATQSAQVLLEKQGQYLSPEEKEKLQKNMKELKVHYETALAESEKKMKLTHSLQEELEKFDADYTEFEHWLQQSEQELENLEAGADDINGLMTKLKRQKSFSEDVISHKGDLRYITISGNRVLEAAKSCSKRDGGKVDTSATHREVQRKLDHATDRFRSLYSKCNVLGNNLKDLVDKYQHYEDASCGLLAGLQACEATASKHLSEPIAVDPKNLQRQLEETKALQGQISSQQVAVEKLKKTAEVLLDARGSLLPAKNDIQKTLDDIVGRYEDLSKSVNERNEKLQITLTRSLSVQDGLDEMLDWMGNVESSLKEQGQVPLNSTALQDIISKNIMLEQDIAGRQSSINAMNEKVKKFMETTDPSTASSLQAKMKDLSARFSEASHKHKETLAKMEELKTKVELFENLSEKLQTFLETKTQALTEVDVPGKDVTELSQYMQESTSEFLEHKKHLEVLHSLLKEISSHGLPSDKALVLEKTNNLSKKFKEMEDTIKEKKEAVTSCQEQLDAFQVLVKSLKSWIKETTKKVPIVQPSFGAEDLGKSLEDTKKLQEKWSLKTPEIQKVNNSGISLCNLISAVTTPAKAIAAVKSGGAVLNGEGTATNTEEFWANKGLTSIKKDMTDISHGYEDLGLLLKDKIAELNTKLSKLQKAQEESSAMMQWLQKMNKTATKWQQTPAPTDTEAVKTQVEQNKSFEAELKQNVNKVQELKDKLTELLEENPDTPEAPRWKQMLTEIDSKWQELNQLTIDRQQKLEESSNNLTQFQTVEAQLKQWLVEKELMVSVLGPLSIDPNMLNTQRQQVQILLQEFATRKPQYEQLTAAGQGILSRPGEDPSLRGIVKEQLAAVTQKWDSLTGQLSDRCDWIDQAIVKSTQYQSLLRSLSDKLSDLDNKLSSSLAVSTHPDAMNQQLETAQKMKQEIQQEKKQIKVAQALCEDLSALVKEEYLKAELSRQLEGILKSFKDVEQKAENHVQHLQSACASSHQFQQMSRDFQAWLDTKKEEQNKSHPISAKLDVLESLIKDHKDFSKTLTAQSHMYEKTIAEGENLLLKTQGSEKAALQLQLNTIKTNWDTFNKQVKERENKLKESLEKALKYKEQVETLWPWIDKCQNNLEEIKFCLDPAEGENSIAKLKSLQKEMDQHFGMVELLNNTANSLLSVCEIDKEVVTDENKSLIQKVDMVTEQLHSKKFCLENMTQKFKEFQEVSKESKRQLQCAKEQLDIHDSLGSQAYSNKYLTMLQTQQKSLQALKHQVDLAKRLAQDLVVEASDSKGTSDVLLQVETIAQEHSTLSQQVDEKCSFLETKLQGIGHFQNTIREMFSQFAEFDDELDSMAPVGRDAETLQKQKETIKAFLKKLEALMASNDNANKTCKMMLATEETSPDLVGIKRDLEALSKQCNKLLDRAQAREEQVEGTIKRLEEFYSKLKEFSILLQKAEEHEESQGPVGMETETINQQLNMFKVFQKEEIEPLQGKQQDVNWLGQGLIQSAAKSTSTQGLEHDLDDVNARWKTLNKKVAQRAAQLQEALLHCGRFQDALESLLSWMVDTEELVANQKPPSAEFKVVKAQIQEQKLLQRLLDDRKSTVEVIKREGEKIATTAEPADKVKILKQLSLLDSRWEALLNKAETRNRQLEGISVVAQQFHETLEPLNEWLTTIEKRLVNCEPIGTQASKLEEQIAQHKALEDDIINHNKHLHQAVSIGQSLKVLSSREDKDMVQSKLDFSQVWYIEIQEKSHSRSELLQQALCNAKIFGEDEVELMNWLNEVHDKLSKLSVQDYSTEGLWKQQSELRVLQEDILLRKQNVDQALLNGLELLKQTTGDEVLIIQDKLEAIKARYKDITKLSTDVAKTLEQALQLARRLHSTHEELCTWLDKVEVELLSYETQVLKGEEASQAQMRPKELKKEAKNNKALLDSLNEVSSALLELVPWRAREGLEKMVAEDNERYRLVSDTITQKVEEIDAAILRSQQFDQAADAELSWITETEKKLMSLGDIRLEQDQTSAQLQVQKTFTMEILRHKDIIDDLVKSGHKIMTACSEEEKQSMKKKLDKVLKNYDTICQINSERYLQLERAQSLVNQFWETYEELWPWLTETQSIISQLPAPALEYETLRQQQEEHRQLRELIAEHKPHIDKMNKTGPQLLELSPGEGFSIQEKYVAADTLYSQIKEDVKKRAVALDEAISQSTQFHDKIDQILESLERIVERLRQPPSISAEVEKIKEQISENKNVSVDMEKLQPLYETLKQRGEEMIARSGGTDKDISAKAVQDKLDQMVFIWENIHTLVEEREAKLLDVMELAEKFWCDHMSLIVTIKDTQDFIRDLEDPGIDPSVVKQQQEAAETIREEIDGLQEELDIVINLGSELIAACGEPDKPIVKKSIDELNSAWDSLNKAWKDRIDKLEEAMQAAVQYQDGLQAVFDWVDIAGGKLASMSPIGTDLETVKQQIEELKQFKSEAYQQQIEMERLNHQAELLLKKVTEESDKHTVQDPLMELKLIWDSLEERIINRQHKLEGALLALGQFQHALDELLAWLTHTEGLLSEQKPVGGDPKAIEIELAKHHVLQNDVLAHQSTVEAVNKAGNDLIESSAGEEASNLQNKLEVLNQRWQNVLEKTEQRKQQLDGALRQAKGFHGEIEDLQQWLTDTERHLLASKPLGGLPETAKEQLNVHMEVCAAFEAKEETYKSLMQKGQQMLARCPKSAETNIDQDINNLKEKWESVETKLNERKTKLEEALNLAMEFHNSLQDFINWLTQAEQTLNVASRPSLILDTVLFQIDEHKVFANEVNSHREQIIELDKTGTHLKYFSQKQDVVLIKNLLISVQSRWEKVVQRLVERGRSLDDARKRAKQFHEAWSKLMEWLEESEKSLDSELEIANDPDKIKTQLAQHKEFQKSLGAKHSVYDTTNRTGRSLKEKTSLADDNLKLDDMLSELRDKWDTICGKSVERQNKLEEALLFSGQFTDALQALIDWLYRVEPQLAEDQPVHGDIDLVMNLIDNHKAFQKELGKRTSSVQALKRSARELIEGSRDDSSWVKVQMQELSTRWETVCALSISKQTRLEAALRQAEEFHSVVHALLEWLAEAEQTLRFHGVLPDDEDALRTLIDQHKEFMKKLEEKRAELNKATTMGDTVLAICHPDSITTIKHWITIIRARFEEVLAWAKQHQQRLASALAGLIAKQELLEALLAWLQWAETTLTDKDKEVIPQEIEEVKALIAEHQTFMEEMTRKQPDVDKVTKTYKRRAADPSSLQSHIPVLDKGRAGRKRFPASSLYPSGSQTQIETKNPRVNLLVSKWQQVWLLALERRRKLNDALDRLEELREFANFDFDIWRKKYMRWMNHKKSRVMDFFRRIDKDQDGKITRQEFIDGILSSKFPTSRLEMSAVADIFDRDGDGYIDYYEFVAALHPNKDAYKPITDADKIEDEVTRQVAKCKCAKRFQVEQIGDNKYRFFLGNQFGDSQQLRLVRILRSTVMVRVGGGWMALDEFLVKNDPCRAKGRTNMELREKFILADGASQGMAAFRPRGRRSRPSSRGASPNRSTSVSSQAAQAASPQVPATTTPKILHPLTRNYGKPWLTNSKMSTPCKAAECSDFPVPSAEGTPIQGSKLRLPGYLSGKGFHSGEDSGLITTAAARVRTQFADSKKTPSRPGSRAGSKAGSRASSRRGSDASDFDISEIQSVCSDVETVPQTHRPTPRAGSRPSTAKPSKIPTPQRKSPASKLDKSSKR

SEQ ID NO: 11906 - protein, 465 aa, Homo sapiens
LRPFPETDSSFGEQKAPAMQPWHGKAMQRASEAGATAPKASARNARGAPMDPTESPAAPEAALPKAGKFGPARKSGSRQKKSAPDTQERPPVRATGARAKKAPQRAQDTQPSDATSAPGAEGLEPPAAREPALSRAGSCRQRGARCSTKPRPPPGPWDVPSPGLPVSAPILVRRDAAPGASKLRAVLEKLKLSRDDISTAAGMVKGVVDHLLLRLKCDSAFRGVGLLNTGSYYEHVKISAPNEFDVMFKLEVPRIQLEEYSNTRAYYFVKFKRNPKENPLSQFLEGEILSASKMLSKFRKIIKEEINDIKDTDVIMKRKRGGSPAVTLLISEKISVDITLALESKSSWPASTQEGLRIQNWLSAKVRKQLRLKPFYLVPKHAKEGNGFQEETWRLSFSHIEKEILNNHGKSKTCCENKEEKCCRKDCLKLMKYLLEQLKERFKDKKHLDKFSSYHVKTAFFHRLY

SEQ ID NO: 11907 - protein, 551 aa, Homo sapiens
LVSNSCCWLFLLRPFPETDSSFGEQKAPAMQPWHGKAMQRASEAGATAPKASARNARGAPMDPTESPAAPEAALPKAGKFGPARKSGSRQKKSAPDTQERPPVRATGARAKKAPQRAQDTQPSDATSAPGAEGLEPPAAREPALSRAGSCRQRGARCSTKPRPPPGPWDVPSPGLPVSAPILVRRDAAPGASKLRAVLEKLKLSRDDISTAAGMVKGVVDHLLLRLKCDSAFRGVGLLNTGSYYEHVKISAPNEFDVMFKLEVPRIQLEEYSNTRAYYFVKFKRNPKENPLSQFLEGEILSASKMLSKFRKIIKEEINDIKDTDVIMKRKRGGSPAVTLLISEKISVDITLALESKSSWPASTQEGLRIQNWLSAKVRKQLRLKPFYLVPKHAKEGNGFQEETWRLSFSHIEKEILNNHGKSKTCCENKEEKCCRKDCLKLMKYLLEQLKERFKDKKHLDKFSSYHVKTAFFHVCTQNPQDSQWDRKDLGLCFDNCVTYFLQCLRTEKLENYFIPEFNLFSSNLIDKRSKEFLTKQIEYERNNEFPVFDEF

SEQ ID NO: 11908 - protein, 121 aa, Homo sapiens
LSQFLEGEILSASKMLSKFRKIIKEEINDIKDTDVIMKRKRGGSPAVTLLISEKISVDITLALESKSSWPASTQEGLRIQNWLSAKVRKQLRLKPFYLVPKHAKEGNGFQGILNIKVNLKK

SEQ ID NO: 11909 - protein, 103 aa, Homo sapiens
LIRMPYGCGEQNMINFAPNIYILDYLTKKKQLTDNLKEKALSFMRQGYQRELLYQREDGSFSAFGNYDPSGSTCRGLCSCQRVHVSKRRLQVCHSPERGGWSL

SEQ ID NO: 11910 - protein, 16 aa, Homo sapiens
LINNRALLWGSIFIDL

SEQ ID NO: 11911 - protein, 89 aa, Homo sapiens
LQNELGAWGRLTVAETSPLRRGGCGHFTAWDEGRRVCVLAFILLSWEPTAGGSFSGSLGGRWMGSRGPRGTGPGKRRRRRRRSRSPGEA

SEQ ID NO: 11912 - protein, 1301 aa, Homo sapiens
VDPPSKMEDGKPVWAPHPTDGFQMGNIVDIGPDSLTIEPLNQKGKTFLALINQVFPAEEDSKKDVEDNCSLMYLNEATLLHNIKVRYSKDRIYTYVANILIAVNPYFDIPKIYSSEAIKSYQGKSLGTRPPHVFAIADKAFRDMKVLKMSQSIIVSGESGAGKTENTKFVLRYLTESYGTGQDIDDRIVEANPLLEAFGNAKTVRNNNSSRFGKFVEIHFNEKSSVVGGFVSHYLLEKSRICVQGKEERNYHIFYRLCAGASEDIREKLHLSSPDNFRYLNRGCTRYFANKETDKQILQNRKSPEYLKAGSMKDPLLDDHGDFIRMCTAMKKIGLDDEEKLDLFRVVAGVLHLGNIDFEEAGSTSGGCNLKNKSAQSLEYCAELLGLDQDDLRVSLTTRVMLTTAGGTKGTVIKVPLKVEQANNARDALAKTVYSHLFDHVVNRVNQCFPFETSSYFIGVLDIAGFEYFEHNSFEQFCINYCNEKLQQFFNERILKEEQELYQKEGLGVNEVHYVDNQDCIDLIEAKLVGILDILDEENRLPQPSDQHFTSAVHQKHKDHFRLTIPRKSKLAVHRNIRDDEGFIIRHFAGAVCYETTQFVEKNNDALHMSLESLICESRDKFIRELFESSTNNNKDTKQKAGKLSFISVGNKFKTQLNLLLDKLRSTGASFIRCIKPNLKMTSHHFEGAQILSQLQCSGMVSVLDLMQGGYPSRASFHELYNMYKKYMPDKLARLDPRLFCKALFKALGLNENDYKFGLTKVFFRPGKFAEFDQIMKSDPDHLAELVKRVNHWLTCSRWKKVQWCSLSVIKLKNKIKYRAEACIKMQKTIRMWLCKRRHKPRIDGLVKVGTLKKRLDKFNEVVSVLKDGKPEMNKQIKNLEISIDTLMAKIKSTMMTQEQIQKEYDALVKSSEELLSALQKKKQQEEEAERLRRIQEEMEKERKRREEDEKRRRKEEEERRMKLEMEAKRKQEEEERKKREDDEKRIQAEVEAQLARQKEEESQQQAVLEQERRDRELALRIAQSEAELISDEAQADLALRRYLDSYPVTSKNDGTRPKMTPEQMAKEMSEFLSRGPAVLATKAAAGTKKYDLSKWKYAELRDTINTSCDIELLAACREEFHRRLKVYHAWKSKNKKRNTETEQRAPKSVTDYDFAPFLNNSPQQNPAAQIPARQREIEMNRQQRFFRIPFIRPADQYKDPQSKKKGWWYAHFDGPWIARQMELHPDKPPILLVAGKDDMEMCELNLEETGLTRKRGAEILPRQFEEIWERCGGIQYLQNAIESRQARPTYATAMLQSLLK

SEQ ID NO: 11913 - protein, 1268 aa, Homo sapiens
VDPPSKMEDGKPVWAPHPTDGFQMGNIVDIGPDSLTIEPLNQKGKTFLALINQVFPAEEDSKKDVEDNCSLMYLNEATLLHNIKVRYSKDRIYTYVANILIAVNPYFDIPKIYSSEAIKSYQGKSLGTRPPHVFAIADKAFRDMKVLKMSQSIIVSGESGAGKTENTKFVLRYLTESYGTGQDIDDRIVEANPLLEAFGNAKTVRNNNSSRFGKFVEIHFNEKSSVVGGFVSHYLLEKSRICVQGKEERNYHIFYRLCAGASEDIREKLHLSSPDNFRYLNRGCTRYFANKETDKQILQNRKSPEYLKAGSMKDPLLDDHGDFIRMCTAMKKIGLDDEEKLDLFRVVAGVLHLGNIDFEEAGSTSGGCNLKNKSAQSLEYCAELLGLDQDDLRVSLTTRVMLTTAGGTKGTVIKVPLKVEQANNARDALAKTVYSHLFDHVVNRVNQCFPFETSSYFIGVLDIAGFEYFEHNSFEQFCINYCNEKLQQFFNERILKEEQELYQKEGLGVNEVHYVDNQDCIDLIEAKLVGILDILDEENRLPQPSDQHFTSAVHQKHKDHFRLTIPRKSKLAVHRNIRDDEGFIIRHFAGAVCYETTQFVEKNNDALHMSLESLICESRDKFIRELFESSTNNNKDTKQKAGKLSFISVGNKFKTQLNLLLDKLRSTGASFIRCIKPNLKMTSHHFEGAQILSQLQCSGMVSVLDLMQGGYPSRASFHELYNMYKKYMPDKLARLDPRLFCKALFKALGLNENDYKFGLTKVFFRPGKFAEFDQIMKSDPDHLAELVKRVNHWLTCSRWKKVQWCSLSVIKLKNKIKYRAEACIKMQKTIRMWLCKRRHKPRIDGLVKVGTLKKRLDKFNEVVSVLKDGKPEMNKQIKNLEISIDTLMAKIKSTMMTQEQIQKEYDALVKSSEELLSALQKKKQQEEEAERLRRIQEEMEKERKRREEDEKRRRKEEEERRMKLEMEAKRKQEEEERKKREDDEKRIQAEVEAQLARQKEEESQQQAVLEQERRDRELALRIAQSEAELISDEAQADLALRRGPAVLATKAAAGTKKYDLSKWKYAELRDTINTSCDIELLAACREEFHRRLKVYHAWKSKNKKRNTETEQRAPKSVTDYDFAPFLNNSPQQNPAAQIPARQREIEMNRQQRFFRIPFIRPADQYKDPQSKKKGWWYAHFDGPWIARQMELHPDKPPILLVAGKDDMEMCELNLEETGLTRKRGAEILPRQFEEIWERCGGIQYLQNAIESRQARPTYATAMLQSLLK

SEQ ID NO: 11914 - protein, 1291 aa, Homo sapiens
VDPPSKMEDGKPVWAPHPTDGFQMGNIVDIGPDSLTIEPLNQKGKTFLALINQVFPAEEDSKKDVEDNCSLMYLNEATLLHNIKVRYSKDRIYTYVANILIAVNPYFDIPKIYSSEAIKSYQGKSLGTRPPHVFAIADKAFRDMKVLKMSQSIIVSGESGAGKTENTKFVLRYLTESYGTGQDIDDRIVEANPLLEAFGNAKTVRNNNSSRFGKFVEIHFNEKSSVVGGFVSHYLLEKSRICVQGKEERNYHIFYRLCAGASEDIREKLHLSSPDNFRYLNRGCTRYFANKETDKQILQNRKSPEYLKAGSMKDPLLDDHGDFIRMCTAMKKIGLDDEEKLDLFRVVAGVLHLGNIDFEEAGSTSGGCNLKNKSAQSLEYCAELLGLDQDDLRVSLTTRVMLTTAGGTKGTVIKVPLKVEQANNARDALAKTVYSHLFDHVVNRVNQCFPFETSSYFIGVLDIAGFEYFEHNSFEQFCINYCNEKLQQFFNERILKEEQELYQKEGLGVNEVHYVDNQDCIDLIEAKLVGILDILDEENRLPQPSDQHFTSAVHQKHKDHFRLTIPRKSKLAVHRNIRDDEGFIIRHFAGAVCYETTQFVEKNNDALHMSLESLICESRDKFIRELFESSTNNNKDTKQKAGKLSFISVGNKFKTQLNLLLDKLRSTGASFIRCIKPNLKMTSHHFEGAQILSQLQCSGMVSVLDLMQGGYPSRASFHELYNMYKKYMPDKLARLDPRLFCKALFKALGLNENDYKFGLTKVFFRPGKFAEFDQIMKSDPDHLAELVKRVNHWLTCSRWKKVQWCSLSVIKLKNKIKYRAEACIKMQKTIRMWLCKRRHKPRIDGLVKVGTLKKRLDKFNEVVSVLKDGKPEMNKQIKNLEISIDTLMAKIKSTMMTQEQIQKEYDALVKSSEELLSALQKKKQQEEEAERLRRIQEEMEKERKRREEDEKRRRKEEEERRMKLEMEAKRKQEEEERKKREDDEKRIQAEVEAQLARQKEEESQQQAVLEQERRDRELALRIAQSEAELISDEAQADLALRRNDGTRPKMTPEQMAKEMSEFLSRGPAVLATKAAAGTKKYDLSKWKYAELRDTINTSCDIELLAACREEFHRRLKVYHAWKSKNKKRNTETEQRAPKSVTDYDFAPFLNNSPQQNPAAQIPARQREIEMNRQQRFFRIPFIRPADQYKDPQSKKKGWWYAHFDGPWIARQMELHPDKPPILLVAGKDDMEMCELNLEETGLTRKRGAEILPRQFEEIWERCGGIQYLQNAIESRQARPTYATAMLQSLLK

SEQ ID NO: 11915 - protein, 1259 aa, Homo sapiens
VDPPSKMEDGKPVWAPHPTDGFQMGNIVDIGPDSLTIEPLNQKGKTFLALINQVFPAEEDSKKDVEDNCSLMYLNEATLLHNIKVRYSKDRIYTYVANILIAVNPYFDIPKIYSSEAIKSYQGKSLGTRPPHVFAIADKAFRDMKVLKMSQSIIVSGESGAGKTENTKFVLRYLTESYGTGQDIDDRIVEANPLLEAFGNAKTVRNNNSSRFGKFVEIHFNEKSSVVGGFVSHYLLEKSRICVQGKEERNYHIFYRLCAGASEDIREKLHLSSPDNFRYLNRGCTRYFANKETDKQILQNRKSPEYLKAGSMKDPLLDDHGDFIRMCTAMKKIGLDDEEKLDLFRVVAGVLHLGNIDFEEAGSTSGGCNLKNKSAQSLEYCAELLGLDQDDLRVSLTTRVMLTTAGGTKGTVIKVPLKVEQANNARDALAKTVYSHLFDHVVNRVNQCFPFETSSYFIGVLDIAGFEYFEHNSFEQFCINYCNEKLQQFFNERILKEEQELYQKEGLGVNEVHYVDNQDCIDLIEAKLVGILDILDEENRLPQPSDQHFTSAVHQKHKDHFRLTIPRKSKLAVHRNIRDDEGFIIRHFAGAVCYETTQFVEKNNDALHMSLESLICESRDKFIRELFESSTNNNKDTKQKAGKLSFISVGNKFKTQLNLLLDKLRSTGASFIRCIKPNLKMTSHHFEGAQILSQLQCSGMVSVLDLMQGGYPSRASFHELYNMYKKYMPDKLARLDPRLFCKALFKALGLNENDYKFGLTKVFFRPGKFAEFDQIMKSDPDHLAELVKRVNHWLTCSRWKKVQWCSLSVIKLKNKIKYRAEACIKMQKTIRMWLCKRRHKPRIDGLVKVGTLKKRLDKFNEVVSVLKDGKPEMNKQIKNLEISIDTLMAKIKSTMMTQEQIQKEYDALVKSSEELLSALQKKKQQEEEAERLRRIQEEMEKERKRREEDEKRRRKEEEERRMKLEMEAKRKQEEEERKKREDDEKRIQAEVEAQLARQKEEESQQQAVLEQERRDRELALRIAQSEAELISDEAQADLALRRGPAVLATKAAAGTKKYDLSKWKYAELRDTINTSCDIELLAACREEFHRRLKVYHAWKSKNKKRNTETEQRAPKSVTDYAQQNPAAQIPARQREIEMNRQQRFFRIPFIRPADQYKDPQSKKKGWWYAHFDGPWIARQMELHPDKPPILLVAGKDDMEMCELNLEETGLTRKRGAEILPRQFEEIWERCGGIQYLQNAIESRQARPTYATAMLQSLLK

SEQ ID NO: 11916 - protein, 1300 aa, Homo sapiens
VDPPSKMEDGKPVWAPHPTDGFQMGNIVDIGPDSLTIEPLNQKGKTFLALINQVFPAEEDSKKDVEDNCSLMYLNEATLLHNIKVRYSKDRIYTYVANILIAVNPYFDIPKIYSSEAIKSYQGKSLGTRPPHVFAIADKAFRDMKVLKMSQSIIVSGESGAGKTENTKFVLRYLTESYGTGQDIDDRIVEANPLLEAFGNAKTVRNNNSSRFGKFVEIHFNEKSSVVGGFVSHYLLEKSRICVQGKEERNYHIFYRLCAGASEDIREKLHLSSPDNFRYLNRGCTRYFANKETDKQILQNRKSPEYLKAGSMKDPLLDDHGDFIRMCTAMKKIGLDDEEKLDLFRVVAGVLHLGNIDFEEAGSTSGGCNLKNKSAQSLEYCAELLGLDQDDLRVSLTTRVMLTTAGGTKGTVIKVPLKVEQANNARDALAKTVYSHLFDHVVNRVNQCFPFETSSYFIGVLDIAGFEYFEHNSFEQFCINYCNEKLQQFFNERILKEEQELYQKEGLGVNEVHYVDNQDCIDLIEAKLVGILDILDEENRLPQPSDQHFTSAVHQKHKDHFRLTIPRKSKLAVHRNIRDDEGFIIRHFAGAVCYETTQFVEKNNDALHMSLESLICESRDKFIRELFESSTNNNKDTKQKAGKLSFISVGNKFKTQLNLLLDKLRSTGASFIRCIKPNLKMTSHHFEGAQILSQLQCSGMVSVLDLMQGGYPSRASFHELYNMYKKYMPDKLARLDPRLFCKALFKALGLNENDYKFGLTKVFFRPGKFAEFDQIMKSDPDHLAELVKRVNHWLTCSRWKKVQWCSLSVIKLKNKIKYRAEACIKMQKTIRMWLCKRRHKPRIDGLVKVGTLKKRLDKFNEVVSVLKDGKPEMNKQIKNLEISIDTLMAKIKSTMMTQEQIQKEYDALVKSSEELLSALQKKKQQEEEAERLRRIQEEMEKERKRREEDEKRRRKEEEERRMKLEMEAKRKQEEEERKKREDDEKRIQAEVEAQLARQKEEESQQQAVLEQERRDRELALRIAQSEAELISDEAQADLALRSLDSYPVTSKNDGTRPKMTPEQMAKEMSEFLSRGPAVLATKAAAGTKKYDLSKWKYAELRDTINTSCDIELLAACREEFHRRLKVYHAWKSKNKKRNTETEQRAPKSVTDYDFAPFLNNSPQQNPAAQIPARQREIEMNRQQRFFRIPFIRPADQYKDPQSKKKGWWYAHFDGPWIARQMELHPDKPPILLVAGKDDMEMCELNLEETGLTRKRGAEILPRQFEEIWERCGGIQYLQNAIESRQARPTYATAMLQSLLK

SEQ ID NO: 11917 - protein, 137 aa, Homo sapiens
LPAARSWVQLCVHASPEPGGQGVCPGRSERMVIRVFIASSSGFVAIKKKQQDVVRFLEANKIEFEEVDITMSEEQRQWMYKNVPPEKKPTQGNPLPPQIFNGDRYCGDYDSFFESKESNTVFSFLGLKPRLASKAEP

SEQ ID NO: 11918 - protein, 885 aa, Homo sapiens
VIATGKFKRVCGKEFGFHLFISPAQLSVEMESEDLSGRELTIDSIMNKVRDIKNKFKNEDLTDELSLNKISADTTDNSGTVNQIMMMANNPEDWLSLLLKLEKNSVPLSDALLNKLIGRYSQAIEALPPDKYGQNESFARIQVRFAELKAIQEPDDARDYFQMARANCKKFAFVHISFAQFELSQGNVKKSKQLLQKAVERGAVPLEMLEIALRNLNLQKKQLLSEEEKKNLSASTVLTAQESFSGSLGHLQNRNNSCDSRGQTTKARFLYGENMPPQDAEIGYRNSLRQTNKTKQSCPFGRVPVNLLNSPDCDVKTDDSVVPCFMKRQTSRSECRDLVVPGSKPSGNDSCELRNLKSVQNSHFKEPLVSDEKSSELIITDSITLKNKTESSLLAKLEETKEYQEPEVPESNQKQWQSKRKSECINQNPAASSNHWQIPELARKVNTEKHTTFEQPVFSVSKQSPPISTSKWFDPKSICKTPSSNTLDDYMSCFRTPVVKNDFPPACQLSTPYGQPACFQQQQHQILATPLQNLQVLASSSANECISVKGRIYSILKQIGSGGSSKVFQVLNEKKQIYAIKYVNLEEADNQTLDSYRNEIAYLNKLQQHSDKIIRLYDYEITDQYIYMVMECGNIDLNSWLKKKKSIDPWERKSYWKNMLEAVHTIHQHGIVHSDLKPANFLIVDGMLKLIDFGIANQMQPDTTSVVKDSQVGTVNYMPPEAIKDMSSSRENGKSKSKISPKSDVWSLGCILYYMTYGKTPFQQIINQISKLHAIIDPNHEIEFPDIPEKDLQDVLKCCLKRDPKQRISIPELLAHPYVQIQTHPVNQMAKGTTEEMKYVLGQLVGLNSPNSILKAAKTLYEHYSGGESHNSSSSKTFEKKRGKK

SEQ ID NO: 11919 - protein, 889 aa, Homo sapiens
VIATGKFKRVCGKEFGFHLFISPAQLSVVFFLEMESEDLSGRELTIDSIMNKVRDIKNKFKNEDLTDELSLNKISADTTDNSGTVNQIMMMANNPEDWLSLLLKLEKNSVPLSDALLNKLIGRYSQAIEALPPDKYGQNESFARIQVRFAELKAIQEPDDARDYFQMARANCKKFAFVHISFAQFELSQGNVKKSKQLLQKAVERGAVPLEMLEIALRNLNLQKKQLLSEEEKKNLSASTVLTAQESFSGSLGHLQNRNNSCDSRGQTTKARFLYGENMPPQDAEIGYRNSLRQTNKTKQSCPFGRVPVNLLNSPDCDVKTDDSVVPCFMKRQTSRSECRDLVVPGSKPSGNDSCELRNLKSVQNSHFKEPLVSDEKSSELIITDSITLKNKTESSLLAKLEETKEYQEPEVPESNQKQWQSKRKSECINQNPAASSNHWQIPELARKVNTEKHTTFEQPVFSVSKQSPPISTSKWFDPKSICKTPSSNTLDDYMSCFRTPVVKNDFPPACQLSTPYGQPACFQQQQHQILATPLQNLQVLASSSANECISVKGRIYSILKQIGSGGSSKVFQVLNEKKQIYAIKYVNLEEADNQTLDSYRNEIAYLNKLQQHSDKIIRLYDYEITDQYIYMVMECGNIDLNSWLKKKKSIDPWERKSYWKNMLEAVHTIHQHGIVHSDLKPANFLIVDGMLKLIDFGIANQMQPDTTSVVKDSQVGTVNYMPPEAIKDMSSSRENGKSKSKISPKSDVWSLGCILYYMTYGKTPFQQIINQISKLHAIIDPNHEIEFPDIPEKDLQDVLKCCLKRDPKQRISIPELLAHPYVQIQTHPVNQMAKGTTEEMKYVLGQLVGLNSPNSILKAAKTLYEHYSGGESHNSSSSKTFEKKRGKK

SEQ ID NO: 11920 - protein, 886 aa, Homo sapiens [sequence omitted]

SEQ ID NO: 11921 - protein, 168 aa, Homo sapiens
LNKISADTTDNSGTVNQIMMMANNPEDWLSLLLKLEKNSVPLSDALLNKLIGRYSQAIEALPPDKYGQNESFARIQVRFAELKAIQEPDDARDYFQMARANCKKFAFVHISFAQFELSQGNVKKSKQLLQKAVERGAVPLEMLEIALRNLNLQKKQLLSEEEKKNLSE

SEQ ID NO: 11922 - protein, 486 aa, Homo sapiens
LLSERARSSWKCCRLSVSLSLAALLEGAAASRTDQGQVALGGHYMAEGEGYFAMSEDELACSPYIPLGGDFGGGDFGGGDFGGGDFGGGGSFGGHCLDYCESPTAHCNVLNWEQVQRLDGILSETIPIHGRGNFPTLELQPSLIVKVVRRRLAEKRIGVRDVRLNGSAASHVLHQDSGLGYKDLDLIFCADLRGEGEFQTVKDVVLDCLLDFLPEGVNKEKITPLTLKEAYVQKMVKVCNDSDRWSLISLSNNSGKNVELKFVDSLRRQFEFSVDSFQIKLDSLLLFYECSENPMTETFHPTIIGESVYGDFQEAFDHLCNKIIATRNPEEIRGGGLLKYCNLLVRGFRPASDEIKTLQRYMCSRFFIDFSDIGEQQRKLESYLQNHFVGLEDRKYEYLMTLHGVVNESTVCLMGHERRQTLNLITMLAIRVLADQNVIPNVANVTCYYQPAPYVADANFSNYYIAQVQPVFTCQQQTYSTWLPCN

SEQ ID NO: 11923 - protein, 14 aa, Homo sapiens
LTLLTVNSVLSVDE

SEQ ID NO: 11924 - protein, 69 aa, Homo sapiens
VQFGLMKGKGFVWKNALECDISARMLKYRFPAGTMALSSVAQWSSSEDAKIHEKTSRTSGRIFNGKSLG

SEQ ID NO: 11925 - protein, 39 aa, Homo sapiens
VVGTMALSSVAQWSSSEDAKIHEKTSRTSGRIFNGKSLG

SEQ ID NO: 11926 - protein, 30 aa, Homo sapiens
MEPSPFGDVSSRLTTAGSTTKKMLFPSTVI

SEQ ID NO: 11927 - protein, 9 aa, Homo sapiens
MFRDLLRLS

SEQ ID NO: 11928 - protein, 61 aa, Homo sapiens
LLSDKLPSAMTVVSVPQREPLVLGGRLAPLGFSSRGFKIKDGKIGENCPSPWPACSWYTLV

SEQ ID NO: 11929 - protein, 172 aa, Homo sapiens
LSSPSRSGSRSSWVAALRRLAFPPEVLKSKMGKSEKIALPHGQLVHGIHLYEQPKINRQKSKYNLPLTKITSAKRNENNFWQDSVSSDRIQKQEKKPFKNTENIKNSHLKKSAFLTEVSQKENYAGAKFSDPPSPSVLPKPPSHWMGSTVENSNQNRELMAVHLKTLLKVQT

SEQ ID NO: 11930 - protein, 152 aa, Homo sapiens
LGKIKVLKSKMGKSEKIALPHGQLVHGIHLYEQPKINRQKSKYNLPLTKITSAKRNENNFWQDSVSSDRIQKQEKKPFKNTENIKNSHLKKSAFLTEVSQKENYAGAKFSDPPSPSVLPKPPSHWMGSTVENSNQNRELMAVHLKTLLKVQT

SEQ ID NO: 11931 - protein, 18 aa, Homo sapiens
LKMISLLRHQKLLSREAA

SEQ ID NO: 11932 - protein, 54 aa, Homo sapiens
LFICCPEETENTFGAHYSGLSSNTVPKYPLLFSSRSDSYLHNGATPCPGKERQQ

SEQ ID NO: 11933 - protein, 850 aa, Homo sapiens
LEKLHGVNGMSVDEKPDSPMYVYESTVHCTNILLGLNDQRKKDILCDVTLIVERKEFRAHRAVLAACSEYFWQALVGQTKNDLVVSLPEEVTARGFGPLLQFAYTAKLLLSRENIREVIRCAEFLRMHNLEDSCFSFLQTQLLNSEDGLFVCRKDAACQRPHEDCENSAGEEEDEEEETMDSETAKMACPRDQMLPEPISFEAAAIPVAEKEEALLPEPDVPTDTKESSEKDALTQYPRYKKYQLACTKNVYNASSHSTSGFASTFREDNSSNSLKPGLARGQIKSEPPSEENEEESITLCLSGDEPDAKDRAGDVEMDRKQPSPAPTPTAPAGAACLERSRSVASPSCLRSLFSITKSVELSGLPSTSQQHFARSPACPFDKGITQGDLKTDYTPFTGNYGQPHVGQKEVSNFTMGSPLRGPGLEALCKQEGELDRRSVIFSSSACDQVSTSVHSYSGVSSLDKDLSEPVPKGLWVGAGQSLPSSQAYSHGGLMADHLPGRMRPNTSCPVPIKVCPRSPPLETRTRTSSSCSSYSYAEDGSGGSPCSLPLCEFSSSPCSQGARFLATEHQEPGLMGDGMYNQVRPQIKCEQSYGTNSSDESGSFSEADSESCPVQDRGQEVKLPFPVDQITDLPRNDFQMMIKMHKLTSEQLEFIHDVRRRSKNRIAAQRCRKRKLDCIQNLECEIRKLVCEKEKLLSERNQLKACMGELLDNFSCLSQEVCRDIQSPEQIQALHRYCPVLRPMDLPTASSINPAPLGAEQNIAASQCAVGENVPCCLEPGAAPPGPPWAPSNTSENCTSGRRLEGTDPGTFSERGPPLEPRSQTVTVDFCQEMTDKCTTDEQPRKDYT

SEQ ID NO: 11934 - protein, 73 aa, Homo sapiens
MYVYESTVHCTNILLGLNDQRKKDILCDVTLIVERKEFRAHRAVLAACSEYFWQALVGQTKNDLVVSLPEEMV

SEQ ID NO: 11935 - protein, 17 aa, Homo sapiens
LHPKTRRQHRTWKNYMV

SEQ ID NO: 11936 - protein, 17 aa, Homo sapiens
MDCQSLLISPFAQFPAS

SEQ ID NO: 11937 - protein, 70 aa, Homo sapiens
MVSRDYLAGLEQREENIVKDCCEVYHNCVQLSASESEGSRNEENLQELPRTVTCLIPCSHPCSMNKVDTH

SEQ ID NO: 11938 - protein, 54 aa, Homo sapiens
MIKPEESMLSDHLQLSASESEGSRNEENLQELPRTVTCLIPCSHPCSMNKVDTH

SEQ ID NO: 11939 - protein, 65 aa, Homo sapiens
LPGGGCEPGRRGEEEAEKDAKFSGELSASESEGSRNEENLQELPRTVTCLIPCSHPCSMNKVDTH

SEQ ID NO: 11940 - protein, 121 aa, Homo sapiens
LPTPAAAPLSLSPRPPLAPSPPPSRRTRGAGNELPCDARPLRELSVTHELPTSPAAGRGLRAGKTRGRGGGKGRKVLRRVQLSASESEGSRNEENLQELPRTVTCLIPCSHPCSMNKVDTH

SEQ ID NO: 11941 - protein, 100 aa, Homo sapiens
MEKIYSRGELHHFIDGFNEEKSNWMRYVNPAHSPREQNLAACQNGMNIYFYTIKPIPANQELLVWYCRDFAERLHYPYPGELTMMNLSKWITEQKNKKCQ

SEQ ID NO: 11942 - protein, 138 aa, Homo sapiens
LHPTAPSTCWKPAVPQRTVGEAAGWQRHNHQVKTVTTEEYLVNPVGMNRYSVDTSASTFNHRGSLHPSSSLYCKRQNSGDSHLGGGPAATAGGPRTSPMSSGGPSAPGLRPPASSPKRNTTSLEGNRCGNVMHASASH

SEQ ID NO: 11943 - protein, 32 aa, Homo sapiens
LGAGVQSVVVAAAVRRARRRRGCHGRAAVPVR

SEQ ID NO: 11944 - protein, 399 aa, Homo sapiens
LTESVCLIMDSELMHSIVGSYHKPPERVFVPSFTQNEPSQNCHPANLEVTSPKILHSPNSQALILALKTLQEKIHRLELERTQAEDNLNILSREAAQYKKALENETNERNLAHQELIKQKKDISIQLSSAQSRCTLLEKQLEYTKRMVLNVEREKNMILEQQAQLQREKEQDQMKLYAKLEKLDVLEKECFRLTTTQKTAEDKIKHLEEKLKEEEHQRKLFQDKASELQTGLEISKIIMSSVSNLKHSKEKKKSSKKTKCIKRRPPWQICSKFGALPFVAEKMRQHRDPHILQKPFNVTETRCLPKPSRTTSWCKAIPPDSEKSISICDNLSELLMAMQDELDQMSMEHQELLKQMKETESHSVCDDIECELECLLKKMEIKGEQISKLKKHQDSVRRL

SEQ ID NO: 11945 - protein, 415 aa, Homo sapiens
LTESVCLIMDSELMHSIVGSYHKPPERVFVPSFTQNEPSQNCHPANLEVTSPKILHSPNSQALILALKTLQEKIHRLELERTQAEDNLNILSREAAQYKKALENETNERNLAHQELIKQKKDISIQLSSAQSRCTLLEKQLEYTKRMVLNVEREKNMILEQQAQLQREKEQDQMKLYAKLEKLDVLEKECFRLTTTQKTAEDKIKHLEEKLKEEEHQRKLFQDKASEKTKCIKRRPPWQICSKFGALPFVAEKPSRTTSWCKAIPPDSEKSISICDNLSELLMAMQDELDQMSMEHQELLKQMKETESHSVCDDIECELECLLKKMEIKGEQISKLKKHQDSVCKLQQKVQNSKMSEASGIQQEDSYPKGSKNIKNSPRKCLTDTNLFQKNSSFHPIRVHNLQMKLRRDDIMWEQ

SEQ ID NO: 11946 - protein, 82 aa, Homo sapiens
LQVAVAMDTLDRVVKPKTKRAKRFLEKREPKLNENIKNAMLIKGGNANATVTKVLKDVNVFCFESYKFCFTVCTEKTIRCTI

SEQ ID NO: 11947 - protein, 65 aa, Homo sapiens
LQVAVAMDTLDRVVKPKTKRAKRFLEKREPKLNENIKNAMLIKGGNANATVTKVLKDVEKYYKTF

SEQ ID NO: 11948 - protein, 243 aa, Homo sapiens
MWKNITRPFEDQTSLEFFSKKSDCSLFMFGSHNKKRPNNLVIGRMYDYHVLDMIELGIENFVSLKDIKNSKCPEGTKPMLIFAGDDFDVTEDYRRLKSLLIDFFRGPTVSNIRLAGLEYVLHFTALNGKIYFRSYKLLLKKSGCRTPRIELEEMGPSLDLVLRRTHLASDDLYKLSMKMPKALKPKKKKNISHDTFGTTYGRIHMQKQDLSKLQTRKMKGLKKRPAERITEDHEKKSKRIKKN

SEQ ID NO: 11949 - protein, 43 aa, Homo sapiens
LRKPECDHAVSMLQGIYFSGRWSSSVEHMANDNGLTDQKQERT

SEQ ID NO: 11950 - protein, 110 aa, Homo sapiens [sequence omitted]

SEQ ID NO: 11951 - protein, 27 aa, Homo sapiens
LPPQLQPRYSCGSVTVLLALTARGEGR

SEQ ID NO: 11952 - protein, 21 aa, Homo sapiens
MNLLTTSAATVTCSHHPLPQN

SEQ ID NO: 11953 - protein, 107 aa, Homo sapiens
LTERMALSTIVSQRKQIKRKAPRGFLKRVFKRKKPQLRLEKSGDLLVRFHPFSGWEWGTGEVHLNCLLFVHRLAEESRTNACASKCRVINKEHVLAAAKVILKKSRG

SEQ ID NO: 11954 - protein, 92 aa, Homo sapiens
LTERMALSTIVSQRKQIKRKAPRGFLKRVFKRKKPQLRLEKSGDLLVHLNCLLFVHRLAEESRTNACASKCRVINKEHVLAAAKVILKKSRG

SEQ ID NO: 11955 - protein, 24 aa, Homo sapiens
LPEEEMVSRGCNCRQVSPRSHKFL

SEQ ID NO: 11956 - protein, 3129 aa, Homo sapiens
VDPVAATTMPGAAGVLLLLLLSGGLGGVQAQRPQQQRQSQAHQQRGLFPAVLNLASNALITTNATCGEKGPEMYCKLVEHVPGQPVRNPQCRICNQNSSNPNQRHPITNAIDGKNTWWQSPSIKNGIEYHYVTITLDLQQVFQIAYVIVKAANSPRPGNWILERSLDDVEYKPWQYHAVTDTECLTLYNIYPRTGPPSYAKDDEVICTSFYSKIHPLENGEIHISLINGRPSADDPSPELLEFTSARYIRLRFQRIRTLNADLMMFAHKDPREIDPIVTRRYYYSVKDISVGGMCICYGHARACPLDPATNKSRCECEHNTCGDSCDQCCPGFHQKPWRAGTFLTKTECEACNCHGKAEECYYDENVARRNLSLNIRGKYIGGGVCINCTQNTAGINCETCTDGFFRPKGVSPNYPRPCQPCHCDPIGSLNEVCVKDEKHARRGLAPGSCHCKTGFGGVSCDRCARGYTGYPDCKACNCSGLGSKNEDPCFGPCICKENVEGGDCSRCKSGFFNLQEDNWKGCDECFCSGVSNRCQSSYWTYGKIQDMSGWYLTDLPGRIRVAPQQDDLDSPQQISISNAEARQALPHSYYWSAPAPYLGNKLPAVGGQLTFTISYDLEEEEEDTERVLQLMIILEGNDLSISTAQDEVYLHPSEEHTNVLLLKEESFTIHGTHFPVRRKEFMTVLANLKRVLLQITYSFGMDAIFRLSSVNLESAVSYPTDGSIAAAVEVCQCPPGYTGSSCESCWPRHRRVNGTIFGGICEPCQCFGHAESCDDVTGECLNCKDHTGGPYCDKCLPGFYGEPTKGTSEDCQPCACPLNIPSNNFSPTCHLDRSLGLICDGCPVGYTGPRCERCAEGYFGQPSVPGGSCQPCQCNDNLDFSIPGSCDSLSGSCLICKPGTTGRYCELCADGYFGDAVDAKNCQPCRCNAGGSFSEVCHSQTGQCECRANVQGQRCDKCKAGTFGLQSARGCVPCNCNSFGSKSFDCEESGQCWCQPGVTGKKCDRCAHGYFNFQEGGCTACECSHLGNNCDPKTGRCICPPNTIGEKCSKCAPNTWGHSITTGCKACNCSTVGSLDFQCNVNTGQCNCHPKFSGAKCTECSRGHWNYPRCNLCDCFLPGTDATTCDSETKKCSCSDQTGQCTCKVNVEGIHCDRCRPGKFGLDAKNPLGCSSCYCFGTTTQCSEAKGLIRTWVTLKAEQTILPLVDEALQHTTTKGIVFQHPEIVAHMDLMREDLHLEPFYWKLPEQFEGKKLMAYGGKLKYAIYFEAREETGFSTYNPQVIIRGGTPTHARIIVRHMAAPLIGQLTRHEIEMTEKEWKYYGDDPRVHRTVTREDFLDILYDIHYILIKATYGNFMRQSRISEISMEVAEQGRGTTMTPPADLIEKCDCPLGYSGLSCEACLPGFYRLRSQPGGRTPGPTLGTCVPCQCNGHSSLCDPETSICQNCQHHTAGDFCERCALGYYGIVKGLPNDCQQCACPLISSSNNFSPSCVAEGLDDYRCTACPRGYEGQYCERCAPGYTGSPGNPGGSCQECECDPYGSLPVPCDPVTGFCTCRPGATGRKCDGCKHWHAREGWECVFCGDECTGLLLGDLARLEQMVMSINLTGPLPAPYKMLYGLENMTQELKHLLSPQRAPERLIQLAEGNLNTLVTEMNELLTRATKVTADGEQTGQDAERTNTRAKSLGEFIKELARDAEAVNEKAIKLNETLGTRDEAFERNLEGLQKEIDQMIKELRRKNLETQKEIAEDELVAAEALLKKVKKLFGESRGENEEMEKDLREKLADYKNKVDDAWDLLREATDKIREANRLFAVNQKNMTALEKKKEAVESGKRQIENTLKEGNDILDEANRLADEINSIIDYVEDIQTKLPPMSEELNDKIDDLSQEIKDRKLAEKVSQAESHAAQLNDSSAVLDGILDEAKNISFNATAAFKAYSNIKDYIDEAEKVAKEAKDLAHEATKLATGPRGLLKEDAKGCLQKSFRILNEAKKLANDVKENEDHLNGLKTRIENADARNGDLLRTLNDTLGKLSAIPNDTAAKLQAVKDKARQANDTAKDVLAQITELHQNLDGLKKNYNKLADSVAKTNAVVKDPSKNTVADADATVKNLEQEADRLIDKLKPIKELEDNLKKNISEIKELINQARKQANSIKVSVSSGGDCIRTYKPEIKKGSYNNIVVNVKTAVADNLLFYLGSAKFIDFLAIEMRKGKVSFLWDVGSGVGRVEYPDLTIDDSYWYRIVASRTGRNGTISVRALDGPKASIVPSTHHSTSPPGYTILDVDANAMLFVGGLTGKLKKADAVRVITFTGCMGETYFDNKPIGLWNFREKEGDCKGCTVSPQVEDSEGTIQFDGEGYALVSRPIRWYPNISTVMFKFRTFSSSALLMYLATRDLRDFMSVELTDGHIKVSYDLGSGMASVVSNQNHNDGKWKSFTLSRIQKQANISIVDIDTNQEENIATSSSGNNFGLDLKADDKIYFGGLPTLRNLSMKARPEVNLKKYSGCLKDIEISRTPYNILSSPDYVGVTKGCSLENVYTVSFPKPGFVELSPVPIDVGTEINLSFSTKNESGIILLGSGGTPAPPRRKRRQTGQAYYAILLNRGRLEVHLSTGARTMRKIVIRPEPNLFHDGREHSVHVERTRGIFTVQVDENRRYMQNLTVEQPIEVKKLFVGGAPPEFQPSPLRNIPPFEGCIWNLVINSVPMDFARPVSFKNADIGRCAHQKLREDEDGAAPAEIVIQPEPVPTPAFPTPTPVLTHGPCAAESEPALLIGSKQFGLSRNSHIAIAFDDTKVKNRLTIELEVRTEAESGLLFYMARINHADFATVQLRNGLPYFSYDLGSGDTHTMIPTKINDGQWHKIKIMRSKQEGILYVDGASNRTISPKKADILDVVGMLYVGGLPINYTTRRIGPVTYSIDGCVRNLHMAEAPADLEQPTSSFHVGTCFANAQRGTYFDGTGFAKAVGGFKVGLDLLVEFEFRTTTTTGVLLGISSQKMDGMGIEMIDEKLMFHVDNGAGRFTAVYDAGVPGHLCDGQWHKVTANKIKHRIELTVDGNQVEAQSPNPASTSADTNDPVFVGGFPDDLKQFGLTTSIPFRGCIRSLKLTKGTGKPLEVNFAKALELRGVQPVSCPAN

SEQ ID NO: 11957 - protein, 3126 aa, Homo sapiens
VDPVAATTMPGAAGVLLLLLLSGGLGGVQAQRPQQQRQSQAHQQRGLFPAVLNLASNALITTNATCGEKGPEMYCKLVEHVPGQPVRNPQCRICNQNSSNPNQRHPITNAIDGKNTWWQSPSIKNGIEYHYVTITLDLQQVFQIAYVIVKAANSPRPGNWILERSLDDVEYKPWQYHAVTDTECLTLYNIYPRTGPPSYAKDDEVICTSFYSKIHPLENGEIHISLINGRPSADDPSPELLEFTSARYIRLRFQRIRTLNADLMMFAHKDPREIDPIVTRRYYYSVKDISVGGMCICYGHARACPLDPATNKSRCECEHNTCGDSCDQCCPGFHQKPWRAGTFLTKTECEACNCHGKAEECYYDENVARRNLSLNIRGKYIGGGVCINCTQNTAGINCETCTDGFFRPKGVSPNYPRPCQPCHCDPIGSLNEVCVKDEKHARRGLAPGSCHCKTGFGGVSCDRCARGYTGYPDCKACNCSGLGSKNEDPCFGPCICKENVEGGDCSRCKSGFFNLQEDNWKGCDECFCSGVSNRCQSSYWTYGKIQDMSGWYLTDLPGRIRVAPQQDDLDSPQQISISNAEARQALPHSYYWSAPAPYLGNKLPAVGGQLTFTISYDLEEEEEDTERVLQLMIILEGNDLSISTAQDEVYLHPSEEHTNVLLLKEESFTIHGTHFPVRRKEFMTVLANLKRVLLQITYSFGMDAIFRLSSVNLESAVSYPTDGSIAAAVEVCQCPPGYTGSSCESCWPRHRRVNGTIFGGICEPCQCFGHAESCDDVTGECLNCKDHTGGPYCDKCLPGFYGEPTKGTSEDCQPCACPLNIPSNNFSPTCHLDRSLGLICDGCPVGYTGPRCERCAEGYFGQPSVPGGSCQPCQCNDNLDFSIPGSCDSLSGSCLICKPGTTGRYCELCADGYFGDAVDAKNCQPCRCNAGGSFSEVCHSQTGQCECRANVQGQRCDKCKAGTFGLQSARGCVPCNCNSFGSKSFDCEESGQCWCQPGVTGKKCDRCAHGYFNFQEGGCTACECSHLGNNCDPKTGRCICPPNTIGEKCSKCAPNTWGHSITTGCKACNCSTVGSLDFQCNVNTGQCNCHPKFSGAKCTECSRGHWNYPRCNLCDCFLPGTDATTCDSETKKCSCSDQTGQCTCKVNVEGIHCDRCRPGKFGLDAKNPLGCSSCYCFGTTTQCSEAKGLIRTWVTLKAEQTILPLVDEALQHTTTKGIVFQHPEIVAHMDLMREDLHLEPFYWKLPEQFEGKKLMAYGGKLKYAIYFEAREETGFSTYNPQVIIRGGTPTHARIIVRHMAAPLIGQLTRHEIEMTEKEWKYYGDDPRVHRTVTREDFLDILYDIHYILIKATYGNFMRQSRISEISMEVAEQGRGTTMTPPADLIEKCDCPLGYSGLSCEACLPGFYRLRSQPGGRTPGPTLGTCVPCQCNGHSSLCDPETSICQNCQHHTAGDFCERCALGYYGIVKGLPNDCQQCACPLISSSNNFSPSCVAEGLDDYRCTACPRGYEGQYCERCAPGYTGSPGNPGGSCQECECDPYGSLPVPCDPVTGFCTCRPGATGRKCDGCKHWHAREGWECVFCGDECTGLLLGDLARLEQMVMSINLTGPLPAPYKMLYGLENMTQELKHLLSPQRAPERLIQLAEGNLNTLVTEMNELLTRATKVTADGEQTGQDAERTNTRAKSLGEFIKELARDAEAVNEKAIKLNETLGTRDEAFERNLEGLQKEIDQMIKELRRKNLETQKEIAEDELVAAEALLKKVKKLFGESRGENEEMEKDLREKLADYKNKVDDAWDLLREATDKIREANRLFAVNQKNMTALEKKKEAVESGKRQIENTLKEGNDILDEANRLADEINSIIDYVEDIQTKLPPMSEELNDKIDDLSQEIKDRKLAEKVSQAESHAAQLNDSSAVLDGILDEAKNISFNATAAFKAYSNIKDYIDEAEKVAKEAKDLAHEATKLATGPRGLLKEDAKGCLQKSFRILNEAKKLANDVKENEDHLNGLKTRIENADARNGDLLRTLNDTLGKLSAIPNDTAAKLQAVKDKARQANDTAKDVLAQITELHQNLDGLKKNYNKLADSVAKTNAVVKDPSKNNAVADADATVKNLEQEADRLIDKLKPIKELEDNLKKNISEIKELINQARKQANSIKVSVSSGGDCIRTYKPEIKKGSYNNIVVNVKTAVADNLLFYLGSAKFIDFLAIEMRKGKVSFLWDVGSGVGRVEYPDLTIDDSYWYRIVASRTGRNGTISVRALDGPKASIVPSTHHSTSPPGYTILDVDANAMLFVGGLTGKLKKADAVRVITFTGCMGETYFDNKPIGLWNFREKEGDCKGCTVSPQVEDSEGTIQFDGEGYALVSRPIRWYPNISTVMFKFRTFSSSALLMYLATRDLRDFMSVELTDGHIKVSYDLGSGMASVVSNQNHNDGKWKSFTLSRIQKQANISIVDIDTNQEENIATSSSGNNFGLDLKADDKIYFGGLPTLRNLRPEVNLKKYSGCLKDIEISRTPYNILSSPDYVGVTKGCSLENVYTVSFPKPGFVELSPVPIDVGTEINLSFSTKNESGIILLGSGGTPAPPRRKRRQTGQAYYAILLNRGRLEVHLSTGARTMRKIVIRPEPNLFHDGREHSVHVERTRGIFTVQVDENRRYMQNLTVEQPIEVKKLFVGGAPPEFQPSPLRNIPPFEGCIWNLVINSVPMDFARPVSFKNADIGRCAHQKLREDEDGAAPAEIVIQPEPVPTPAFPTPTPVLTHGPCAAESEPALLIGSKQFGLSRNSHIAIAFDDTKVKNRLTIELEVRTEAESGLLFYMARINHADFATVQLRNGLPYFSYDLGSGDTHTMIPTKINDGQWHKIKIMRSKQEGILYVDGASNRTISPKKADILDVVGMLYVGGLPINYTTRRIGPVTYSIDGCVRNLHMAEAPADLEQPTSSFHVGTCFANAQRGTYFDGTGFAKAVGGFKVGLDLLVEFEFRTTTTTGVLLGISSQKMDGMGIEMIDEKLMFHVDNGAGRFTAVYDAGVPGHLCDGQWHKVTANKIKHRIELTVDGNQVEAQSPNPASTSADTNDPVFVGGFPDDLKQFGLTTSIPFRGCIRSLKLTKGTGKPLEVNFAKALELRGVQPVSCPAN

SEQ ID NO: 11958 - protein, 3130 aa, Homo sapiens
VDPVAATTMPGAAGVLLLLLLSGGLGGVQAQRPQQQRQSQAHQQRGLFPAVLNLASNALITTNATCGEKGPEMYCKLVEHVPGQPVRNPQCRICNQNSSNPNQRHPITNAIDGKNTWWQSPSIKNGIEYHYVTITLDLQQVFQIAYVIVKAANSPRPGNWILERSLDDVEYKPWQYHAVTDTECLTLYNIYPRTGPPSYAKDDEVICTSFYSKIHPLENGEIHISLINGRPSADDPSPELLEFTSARYIRLRFQRIRTLNADLMMFAHKDPREIDPIVTRRYYYSVKDISVGGMCICYGHARACPLDPATNKSRCECEHNTCGDSCDQCCPGFHQKPWRAGTFLTKTECEACNCHGKAEECYYDENVARRNLSLNIRGKYIGGGVCINCTQNTAGINCETCTDGFFRPKGVSPNYPRPCQPCHCDPIGSLNEVCVKDEKHARRGLAPGSCHCKTGFGGVSCDRCARGYTGYPDCKACNCSGLGSKNEDPCFGPCICKENVEGGDCSRCKSGFFNLQEDNWKGCDECFCSGVSNRCQSSYWTYGKIQDMSGWYLTDLPGRIRVAPQQDDLDSPQQISISNAEARQALPHSYYWSAPAPYLGNKLPAVGGQLTFTISYDLEEEEEDTERVLQLMIILEGNDLSISTAQDEVYLHPSEEHTNVLLLKEESFTIHGTHFPVRRKEFMTVLANLKRVLLQITYSFGMDAIFRLSSVNLESAVSYPTDGSIAAAVEVCQCPPGYTGSSCESCWPRHRRVNGTIFGGICEPCQCFGHAESCDDVTGECLNCKDHTGGPYCDKCLPGFYGEPTKGTSEDCQPCACPLNIPSNNFSPTCHLDRSLGLICDGCPVGYTGPRCERCAEGYFGQPSVPGGSCQPCQCNDNLDFSIPGSCDSLSGSCLICKPGTTGRYCELCADGYFGDAVDAKNCQPCRCNAGGSFSEVCHSQTGQCECRANVQGQRCDKCKAGTFGLQSARGCVPCNCNSFGSKSFDCEESGQCWCQPGVTGKKCDRCAHGYFNFQEGGCTACECSHLGNNCDPKTGRCICPPNTIGEKCSKCAPNTWGHSITTGCKACNCSTVGSLDFQCNVNTGQCNCHPKFSGAKCTECSRGHWNYPRCNLCDCFLPGTDATTCDSETKKCSCSDQTGQCTCKVNVEGIHCDRCRPGKFGLDAKNPLGCSSCYCFGTTTQCSEAKGLIRTWVTLKAEQTILPLVDEALQHTTTKGIVFQHPEIVAHMDLMREDLHLEPFYWKLPEQFEGKKLMAYGGKLKYAIYFEAREETGFSTYNPQVIIRGGTPTHARIIVRHMAAPLIGQLTRHEIEMTEKEWKYYGDDPRVHRTVTREDFLDILYDIHYILIKATYGNFMRQSRISEISMEVAEQGRGTTMTPPADLIEKCDCPLGYSGLSCEACLPGFYRLRSQPGGRTPGPTLGTCVPCQCNGHSSLCDPETSICQNCQHHTAGDFCERCALGYYGIVKGLPNDCQQCACPLISSSNNFSPSCVAEGLDDYRCTACPRGYEGQYCERCAPGYTGSPGNPGGSCQECECDPYGSLPVPCDPVTGFCTCRPGATGRKCDGCKHWHAREGWECVFCGDECTGLLLGDLARLEQMVMSINLTGPLPAPYKMLYGLENMTQELKHLLSPQRAPERLIQLAEGNLNTLVTEMNELLTRATKVTADGEQTGQDAERTNTRAKSLGEFIKELARDAEAVNEKAIKLNETLGTRDEAFERNLEGLQKEIDQMIKELRRKNLETQKEIAEDELVAAEALLKKVKKLFGESRGENEEMEKDLREKLADYKNKVDDAWDLLREATDKIREANRLFAVNQKNMTALEKKKEAVESGKRQIENTLKEGNDILDEANRLADEINSIIDYVEDIQTKLPPMSEELNDKIDDLSQEIKDRKLAEKVSQAESHAAQLNDSSAVLDGILDEAKNISFNATAAFKAYSNIKDYIDEAEKVAKEAKDLAHEATKLATGPRGLLKEDAKGCLQKSFRILNEAKKLANDVKENEDHLNGLKTRIENADARNGDLLRTLNDTLGKLSAIPNDTAAKLQAVKDKARQANDTAKDVLAQITELHQNLDGLKKNYNKLADSVAKTNAVVKDPSKNKIIADADATVKNLEQEADRLIDKLKPIKELEDNLKKNISEIKELINQARKQANSIKVSVSSGGDCIRTYKPEIKKGSYNNIVVNVKTAVADNLLFYLGSAKFIDFLAIEMRKGKVSFLWDVGSGVGRVEYPDLTIDDSYWYRIVASRTGRNGTISVRALDGPKASIVPSTHHSTSPPGYTILDVDANAMLFVGGLTGKLKKADAVRVITFTGCMGETYFDNKPIGLWNFREKEGDCKGCTVSPQVEDSEGTIQFDGEGYALVSRPIRWYPNISTVMFKFRTFSSSALLMYLATRDLRDFMSVELTDGHIKVSYDLGSGMASVVSNQNHNDGKWKSFTLSRIQKQANISIVDIDTNQEENIATSSSGNNFGLDLKADDKIYFGGLPTLRNLSMKARPEVNLKKYSGCLKDIEISRTPYNILSSPDYVGVTKGCSLENVYTVSFPKPGFVELSPVPIDVGTEINLSFSTKNESGIILLGSGGTPAPPRRKRRQTGQAYYAILLNRGRLEVHLSTGARTMRKIVIRPEPNLFHDGREHSVHVERTRGIFTVQVDENRRYMQNLTVEQPIEVKKLFVGGAPPEFQPSPLRNIPPFEGCIWNLVINSVPMDFARPVSFKNADIGRCAHQKLREDEDGAAPAEIVIQPEPVPTPAFPTPTPVLTHGPCAAESEPALLIGSKQFGLSRNSHIAIAFDDTKVKNRLTIELEVRTEAESGLLFYMARINHADFATVQLRNGLPYFSYDLGSGDTHTMIPTKINDGQWHKIKIMRSKQEGILYVDGASNRTISPKKADILDVVGMLYVGGLPINYTTRRIGPVTYSIDGCVRNLHMAEAPADLEQPTSSFHVGTCFANAQRGTYFDGTGFAKAVGGFKVGLDLLVEFEFRTTTTTGVLLGISSQKMDGMGIEMIDEKLMFHVDNGAGRFTAVYDAGVPGHLCDGQWHKVTANKIKHRIELTVDGNQVEAQSPNPASTSADTNDPVFVGGFPDDLKQFGLTTSIPFRGCIRSLKLTKGTGKPLEVNFAKALELRGVQPVSCPAN

SEQ ID NO: 11959 - protein, 539 aa, Homo sapiens
LKTIFPACHICKVYLQETAMETWSVEQVCSWLVEKNLGELVHRFQEEEVSGAALLALNDRMVQQLVKKIGHQAVLMDLIKKYKQNTQGLKSPENPKKAALVMQTEAARDYRDEESSSPARHGEQMPSFYPAENLDNGLIDQRVLKQRRNVKQILARSKALQWTKSYVLPEFPYDVKCMLAEQKCPDHSMRIRIIEFLQADMTKYLEGSLYPSTQQYNDVVNALLQAHPFLDEDGCGFFLWKRALKDRFKYVRRPIEDDEQVIRNKCKFGHRRGQTRKSLADIRFDEIKLVQIKEEAVCFDSELDEHIKWFQQEYVKTEKDWREIDKRMSQTLEIRRKMIGSRTPLKDILKLFPFLKCPYQMFREFQLLTRTDIYKKTRHILESYSENILTSFSVVDNPINIVLQEKMKHYTDEDMLKYMKMTATCLLLPDVFGDDPSLFVIMNEQVQVSTPVLEVKNPFNMEVCEFSLYLERERLTKVDDCVTALAALVAAFHVFRIECPRRLSQTFNFLETLIFDMHSPYFPSLKEKENEVGFQHPLT

SEQ ID NO: 11960 - protein, 282 aa, Homo sapiens
VYLQETAMETWSVEQVCSWLVEKNLGELVHRFQEEEVSGAALLALNDRMVQQLVKKIGHQAVLMDLIKKYKQNTQGLKSPENPKKAALVMQTEAAREDEESSSPARHGEQMPSFYPAENLDNGLIDQRVLKQRRNVKQILARSKALQWTKSYVLPEFPYDVKCMLAEQKCPDHSMRIRIIEFLQADMTKYLEGSLYPSTQQYNDVVNALLQAHPFLDEDGCGFFLWKRALKDRFKYVRRPIEDDEQVIRNKCKFGHRRGQTRKSLADIRFDEIKLVQIKLSA

SEQ ID NO: 11961 - protein, 244 aa, Homo sapiens
VYLQETAMETWSVEQVCSWLVEKNLGELVHRFQEEEVSGAALLALNDRMVQQLVKKIGHQAVLMDLIKKYKQNTQGLKSPENPKKAALVMQTEAARDYRDEESSSPARHGEQMPSFYPAENLDNGLIDQRVLKQRRNVKQILARSKALQWTKSYVLPEFPYDVKCMLAEQKCPDHSMRIRIIEFLQADMTKYLEGSLYPSTQQYNDVVNALLQAHPFLDEDGCGFCHKIAVRIKGRIDILFLLP

SEQ ID NO: 11962 - protein, 27 aa, Homo sapiens
LLPFRNMNPVSPELLIFQEKPRFQICR

SEQ ID NO: 11963 - protein, 117 aa, Homo sapiens
VVKGVKKIDPDLYEKFISHRFGEEILYRIDLCSMLKKKQSNGYYHCESSIVIGEKNGGEPDDAELVRLSKRLVENAVLKAVQQYLEETQNKNKPGEGSSVKTEAADQNGNDNENNRK

SEQ ID NO: 11964 - protein, 284 aa, Homo sapiens
LFFSGYSFLKMKEEPDSSGHSYGPVSSEVIKALQRVDGMVGMLMDGLKELNLHRCLNLILISDHGMEQGSCKKYIYLNKYLGDVKNIKVIYGPAARLRPSDVPDKYYSFNYEGIARNLSCREPNQHFKPYLKHFLPKRLHFAKSDRIEPLTFYLDPQWQLALNPSERKYCGSGFHGSDNVFSNMQALFVGYGPGFKHGIEADTFENIEVYNLMCDLLNLTPAPNNGTHGSLNHLLKNPVYTPKHPKEVHPLVQCPFTRNPRDNLGCSCNPSVSIVKKFGPVCMV

SEQ ID NO: 11965 - protein, 565 aa, Homo sapiens
LFFSGYSFLKMKEEPDSSGHSYGPVSSEVIKALQRVDGMVGMLMDGLKELNLHRCLNLILISDHGMEQGSCKKYIYLNKYLGDVKNIKVIYGPAARLRPSDVPDKYYSFNYEGIARNLSCREPNQHFKPYLKHFLPKRLHFAKSDRIEPLTFYLDPQWQLALNPSERKYCGSGFHGSDNVFSNMQALFVGYGPGFKHGIEADTFENIEVYNLMCDLLNLTPAPNNGTHGSLNHLLKNPVYTPKHPKEVHPLVQCPFTRNPRDNLGCSCNPSILPIEDFQTQFNLTVAEEKIIKHETLPYGRPRVLQKENTICLLSQHQFMSGYSQDILMPLWTSYTVDRNDSFSTEDFSNCLYQDFRIPLSPVHKCSFYKNNTKVSYGFLSPPQLNKNSSGIYSEALLTTNIVPMYQSFQVIWRYFHDTLLRKYAEERNGVNVVSGPVFDFDYDGRCDSLENLRQKRRVIRNQEILIPTHFFIVLTSCKDTSQTPLHCENLDTLAFILPHRTDNSESCVHGKHDSSWVEELLMLHRARITDVEHITGLSFYQQRKEPVSDILKLKTHLPTFSQED

SEQ ID NO: 11966 - protein, 20 aa, Homo sapiens
LICFLSPNTMNLFERTLYFI

SEQ ID NO: 11967 - protein, 10 aa, Homo sapiens
LQLRAPGSWW

SEQ ID NO: 11968 - protein, 52 aa, Homo sapiens
MTNIMKCAFSEEIVLAPKLFLSQCFSSLFSLVDMLCEPSCECGMPDHRWILL

SEQ ID NO: 11969 - protein, 16 aa, Homo sapiens
LLGLGFKGFYVCFRMF

SEQ ID NO: 11970 - protein, 260 aa, Homo sapiens
LQPRMTLFCLLQLFYHLQRERCFLEPRARFYAAEIASALGYLHSLNIVYRDLKPENILLDSQGHIVLTDFGLCKENIEHNSTTSTFCGTPEYLAPEVLHKQPYDRTVDWWCLGAVLYEMLYGLPPFYSRNTAEMYDNILNKPLQLKPNITNSARHLLEGLLQKDRTKRLGAKDDFMEIKSHVFFSLINWDDLINKKITPPFNPNVSGPNDLRHFDPEFTEEPVPNSIGKSPDSVLVTASVKEAAEAFLGFSYAPPTDSFL

SEQ ID NO: 11971 - protein, 428 aa, Homo sapiens
VCVAPDVMKPSKRFFISPPSSTAFMKQRRMGLNDFIQKIANNSYACKHPEVQSILKISQPQEPELMNANPSPPPSPSQQINLGPSSNPHAKPSDFHFLKVIGKGSFGKVLLARHKAEEVFYAVKVLQKKAILKKKEEKHIMSERNVLLKNVKHPFLVGLHFSFQTADKLYFVLDYINGGELFYHLQRERCFLEPRARFYAAEIASALGYLHSLNIVYRDLKPENILLDSQGHIVLTDFGLCKENIEHNSTTSTFCGTPEYLAPEVLHKQPYDRTVDWWCLGAVLYEMLYGLPPFYSRNTAEMYDNILNKPLQLKPNITNSARHLLEGLLQKDRTKRLGAKDDFMEIKSHVFFSLINWDDLINKKITPPFNPNVSGPNDLRHFDPEFTEEPVPNSIGKSPDSVLVTASVKEAAEAFLGFSYAPPTDSFL

SEQ ID NO: 11972 - protein, 433 aa, Homo sapiens
VVMTVKTEAAKGTLTYSRMRGMVAILIAFMKQRRMGLNDFIQKIANNSYACKHPEVQSILKISQPQEPELMNANPSPPPSPSQQINLGPSSNPHAKPSDFHFLKVIGKGSFGKVLLARHKAEEVFYAVKVLQKKAILKKKEEKHIMSERNVLLKNVKHPFLVGLHFSFQTADKLYFVLDYINGGELFYHLQRERCFLEPRARFYAAEIASALGYLHSLNIVYRDLKPENILLDSQGHIVLTDFGLCKENIEHNSTTSTFCGTPEYLAPEVLHKQPYDRTVDWWCLGAVLYEMLYGLPPFYSRNTAEMYDNILNKPLQLKPNITNSARHLLEGLLQKDRTKRLGAKDDFMEIKSHVFFSLINWDDLINKKITPPFNPNVSGPNDLRHFDPEFTEEPVPNSIGKSPDSVLVTASVKEAAEAFLGFSYAPPTDSFL

SEQ ID NO: 11973 - protein, 389 aa, Homo sapiens
VVMTVKTEAAKGTLTYSRMRGMVAILIAFMKQRRMGLNDFIQKIANNSYACKHPEVQSILKISQPQEPELMNANPSPPPSPSQQINLGPSSNPHAKPSDFHFLKVIGKGSFGKVLLARHKAEEVFYAVKVLQKKAILKKKELFYHLQRERCFLEPRARFYAAEIASALGYLHSLNIVYRDLKPENILLDSQGHIVLTDFGLCKENIEHNSTTSTFCGTPEYLAPEVLHKQPYDRTVDWWCLGAVLYEMLYGLPPFYSRNTAEMYDNILNKPLQLKPNITNSARHLLEGLLQKDRTKRLGAKDDFMEIKSHVFFSLINWDDLINKKITPPFNPNVSGPNDLRHFDPEFTEEPVPNSIGKSPDSVLVTASVKEAAEAFLGFSYAPPTDSFL

SEQ ID NO: 11974 - protein, 447 aa, Homo sapiens
LPMGEMQGALARARLESLLRPRHKKRAEAQKRSESFLLSGLAFMKQRRMGLNDFIQKIANNSYACKHPEVQSILKISQPQEPELMNANPSPPPSPSQQINLGPSSNPHAKPSDFHFLKVIGKGSFGKVLLARHKAEEVFYAVKVLQKKAILKKKEEKHIMSERNVLLKNVKHPFLVGLHFSFQTADKLYFVLDYINGGELFYHLQRERCFLEPRARFYAAEIASALGYLHSLNIVYRDLKPENILLDSQGHIVLTDFGLCKENIEHNSTTSTFCGTPEYLAPEVLHKQPYDRTVDWWCLGAVLYEMLYGLPPFYSRNTAEMYDNILNKPLQLKPNITNSARHLLEGLLQKDRTKRLGAKDDFMEIKSHVFFSLINWDDLINKKITPPFNPNVSGPNDLRHFDPEFTEEPVPNSIGKSPDSVLVTASVKEAAEAFLGFSYAPPTDSFL

SEQ ID NO: 11975 - protein, 464 aa, Homo sapiens
LARALMSSQSSSLSEACSREAYSSHNWALPPASRSNPQPAYPWATRRMKEEAIKPPLKAFMKQRRMGLNDFIQKIANNSYACKHPEVQSILKISQPQEPELMNANPSPPPSPSQQINLGPSSNPHAKPSDFHFLKVIGKGSFGKVLLARHKAEEVFYAVKVLQKKAILKKKEEKHIMSERNVLLKNVKHPFLVGLHFSFQTADKLYFVLDYINGGELFYHLQRERCFLEPRARFYAAEIASALGYLHSLNIVYRDLKPENILLDSQGHIVLTDFGLCKENIEHNSTTSTFCGTPEYLAPEVLHKQPYDRTVDWWCLGAVLYEMLYGLPPFYSRNTAEMYDNILNKPLQLKPNITNSARHLLEGLLQKDRTKRLGAKDDFMEIKSHVFFSLINWDDLINKKITPPFNPNVSGPNDLRHFDPEFTEEPVPNSIGKSPDSVLVTASVKEAAEAFLGFSYAPPTDSFL

SEQ ID NO: 11976 - protein, 74 aa, Homo sapiens [sequence omitted]

SEQ ID NO: 11977 - protein, 19 aa, Homo sapiens
MFSCPPGPAGTCTRPPCPY

SEQ ID NO: 11978 - protein, 109 aa, Homo sapiens
LRWGEFLKSSLIFIAVYIFFSTGNVCHMKLPIKSKVIFPFFQPPFYSRNTAEMYDNILNKPLQLKPNITNSARHLLEGLLQKDRTKRLGAKDDFVSDVFLSSWAGRDVH

SEQ ID NO: 11979 - protein, 363 aa, Homo sapiens
VVMTVKTEAAKGTLTYSRMRGMVAILIAFMKQRRMGLNDFIQKIANNSYACKHPEVQSILKISQPQEPELMNANPSPPPSPSQQINLGPSSNPHAKPSDFHFLKVIGKGSFGKVLLARHKAEEVFYAVKVLQKKAILKKKEEKHIMSERNVLLKNVKHPFLVGLHFSFQTADKLYFVLDYINGGELFYHLQRERCFLEPRARFYAAEIASALGYLHSLNIVYRDLKPENILLDSQGHIVLTDFGLCKENIEHNSTTSTFCGTPEYLAPEVLHKQPYDRTVDWWCLGAVLYEMLYGLPPFYSRNTAEMYDNILNKPLQLKPNITNSARHLLEGLLQKDRTKRLGAKDDFVSDVFLSSWAGRDVH

SEQ ID NO: 11980 - protein, 86 aa, Homo sapiens
LFPWSVFQYLAPEVLHKQPYDRTVDWWCLGAVLYEMLYGLVSGTLGTMEHCLLPTILPSHSPCLAMVSCPYQYAYQKQLRGILVIL

SEQ ID NO: 11981 - protein, 131 aa, Homo sapiens
LGYLHSLNIVYRDLKPENILLDSQGHIVLTDFGLCKENIEHNSTTSTFCGTPEYLAPEVLHKQPYDRTVDWWCLGAVLYEMLYGLVSGTLGTMEHCLLPTILPSHSPCLAMVSCPYQYAYQKQLRGILVIL

SEQ ID NO: 11982 - protein, 70 aa, Homo sapiens
LLDSQGHIVLTDFGLCKENIEHNSTTSTFCGTPEVGAVLVWCLVYPRLPRERCTIMHLTTKKSKLLSETS

SEQ ID NO: 11983 - protein, 78 aa, Homo sapiens
MSERNVLLKNVKHPFLVGLHFSFQTADKLYFVLDYINGGELFYHLQRERCFLEPRARFYAAEIASALGYLHSLNIVYR

SEQ ID NO: 11984 - protein, 86 aa, Homo sapiens [sequence omitted]

SEQ ID NO: 11985 - protein, 33 aa, Homo sapiens
LKFQVLLARHKAEEVFYAVKVLQKKAILKKKEV

SEQ ID NO: 11986 - protein, 96 aa, Homo sapiens
VPFIPCSPEVQSILKISQPQEPELMNANPSPPPSPSQQINLGPSSNPHAKPSDFHFLKVIGKGSFGKVLLARHKAEEVFYAVKVLQKKAILKKKEV

SEQ ID NO: 11987 - protein, 142 aa, Homo sapiens
VVMTVKTEAAKGTLTYSRMRGMVAILIAFMKQRRMGLNDFIQKIANNSYACKHPEVQSILKISQPQEPELMNANPSPPPSPSQQINLGPSSNPHAKPSDFHFLKVIGKGSFGKVLLARHKAEEVFYAVKVLQKKAILKKKEV

SEQ ID NO: 11988 - protein, 173 aa, Homo sapiens
LARALMSSQSSSLSEACSREAYSSHNWALPPASRSNPQPAYPWATRRMKEEAIKPPLKAFMKQRRMGLNDFIQKIANNSYACKHPEVQSILKISQPQEPELMNANPSPPPSPSQQINLGPSSNPHAKPSDFHFLKVIGKGSFGKVLLARHKAEEVFYAVKVLQKKAILKKKEV

SEQ ID NO: 11989 - protein, 144 aa, Homo sapiens
VVMTVKTEAAKGTLTYSRMRGMVAILIAFMKQRRMGLNDFIQKIANNSYACKHPEVQSILKISQPQEPELMNANPSPPPSPSQQINLGPSSNPHAKPSDFHFLKVIGKGSFGKVISNLKIFWYTSFMSSFVFSLDEDRKMIFLN

SEQ ID NO: 11990 - protein, 49 aa, Homo sapiens
VPFIPCSPEVQSILKISQPQEPELMNANPSPPVSFCMCRASVENCKGVS

SEQ ID NO: 11991 - protein, 90 aa, Homo sapiens
VCVAPDVMKPSKRFFISPPSSTAFMKQRRMGLNDFIQKIANNSYACKHPEVQSILKISQPQEPELMNANPSPPVSFCMCRASVENCKGVS

SEQ ID NO: 11992 - protein, 95 aa, Homo sapiens
VVMTVKTEAAKGTLTYSRMRGMVAILIAFMKQRRMGLNDFIQKIANNSYACKHPEVQSILKISQPQEPELMNANPSPPVSFCMCRASVENCKGVS

SEQ ID NO: 11993 - protein, 126 aa, Homo sapiens
LARALMSSQSSSLSEACSREAYSSHNWALPPASRSNPQPAYPWATRRMKEEAIKPPLKAFMKQRRMGLNDFIQKIANNSYACKHPEVQSILKISQPQEPELMNANPSPPVSFCMCRASVENCKGVS

SEQ ID NO: 11994 - protein, 53 aa, Homo sapiens
VVMTVKTEAAKGTLTYSRMRGMVAILIAFMKQRRMGLNDFIQKIANNSYACKQ

SEQ ID NO: 11995 - protein, 67 aa, Homo sapiens
LGEHAFQRGVLPQENESCSWETQSGCEVREPCNHANILTKPDPRTFWTNDDPDIDNIAKMEMGKFSA

SEQ ID NO: 11996 - protein, 16 aa, Homo sapiens
MTVSGKKQTMGFEVPG

SEQ ID NO: 11997 - protein, 392 aa, Homo sapiens
LRNFAPAVRSAAAQPGRDAGRRRAAGGGSPVRSPRLSAEPRARRAMARRPRHSIYSSDEDDEDFEMCDHDYDGLLPKSGKRHLGKTRWTREEDEKLKKLVEQNGTDDWKVIANYLPNRTDVQCQHRWQKVLNPELIKGPWTKEEDQRVIELVQKYGPKRWSVIAKHLKGRIGKQCRERWHNHLNPEVKKTSWTEEEDRIIYQAHKRLGNRWAEIAKLLPGRTDNAIKNHWNSTMRRKVEQEGYLQESSKASQPAVATSFQKNSHLMGFAQAPPTAQLPATGQPTVNNDYSYYHISEAQNVSSHVPYPVALHVNIVNVPQPAAAAIQRHYNDEDPEKEKRIKELELLLMSTENELKGQQLCGPLLNSDIFSDWAANWDGSLCFATYIVNQQRQ

SEQ ID NO: 11998 - protein, 395 aa, Homo sapiens
LRNFAPAVRSAAAQPGRDAGRRRAAGGGSPVRSPRLSAEPRARRAMARRPRHSIYSSDEDDEDFEMCDHDYDGLLPKSGKRHLGKTRWTREEDEKLKKLVEQNGTDDWKVIANYLPNRTDVQCQHRWQKVLNPELIKGPWTKEEDQRVIELVQKYGPKRWSVIAKHLKGRIGKQCRERWHNHLNPEVKKTSWTEEEDRIIYQAHKRLGNRWAEIAKLLPGRTDNAIKNHWNSTMRRKVEQEGYLQESSKASQPAVATSFQKNSHLMGFAQAPPTAQLPATGQPTVNNDYSYYHISEAQNVSSHVPYPVALHVNIVNVPQPAAAAIQRHYNDEDPEKEKRIKELELLLMSTENELKGQQVLPLCGPLLNSDIFSDWAANWDGSLCFATYIVNQQRQ

SEQ ID NO: 11999 - protein, 447 aa, Homo sapiens
LRNFAPAVRSAAAQPGRDAGRRRAAGGGSPVRSPRLSAEPRARRAMARRPRHSIYSSDEDDEDFEMCDHDYDGLLPKSGKRHLGKTRWTREEDEKLKKLVEQNGTDDWKVIANYLPNRTDVQCQHRWQKVLNPELIKGPWTKEEDQRVIELVQKYGPKRWSVIAKHLKGRIGKQCRERWHNHLNPEVKKTSWTEEEDRIIYQAHKRLGNRWAEIAKLLPGRTDNAIKNHWNSTMRRKVEQEGYLQESSKASQPAVATSFQKNSHLMGFAQAPPTAQLPATGQPTVNNDYSYYHISEAQNVSSHVPYPVALHVNIVNVPQPAAAAIQRHYNDEDPEKEKRIKELELLLMSTENELKGQQVLPTQNHTCSYPGWHSTTIADHTRPHGDSAPVSCLGEHHSTPSLPADPGSLPEESASPARCMIVHQGTILDNVKNLLEFAETLQFIDSM

SEQ ID NO: 12000 - protein, 494 aa, Homo sapiens
LRNFAPAVRSAAAQPGRDAGRRRAAGGGSPVRSPRLSAEPRARRAMARRPRHSIYSSDEDDEDFEMCDHDYDGLLPKSGKRHLGKTRWTREEDEKLKKLVEQNGTDDWKVIANYLPNRTDVQCQHRWQKVLNPELIKGPWTKEEDQRVIELVQKYGPKRWSVIAKHLKGRIGKQCRERWHNHLNPEVKKTSWTEEEDRIIYQAHKRLGNRWAEIAKLLPGRTDNAIKNHWNSTMRRKVEQEGYLQESSKASQPAVATSFQKNSHLMGFAQAPPTAQLPATGQPTVNNDYSYYHISEAQNVSSHVPYPVALHVNIVNVPQPAAAAIQRHYNDEDPEKEKRIKELELLLMSTENELKGQQVLPTQNHTCSYPGWHSTTIADHTRPHGDSAPVSCLGEHHSTPSLPADPGSLPEESASPARCMIVHQGTILDNVKNLLEFAETLQFIDSFLNTSSNHENSDLEMPSLTSTPLIGHKLTVTTPFHRDQTVKTQKENTV

SEQ ID NO: 12001 - protein, 705 aa, Homo sapiens
LRNFAPAVRSAAAQPGRDAGRRRAAGGGSPVRSPRLSAEPRARRAMARRPRHSIYSSDEDDEDFEMCDHDYDGLLPKSGKRHLGKTRWTREEDEKLKKLVEQNGTDDWKVIANYLPNRTDVQCQHRWQKVLNPELIKGPWTKEEDQRVIELVQKYGPKRWSVIAKHLKGRIGKQCRERWHNHLNPEVKKTSWTEEEDRIIYQAHKRLGNRWAEIAKLLPGRTDNAIKNHWNSTMRRKVEQEGYLQESSKASQPAVATSFQKNSHLMGFAQAPPTAQLPATGQPTVNNDYSYYHISEAQNVSSHVPYPVALHVNIVNVPQPAAAAIQRHYNDEDPEKEKRIKELELLLMSTENELKGQQVLPTQNHTCSYPGWHSTTIADHTRPHGDSAPVSCLGEHHSTPSLPADPGSLPEESASPARCMIVHQGTILDNVKNLLEFAETLQFIDSFLNTSSNHENSDLEMPSLTSTPLIGHKLTVTTPFHRDQTVKTQKENTVFRTPAIKRSILESSPRTPTPFKHALAAQEIKYGPLKMLPQTPSHLVEDLQDVIKQESDESGIVAEFQENGPPLLKKIKQEVESPTDKSGNFFCSHHWEGDSLNTQLFTQTSPVADAPTGVQWHDFGSLQPLPPGFKRFSCLSLPRSWDYRHPPPRPANFEFLVETGFLHVGQAGLELLTSGDLPASASQSARITGVSHRARPGGIFLQAPF

SEQ ID NO: 12002 - protein, 711 aa, Homo sapiens
LRNFAPAVRSAAAQPGRDAGRRRAAGGGSPVRSPRLSAEPRARRAMARRPRHSIYSSDEDDEDFEMCDHDYDGLLPKSGKRHLGKTRWTREEDEKLKKLVEQNGTDDWKVIANYLPNRTDVQCQHRWQKVLNPELIKGPWTKEEDQRVIELVQKYGPKRWSVIAKHLKGRIGKQCRERWHNHLNPEVKKTSWTEEEDRIIYQAHKRLGNRWAEIAKLLPGRTDNAIKNHWNSTMRRKVEQEGYLQESSKASQPAVATSFQKNSHLMGFAQAPPTAQLPATGQPTVNNDYSYYHISEAQNVSSHVPYPVALHVNIVNVPQPAAAAIQRHYNDEDPEKEKRIKELELLLMSTENELKGQQVLPTQNHTCSYPGWHSTTIADHTRPHGDSAPVSCLGEHHSTPSLPADPGSLPEESASPARCMIVHQGTILDNVKNLLEFAETLQFIDSFLNTSSNHENSDLEMPSLTSTPLIGHKLTVTTPFHRDQTVKTQKENTVFRTPAIKRSILESSPRTPTPFKHALAAQEIKYGPLKMLPQTPSHLVEDLQDVIKQESDESGIVAEFQENGPPLLKKIKQEVESPTDKSGNFFCSHHWEGDSLNTQLFTQTSPVADAPTGVQWHDFGSLQPLPPGFKRFSCLSLPRSWDYRHPPPRPANFEFLVETGFLHVGQAGLELLTSGDLPASASQSARITGVSHRARPEYSYKLRFNGTSIRR

SEQ ID NO: 12003 - protein, 657 aa, Homo sapiens
LRNFAPAVRSAAAQPGRDAGRRRAAGGGSPVRSPRLSAEPRARRAMARRPRHSIYSSDEDDEDFEMCDHDYDGLLPKSGKRHLGKTRWTREEDEKLKKLVEQNGTDDWKVIANYLPNRTDVQCQHRWQKVLNPELIKGPWTKEEDQRVIELVQKYGPKRWSVIAKHLKGRIGKQCRERWHNHLNPEVKKTSWTEEEDRIIYQAHKRLGNRWAEIAKLLPGRTDNAIKNHWNSTMRRKVEQEGYLQESSKASQPAVATSFQKNSHLMGFAQAPPTAQLPATGQPTVNNDYSYYHISEAQNVSSHVPYPVALHVNIVNVPQPAAAAIQRHYNDEDPEKEKRIKELELLLMSTENELKGQQVLPTQNHTCSYPGWHSTTIADHTRPHGDSAPVSCLGEHHSTPSLPADPGSLPEESASPARCMIVHQGTILDNVKNLLEFAETLQFIDSFLNTSSNHENSDLEMPSLTSTPLIGHKLTVTTPFHRDQTVKTQKENTVFRTPAIKRSILESSPRTPTPFKHALAAQEIKYGPLKMLPQTPSHLVEDLQDVIKQESDESGIVAEFQENGPPLLKKIKQEVESPTDKSGNFFCSHHWEGDSLNTQLFTQTSPVADAPNILTSSVLMAPASEDEDNVLKAFTVPKNRSLASPLQATKAQRLFQF

SEQ ID NO: 12004 - protein, 806 aa, Homo sapiens
LRNFAPAVRSAAAQPGRDAGRRRAAGGGSPVRSPRLSAEPRARRAMARRPRHSIYSSDEDDEDFEMCDHDYDGLLPKSGKRHLGKTRWTREEDEKLKKLVEQNGTDDWKVIANYLPNRTDVQCQHRWQKVLNPELIKGPWTKEEDQRVIELVQKYGPKRWSVIAKHLKGRIGKQCRERWHNHLNPEVKKTSWTEEEDRIIYQAHKRLGNRWAEIAKLLPGRTDNAIKNHWNSTMRRKVEQEGYLQESSKASQPAVATSFQKNSHLMGFAQAPPTAQLPATGQPTVNNDYSYYHISEAQNVSSHVPYPVALHVNIVNVPQPAAAAIQRHYNDEDPEKEKRIKELELLLMSTENELKGQQVLPTQNHTCSYPGWHSTTIADHTRPHGDSAPVSCLGEHHSTPSLPADPGSLPEESASPARCMIVHQGTILDNVKNLLEFAETLQFIDSDSSSWCDLSSFEFFEEADFSPSQHHTGKALQLQQREGNGTKPAGEPSPRVNKRMLSESSLDPPKVLPPARHSTIPLVILRKKRGQASPLATGDCSSFIFADVSSSTPKRSPVKSLPFSPSQFLNTSSNHENSDLEMPSLTSTPLIGHKLTVTTPFHRDQTVKTQKENTVFRTPAIKRSILESSPRTPTPFKHALAAQEIKYGPLKMLPQTPSHLVEDLQDVIKQESDESGIVAEFQENGPPLLKKIKQEVESPTDKSGNFFCSHHWEGDSLNTQLFTQTSPVADAPNILTSSVLMAPASEDEDNVLKAFTVPKNRSLASPLQPCSSTWEPASCGKMEEQMTSSSQARKYVNAFSARTLVM

SEQ ID NO: 12005 - protein, 682 aa, Homo sapiens
LRNFAPAVRSAAAQPGRDAGRRRAAGGGSPVRSPRLSAEPRARRAMARRPRHSIYSSDEDDEDFEMCDHDYDGLLPKSGKRHLGKTRWTREEDEKLKKLVEQNGTDDWKVIANYLPNRTDVQCQHRWQKVLNPELIKGPWTKEEDQRVIELVQKYGPKRWSVIAKHLKGRIGKQCRERWHNHLNPEVKKTSWTEEEDRIIYQAHKRLGNRWAEIAKLLPGRTDNAIKNHWNSTMRRKVEQEGYLQESSKASQPAVATSFQKNSHLMGFAQAPPTAQLPATGQPTVNNDYSYYHISEAQNVSSHVPYPVALHVNIVNVPQPAAAAIQRHYNDEDPEKEKRIKELELLLMSTENELKGQQTQNHTCSYPGWHSTTIADHTRPHGDSAPVSCLGEHHSTPSLPADPGSLPEESASPARCMIVHQGTILDNVKNLLEFAETLQFIDSFLNTSSNHENSDLEMPSLTSTPLIGHKLTVTTPFHRDQTVKTQKENTVFRTPAIKRSILESSPRTPTPFKHALAAQEIKYGPLKMLPQTPSHLVEDLQDVIKQESDESGIVAEFQENGPPLLKKIKQEVESPTDKSGNFFCSHHWEGDSLNTQLFTQTSPVADAPNILTSSVLMAPASEDEDNVLKAFTVPKNRSLASPLQPCSSTWEPASCGKMEEQMTSSSQARKYVNAFSARTLVM

SEQ ID NO: 12006 - protein, 771 aa, Homo sapiens
LRNFAPAVRSAAAQPGRDAGRRRAAGGGSPVRSPRLSAEPRARRAMARRPRHSIYSSDEDDEDFEMCDHDYDGLLPKSGKRHLGKTRWTREEDEKLKKLVEQNGTDDWKVIANYLPNRTDVQCQHRWQKVLNPELIKGPWTKEEDQRVIELVQKYGPKRWSVIAKHLKGRIGKQCRERWHNHLNPEVKKTSWTEEEDRIIYQAHKRLGNRWAEIAKLLPGRTDNAIKNHWNSTMRRKVEQEGYLQESSKASQPAVATSFQKNSHLMGFAQAPPTAQLPATGQPTVNNDYSYYHISEAQNVSSHVPYPVALHVNIVNVPQPAAAAIQRHYNDEDPEKEKRIKELELLLMSTENELKGQQVLPTQNHTCSYPGWHSTTIADHTRPHGDSAPVSCLGEHHSTPSLPADPGSLPEESASPARCMIVHQGTILDNVKNLLEFAETLQFIDSFLNTSSNHENSDLEMPSLTSTPLIGHKLTVTTPFHRDQTVKTQKENTVFRTPAIKRSILESSPRTPTPFKHALAAQEIKYGPLKMLPQTPSHLVEDLQDVIKQESDESGIVAEFQENGPPLLKKIKQEVESPTDKSGNFFCSHHWEGDSLNTQLFTQTSPVADAPTGVQWHDFGSLQPLPPGFKRFSCLSLPRSWDYRHPPPRPANFEFLVETGFLHVGQAGLELLTSGDLPASASQSARITGVSHRARPDNILTSSVLMAPASEDEDNVLKAFTVPKNRSLASPLQPCSSTWEPASCGKMEEQMTSSSQARKYVNAFSARTLVM

SEQ ID NO: 12007 - protein, 685 aa, Homo sapiens
LRNFAPAVRSAAAQPGRDAGRRRAAGGGSPVRSPRLSAEPRARRAMARRPRHSIYSSDEDDEDFEMCDHDYDGLLPKSGKRHLGKTRWTREEDEKLKKLVEQNGTDDWKVIANYLPNRTDVQCQHRWQKVLNPELIKGPWTKEEDQRVIELVQKYGPKRWSVIAKHLKGRIGKQCRERWHNHLNPEVKKTSWTEEEDRIIYQAHKRLGNRWAEIAKLLPGRTDNAIKNHWNSTMRRKVEQEGYLQESSKASQPAVATSFQKNSHLMGFAQAPPTAQLPATGQPTVNNDYSYYHISEAQNVSSHVPYPVALHVNIVNVPQPAAAAIQRHYNDEDPEKEKRIKELELLLMSTENELKGQQVLPTQNHTCSYPGWHSTTIADHTRPHGDSAPVSCLGEHHSTPSLPADPGSLPEESASPARCMIVHQGTILDNVKNLLEFAETLQFIDSFLNTSSNHENSDLEMPSLTSTPLIGHKLTVTTPFHRDQTVKTQKENTVFRTPAIKRSILESSPRTPTPFKHALAAQEIKYGPLKMLPQTPSHLVEDLQDVIKQESDESGIVAEFQENGPPLLKKIKQEVESPTDKSGNFFCSHHWEGDSLNTQLFTQTSPVADAPNILTSSVLMAPASEDEDNVLKAFTVPKNRSLASPLQPCSSTWEPASCGKMEEQMTSSSQARKYVNAFSARTLVM

SEQ ID NO: 12008 - protein, 649 aa, Homo sapiens
VRSAAAQPGRDAGRRRAAGGGSPVRSPRLSAEPRARRAMARRPRHSIYSSDEDDEDFEMCDHDYDGLLPKSGKRHLGKTRWTREEDEKLKKLVEQNGTDDWKVIANYLPNRTDVQCQHRWQKVLNPELIKGPWTKEEDQRVIELVQKYGPKRWSVIAKHLKGRIGKQCRERWHNHLNPEVKKTSWTEEEDRIIYQAHKRLGNRWAEIAKLLPGRTDNAIKNHWNSTMRRKVEQEGYLQESSKASQPAVATSFQKNSHLMGFAQAPPTAQLPATGQPTVNNDYSYYHISEAQNVSSHVPYPVALHVNIVNVPQPAAAAIQRHYNDEDPEKEKRIKELELLLMSTENELKGQQVLPTQNHTCSYPGWHSTTIADHTRPHGDSAPVSCLGEHHSTPSLPADPGSLPEESASPARCMIVHQGTILDNVKNLLEFAETLQFIDSFLNTSSNHENSDLEMPSLTSTPLIGHKLTVTTPFHRDQTVKTQKENTVFRTPAIKRSILESSPRTPTPFKHALAAQEIKYGPLKMLPQTPSHLVEDLQDVIKQESDESGIVAEFQENGPPLLKKIKQEVESPTDKSGNFFCSHHWEGDSLNTQLFTQTSPVADAPNILTSSVLMAPASEDEDNVLKAFTVPKNRSLASPLQVITIPTLVF

SEQ ID NO: 12009 - protein, 314 aa, Homo sapiens
VRSPRLSAEPRARRAMARRPRHSIYSSDEDDEDFEMCDHDYDGLLPKSGKRHLGKTRWTREENRTDVQCQHRWQKVLNPELIKGPWTKEEDQRVIELVQKYGPKRWSVIAKHLKGRIGKQCRERWHNHLNPEVKKTSWTEEEDRIIYQAHKRLGNRWAEIAKLLPGRTDNAIKNHWNSTMRRKVEQEGYLQESSKASQPAVATSFQKNSHLMGFAQAPPTAQLPATGQPTVNNDYSYYHISEAQNVSSHVPYPVALHVNIVNVPQPAAAAIQRHYNDEDPEKEKRIKELELLLMSTENELKGQQVLPVRLSSCA

SEQ ID NO: 12010 - protein, 189 aa, Homo sapiens
LSSSRVLGPKKKIRETDNAIKNHWNSTMRRKVEQEGYLQESSKASQPAVATSFQKNSHLMGFAQAPPTAQLPATGQPTVNNDYSYYHISEAQNVSSHVPYPVALHVNIVNVPQPAAAAIQRHYNDEDPEKEKRIKELELLLMSTENELKGQQVLPLCGPLLNSDIFSDWAANWDGSLCFATYIVNQQRQ

SEQ ID NO: 12011 - protein, 479 aa, Homo sapiens
LSSSRVLGPKKKIRETDNAIKNHWNSTMRRKVEQEGYLQESSKASQPAVATSFQKNSHLMGFAQAPPTAQLPATGQPTVNNDYSYYHISEAQNVSSHVPYPVALHVNIVNVPQPAAAAIQRHYNDEDPEKEKRIKELELLLMSTENELKGQQVLPTQNHTCSYPGWHSTTIADHTRPHGDSAPVSCLGEHHSTPSLPADPGSLPEESASPARCMIVHQGTILDNVKNLLEFAETLQFIDSFLNTSSNHENSDLEMPSLTSTPLIGHKLTVTTPFHRDQTVKTQKENTVFRTPAIKRSILESSPRTPTPFKHALAAQEIKYGPLKMLPQTPSHLVEDLQDVIKQESDESGIVAEFQENGPPLLKKIKQEVESPTDKSGNFFCSHHWEGDSLNTQLFTQTSPVADAPNILTSSVLMAPASEDEDNVLKAFTVPKNRSLASPLQPCSSTWEPASCGKMEEQMTSSSQARKYVNAFSARTLVM

SEQ ID NO: 12012 - protein, 58 aa, Homo sapiens
LSISLSVLFQFLNTSSNHENSDLEMPSLTSTPLIGHKLTVTTPFHRDQTVKTQKENTV

SEQ ID NO: 12013 - protein, 249 aa, Homo sapiens
LSISLSVLFQFLNTSSNHENSDLEMPSLTSTPLIGHKLTVTTPFHRDQTVKTQKENTVFRTPAIKRSILESSPRTPTPFKHALAAQEIKYGPLKMLPQTPSHLVEDLQDVIKQESDESGIVAEFQENGPPLLKKIKQEVESPTDKSGNFFCSHHWEGDSLNTQLFTQTSPVADAPNILTSSVLMAPASEDEDNVLKAFTVPKNRSLASPLQPCSSTWEPASCGKMEEQMTSSSQARKYVNAFSARTLVM

SEQ ID NO: 12014 - protein, 363 aa, Homo sapiens
LFQDSSSWCDLSSFEFFEEADFSPSQHHTGKALQLQQREGNGTKPAGEPSPRVNKRMLSESSLDPPKVLPPARHSTIPLVILRKKRGQASPLATGDCSSFIFADVSSSTPKRSPVKSLPFSPSQFLNTSSNHENSDLEMPSLTSTPLIGHKLTVTTPFHRDQTVKTQKENTVFRTPAIKRSILESSPRTPTPFKHALAAQEIKYGPLKMLPQTPSHLVEDLQDVIKQESDESGIVAEFQENGPPLLKKIKQEVESPTDKSGNFFCSHHWEGDSLNTQLFTQTSPVADAPNILTSSVLMAPASEDEDNVLKAFTVPKNRSLASPLQPCSSTWEPASCGKMEEQMTSSSQARKYVNAFSARTLVM

SEQ ID NO: 12015 - protein, 371 aa, Homo sapiens
LSTAFEKVLLIWENKDYGSTRSIVRIIGKMLPLEPCRRPNFELIPLLNSVDSDNCGSMVPSFADILYVANDEEASYLRFRNSIWKNEEEKVEIFHPLRLVRDPLSPAVRQKETVKNDLPVNEAAIRKIAALENELTFLRSQIAAIVEMQELKNSTNSSSFGLSDERISLGQLSSSRAAHLSVDPDQLPGSVLSPPPPPPLPPQFSSLQPPCFPPVQPGSNNICDSDNPATEMSKQNPAANKTNYSHHSKSQRNKDIPNMLDVLKDMNKVKLRAIERSPGGRPIHKRKRQNSHWDPVSLISHALKQKFAFQEDDSFEKENRSWESSPFSSPETSRFGHHISQSEGQRTKEEMVNTKAVDQGISNTSLLNSRI

SEQ ID NO: 12016 - protein, 393 aa, Homo sapiens
LASVFASSMSLILNILREMLEYFGVPVEQVLLIWENKDYGSTRSIVRIIGKMLPLEPCRRPNFELIPLLNSVDSDNCGSMVPSFADILYVANDEEASYLRFRNSIWKNEEEKVEIFHPLRLVRDPLSPAVRQKETVKNDLPVNEAAIRKIAALENELTFLRSQIAAIVEMQELKNSTNSSSFGLSDERISLGQLSSSRAAHLSVDPDQLPGSVLSPPPPPPLPPQFSSLQPPCFPPVQPGSNNICDSDNPATEMSKQNPAANKTNYSHHSKSQRNKDIPNMLDVLKDMNKVKLRAIERSPGGRPIHKRKRQNSHWDPVSLISHALKQKFAFQEDDSFEKENRSWESSPFSSPETSRFGHHISQSEGQRTKEEMVNTKAVDQGISNTSLLNSRI

SEQ ID NO: 12017 - protein, 19 aa, Homo sapiens
MVFLAFLSREMAAVWLQRR

SEQ ID NO: 12018 - protein, 891 aa, Homo sapiens
LRSLQSSWRAKRAWSPRGRSGESGRQERSHPQPTLPASEPDPRRPWSVASARSLPRPPPAARSCLDQDLGLCERIAGPGEVTAAPPGEVTAAPPGEVLESTMAEQVLPQALYLSNMRKAVKIRERTPEDIFKPTNGIIHHFKTMHRYTLEMFRTCQFCPQFREIIHKALIDRNIQATLESQKKLNWCREVRKLVALKTNGDGNCLMHATSQYMWGVQDTDLVLRKALFSTLKETDTRNFKFRWQLESLKSQEFVETGLCYDTRNWNDEWDNLIKMASTDTPMARSGLQYNSLEEIHIFVLCNILRRPIIVISDKMLRSLESGSNFAPLKVGGIYLPLHWPAQECYRYPIVLGYDSHHFVPLVTLKDSGPEIRAVPLVNRDRGRFEDLKVHFLTDPENEMKEKLLKEYLMVIEIPVQGWDHGTTHLINAAKLDEANLPKEINLVDDYFELVQHEYKKWQENSEQGRREGHAQNPMEPSVPQLSLMDVKCETPNCPFFMSVNTQPLCHECSERRQKNQNKLPKLNSKPGPEGLPGMALGASRGEAYEPLAWNPEESTGGPHSAPPTAPSPFLFSETTAMKCRSPGCPFTLNVQHNGFCERCHNARQLHASHAPDHTRHLDPGKCQACLQDVTRTFNGICSTCFKRTTAEASSSLSTSLPPSCHQRSKSDPSRLVRSPSPHSCHRAGNDAPAGCLSQAARTPGDRTGTSKCRKAGCVYFGTPENKGFCTLCFIEYRENKHFAAASGKVSPTASRFQNTIPCLGRECGTLGSTMFEGYCQKCFIEAQNQRFHEAKRTEEQLRSSQRRDVPRTTQSTSRPKCARASCKNILACRSEELCMECQHPNQRMGPGAHRGEPAPEDPPKQRCRAPACDHFGNAKCNGYCNECFQFKQMYG

SEQ ID NO: 12019 - protein, 807 aa, Homo sapiens
LGLCERIAGPGEVLESTMAEQVLPQALYLSNMRKAVKIRERTPEDIFKPTNGIIHHFKTMHRYTLEMFRTCQFCPQFREIIHKALIDRNIQATLESQKKLNWCREVRKLVALKTNGDGNCLMHATSQYMWGVQDTDLVLRKALFSTLKETDTRNFKFRWQLESLKSQEFVETGLCYDTRNWNDEWDNLIKMASTDTPMARSGLQYNSLEEIHIFVLCNILRRPIIVISDKMLRSLESGSNFAPLKVGGIYLPLHWPAQECYRYPIVLGYDSHHFVPLVTLKDSGPEIRAVPLVNRDRGRFEDLKVHFLTDPENEMKEKLLKEYLMVIEIPVQGWDHGTTHLINAAKLDEANLPKEINLVDDYFELVQHEYKKWQENSEQGRREGHAQNPMEPSVPQLSLMDVKCETPNCPFFMSVNTQPLCHECSERRQKNQNKLPKLNSKPGPEGLPGMALGASRGEAYEPLAWNPEESTGGPHSAPPTAPSPFLFSETTAMKCRSPGCPFTLNVQHNGFCERCHNARQLHASHAPDHTRHLDPGKCQACLQDVTRTFNGICSTCFKRTTAEASSSLSTSLPPSCHQRSKSDPSRLVRSPSPHSCHRAGNDAPAGCLSQAARTPGDRTGTSKCRKAGCVYFGTPENKGFCTLCFIEYRENKHFAAASGKVSPTASRFQNTIPCLGRECGTLGSTMFEGYCQKCFIEAQNQRFHEAKRTEEQLRSSQRRDVPRTTQSTSRPKCARASCKNILACRSEELCMECQHPNQRMGPGAHRGEPAPEDPPKQRCRAPACDHFGNAKCNGYCNECFQFKQMYG

SEQ ID NO: 12020 - protein, 219 aa, Homo sapiens
VLESTMAEQVLPQALYLSNMRKAVKIRERTPEDIFKPTNGIIHHFKTMHRYTLEMFRTCQFCPQFREIIHKALIDRNIQATLESQKKLNWCREVRKLVALKTNGDGNCLMHATSQYMWGVQDTDLVLRKALFSTLKETDTRNFKFRWQLESLKSQEFVETGLCYDTRNWNDEWDNLIKWLPQTHPWPEVDFSTTHWKKYTYLSFATSSEGQSLSFQTKC

SEQ ID NO: 12021 - protein, 475 aa, Homo sapiens
VLESTMAEQVLPQALYLSNMRKAVKIRERTPEDIFKPTNGIIHHFKTMHRYTLEMFRTCQFCPQFREIIHKALIDRNIQATLESQKKLNWCREVRKLVALKTNGDGNCLMHATSQYMWGVQDTDLVLRKALFSTLKETDTRNFKFRWQLESLKSQEFVETGLCYDTRNWNDEWDNLIKMASTDTPMARSGLQYNSLEEIHIFVLCNILRRPIIVISDKMLRSLESGSNFAPLKVGGIYLPLHWPAQECYRYPIVLGYDSHHFVPLVTLKDSGPEIRAVPLVNRDRGRFEDLKVHFLTDPENEMKEKLLKEYLMVIEIPVQGWDHGTTHLINAAKLDEANLPKEINLVDDYFELVQHEYKKWQENSEQGRREGHAQNPMEPSVPQLSLMDVKCETPNCPFFMSVNTQPLCHECSERRQKNQNKLPKLNSKPGPEGLPGMALGASRGEAYEPLAWNPEESTGGSFGPTDSTQPFSVQ

SEQ ID NO: 12022 - protein, 536 aa, Homo sapiens
VLESTMAEQVLPQALYLSNMRKAVKIRERTPEDIFKPTNGIIHHFKTMHRYTLEMFRTCQFCPQFREIIHKALIDRNIQATLESQKKLNWCREVRKLVALKTNGDGNCLMHATSQYMWGVQDTDLVLRKALFSTLKETDTRNFKFRWQLESLKSQEFVETGLCYDTRNWNDEWDNLIKMASTDTPMARSGLQYNSLEEIHIFVLCNILRRPIIVISDKMLRSLESGSNFAPLKVGGIYLPLHWPAQECYRYPIVLGYDSHHFVPLVTLKDSGPEIRAVPLVNRDRGRFEDLKVHFLTDPENEMKEKLLKEYLMVIEIPVQGWDHGTTHLINAAKLDEANLPKEINLVDDYFELVQHEYKKWQENSEQGRREGHAQNPMEPSVPQLSLMDVKCETPNCPFFMSVNTQPLCHECSERRQKNQNKLPKLNSKPGPEGLPGMALGASRGEAYEPLAWNPEESTGGPHSAPPTAPSPFLFSETTAMKCRSPGCPFTLNVQHNGFCERCHNARQLRQPRPRPHKALGSREVPSLPPGCYQDI

SEQ ID NO: 12023 - protein, 674 aa, Homo sapiens
VLESTMAEQVLPQALYLSNMRKAVKIRERTPEDIFKPTNGIIHHFKTMHRYTLEMFRTCQFCPQFREIIHKALIDRNIQATLESQKKLNWCREVRKLVALKTNGDGNCLMHATSQYMWGVQDTDLVLRKALFSTLKETDTRNFKFRWQLESLKSQEFVETGLCYDTRNWNDEWDNLIKMASTDTPMARSGLQYNSLEEIHIFVLCNILRRPIIVISDKMLRSLESGSNFAPLKVGGIYLPLHWPAQECYRYPIVLGYDSHHFVPLVTLKDSGPEIRAVPLVNRDRGRFEDLKVHFLTDPENEMKEKLLKEYLMVIEIPVQGWDHGTTHLINAAKLDEANLPKEINLVDDYFELVQHEYKKWQENSEQGRREGHAQNPMEPSVPQLSLMDVKCETPNCPFFMSVNTQPLCHECSERRQKNQNKLPKLNSKPGPEGLPGMALGASRGEAYEPLAWNPEESTGGPHSAPPTAPSPFLFSETTAMKCRSPGCPFTLNVQHNGFCERCHNARQLHASHAPDHTRHLDPGKCQACLQDVTRTFNGICSTCFKRTTAEASSSLSTSLPPSCHQRSKSDPSRLVRSPSPHSCHRAGNDAPAGCLSQAARTPGDRTGTSKCRKAGCVYFGTPENKGFCTLFHRVQRKQTFCCCLRESQSHSVQVPEHHSVPGEGMRHPWKHHV

SEQ ID NO: 12024 - protein, 754 aa, Homo sapiens
VLESTMAEQVLPQALYLSNMRKAVKIRERTPEDIFKPTNGIIHHFKTMHRYTLEMFRTCQFCPQFREIIHKALIDRNIQATLESQKKLNWCREVRKLVALKTNGDGNCLMHATSQYMWGVQDTDLVLRKALFSTLKETDTRNFKFRWQLESLKSQEFVETGLCYDTRNWNDEWDNLIKMASTDTPMARSGLQYNSLEEIHIFVLCNILRRPIIVISDKMLRSLESGSNFAPLKVGGIYLPLHWPAQECYRYPIVLGYDSHHFVPLVTLKDSGPEIRAVPLVNRDRGRFEDLKVHFLTDPENEMKEKLLKEYLMVIEIPVQGWDHGTTHLINAAKLDEANLPKEINLVDDYFELVQHEYKKWQENSEQGRREGHAQNPMEPSVPQLSLMDVKCETPNCPFFMSVNTQPLCHECSERRQKNQNKLPKLNSKPGPEGLPGMALGASRGEAYEPLAWNPEESTGGPHSAPPTAPSPFLFSETTAMKCRSPGCPFTLNVQHNGFCERCHNARQLHASHAPDHTRHLDPGKCQACLQDVTRTFNGICSTCFKRTTAEASSSLSTSLPPSCHQRSKSDPSRLVRSPSPHSCHRAGNDAPAGCLSQAARTPGDRTGTSKCRKAGCVYFGTPENKGFCTLCFIEYRENKHFAAASGKVSPTASRFQNTIPCLGRECGTLGSTMFEGYCQKCFIEAQNQRFHEAKRTEEQLRSSQRRDVPRTTQSTSRPKCARASCKNILACRSEELCMECQHQPEDGPWGPPG

SEQ ID NO: 12025 - protein, 623 aa, Homo sapiens
MGQSYQMASTDTPMARSGLQYNSLEEIHIFVLCNILRRPIIVISDKMLRSLESGSNFAPLKVGGIYLPLHWPAQECYRYPIVLGYDSHHFVPLVTLKDSGPEIRAVPLVNRDRGRFEDLKVHFLTDPENEMKEKLLKEYLMVIEIPVQGWDHGTTHLINAAKLDEANLPKEINLVDDYFELVQHEYKKWQENSEQGRREGHAQNPMEPSVPQLSLMDVKCETPNCPFFMSVNTQPLCHECSERRQKNQNKLPKLNSKPGPEGLPGMALGASRGEAYEPLAWNPEESTGGPHSAPPTAPSPFLFSETTAMKCRSPGCPFTLNVQHNGFCERCHNARQLHASHAPDHTRHLDPGKCQACLQDVTRTFNGICSTCFKRTTAEASSSLSTSLPPSCHQRSKSDPSRLVRSPSPHSCHRAGNDAPAGCLSQAARTPGDRTGTSKCRKAGCVYFGTPENKGFCTLCFIEYRENKHFAAASGKVSPTASRFQNTIPCLGRECGTLGSTMFEGYCQKCFIEAQNQRFHEAKRTEEQLRSSQRRDVPRTTQSTSRPKCARASCKNILACRSEELCMECQHPNQRMGPGAHRGEPAPEDPPKQRCRAPACDHFGNAKCNGYCNECFQFKQMYG

SEQ ID NO: 12026 - protein, 208 aa, Homo sapiens
LETTPLLAACLKLHGLLGTGRGRASAEKPAACILGLQKTRAFAHCFIEYRENKHFAAASGKVSPTASRFQNTIPCLGRECGTLGSTMFEGYCQKCFIEAQNQRFHEAKRTEEQLRSSQRRDVPRTTQSTSRPKCARASCKNILACRSEELCMECQHPNQRMGPGAHRGEPAPEDPPKQRCRAPACDHFGNAKCNGYCNECFQFKQMYG

SEQ ID NO: 12027 - protein, 19 aa, Homo sapiens
LQAMRFFAGQGWECLFINN

SEQ ID NO: 12028 - protein, 8 aa, Homo sapiens
MRNIMMFM

SEQ ID NO: 12029 - protein, 234 aa, Homo sapiens
LDATSPPSVFGAEIAKTEGLEMADHMMAMNHGRFPDGTNGLHHHPAHRMGMGQFPSPHHHQQQQPQHAFNALMGEHIHYGAGNMNATSGIRHAMGPGTVNGGHPPSALAPAARFNNSQFMGPPVASQGGSLPASMQLQKLNNQYFNHHPYPHNHYMPDLHPAAGHQMNGTNQHFRDCNPNVIDTDFIDEEVLMSLVIEMGLDRIKELPELWLGQNEFDFMTDFVCKQQPSRVSC

SEQ ID NO: 12030 - protein, 341 aa, Homo sapiens
LPSCEGNGGEIKGNGSESAPAAAARPRRRHRDSEALCTPGRSPLCAAEPVLDATSPPSVFGAEIAKTEGLEMADHMMAMNHGRFPDGTNGLHHHPAHRMGMGQFPSPHHHQQQQPQHAFNALMGEHIHYGAGNMNATSGIRHAMGPGTVNGGHPPSALAPAARFNNSQFMGPPVASQGGSLPASMQLQKLNNQYFNHHPYPHNHYMPDLHPAAGHQMNGTNQHFRDCNPKHSGGSSTPGGSGGSSTPGGSGSSSGGGAGSSNSGGGSGSGNMPASVAHVPAAMLPPNVIDTDFIDEEVLMSLVIEMGLDRIKELPELWLGQNEFDFMTDFVCKQQPSRVSC

SEQ ID NO: 12031 - protein, 193 aa, Homo sapiens
LGMEAKAAPKPAASGACSVSAEETEKWMEEAMHMAKEALENTEVPVGCLMVYNNEVVGKGRNEVNQTKNATRHAEMVAIDQVLDWCRQSGKSPSEVFEHTVLYVTVEPCIMCAAALRLMKIPLVVYGCQNERFGGCGSVLNIASADLPNTGRPFQCIPGYRAEEAVEMLKTFYKQENPNAPKSKVRKKECQKS

SEQ ID NO: 12032 - protein, 631 aa, Homo sapiens
VLRPRRREPMAEAGWRPAASPVDPAGQAAAVPVPEPEAPAPPAAPALRWLPGDPSPRGRSQSDLSSSSSRGRPLRVHISGSVDGLDKASIANSDGPTAGSQTPPFKRKGKLSTIGKIFKPWKWRKKKTSDKFRETSAVLERKISTRQSREELIRRGVLKELPDQDGDVTVNFENSNGHMIPIGEESTREENVVKSEEGNGSVSEKTPPLEEQAEDKKAGSSHSKKTTGSKASASPSTSSTSSRPKASKETVSSKAGTVGTTKGKRKTDKQPITSHLSSDTTTSGTSDLKGEPAETRVESFKLEQTVPGAEEQNTGKFKSMVPPPPVAPAPSPLAPPLPLEDQCITASDTPVVLVSVGADLPVSALDPSQLLWAEEPTNRTTLYSGTGLSVNRENAKCFTTKEELGKTVPQLLTPGLMGESSESFSASEDEGHREYQANDSDSDGPILYTDDEDEDEDEDGSGESALASKIRRRDTLAIKLGNRPSKKELEDKNILQRTSEEERQEIRQQIGTKLVRRLSQRPTTEELEQRNILKQKNEEEEQEAKMELKRRLSRKLSLRPTVAELQARRILRFNEYVEVTDSPDYDRRADKPWARLTPADKAAIRKELNEFKSTEMEVHEESRQFTRFHRP

SEQ ID NO: 12033 - protein, 173 aa, Homo sapiens
LIAGPGPATPVMGQTSVSTLSPQPGSVDGLDKASIANSDGPTAGSQTPPFKRKGKLSTIGKIFKPWKWRKKKTSDKFRETSAVLERKISTRQSREELIRRGVLKELPDQDGDVTVNFENSNGHMIPIGEESTREENVVKSEEGNGSVSEKTPPLEEQAEDKKGKIKTNPYYLL

SEQ ID NO: 12034 - protein, 164 aa, Homo sapiens
LIAGPGPATPVMGQTSVSTLSPQPGSVDGLDKASIANSDGPTAGSQTPPFKRKGKLSTIGKIFKPWKWRKKKTSDKFRETSAVLERKISTRQSREELIRRGVLKELPDQDGDVTVNFENSNGHMIPIGEESTREENVVKSEEGNGSVSEKTPPLEEQAEDKKDC

SEQ ID NO: 12035 - protein, 656 aa, Homo sapiens
LIAGPGPATPVMGQTSVSTLSPQPGSVDGLDKASIANSDGPTAGSQTPPFKRKGKLSTIGKIFKPWKWRKKKTSDKFRETSAVLERKISTRQSREELIRRGVLKELPDQDGDVTVNFENSNGHMIPIGEESTREENVVKSEEGNGSVSEKTPPLEEQAEDKKENTENHSETPAAPALPPSAPPKPRPKPKPKKSPVPPKGATAGASHKGDEVPPIKKNTKAPGKQAPVPPPKPASRNTTREAAGSSHSKKTTGSKASASPSTSSTSSRPKASKETVSSKAGTVGTTKGKRKTDKQPITSHLSSDTTTSGTSDLKGEPAETRVESFKLEQTVPGAEEQNTGKFKSMVPPPPVAPAPSPLAPPLPLEDQCITASDTPVVLVSVGADLPVSALDPSQLLWAEEPTNRTTLYSGTGLSVNRENAKCFTTKEELGKTVPQLLTPGLMGESSESFSASEDEGHREYQANDSDSDGPILYTDDEDEDEDEDGSGESALASKIRRRDTLAIKLGNRPSKKELEDKNILQRTSEEERQEIRQQIGTKLVRRLSQRPTTEELEQRNILKQKNEEEEQEAKMELKRRLSRKLSLRPTVAELQARRILRFNEYVEVTDSPDYDRRADKPWARLTPADKAAIRKELNEFKSTEMEVHEESRQFTRFHRP

SEQ ID NO: 12036 - protein, 576 aa, Homo sapiens
LIAGPGPATPVMGQTSVSTLSPQPGSVDGLDKASIANSDGPTAGSQTPPFKRKGKLSTIGKIFKPWKWRKKKTSDKFRETSAVLERKISTRQSREELIRRGVLKELPDQDGDVTVNFENSNGHMIPIGEESTREENVVKSEEGNGSVSEKTPPLEEQAEDKKAGSSHSKKTTGSKASASPSTSSTSSRPKASKETVSSKAGTVGTTKGKRKTDKQPITSHLSSDTTTSGTSDLKGEPAETRVESFKLEQTVPGAEEQNTGKFKSMVPPPPVAPAPSPLAPPLPLEDQCITASDTPVVLVSVGADLPVSALDPSQLLWAEEPTNRTTLYSGTGLSVNRENAKCFTTKEELGKTVPQLLTPGLMGESSESFSASEDEGHREYQANDSDSDGPILYTDDEDEDEDEDGSGESALASKIRRRDTLAIKLGNRPSKKELEDKNILQRTSEEERQEIRQQIGTKLVRRLSQRPTTEELEQRNILKQKNEEEEQEAKMELKRRLSRKLSLRPTVAELQARRILRFNEYVEVTDSPDYDRRADKPWARLTPADKAAIRKELNEFKSTEMEVHEESRQFTRFHRP

SEQ ID NO: 12037 - protein, 73 aa, Homo sapiens
VSTLSPQPGSVDGLDKASIANSDGPTAGSQTPPFKRKGKLSTIGKIFKPWKWRKKKTSDKFRETSAGMSIITC

SEQ ID NO: 12038 - protein, 129 aa, Homo sapiens
LSQRPTTEELEQRNILKQKNEEEEQEAKMELKRRLSRKLSLRPTVAELQARRILRFNEYVEVTDSPDYDRRADKPWARLTPADKARIPVDFVLIVLLFWKLQYPHPPYLSHPRGRDLTKYYNSFLPLII

SEQ ID NO: 12039 - protein, 29 aa, Homo sapiens
VLLTCVAQMAPTSKRKDAVTLAAQNAQRW

SEQ ID NO: 12040 - protein, 28 aa, Homo sapiens
MKMWINCGLHACCSYFSDGHTQNKMSFT

SEQ ID NO: 12041 - protein, 571 aa, Homo sapiens
VKAAGDWASIHCEDRRDTPCCSCLQGSERRKPGAGPAPVAAGHSMEHPSKMEFFQKLGYDREDVLRVLGKLGEGALVNDVLQELIRTGSRPGALEHPAAPRLVPRGSCGVPDSAQRGPGTALEEDFRTLASSLRPIVIDGSNVAMSHGNKETFSCRGIKLAVDWFRDRGHTYIKVFVPSWRKDPPRADTPIREQHVLAELERQAVLVYTPSRKVHGKRLVCYDDRYIVKVAYEQDGVIVSNDNYRDLQSENPEWKWFIEQRLLMFSFVNDRFMPPDDPLGRHGPSLSNFLSRKPKPPEPSWQHCPYGKKCTYGIKCKFYHPERPHHAQLAVADELRAKTGARPGAGAEEQRPPRAPGGSAGARAAPREPFAHSLPPARGSPDLAALRGSFSRLAFSDDLGPLGPPLPVPACSLTPRLGGPDWVSAGGRVPGPLSLPSPESQFSPGDLPPPPGLQLQPRGEHRPRDLHGDLLSPRRPPDDPWARPPRSDRFPGRSVWAEPAWGDGATGGLSVYATEDDEGDARARARIALYSVFPRDQVDRVMAAFPELSDLARLILLVQRCQSAGAPLGKP

SEQ ID NO: 12042 - protein, 196 aa, Homo sapiens
LWSWQSSCLQGSERRKPGAGPAPVAAGHSMEHPSKMEFFQKLGYDREDVLRVLGKLGEGALVNDVLQELIRTGSRPGALEHPAAPRLVPRGSCGVPDSAQRGPGTALEEDFRTLASSLRPIVIDGSNVAMSHGNKETFSCRGIKLAVDWFRDRGHTYIKVFVPSWRKDPPRADTPIRGIGMGNEWRSILLGAAARE

SEQ ID NO: 12043 - protein, 205 aa, Homo sapiens
LWSWQSSCLQGSERRKPGAGPAPVAAGHSMEHPSKMEFFQKLGYDREDVLRVLGKLGEGALVNDVLQELIRTGSRPGALEHPAAPRLVPRGSCGVPDSAQRGPGTALEEDFRTLASSLRPIVIDGSNVAMSHGNKETFSCRGIKLAVDWFRDRGHTYIKVFVPSWRKDPPRADTPIRGMLEQMYAQEVLDTFPWCTSNIDSQIST

SEQ ID NO: 12044 - protein, 9 aa, Homo sapiens
LAELMSAGL

SEQ ID NO: 12045 - protein, 8 aa, Homo sapiens
LLLMSAGL

SEQ ID NO: 12046 - protein, 31 aa, Homo sapiens
LQLNVTVACRKWSIGMKWLLVAAWRTPAALL

SEQ ID NO: 12047 - protein, 9 aa, Homo sapiens
MKSADRDEL

SEQ ID NO: 12048 - protein, 285 aa, Homo sapiens
VSPENQPSRAMGTRLPLVLRQLRRPPQPPGPPRRLRVPCRASSGGGGGGGGGREGLLGQRRPQDGQARSSCSPGGRTPAARDSIVREVIQNSKEVLSLLQEKNPAFKPVLAIIQAGDDNLMQEINQNLAEEAGLNITHICLPPDSSEAEIIDEILKINEDTRVHGLALQISENLFSNKVLNALKPEKDVDGVTDINLGKLVRGDAHECFVSPVAKAVIELLEKSGVNLDGKKILVVGAHGSLEAALQCLFQRKGSMTMSIQWKTRQLQSKTESRSVTRLECRRVI

SEQ ID NO: 12049 - protein, 130 aa, Homo sapiens
LQEKNPAFKPVLAIIQAGDDNLMQEINQNLAEEAGLNITHICLPPDSSEAEIIDEILKINEDTRVHGLALQISENLFSNKVLNALKPEKDVDGVTDINLGKLVRGDAHECFVSPVAKAVIELLEKSASRG

SEQ ID NO: 12050 - protein, 393 aa, Homo sapiens
VGEMFPQELAQKIKGYQEQIASLNSKCKMLTMKAKHATMLLTVTEVEGLAEGTEDLDGELLPTPSAHPSVVMDIAYYQALSAERLQTDAAKIHPSTSASQEFYEPGLEPSATAKLGDLQRSWETLKNVISEKQRTLYEALERQQKYQDSLQSISTKMEAIELKLSESPEPGRSPESQMAEHQSFLQALMDEILMLQDEINELQSSLAEELVSESCEADPAEQLALQSTLTVLAERMSTIRMKASGKRQLLEEKLNDQLEEQRQEQALQRYRCEADELDSWLLSTKATLDTALSPPKEPMDMEAQLMDCQNMLVEIEQKVVALSELSVHNENLLLEGKAHTKDEAEQLAGKLRRLKGSLLELQRALHDKQLNMQVRVPAAGPQLKVGTLFTCSF

SEQ ID NO: 12051 - protein, 1360 aa, Homo sapiens
LCRQSNNLCLQREEDLQRTRDYHDCMNVVEVFLEKFTTEWDNLARSDAESTAVHLEALKKLALALQERKYAIEDLKDQKQKMIEHLNLDDKELVKEQTSHLEQRWFQLEDLIKRKIQVSVTNLEELNVVQSRFQELMEWAEEQQPNIAEALKQSPPPDMAQNLLMDHLAICSELEAKQMLLKSLIKDADRVMADLGLNERQVIQKALSDAQSHVNCLSDLVGQRRKYLNKALSEKTQFLMAVFQATSQIQQHERKIMFREHICLLPDDVSKQVKTCKSAQASLKTYQNEVTGLWAQGRELMKEVTEQEKSEVLGKLQELQSVYDSVLQKCSHRLQELEKNLVSRKHFKEDFDKACHWLKQADIVTFPEINLMNESSELHTQLAKYQNILEQSPEYENLLLTLQRTGQTILPSLNEVDHSYLSEKLNALPRQFNVIVALAKDKFYKVQEAILARKEYASLIELTTQSLSELEAQFLRMSKVPTDLAVEEALSLQDGCRAILDEVAGLGEAVDELNQKKEGFRSTGQPWQPDKMLHLVTLYHRLKRQTEQRVSLLEDTTSAYQEHEKMCQQLERQLKSVKEEQSKVNEETLPAEEKLKMYHSLAGSLQDSGIVLKRVTIHLEDLAPHLDPLAYEKARHQIQSWQGELKLLTSAIGETVTECESRMVQSIDFQTEMSRSLDWLRRVKAELSGPVYLDLNLQDIQEEIRKIQIHQEEVQSSLRIMNALSHKEKEKFTKAKELISADLEHSLAELSELDGDIQEALRTRQATLTEIYSQCQRYYQVFQAANDWLEDAQELLQLAGNGLDVESAEENLKSHMEFFSTEDQFHSNLEELHSLVATLDPLIKPTGKEDLEQKVASLELRSQRMSRDSGAQVDLLQRCTAQWHDYQKAREEVIELMNDTEKKLSEFSLLKTSSSHEAEEKLSEHKALVSVVNSFHEKIVALEEKASQLEKTGNDASKATLSRSMTTVWQRWTRLRAVAQDQEKILEDAVDEWTGFNNKVKKATEMIDQLQDKLPGSSAEKASKAELLTLLEYHDTFVLELEQQQSALGMLRQQTLSMLQDGAAPTPGEEPPLMQEITAMQDRCLNMQEKVKTNGKLVKQELKDREMVETQINSVKCWVQETKEYLGNPTIEIDAQLEELQILLTEATNHRQNIEKMAEEQKEKYLGLYTILPSELSLQLAEVALDLKIRDQIQDKIKEVEQSKATSQELSRQIQKLAKDLTTILTKLKAKTDNVVQAKTDQKVLGEELDGCNSKLMELDAAVQKFLEQNGQLGKPLAKKIGKLTELHQQTIRQAENRLSKLNQAASHLEEYNEMLELILKWIEKAKVLAHGTIAWNSASQLREQYILHQVTLGKIIFKK

SEQ ID NO: 12052 - protein, 1466 aa, Homo sapiens
LCRQSNNLCLQREEDLQRTRDYHDCMNVVEVFLEKFTTEWDNLARSDAESTAVHLEALKKLALALQERKYAIEDLKDQKQKMIEHLNLDDKELVKEQTSHLEQRWFQLEDLIKRKIQVSVTNLEELNVVQSRFQELMEWAEEQQPNIAEALKQSPPPDMAQNLLMDHLAICSELEAKQMLLKSLIKDADRVMADLGLNERQVIQKALSDAQSHVNCLSDLVGQRRKYLNKALSEKTQFLMAVFQATSQIQQHERKIMFREHICLLPDDVSKQVKTCKSAQASLKTYQNEVTGLWAQGRELMKEVTEQEKSEVLGKLQELQSVYDSVLQKCSHRLQELEKNLVSRKHFKEDFDKACHWLKQADIVTFPEINLMNESSELHTQLAKYQNILEQSPEYENLLLTLQRTGQTILPSLNEVDHSYLSEKLNALPRQFNVIVALAKDKFYKVQEAILARKEYASLIELTTQSLSELEAQFLRMSKVPTDLAVEEALSLQDGCRAILDEVAGLGEAVDELNQKKEGFRSTGQPWQPDKMLHLVTLYHRLKRQTEQRVSLLEDTTSAYQEHEKMCQQLERQLKSVKEEQSKVNEETLPAEEKLKMYHSLAGSLQDSGIVLKRVTIHLEDLAPHLDPLAYEKARHQIQSWQGELKLLTSAIGETVTECESRMVQSIDFQTEMSRSLDWLRRVKAELSGPVYLDLNLQDIQEEIRKIQIHQEEVQSSLRIMNALSHKEKEKFTKAKELISADLEHSLAELSELDGDIQEALRTRQATLTEIYSQCQRYYQVFQAANDWLEDAQELLQLAGNGLDVESAEENLKSHMEFFSTEDQFHSNLEELHSLVATLDPLIKPTGKEDLEQKVASLELRSQRMSRDSGAQVDLLQRCTAQWHDYQKAREEVIELMNDTEKKLSEFSLLKTSSSHEAEEKLSEHKALVSVVNSFHEKIVALEEKASQLEKTGNDASKATLSRSMTTVWQRWTRLRAVAQDQEKILEDAVDEWTGFNNKVKKATEMIDQLQDKLPGSSAEKASKAELLTLLEYHDTFVLELEQQQSALGMLRQQTLSMLQDGAAPTPGEEPPLMQEITAMQDRCLNMQEKVKTNGKLVKQELKDREMVETQINSVKCWVQETKEYLGNPTIEIDAQLEELQILLTEATNHRQNIEKMAEEQKEKYLGLYTILPSELSLQLAEVALDLKIRDQTLEDLLGRMTWQVHGLFIFLRQSLALSPRLECSETISAYCNLLGLSSSRASASQVAGIPGMHHHTRLIFCIFSKKRQGFAMLASLVSNSWPQVSCLPQPPKVLGLQIQDKIKEVEQSKATSQELSRQIQKLAKDLTTILTKLKAKTDNVVQAKTDQKVLGEELDGCNSKLMELDAAVQKFLEQNGQLGKPLAKKIGKLTELHQQTIRQAENRLSKLNQAASHLEEYNEMLELILKWIEKAKVLAHGTIAWNSASQLREQYILHQVTLGKIIFKK

SEQ ID NO: 12053 - protein, 961 aa, Homo sapiens
LSLWDGQLENHFCHFQEKVSRLDRIVAEHNQFSLGIKELQDWMTDAIHMLDSYCHPTSDKSVLDSRTLKLEALLSVKQEKEIQMKMIVTRGESVLQNTSPEGIPTIQQQLQSVKDMWASLLSAGIRCKSQLEGALSKWTSYQDGVRQFSGWMDSMEANLNESERQHAELRDKTTMLGKAKLLNEEVLSYSSLLETIEVKGAGMTEHYVTQLELQDLQERYRAIQERAKEAVTKSEKLVRLHQEYQRDLKAFEVWLGQEQEKLDQYSVLEGDAHTHETTLRDLQELQVHCAEGQALLNSVLHTREDVIPSGIPQAEDRALESLRQDWQAYQHRLSETRTQFNNVVNKLRLMEQKFQQVDEWLKTAEEKVSPRTRRQSNRATKEIQLHQMKKWHEEVTAYRDEVEEVGARAQEILDESHVNSRMGCQATQLTSRYQALLLQVLEQIKFLEEEIQSLEESESSLSSYSDWYGSTHKNFKNVATKIDKVDTVMMGKKLKTLEVLLKDMEKGHSLLKSAREKGERAVKYLEEGEAERLRKEIHDHMEQLKELTSTVRKEHMTLEKGLHLAKEFSDKCKALTQWIAEYQEILHVPEEPKMELYEKKAQLSKYKSLQQTVLSHEPSVKSVREKGEALLELVQDVTLKDKIDQLQSDYQDLCSIGKEHVFSLEAKVKDHEDYNSELQEVEKWLLQMSGRLVAPDLLETSSLETITQQLAHHKAMMEEIAGFEDRLNNLQMKGDTLIGQCADHLQAKLKQNVHAHLQGTKDSYSAICSTAQRMYQSLEHELQKHVSRQDTLQQCQAWLSAVQPDLEPSPQPPLSRAEAIKQVKHFRALQEQARTYLDLLCSMCDLSNASVKTTAKDIQQTEQTIEQKLVQAQNLTQGWEEIKHLKSELWIYLQDADQQLQNMKRRHSELELNIAQNMVSQVKVGINLPPREIKEANRVENLKCVQCIHFNMPECLSILRH

SEQ ID NO: 12054 - protein, 284 aa, Homo sapiens
LENLVSQMALSEQEFSGQVAQLEQALEQFSALLKTWAQQLTLLEGKNTDEEIVECWHKGQEILDALQKAEPRTEDLKSQLNELCRFSRDLSTYSGKVSGLIKEYNCLCLQASKGCQNKEQILQQRFRKAFRDFQQWLVNAKITTAKCFDIPQNISEVSTSLQKIQEFLSESENGQHKLNMMLSKGELLSTLLTKEKAKGIQAKVTAAKEDWKNFHSNLHQKESALENLKIQMKDFEVSAEPIQDWLSKTEKMVHESSNRLYDLPAKRREQQKLQVMSPPPRSPI

SEQ ID NO: 12055 - protein, 42 aa, Homo sapiens
MVIYFSSVSKVSTTWKKILEDDKGAFQLYSKAIQRVTVSVCR

SEQ ID NO: 12056 - protein, 46 aa, Homo sapiens
LRKIEILLIHWCYDVALCLRNAQEILWEKNGACIHNFSFSSPPQPP

SEQ ID NO: 12057 - protein, 469 aa, Homo sapiens
LPGEFFFRFHPAHKHCHLLPPSLFTNVTTQSEISSFLSFLHFQQVPLRQKPRRKTQGFLTMSRRRISCKDLGHADCQGWLYKKKEKGSFLSNKWKKFWVILKGSSLYWYSNQMAEKADGFVNLPDFTVERASECKKKHAFKISHPQIKTFYFAAENVQEMNVWLNKLGSAVIHQESTTKDEECYSESEQEDPEIAAETPPPPHASQTQSLTAQQASSSSPSLSGTSYSFSSLENTVKTPSSFPSSLSKERQSLPDTVNSLSAAEDEGQPITFAVQVHSPVPSEAGIHKALENSFVTSESGFLNSLSSDDTSSLSSNHDHLTVPDKPAGSKIMDKEETKVSEDDEMEKLYKSLEQASLSPLGDRRPSTKKELRKSFVKRCKNPSINEKLHKIRTLNSTLKCKEHDLAMINQLLDDPKLTARKYREWKVMNTLLIQDIYQQQRASPAPDDTDDTPQELKKSPSSPSVENSI

SEQ ID NO: 12058 - protein, 99 aa, Homo sapiens
LHFQQVPLRQKPRRKTQGFLTMSRRRISCKDLGHADCQGWLYKKKEKGSFLSNKWKKFWVILKGSSLYWYSNQMAEKADGFVNLPDFTVERASECKKKQ

SEQ ID NO: 12059 - protein, 9 aa, Homo sapiens
LKQMRRLPE

SEQ ID NO: 12060 - protein, 12 aa, Homo sapiens
LVKPQKRDMLLS

SEQ ID NO: 12061 - protein, 648 aa, Homo sapiens
VISRNIPCWHHVRVKTVFASSLDILTILCLKGPSTEGIFRRAANEKARKELKEELNSGDAVDLERLPVHLLAVVFKDFLRSIPRKLLSSDLFEEWMGALEMQDEEDRIEALKQVADKLPRPNLLLLKHLVYVLHLISKNSEVNRMDSSNLAICIGPNMLTLENDQSLSFEAQKDLNNKVKTLVEFLIDNCFEIFGENIPVHSSITSDDSLEHTDSSDVSTLQNDSAYDSNDPDVESNSSSGISSPSRQPQVPMATAAGLDSAGPQDAREVSPEPIVSTVARLKSSLAQPDRRYSEPSMPSSQECLESRVTNQTLTKSEGDFPVPRVGSRLESEEAEDPFPEEVFPAVQGKTKRPVDLKIKNLAPGSVLPRALVLKAFSSSSLDASSDSSPVASPSSPKRNFFSRHQSFTTKTEKGKPSREIKKHSMSFTFAPHKKVLTKNLSAGSGKSQDFTRDHVPRGVRKESQLAGRIVQENGCETHNQTARGFCLRPHALSVDDVFQGADWERPGSPPSYEEAMQGPAARLVASESQTVGSMTVGSMRARMLEAHCLLPPLPPAHHVEDSRHRGSKEPLPGHGLSPLPERWKQSRTVHASGDSLGHVSGPGRPELLPLRTVSESVQRNKRDCLVRRCSQPVFEADQFQYAKESYI

SEQ ID NO: 12062 - protein, 743 aa, Homo sapiens [sequence omitted]

SEQ ID NO: 12063 - protein, 278 aa, Homo sapiens
VKSTPGQSAAILMKLRSSHNASKTLNANNMETLIECQSEGDIKEHPLLASCESEDSICQLIEVKKRKKVLSWPFLMRRLSPASDFSGALETDLKASLFDQPLSIICGDSDTLPRPIQDILTILCLKGPSTEGIFRRAANEKARKELKEELNSGDAVDLERLPVHLLAVVFKDFLRSIPRKLLSSDLFEEWMGALEMQDEEDRIEALKQVADKLPRPNLLLLKHLVYVLHLISKNSEVNRMDSSNLAICIGPNMLTLENDQSLSFEAQKDLNNKVCSAY

SEQ ID NO: 12064 - protein, 69 aa, Homo sapiens
VKSTPGQSAAILMKLRSSHNASKTLNANNMETLIECQSEGDIKEHPLLASCESEDSICQLIGHSHYSMP

SEQ ID NO: 12065 - protein, 42 aa, Homo sapiens
LARDPPRTEAQPHGSEIHPWTVSRNTDEAEKQPQCFKNTKRQ

SEQ ID NO: 12066 - protein, 7 aa, Homo sapiens
LDSQPQY

SEQ ID NO: 12067 - protein, 12 aa, Homo sapiens
MLFLPFFTAHRM

SEQ ID NO: 12068 - protein, 13 aa, Homo sapiens
LVSTRKGEYIIVV

SEQ ID NO: 12069 - protein, 122 aa, Homo sapiens
LNSTKARTSASIILRGANDFMCDEMERSLHDALCVVKRVLESKSVVPGGGAVEAALSIYLENYATSMGSREQLAIAEFARSLLVIPNTLAVNAAQDSTDLVAKLRAFHNEAQVNPERKNLKW

SEQ ID NO: 12070 - protein, 141 aa, Homo sapiens
LGHRSGTLHAVAATAVVAGRPRGRDTGCPRCKQNSTCIAAVKMEGPLSVFGDRSTGETIRSQNVMAAASIANIVKSSLGPVGLDKMLVDDIGDVTITNDGATILKLLEVEHPAAKVLCELADLQDKEVGDGTTSVACPRES

SEQ ID NO: 12071 - protein, 142 aa, Homo sapiens
LGHRSGTLHAVAATAVVAGRPRGRDTGCPRCKQNSTCIAAVKMEGPLSVFGDRSTGETIRSQNVMAAASIANIVKSSLGPVGLDKMLVDDIGDVTITNDGATILKLLEVEHPAAKVLCELADLQDKEVGDGTTSVGSSALYQ

SEQ ID NO: 12072 - protein, 93 aa, Homo sapiens
LSTVMAAASIANIVKSSLGPVGLDKMLVDDIGVSTHNCCVSFLKVKLSSVFCYVLSLTLSESTYWKVILKVNVYYNGAVLISISGSYFFLRIS

SEQ ID NO: 12073 - protein, 111 aa, Homo sapiens
MEGPLSVFGDRSTGETIRSQNVMAAASIANIVKSSLGPVGLDKMLVDDIGVSTHNCCVSFLKVKLSSVFCYVLSLTLSESTYWKVILKVNVYYNGAVLISISGSYFFLRIS

SEQ ID NO: 12074 - protein, 11 aa, Homo sapiens
MAAPGERLSRP

SEQ ID NO: 12075 - protein, 1006 aa, Homo sapiens
LVYLQQLFKSIPLYFYYFCLFSVAYGSVFCLQKQKNIAGALAFWMANASELLNFIKQDRDLSRITLDAQDVLAHLVQMAFKYLVHCLQSELNNYMPAFLDDPEENSLQRPKIDDVLHTLTGAMSLLRRCRVNAALTIQLFSQLFHFINMWLFNRLVTDPDSGLCSHYWGAIIRQQLGHIEAWAEKQGLELAADCHLSRIVQATTLLTMDKYAPDDIPNINSTCFKLNSLQLQALLQNYHCAPDEPFIPTDLIENVVTVAENTADELARSDGREVQLEEDPDLQLPFLLPEDGYSCDVVRNIPNGLQEFLDPLCQRGFCRLIPHTRSPGTWTIYFEGADYESHLLRENTELAQPLRKEPEIITVTLKKQNGMGLSIVAAKGAGQDKLGIYVKSVVKGGAADVDGRLAAGDQLLSVDGRSLVGLSQERAAELMTRTSSVVTLEVAKQGAIYHGLATLLNQPSPMMQRISDRRGSGKPRPKSEGFELYNNSTQNGSPESPQLPWAEYSEPKKLPGDDRLMKNRADHRSSPNVANQPPSPGGKSAYASGTTAKITSVSTGNLCTEEQTPPPRPEAYPIPTQTYTREYFTFPASKSQDRMAPPQNQWPNYEEKPHMHTDSNHSSIAIQRVTRSQEELREDKAYQLERHRIEAAMDRKSDSDMWINQSSSLDSSTSSQEHLNHSSKSVTPASTLTKSGPGRWKTPAAIPATPVAVSQPIRTDLPPPPPPPPVHYAGDFDGMSMDLPLPPPPSANQIGLPSAQVAAAERRKREEHQRWYEKEKARLEEERERKRREQERKLGQMRTQSLNPAPFSPLTAQQMKPEKPSTLQRPQETVIRELQPQQQPRTIERRDLQYITVSKEELSSGDSLSPDPWKRDAKEKLEKQQQMHIVDMLSKEIQELQSKPDRSAEESDRLRKLMLEWQFQKRLQESKQKDEDDEEEEDDDVDTMLIMQRLEAERRARLQDEERRRQQQLEEMRKREAEDRARQEEERRRQEEERTKRDAEEKVMVL

SEQ ID NO: 12076 - protein, 234 aa, Homo sapiens
MPCISGKPWWESRFSWRAPNGGSCEGLCRQVPVPQWLPKLVCGKCGWTGPGHSARAWGIHGVLLPPAGSEDSLDTSLRAHGVHATKHVPEKRPLPIRRKRSIEEAVPAVCKTRTVIYEIPRSQVDPTSANFLIWPPCVEVKRCTGCCNTSSVKCQPSRVHHRSVKVAKVEYVRKKPKLKEVQVRLEEHLECACATTSLNPDYREEDTGEWLPSSASVLENRSSEPCFWGVRWPP

SEQ ID NO: 12077 - protein, 389 aa, Homo sapiens
VKEAATLAMASPPACPSEEDESLKGCELYVQLHGIQQVLKDCIVHLCISKPERPMKFLREHFEKLEKEENRQILARQKSNSQSDSHDEEVSPTPPNPVVKARRRRGGVSAEVYTEEDAVSYVRKVIPKDYKTMTALAKAISKNVLFAHLDDNERSDIFDAMFPVTHIAGETVIQQGNEGDNFYVVDQGEVDVYVNGEWVTNISEGGSFGELALIYGTPRAATVKAKTDLKLWGIDRDSYRRILMGSTLRKRKMYEEFLSKVSILESLEKWERLTVADALEPVQFEDGEKIVVQGEPGDDFYIITEGTASVLQRRSPNEEYVEVGRLGPSDYFGEIALLLNRPRAATVVARGPLKCVKLDRPRFERVLGPCSEILKRNIQRYNSFISLTV

SEQ ID NO: 12078 - protein, 300 aa, Homo sapiens
LSPPCPLSPSVSPCPCPPSVSPVSSPHVPSVLSIVTPFVSSPPSTVTDSCPLSPTGYREGFLWKRGRDNGQFLSRKFVLTEREGALKYFNRNDAKEPKAVMKIEHLNATFQPAKIGHPHGLQVTYLKDNSTRNIFIYHEDGKEIVDWFNALRAARFHYLQVAFPGAGDADLVPKLSRNYLKEGYMEKTGPKQTEGFRKRWFTMDDRRLMYFKDPLDAFARGEVFIGSKESGYTVLHGFPPSTQGHHWPHGITIVTPDRKFLFACETESDQREWVAAFQKAVDRPMLPQEYAVEAHFKHKP

SEQ ID NO: 12079 - protein, 305 aa, Homo sapiens
LGVEKAGAAACAPGPCRACVWVVVSAMVLASLELLREQWIRAKYERQEFIYPEKQEPYSAGYREGFLWKRGRDNGQFLSRKFVLTEREGALKYFNRNDAKEPKAVMKIEHLNATFQPAKIGHPHGLQVTYLKDNSTRNIFIYHEDGKEIVDWFNALRAARFHYLQVAFPGAGDADLVPKLSRNYLKEGYMEKTGPKQTEGFRKRWFTMDDRRLMYFKDPLDAFARGEVFIGSKESGYTVLHGFPPSTQGHHWPHGITIVTPDRKFLFACETESDQREWVAAFQKAVDRPMLPQEYAVEAHFKHKP

SEQ ID NO: 12080 - protein, 350 aa, Homo sapiens
LGADPDWASYTLGVFICLSCSGIHRNIPQVSKVKSVRLDAWEEAQVEFMASHGNDAARARFESKVPSFYYRPTPSDCQLLREQWIRAKYERQEFIYPEKQEPYSAGYREGFLWKRGRDNGQFLSRKFVLTEREGALKYFNRNDAKEPKAVMKIEHLNATFQPAKIGHPHGLQVTYLKDNSTRNIFIYHEDGKEIVDWFNALRAARFHYLQVAFPGAGDADLVPKLSRNYLKEGYMEKTGPKQTEGFRKRWFTMDDRRLMYFKDPLDAFARGEVFIGSKESGYTVLHGFPPSTQGHHWPHGITIVTPDRKFLFACETESDQREWVAAFQKAVDRPMLPQEYAVEAHFKHKP

SEQ ID NO: 12081 - protein, 204 aa, Homo sapiens
VGDVGAGGRRMAKQKRKVPEVTEKKNKKLKKASAEGPLLGPEAAPSGEGAGSKGEAVLRPGLDAEPELSPEEQRVLERKLKKERKKEERQRLREAGLVAQHPPARRSGAELALDYLCRWAQKHKNWRFQKTRQTWLLLHMYDSDKVPDEHFSTLLAYLEGLQGRARELTVQKAEALMRELDEEGSDPPLPGRAQRIRQVLQLLS

SEQ ID NO: 12082 - protein, 199 aa, Homo sapiens
LFTLRMAKQKRKVPEVTEKKNKKLKKASAEGPLLGPEAAPSGEGAGSKGEAVLRPGLDAEPELSPEEQRVLERKLKKERKKEERQRLREAGLVAQHPPARRSGAELALDYLCRWAQKHKNWRFQKTRQTWLLLHMYDSDKVPDEHFSTLLAYLEGLQGRARELTVQKAEALMRELDEEGSDPPLPGRAQRIRQVLQLLS

SEQ ID NO: 12083 - protein, 62 aa, Homo sapiens
MAKQKRKVPEVTEKKNKKLKKASAEGPLLGPEAAPSGEGAGSKEPRRNGGPQGPRVSAGFPR

SEQ ID NO: 12084 - protein, 183 aa, Homo sapiens
VQGFMSGISPQQMGEPEGSWSGKNPGTMGASRLYTLVLVLQPQRVLLGMKKRGFGAGRWNGFGGKVQEGETIEDGARRELQEESGLTVDALHKVGQIVFEFVGEPELMDVHVFCTDSIQGTPVESDEMRPCWFQLDQIPFKDMWPDDSYWFPLLLQKKKFHGYFKFQGQDTILDYTLREVDTV

SEQ ID NO: 12085 - protein, 180 aa, Homo sapiens
LARASSTHVMADSALSPSFQNPGTMGASRLYTLVLVLQPQRVLLGMKKRGFGAGRWNGFGGKVQEGETIEDGARRELQEESGLTVDALHKVGQIVFEFVGEPELMDVHVFCTDSIQGTPVESDEMRPCWFQLDQIPFKDMWPDDSYWFPLLLQKKKFHGYFKFQGQDTILDYTLREVDTV

SEQ ID NO: 12086 - protein, 44 aa, Homo sapiens
LQPQRVLLGMKKRGFGAGRWNGFGGKVQEGETIEDGARSPCSLS

SEQ ID NO: 12087 - protein, 74 aa, Homo sapiens
LTPLDQHCFIQAADLLMADFKVLSSQDIMWALHELKGHYAITRKAFSDAIKKWQELSPETSGKRKKRKEMNQYS

SEQ ID NO: 12088 - protein, 383 aa, Homo sapiens
VGGTGLRIPRPRFGPAGDMASSGEDISNDDDDMHPAAAGMADGVHLLGFSDEILLHILSHVPSTDLILNVRRTCRKLAALCLDKSLIHTVLLQKDYQASEDKVRQLVKEIGREIQQLSMAGCYWLPGSTVEHVARCRSLVKVNLSGCHLTSLRLSKMLSALQHLRSLAIDVSPGFDASQLSSECKATLSRVRELKQTLFTPSYGVVPCCTSLEKLLLYFEILDRTREGAILSGQLMVGQSNVPHYQNLRVFYARLAPGYINQEVVRLYLAVLSDRTPQNLHAFLISVPGSFAESGATKNLLDSMARNVVLDALQLPKSWLNGSSLLQHMKFNNPFYFSFSRCTLSGGHLIQQVINGGKDLRSLASLNLSGCVHCLSPDSLLCR

SEQ ID NO: 12089 - protein, 185 aa, Homo sapiens
MDDDIAALVVDNGSGMCKAGFAGDDAPRAVFPSIVGRPRHQGVMVGMGQKDSYVGDEAQSKRGILTLKYPIEHGIVTNWDDMEKIWHHTFYNELRVAPEEHPVLLTEAPLNPKANREKMTQVSGPLPLLVAASLLPGLPELRPFSLVLSSAVFRRTLFSDLSLLWNSAGSICFFPDELFFWCLSL

SEQ ID NO: 12090 - protein, 68 aa, Homo sapiens
LTVSERWPLARATPFCFGSAMPMYQVKPYHGGGAPLRVELPTCMYRLPNVHGRSYGPAPGAGHVQPLQ

SEQ ID NO: 12091 - protein, 340 aa, Homo sapiens
LTVSERWPLARATPFCFGSAMPMYQVKPYHGGGAPLRVELPTCMYRLPNVHGRSYGPAPGAGHVQEESNLSLQALESRQDDILKRLYELKAAVDGLSKMIQTPDADLDVTNIIQADEPTTLTTNALDLNSVLGKDYGALKDIVINANPASPPLSLLVLHRLLCEHFRVLSTVHTHSSVKSVPENLLKCFGEQNKKQPRQDYQLGFTLIWKNVPKTQMKFSIQTMCPIEGEGNIARFLFSLFGQKHNAVNATLIDSWVDIAIFQLKEGSSKEKAAVFRSMNSALGKSPWLAGNELTVADVVLWSVLQQIGGCSVTVPANVQRWMRSCENLAPFNTALKLLK

SEQ ID NO: 12092 - protein, 17 aa, Homo sapiens
LARATPFCFGSAMPMYQ

SEQ ID NO: 12093 - protein, 263 aa, Homo sapiens
LARATPFCFGSAMPMYQVKPYHGGGAPLRVELPTCMYRLPNVHGRSYGPAPGAGHVQDYGALKDIVINANPASPPLSLLVLHRLLCEHFRVLSTVHTHSSVKSVPENLLKCFGEQNKKQPRQDYQLGFTLIWKNVPKTQMKFSIQTMCPIEGEGNIARFLFSLFGQKHNAVNATLIDSWVDIAIFQLKEGSSKEKAAVFRSMNSALGKSPWLAGNELTVADVVLWSVLQQIGGCSVTVPANVQRWMRSCENLAPFNTALKLLK

SEQ ID NO: 12094 - protein, 279 aa, Homo sapiens
VGGLEESNLSLQALESRQDDILKRLYELKAAVDGLSKMIQTPDADLDVTNIIQADEPTTLTTNALDLNSVLGKDYGALKDIVINANPASPPLSLLVLHRLLCEHFRVLSTVHTHSSVKSVPENLLKCFGEQNKKQPRQDYQLGFTLIWKNVPKTQMKFSIQTMCPIEGEGNIARFLFSLFGQKHNAVNATLIDSWVDIAIFQLKEGSSKEKAAVFRSMNSALGKSPWLAGNELTVADVVLWSVLQQIGGCSVTVPANVQRWMRSCENLAPFNTALKLLK

SEQ ID NO: 12095 - protein, 153 aa, Homo sapiens
LSKSGSSWSEQMQSLVSHASNIPACLGPVAGTPEPEGADKDDLLLLSEIFNASSLEEGEFSKEWAAVFGDGQVKEPVPTMALGEPDPKAQTGSGFLPSQLLDQNMKDLQASLQEPAKAASDLTAWFSLFADLDPLSNPDAVGKTDKEHELLNA

SEQ ID NO: 12096 - protein, 409 aa, Homo sapiens
MSRCAPAWATEVLSQEENELGKFLRSQGFQDKTRAGKMMQATGKALCFSSQQRLALRNPLCRFHQEVETFRHRAISDTWLTVNRMEQCRTEYRGALLWMKDVSQELDPDLYKQMEKFRKVQTQVRLAKKNFDKLKMDVCQKVDLLGASRCNLLSHMLATYQTTLLHFWEKTSHTMAAIHESFKGYQPYEFTTLKSLQDPMKKLVEKEEKKKINQQESTDAAVQEPSQLISLEEENQRKESSSFKTEDGKSILSALDKGSTHTACSGPIDELLDMKSEEGACLGPVAGTPEPEGADKDDLLLLSEIFNASSLEEGEFSKEWAAVFGDGQVKEPVPTMALGEPDPKAQTGSGFLPSQLLDQNMKDLQASLQEPAKAASDLTAWFSLFADLDPLSNPDAVGKTDKEHELLNA

SEQ ID NO: 12097 - protein, 498 aa, Homo sapiens
LPLLPKSSTIEEEENMSGHKCSYPWDLQDRYAQDKSVVNKMQQKYWETKQAFIKATGKKEDEHVVASDADLDAKLELFHSIQRTCLDLSKAIVLYQKRICFLSQEENELGKFLRSQGFQDKTRAGKMMQATGKALCFSSQQRLALRNPLCRFHQEVETFRHRAISDTWLTVNRMEQCRTEYRGALLWMKDVSQELDPDLYKQMEKFRKVQTQVRLAKKNFDKLKMDVCQKVDLLGASRCNLLSHMLATYQTTLLHFWEKTSHTMAAIHESFKGYQPYEFTTLKSLQDPMKKLVEKEEKKKINQQESTDAAVQEPSQLISLEEENQRKESSSFKTEDGKSILSALDKGSTHTACSGPIDELLDMKSEEGACLGPVAGTPEPEGADKDDLLLLSEIFNASSLEEGEFSKEWAAVFGDGQVKEPVPTMALGEPDPKAQTGSGFLPSQLLDQNMKDLQASLQEPAKAASDLTAWFSLFADLDPLSNPDAVGKTDKEHELLNA

SEQ ID NO: 12098 - protein, 497 aa, Homo sapiens
LPLLPKSSTIEEEENMSGHKCYPWDLQDRYAQDKSVVNKMQQKYWETKQAFIKATGKKEDEHVVASDADLDAKLELFHSIQRTCLDLSKAIVLYQKRICFLSQEENELGKFLRSQGFQDKTRAGKMMQATGKALCFSSQQRLALRNPLCRFHQEVETFRHRAISDTWLTVNRMEQCRTEYRGALLWMKDVSQELDPDLYKQMEKFRKVQTQVRLAKKNFDKLKMDVCQKVDLLGASRCNLLSHMLATYQTTLLHFWEKTSHTMAAIHESFKGYQPYEFTTLKSLQDPMKKLVEKEEKKKINQQESTDAAVQEPSQLISLEEENQRKESSSFKTEDGKSILSALDKGSTHTACSGPIDELLDMKSEEGACLGPVAGTPEPEGADKDDLLLLSEIFNASSLEEGEFSKEWAAVFGDGQVKEPVPTMALGEPDPKAQTGSGFLPSQLLDQNMKDLQASLQEPAKAASDLTAWFSLFADLDPLSNPDAVGKTDKEHELLNA

SEQ ID NO: 12099 - protein, 505 aa, Homo sapiens
LQEAAGDARQPGRSGTPEEEENMSGHKCSYPWDLQDRYAQDKSVVNKMQQKYWETKQAFIKATGKKEDEHVVASDADLDAKLELFHSIQRTCLDLSKAIVLYQKRICFLSQEENELGKFLRSQGFQDKTRAGKMMQATGKALCFSSQQRLALRNPLCRFHQEVETFRHRAISDTWLTVNRMEQCRTEYRGALLWMKDVSQELDPDLYKQMEKFRKVQTQVRLAKKNFDKLKMDVCQKVDLLGASRCNLLSHMLATYQTTLLHFWEKTSHTMAAIHESFKGYQPYEFTTLKSLQDPMKKLVEKEEKKKINQQESTDAAVQEPSQLISLEEENQRKESSSFKTEDGKSILSALDKGSTHTACSGPIDELLDMKSEEGACLGPVAGTPEPEGADKDDLLLLSEIFNASSLEEGEFSKEWAAVFGDGQVKEPVPTMALGEPDPKAQTGSGFLPSQLLDQNMKDLQASLQEPAKAASDLTAWFSLFADLDPLSNPDAVGKTDKEHELLNA

SEQ ID NO: 12100 - protein, 272 aa, Homo sapiens
LPLLPKSSTIEEEENMSGHKCSYPWDLQDRYAQDKSVVNKMQQKYWETKQAFIKATGKKEDEHVVASDADLDAKLELFHSIQRTCLDLSKAIVLYQKRICFLSQEENELGKFLRSQGFQDKTRAGKMMQATGKALCFSSQQRLALRNPLCRFHQEVETFRHRAISDTWLTVNRMEQCRTEYRGALLWMKDVSQELDPDLYKQMEKFRKVQTQVRLAKKNFDKLKMDVCQKVDLLGASRCNLLSHMLATYQLAWDQWQGPRNLKVLTKMTCCC

SEQ ID NO: 12101 - protein, 8 aa, Homo sapiens
MEKVFYLP

SEQ ID NO: 12102 - protein, 8 aa, Homo sapiens
LGFGGWIR

SEQ ID NO: 12103 - protein, 85 aa, Homo sapiens
LTVNRMEQCRTEYRGALLWMKDVSQELDPDLYKQMEKFRKVQTQVRLAKKNFDKLKMDVCQKVDLLGASRCNLLSHMLATYQVTK

SEQ ID NO: 12104 - protein, 102 aa, Homo sapiens
LPLLPKSSTIEEEENMSGHKCSYPWDLQDRYAQDKSVVNKMQQKYWETKQAFIKATGKKEDEHVVASDADLDAKLELFHSIQRTCLDLSKAIVLYQKRICSF

SEQ ID NO: 12105 - protein, 100 aa, Homo sapiens
LPLLPKSSTIEEEENMSGHKCSYPWDLQDRYAQDKSVVNKMQQKYWETKQAFIKATGKKEDEHVVASDADLDAKLELFHSIQRTCLDLSKAIVLYQKRIC

SEQ ID NO: 12106 - protein, 38 aa, Homo sapiens
LQEAAGDARQPGRSGTPGYNITYPLMLFSCPFSPNHQQ

SEQ ID NO: 12107 - protein, 51 aa, Homo sapiens
MSMCLSFTPPLSAATAAAAAAAAAAARIAAAPSLARRRYLLGQVRSSPEIL

SEQ ID NO: 12108 - protein, 47 aa, Homo sapiens
MSMCLSFTPPLSAATAAAAAAAAAAARIAAAPSLARRRYLLGQKFYE

SEQ ID NO: 12109 - protein, 201 aa, Homo sapiens
MNKHQKPVLTGQRFKTRKRDEKEKFEPTVFRDTLVQGLNEAGDDLEAVAKFLDSTGSRLDYRRYADTLFDILVAGSMLAPGGTRIDDGDKTKMTNHCVFSANEDHETIRNYAQVFNKLIRRYKYLEKAFEDEMKKLLLFLKAFSETEQTKLAMLSGILLGNGTLPATILTSLFTDSLVKEGNEAPVFSPVRQQKKNKVTDS

SEQ ID NO: 12110 - protein, 591 aa, Homo sapiens
LILMMSSPAQPDLMWNLVPWVLFCGCCRIFPDGVAGREQLLAQQRMHSMISSVDVKSEVPVGLEPISPLDLRTDLRMMMPVVDPVVREKQLQQELLLIQQQQQIQKQLLIAEFQKQHENLTRQHQAQLQEHIKELLAIKQQQELLEKEQKLEQQRQEQEVERHRREQQLPPLRGKDRGRERAVASTEVKQKLQEFLLSKSATKDTPTNGKNHSVSRHPKLWYTAAHHTSLDQSSPPLSGTSPSYKYTLPGAQDAKDDFPLRKTESSVSSSSPGSGPSSPNNGPTGSVTENETSVLPPTPHAEQMVSQQRILIHEDSMNLLSLYTSPSLPNITLGLPAVPSQLNASNSLKEKQKCETQTLRQGVPLPGQYGGSIPASSSHPHVTLEGKPPNSSHQALLQHLLLKEQMRQQKLLVAGGVPLHPQSPLATKERISPGIRGTHKLPRHRPLNRTQSAPLPQSTLAQLVIQQQHQQFLEKQKQYQQQIHMNKLLSKSIEQLKQPGSHLEEAEEELQGDQAMQEDRAPSSGNSTRSDSSACVDDTLGQVGAVKVKEEPVDSDEDAQIQEMESGEQAAFMQQVIGKDLAPGFVIKVII

SEQ ID NO: 12111 - protein, 617 aa, Homo sapiens
LQQNPSSLKNSKPDGVAGREQLLAQQRMHSMISSVDVKSEVPVGLEPISPLDLRTDLRMMMPVVDPVVREKQLQQELLLIQQQQQIQKQLLIAEFQKQHENLTRQHQAQLQEHIKELLAIKQQQELLEKEQKLEQQRQEQEVERHRREQQLPPLRGKDRGRERAVASTEVKQKLQEFLLSKSATKDTPTNGKNHSVSRHPKLWYTAAHHTSLDQSSPPLSGTSPSYKYTLPGAQDAKDDFPLRKTASEPNLKVRSRLKQKVAERRSSPLLRRKDGNVVTSFKKRMFEVTESSVSSSSPGSGPSSPNNGPTGSVTENETSVLPPTPHAEQMVSQQRILIHEDSMNLLSLYTSPSLPNITLGLPAVPSQLNASNSLKEKQKCETQTLRQGVPLPGQYGGSIPASSSHPHVTLEGKPPNSSHQALLQHLLLKEQMRQQKLLVAGGVPLHPQSPLATKERISPGIRGTHKLPRHRPLNRTQSAPLPQSTLAQLVIQQQHQQFLEKQKQYQQQIHMNKLLSKSIEQLKQPGSHLEEAEEELQGDQAMQEDRAPSSGNSTRSDSSACVDDTLGQVGAVKVKEEPVDSDEDAQIQEMESGEQAAFMQQVIGKDLAPGFVIKVII

SEQ ID NO: 12112 - protein, 573 aa, Homo sapiens
LQQNPSSLKNSKPDGVAGREQLLAQQRMHSMISSVDVKSEVPVGLEPISPLDLRTDLRMMMPVVDPVVREKQLQQELLLIQQQQQIQKQLLIAEFQKQHENLTRQHQAQLQEHIKELLAIKQQQELLEKEQKLEQQRQEQEVERHRREQQLPPLRGKDRGRERAVASTEVKQKLQEFLLSKSATKDTPTNGKNHSVSRHPKLWYTAAHHTSLDQSSPPLSGTSPSYKYTLPGAQDAKDDFPLRKTESSVSSSSPGSGPSSPNNGPTGSVTENETSVLPPTPHAEQMVSQQRILIHEDSMNLLSLYTSPSLPNITLGLPAVPSQLNASNSLKEKQKCETQTLRQGVPLPGQYGGSIPASSSHPHVTLEGKPPNSSHQALLQHLLLKEQMRQQKLLVAGGVPLHPQSPLATKERISPGIRGTHKLPRHRPLNRTQSAPLPQSTLAQLVIQQQHQQFLEKQKQYQQQIHMNKLLSKSIEQLKQPGSHLEEAEEELQGDQAMQEDRAPSSGNSTRSDSSACVDDTLGQVGAVKVKEEPVDSDEDAQIQEMESGEQAAFMQQVIGKDLAPGFVIKVII

SEQ ID NO: 12113 - protein, 566 aa, Homo sapiens
LHTDGVAGREQLLAQQRMHSMISSVDVKSEVPVGLEPISPLDLRTDLRMMMPVVDPVVREKQLQQELLLIQQQQQIQKQLLIAEFQKQHENLTRQHQAQLQEHIKLQQELLAIKQQQELLEKEQKLEQQRQEQEVERHRREQQLPPLRGKDRGRERAVASTEVKQKLQEFLLSKSATKDTPTNGKNHSVSRHPKLWYTAAHHTSLDQSSPPLSGTSPSYKYTLPGAQDAKDDFPLRKTESSVSSSSPGSGPSSPNNGPTGSVTENETSVLPPTPHAEQMVSQQRILIHEDSMNLLSLYTSPSLPNITLGLPAVPSQLNASNSLKEKQKCETQTLRQGVPLPGQYGGSIPASSSHPHVTLEGKPPNSSHQALLQHLLLKEQMRQQKLLVAGGVPLHPQSPLATKERISPGIRGTHKLPRHRPLNRTQSAPLPQSTLAQLVIQQQHQQFLEKQKQYQQQIHMNKLLSKSIEQLKQPGSHLEEAEEELQGDQAMQEDRAPSSGNSTRSDSSACVDDTLGQVGAVKVKEEPVDSDEDAQIQEMESGEQAAFMQQVIGKDLAPGFVIKVII

SEQ ID NO: 12114 - protein, 15 aa, Homo sapiens
LGLYPSCDLPGLLWG

SEQ ID NO: 12115 - protein, 147 aa, Homo sapiens
LDDIIYRAQLELYPEPLLVANAIKASLPHGPMKSNKEGTRCIQVEITPTSSRISRNAVTSMSIRGHRWKRHEQPDNNNDATELGILVIPEISVTNVAGERTGNGEKGRTLGEIDAQHIQGVQETATDPRTESKGLPEIRRQKSEIQN

SEQ ID NO: 12116 - protein, 437 aa, Homo sapiens
LSTRSQKGKVNTDSETAVVNVTYSSKDQARQALDKLNGFQLENFTLKVAYIPDEMAAQQNPLQQPRGRRGLGQRGSSRQGSPGSVSKQKPCDLPLRLLVPTQFVGAIIGKEGATIRNITKQTQSKIDVHRKENAGAAEKSITILSTPEGTSAACKSILEIMHKEAQDIKFTEEIPLKILAHNNFVGRLIGKEGRNLKKIEQDTDTKITISPLQELTLYNPERTITVKGNVETCAKAEEEIMKKIRESYENDIASMNLQAHLIPGLNLNALGLFPPTSGMPPPTSGPPSAMTPPYPQFEIAPAEAPDAKVRMVIITGPPEAQFKAQGRIYGKIKEENFVSPKEEVKLEAHIRVPSFAAGRVIGKGGKTVNELQNLSSAEVVVPRDQTPDENDQVVVKITGHFYACQVAQRKIQEILTQVKQHQQQKALQSGPPQSRRK

SEQ ID NO: 12117 - protein, 48 aa, Homo sapiens
VVNVREEIEEFFPRMWKINQDKRRLMKSIKDQKIKIEWGKKLNRRLVR

SEQ ID NO: 12118 - protein, 28 aa, Homo sapiens
MLWEGNFSAHKRLRFGSDVCYLMTENEL

SEQ ID NO: 12119 - protein, 216 aa, Homo sapiens
VKYEGKFANHVSGTLETALGKVKLNLGGSSRVESQSSFGTLRKQEVDLQQLIRDSAERTINLRNPVLQQVLEGRNEVLCVLTQKITTMQKCVISEHMQVEEKCGGIVGIQTKTVQVSATEDGNVTKDSNVVLEIPAATTIAYGVIELYVKLDGQFAPLCLPWWSCPVLLMASGECVTPPQLTESSAFSEGSKVASRTRRELTLSTWTPWSFESLHS

SEQ ID NO: 12120 - protein, 344 aa, Homo sapiens [sequence omitted]

SEQ ID NO: 12121 - protein, 135 aa, Homo sapiens
MFAKATRNFLREVDADGDLIAVSNLNDSDKLQLLSLVTKKKRFWCWQRPKYQFLSLTLGDVLIEDQFPSPVVVESDFVKYEGKFANHVSGTLETALGKVKLNLGGSSRVESQSSFGTLRKQEVDLQQLIRDSAER

SEQ ID NO: 12122 - protein, 26 aa, Homo sapiens
VGTSGFGAGVFVVPATKKRGQKLLLF

SEQ ID NO: 12123 - protein, 425 aa, Homo sapiens
LKCFSFVFQGISLGDIPLPGSISDGMNSSAHYHVNFSQAISQDVNLHEAILLCPNNTFRRDPTARTSQSQEPFLQLNSHTTNPEQTLPGTNLTGFLSPVDNHMRNLTSQDLLYDLDINIFDEINLMSLATEDNFDPIDVSQLFDEPDSDSGLSLDSSHNNTSVIKSNSSHSVCDEGAIGYCTDHESSSHHDLEGAVGGYYPEPSKLCHLDQSDSDFHGDLTFQHVFHNHTYHLQPTAPESTSEPFPWPGKSQKIRSRYLEDTDRNLSRDEQRAKALHIPFSVDEIVGMPVDSFNSMLSRYYLTDLQVSLIRDIRRRGKNKVAAQNCRKRKLDIILNLEDDVCNLQAKKETLKREQAQCNKAINIMKQKLHDLYHDIFSRLRDDQGRPVNPNHYALQCTHDGSILIVPKELVASGHKKETQKGKRK

SEQ ID NO: 12124 - protein, 40 aa, Homo sapiens
VLLAELFLEQRQFSLQRQDESGSCSSAEISLISLGCGKSG

SEQ ID NO: 12125 - protein, 175 aa, Homo sapiens
VKSTTSITDAKSCEGQNPELLPKTPISPLKTGVSKPIVKSTLSQTVPSKGELSREICLQSQSKDKSTTPGGTGIKPFLERFGERCQEHSKESPARSTPHRTPIITPNTKAIQERLFKQDTSSSTTHLAQQLKQERQKELACLRGRFDKGNIWSAEKGGNSKSKQLETKQVSLNAK

SEQ ID NO: 12126 - protein, 102 aa, Homo sapiens
LFLKNPIGRINLANCTSRQIEPANREFCARRNTFELITVRPQREDDRETLVSQCRDTLCVTKNWLSADTKEERDLWMQKLNQVLVDIRLWQPDACYKPIGKP

SEQ ID NO: 12127 - protein, 461 aa, Homo sapiens
LPQSERRAGESGCLKAPRTGTRSRGRVRDPPAARSEQAARKEAGLNTMIPLEKPGSGGSSPGATSGSGRAGRGLSGPCRPPPPPQARGLLTEIRAVVRTEPFQDGYSLCPGRELGRGKFAVVRKCIKKDSGKEFAAKFMRKRRKGQDCRMEIIHEIAVLELAQDNPWVINLHEVYETASEMILVLEYAAGGEIFDQCVADREEAFKEKDVQRLMRQILEGVHFLHTRDVVHLDLKPQNILLTSESPLGDIKIVDFGLSRILKNSEELREIMGTPEYVAPEILSYDPISMATDMWSIGVLTYVMLTGISPFLGNDKQETFLNISQMNLSYSEEEFDVLSESAVDFIRTLLVKKPEDRATAEECLKHPWLTQSSIQEPSFRMEKALEEANALQEGHSVPEINSDTDKSETKESIVTEELIVVTSYTLGQCRQSEKEKMEQKAISKRFKFEEPLLQEIPGEFIY

SEQ ID NO: 12128 - protein, 20 aa, Homo sapiens
LILAPEILSYDPISMATDMW

SEQ ID NO: 12129 - protein, 126 aa, Homo sapiens
MNAEPERKFGVVVVGVGRAGSVRMRDLRNPHPSSAFLNLIGFVSRRELGSIDGVQQISLEDALSSQEVEVAYICSESSSHEDYIRWVFHTGSPCLTQQCSTAKMSKQAKTPCKGVRRASEKITIAL

SEQ ID NO: 12130 - protein, 142 aa, Homo sapiens
LAQDGGLRVQRVAGATGEWGDSAGPCESEVGSLVSASRALPPQVLSWSRELPCAWRALHTSPVCAKNRAARVRVSKGDKPVTYEEAHAPHYIAHRKGWLSLHTGERTPGLQKEHSIRLSCKQNEHVSQVFFNSGNNARVRNL

SEQ ID NO: 12131 - protein, 29 aa, Homo sapiens
MAASVCSGLLGPRVSGATRQVPASRRWGP

SEQ ID NO: 12132 - protein, 503 aa, Homo sapiens
LGDGQGQQECLCVFAVNLLGLGEAVWTKQVRSVAMFSEQAAQRAHTLLSPPSANNATFARVPVATYTNSSQPFRLGERSFSRQYAHIYATRLIQMRPFLENRAQQHWGSGVGVKKLCELQPEEKCCVVGTLFKAMPLQPSILREVSEEHNLLPQPPRSKYIHPDDELVLEDELQRIKLKGTIDVSKLVTGTVLAVFGSVRDDGKFLVEDYCFADLAPQKPAPPLDTDRFVLLVSGLGLGGGGGESLLGTQLLVDVVTGQLGDEGEQCSAAHVSRVILAGNLLSHSTQSRDSINKAKYLTKKTQAASVEAVKMLDEILLQLSASVPVDVMPGEFDPTNYTLPQQPLHPCMFPLATAYSTLQLVTNPYQATIDGVRFLGTSGQNVSDIFRYSSMEDHLEILEWTLRVRHISPTAPDTLGCYPFYKTDPFIFPECPHVYFCGNTPSFGSKIIRGPEDQTVLLVTVPDFSATQTACLVNLRSLACQPISFSGFGAEDDDLGGLGLGP

SEQ ID NO: 12133 - protein, 489 aa, Homo sapiens
LGDGQGQQECLCVFAVNLLGLGEAVWTKQVRSVAMFSEQAAQRAHTLLSPPSANNATFARVPVATYTNSSQPFRLGERSFSRQYAHIYATRLIQMRPFLENRAQQHWGSGVGVKKLCELQPEEKCCVVGTLFKAMPLQPSILREVSEEHNLLPQPPRSKYIHPDDELVLEDELQRIKLKGTIDVSKLVTGTVLAVFGSVRDDGKFLVEDYCFADLAPQKPAPPLDTDRFVLLVSGLGLGGGGGESLLGTQLLVDVVTGQLGDEGEQCSAAHVSRVILAGNLLSHSTQSRDSINKAKYLTKKTQAASVEAVKMLDEILLQLSASVPVDVMPGEFDPTNYTLPQQPLHPCMFPLATAYSTLQLVTNPYQATIDGVRFLGTSGQNVSDIFRYSSMEDHLEILEWTLRVRHISPTAPDTLECPHVYFCGNTPSFGSKIIRGPEDQTVLLVTVPDFSATQTACLVNLRSLACQPISFSGFGAEDDDLGGLGLGP

SEQ ID NO: 12134 - protein, 208 aa, Homo sapiens
LGEAVWTKQVRSVAMFSEQAAQRAHTLLSPPSANNATFARVPVATYTNSSQPFRLGERSFSRQYAHIYATRLIQMRPFLENRAQQHWGSGVGVKKLCELQPEEKCCVVGTLFKAMPLQPSILREVSEEHNLLPQPPRSKYIHPDDELVLEDELQRIKLKGTIDVSKLVTGTVLAVFGSVRDDGKFLVEDYCFADLAPQKPAPPLDTDR

SEQ ID NO: 12135 - protein, 115 aa, Homo sapiens
MRPFLENRAQQHWGSGVGVKKLCELQPEEKCCVVGTLFKAMPLQPSILREVSEEHNLLPQPPRSKYIHPDDELVLEDELQRIKLKGTIDVSKLVTGREPNERMWVMQVKSPAVVC

SEQ ID NO: 12136 - protein, 57 aa, Homo sapiens
LFSFFSQYPLGAVRHQESCCFGGWTGAAGMPLCFRSEPPWPGRSCVDQASQECGHVF

SEQ ID NO: 12137 - protein, 56 aa, Homo sapiens
LDDRYRYPLGAVRHQESCCFGGWTGAAGMPLCFRSEPPWPGRSCVDQASQECGHVF

SEQ ID NO: 12138 - protein, 29 aa, Homo sapiens
VGKRLLMGEPPWPGRSCVDQASQECGHVF

SEQ ID NO: 12139 - protein, 152 aa, Homo sapiens
LRSFSVERTGAPFCSPTSSGWRRSRASAIAAGVHPQDAMRSVTKQAIREARLKEIKEELLHSEKLKTYFEDNPRDLQLLRHDLPLHPAVVKPHLGHVPDYLVPPALRGLVRPHKKRKKLSSSCRKAKRAKSQNPLRSFKHKGKKFRPTAKPS

SEQ ID NO: 12140 - protein, 205 aa, Homo sapiens
MCLLCSTLIFPQPLRPTSIELAGSSVTAQASAWTARANNPGIVLTFVLPTEQFHLGKIEELLSGENRGPILLPYQFRMEEIEGFRYRCRDAMRSVTKQAIREARLKEIKEELLHSEKLKTYFEDNPRDLQLLRHDLPLHPAVVKPHLGHVPDYLVPPALRGLVRPHKKRKKLSSSCRKAKRAKSQNPLRSFKHKGKKFRPTAKPS

SEQ ID NO: 12141 - protein, 60 aa, Homo sapiens
LSKFETSLVALLEGVRNFQFWAWAVGLADRPLALGLGARFSASRMRSFAVHQDLGPSGIS

SEQ ID NO: 12142 - protein, 22 aa, Homo sapiens
LGPTCCLTIPEPSVHETGRRPC

SEQ ID NO: 12143 - protein, 20 aa, Homo sapiens
VISEPPGIVAEHPRPAEVPP

SEQ ID NO: 12144 - protein, 41 aa, Homo sapiens
VGAVAEVTVSKWKSLLSQQLLCKMPRPGIVAEHPRPAEVPP

SEQ ID NO: 12145 - protein, 28 aa, Homo sapiens
LGPTCCLTIPEPRPGIVAEHPRPAEVPP

SEQ ID NO: 12146 - protein, 13 aa, Homo sapiens
LGPTCCLTIPEPR

SEQ ID NO: 12147 - protein, 24 aa, Homo sapiens
MVPGTVRAADGGQRWCSLRFGITC

SEQ ID NO: 12148 - protein, 230 aa, Homo sapiens
LRISRFLPGFHSFAPCTVAPSLRAQPAKQRAPVAGVMQRARPLQALLDGRGLCVNASAVSRLRAYLLPAPPAPGNASESEEDRSAGSVESPSVSSTHRVSDPKFHPLHSKIIIIKKGHAKDSQRYKVDYESQSTDTQNFSSESKRETEYGPCRREMEDTLNHLKFLNVLSPRGVHIPNCDKKGFYKKKQCRPSKGRKRGFCWCVDKYGQPLPGYTTKGKEDVHCYSMQSK

SEQ ID NO: 12149 - protein, 327 aa, Homo sapiens
LRISRFLPGFHSFAPCTVAPSLRAQPAKQRAPVAGVMQRARPTLWAAALTLLVLLRGPPVARAGASSAGLGPVVRCEPCDARALAQCAPPPAVCAELVREPGCGCCLTCALSEGQPCGIYTERCGSGLRCQPSPDEARPLQALLDGRGLCVNASAVSRLRAYLLPAPPAPGNASESEEDRSAGSVESPSVSSTHRVSDPKFHPLHSKIIIIKKGHAKDSQRYKVDYESQSTDTQNFSSESKRETEYGPCRREMEDTLNHLKFLNVLSPRGVHIPNCDKKGFYKKKQCRPSKGRKRGFCWCVDKYGQPLPGYTTKGKEDVHCYSMQSK

SEQ ID NO: 12150 - protein, 333 aa, Homo sapiens
LRISRFLPGFHSFAPCTVAPSLRAQPAKQRAPVAGVMQRARPTLWAAALTLLVLLRGPPVARAGASSAGLGPVVRCEPCDARALAQCAPPPAVCAELVREPGCGCCLTCALSEGQPCGIYTERCGSGLRCQPSPDEARPLQALLDGRGLCVNASAVSRLRAYLLPAPPAPGEPPAPGNASESEEDRSAGSVESPSVSSTHRVSDPKFHPLHSKIIIIKKGHAKDSQRYKVDYESQSTDTQNFSSESKRETEYGPCRREMEDTLNHLKFLNVLSPRGVHIPNCDKKGFYKKKQCRPSKGRKRGFCWCVDKYGQPLPGYTTKGKEDVHCYSMQSK

SEQ ID NO: 12151 - protein, 54 aa, Homo sapiens
VLAFSADPHVLTLMSLAEASSISVFHPLQECGHREQRFVLSPRGPHPETVSTHV

SEQ ID NO: 12152 - protein, 13 aa, Homo sapiens
VCVRVCMRACMRV

SEQ ID NO: 12153 - protein, 15 aa, Homo sapiens
VSRREDEEKEKKPRY

SEQ ID NO: 12154 - protein, 80 aa, Homo sapiens
MGKGHARKQHRTRGGPHVPGTLAFRGMRNPQPLRQRCRVTAMLRPSAWALLSSCTRGRGFPSPRSSQDGDANETEKGAYV

SEQ ID NO: 12155 - protein, 21 aa, Homo sapiens
VNWPFLKVTYLTHLCSHMLFG

SEQ ID NO: 12156 - protein, 37 aa, Homo sapiens
VRVGPPLFTKLVNLTFQAHEGKEDLPALQKQEQTTSP

SEQ ID NO: 12157 - protein, 100 aa, Homo sapiens
VHEQVASRVLGTWLIFDRCHLKFLLTVPLAAGGSRSLVLCGTLTTLTGLSFGRVFGFVARKQGSATDNVCHLFAEHDPEQPASAIVNFVSKVMIGSPKKV

SEQ ID NO: 12158 - protein, 1526 aa, Homo sapiens
LHAFKNKAFKKSKVCGVCKQIIDGQGISCRACKYSCHKKCEAKVVIPCGVQVRLEQAPGSSTLSSSLCRDKPLRPVILSPTMEEGHGLDLTYITERIIAVSFPAGCSEESYLHNLQEVTRMLKSKHGDNYLVLNLSEKRYDLTKLNPKIMDVGWPELHAPPLDKMCTICKAQESWLNSNLQHVVVIHCRGGKGRIGVVISSYMHFTNVSASADQALDRFAMKKFYDDKVSALMQPSQKRYVQFLSGLLSGSVKMNASPLFLHFVILHGTPNFDTGGVCRPFLKLYQAMQPVYTSGIYNVGPENPSRICIVIEPAQLLKGDVMVKCYHKKYRSATRDVIFRLQFHTGAVQGYGLVFGKEDLDNASKDDRFPDYGKVELVFSATPEKIQGSEHLYNDHGVIVDYNTTDPLIRWDSYENLSADGEVLHTQGPVDGSLYAKVRKKSSSDPGIPGGPQAIPATNSPDHSDHTLSVSSDSGHSTASARTDKTEERLAPGTRRGLSAQEKAELDQLLSGFGLEDPGSSLKEMTDARSKYSGTRHVVPAQVHVNGDAALKDRETDILDDEMPHHDLHSVDSLGTLSSSEGPQSAHLGPFTCHKSSQNSLLSDGFGSNVGEDPQGTLVPDLGLGMDGPYERERTFGSREPKQPQPLLRKPSVSAQMQAYGQSSYSTQTWVRQQQMVVAHQYSFAPDGEARLVSRCPADNPGLVQAQPRVPLTPTRGTSSRVAVQRGVGSGPHPPDTQQPSPSKAFKPRFPGDQVVNGAGPELSTGPSPGSPTLDIDQSIEQLNRLILELDPTFEPIPTHMNALGSQANGSVSPDSVGGGLRASSRLPDTGEGPSRATGRQGSSAEQPLGGRLRKLSLGQYDNDAGGQLPFSKCAWGKAGVDYAPNLPPFPSPADVKETMTPGYPQDLDIIDGRILSSKESMCSTPAFPVSPETPYVKTALRHPPFSPPEPPLSSPASQHKGGREPRSCPETLTHAVGMSESPIGPKSTMLRADASSTPSFQQAFASSCTISSNGPGQRRESSSSAERQWVESSPKPMVSLLGSGRPTGSPLSAEFSGTRKDSPVLSCFPPSELQAPFHSHELSLAEPPDSLAPPSSQAFLGFGTAPVGSGLPPEEDLGALLANSHGASPTPSIPLTATGAADNGFLSHNFLTVAPGHSSHHSPGLQGQGVTLPGQPPLPEKKRASEGDRSLGSVSPSSSGFSSPHSGSTISIPFPNVLPDFSKASEAASPLPDSPGDKLVIVKFVQDTSKFWYKADISREQAIAMLKDKEPGSFIVRDSHSFRGAYGLAMKVATPPPSVLQLNKKAGDLANELVRHFLIECTPKGVRLKGCSNEPYFGSLTALVCQHSITPLALPCKLLIPERDPLEEIAESSPQTAANSAAELLKQGAACNVWYLNSVEMESLTGHQAIQKALSITLVQEPPPVSTVVHFKVSAQGITLTDNQRKLFFRRHYPVNSVIFCALDPQDRKWIKDGPSSKVFGFVARKQGSATDNVCHLFAEHDPEQPASAIVNFVSKVMIGSPKKV

SEQ ID NO: 12159 - protein, 61 aa, Homo sapiens
LYNDHGVIVDYNTTDPLIRWDSYENLSADGEGACVHLVCSYGGKGHREDSPLKYLKYFAVC

SEQ ID NO: 12160 - protein, 345 aa, Homo sapiens
LQAWQEEPEELTSSLHAFKNKAFKKSKVCGVCKQIIDGQGISCRACKYSCHKKCEAKVVIPCGVQVRLEQAPGSSTLSSSLCRDKPLRPVILSPTMEEGHGLDLTYITERIIAVSFPAGCSEESYLHNLQEVTRMLKSKHGDNYLVLNLSEKRYDLTKLNPKIMDVGWPELHAPPLDKMCTICKAQESWLNSNLQHVVVIHCRGGKGRIGVVISSYMHFTNVSASADQALDRFAMKKFYDDKVSALMQPSQKRYVQFLSGLLSGSVKMNASPLFLHFVILHGTPNFDTGGVCRPFLKLYQAMQPVYTSGIYNVGPENPSRICIVIEPAQLLKGDVMVMNYNIANI

SEQ ID NO: 12161 - protein, 12 aa, Homo sapiens
MPSLQVFLPQEM

SEQ ID NO: 12162 - protein, 9 aa, Homo sapiens
VLLKGIAET

SEQ ID NO: 12163 - protein, 44 aa, Homo sapiens
VGPVAPGRPGLRAETGAAMSQSLSGPSGLCSLGLRLETPGGERS

SEQ ID NO: 12164 - protein, 170 aa, Homo sapiens
LLFSSGLEPGTVVITEQAVDTCFKAEFEQIVLGKRVIRKTDLNKKLVQELLLCSAELSEFTTVVGNTMCTLDFYEGQGRLDGALCSYTEKDKQAYLEAAYAAGVRNIEMESSVFAAMCSACGLQAAVVCVTLLNRLEGDQISSPRNVLSEYQQRPQRLVSYFIKKKLSKA

SEQ ID NO: 12165 - protein, 587 aa, Homo sapiens
LTRPKPVCSQDKVEQTPRSQQDPAGPGLPAQSDRLANHQEDDVDLEALVNDMNASLESLYSACSMQSDTVPLLQNGQHARSQPRASGPPRSIQPQVSPRQRVQRSQPVHILAVRRLQEEDQQFRTSSLPAIPNPFPELCGPGSPPVLTPGSLPPSQAAAKQDVKVFSEDGTSKVVEILADMTARDLCQLLVYKSHCVDDNSWTLVEHHPHLGLERCLEDHELVVQVESTMASESKFLFRKNYAKYEFFKNPMNFFPEQMVTWCQQSNGSQTQLLQNFLNSSSCPEIQGFLHVKELGKKSWKKLYVCLRRSGLYCSTKGTSKEPRHLQLLADLEDSNIFSLIAGRKQYNAPTDHGLCIKPNKVRNETKELRLLCAEDEQTRTCWMTAFRLLKYGMLLYQNYRIPQQRKALLSPFSTPVRSVSENSLVAMDFSGQTGRVIENPAEAQSAALEEGHAWRKRSTRMNILGSQSPLHPSTLSTVIHRTQHWFHGRISREESHRIIKQQGLVDGLFLLRDSQSNPKAFVLTLCHHQKIKNFQILPCEDDGQTFFSLDDGNTKFSDLIQLVDFYQLNKGVLPCKLKHHCIRVAL

SEQ ID NO: 12166 - protein, 601 aa, Homo sapiens
VIPTVERGRERPPMQAAGPLFRSKDKVEQTPRSQQDPAGPGLPAQSDRLANHQEDDVDLEALVNDMNASLESLYSACSMQSDTVPLLQNGQHARSQPRASGPPRSIQPQVSPRQRVQRSQPVHILAVRRLQEEDQQFRTSSLPAIPNPFPELCGPGSPPVLTPGSLPPSQAAAKQDVKVFSEDGTSKVVEILADMTARDLCQLLVYKSHCVDDNSWTLVEHHPHLGLERCLEDHELVVQVESTMASESKFLFRKNYAKYEFFKNPMNFFPEQMVTWCQQSNGSQTQLLQNFLNSSSCPEIQGFLHVKELGKKSWKKLYVCLRRSGLYCSTKGTSKEPRHLQLLADLEDSNIFSLIAGRKQYNAPTDHGLCIKPNKVRNETKELRLLCAEDEQTRTCWMTAFRLLKYGMLLYQNYRIPQQRKALLSPFSTPVRSVSENSLVAMDFSGQTGRVIENPAEAQSAALEEGHAWRKRSTRMNILGSQSPLHPSTLSTVIHRTQHWFHGRISREESHRIIKQQGLVDGLFLLRDSQSNPKAFVLTLCHHQKIKNFQILPCEDDGQTFFSLDDGNTKFSDLIQLVDFYQLNKGVLPCKLKHHCIRVAL

SEQ ID NO: 12167 - protein, 803 aa, Homo sapiens
MSAPFSLVFPRTEKAVTASNDEEDLLIAGEFRKTLAELDEDLEEMEDSYETDTSSLTSSIHGASNHCPQDAMIPHGDTDAIPVTFIGEVSDDPVDSGLFSNRNNNAGSFDSEGVASRRDSLAPLQAEHSQPHEKAREEVPALHPASHDVGKGIRVALSNISKDGNLMETAPRVTSFASNLHTDNLNAKVKDKVYGCADGERTQATERVNSQPVNEKDSNDKNAALAPTSWHQRGQNPGKSYRLKHGLTTYKIIPPKSEMRCYDRDVSLSTGAIKIDELGNLVSPHATGIRIISLSSSVPEAESQPIGKVREFWRCNSVEKHLGRPSESSARGPPSTPVPTQTQNPESRLQADPKPISPQQKSAHHEGRNPLGEGRNQPPTMGMGHVRVPAAHTTEVTFLKPQRRTSSQYVASAIAKRIGAPKVHADVVRPHGYAEKGYAGKAPVLAAPPVTVKDDRTSSPHSETQGWKDGAQWPCVTPPNNHGEDLAVGAPPRGEVIGPHRKLSTQDRPAAIHRSSCFSLVQSSQRDRVSVGQSCGFSGKQSTSSQEASSASEPRRAPDGTDPPPPHTSDTQACSRELVNGSVRAPGHGEPSHPPGGSGTESHILLEREEKPSVFSTDGNETDSIWPPSIFGPKKKFKPVVQRPVPKDTSLHSALMEAIHSAGGKDRLRKTAEHTGEGRPAKLSYTEAEGERSALLAAIRGHSGTCSLRKVASSASEELQSFRDAALSAQGSESPLLEDLGLLSPPAIPPPPPPPSQALSAPRTASRFSTGTLSNTADARQALMDAIRSGTGAARLRKVPLLV

SEQ ID NO: 12168 - protein, 1300 aa, Homo sapiens
VGGRWVSAEKVNEGGSGGGGSQRLTRRARSTARVPAPGTMDAPRASAAKPPTGRKMKARAPPPPGKAATLHVHSDQKPPHDGALGSQQNLVRMKEALRASTMDVTVVLPSGLEKRSVLNGSHAMMDLLVELCLQNHLNPSHHALEIRSSETQQPLSFKPNTLIGTLNVHTVFLKEKVPEEKVKPGPPKVPEKSVRLVVNYLRTQKAVVRVSPEVPLQNILPVICAKCEVSPEHVVLLRDNIAGEELELSKSLNELGIKELYAWDNRRETFRKSSLGNDETDKEKKKFLGFFKVNKRSNSKGCLTTPNSPSMHSRSLTLGPSLSLGSISGVSVKSEMKKRRAPPPPGSGPPVQDKASEKVSLGSQIDLQKKKRRAPAPPPPQPPPPSPLIPNRTEDKEENRKSTMVSLPLGSGSHCSPDGAPQVLSEAEETVSVGSCFASEDTTEDSGVMSSPSDIVSLDSQQDSMKYKDKWATDQEDCSDQDLAGTPDLGPQKSPLWEKNGSENSHLRTEKAVTASNDEEDLLIAGEFRKTLAELDEDLEEMEDSYETDTSSLTSSIHGASNHCPQDAMIPHGDTDAIPVTFIGEVSDDPVDSGLFSNRNNNAGSFDSEGVASRRDSLAPLQAEHSQPHEKAREEVPALHPASHDVGKGIRVALSNISKDGNLMETAPRVTSFASNLHTDNLNAKVKDKVYGCADGERTQATERVNSQPVNEKDSNDKNAALAPTSWHQRGQNPGKSYRLKHGLTTYKIIPPKSEMRCYDRDVSLSTGAIKIDELGNLVSPHATGIRIISLSSSVPEAESQPIGKVREFWRCNSVEKHLGRPSESSARGPPSTPVPTQTQNPESRLQADPKPISPQQKSAHHEGRNPLGEGRNQPPTMGMGHVRVPAAHTTEVTFLKPQRRTSSQYVASAIAKRIGAPKVHADVVRPHGYAEKGYAGKAPVLAAPPVTVKDDRTSSPHSETQGWKDGAQWPCVTPPNNHGEDLAVGAPPRGEVIGPHRKLSTQDRPAAIHRSSCFSLVQSSQRDRVSVGQSCGFSGKQSTSSQEASSASEPRRAPDGTDPPPPHTSDTQACSRELVNGSVRAPGHGEPSHPPGGSGTESHILLEREEKPSVFSTDGNETDSIWPPSIFGPKKKFKPVVQRPVPKDTSLHSALMEAIHSAGGKDRLRKTAEHTGEGRPAKLSYTEAEGERSALLAAIRGHSGTCSLRKVASSASEELQSFRDAALSAQGSESPLLEDLGLLSPPAIPPPPPPPSQALSAPRTASRFSTGTLSNTADARQALMDAIRSGTGAARLRKVPLLV

SEQ ID NO: 12169 - protein, 1310 aa, Homo sapiens
VGGRWVSAEKVNEGGSGGGGSQRLTRRARSTARVPAPGTMDAPRASAAKPPTGRKMKARAPPPPGKAATLHVHSDQKPPHDGALGSQQNLVRMKEALRASTMDVTVVLPSGLEKRSVLNGSHAMMDLLVELCLQNHLNPSHHALEIRSSETQQPLSFKPNTLIGTLNVHTVFLKEKVPEEKVKPGPPKVPEKSVRLVVNYLRTQKAVVRVSPEVPLQNILPVICAKCEVSPEHVVLLRDNIAGEELELSKSLNELGIKELYAWDNRRETFRKSSLGNDETDKEKKKFLGFFKVNKRSNSKGCLTTPNSPSMHSRSLTLGPSLSLGSISGVSVKSEMKKRRAPPPPGSGPPVQDKASEKVSLGSQIDLQKKKRRAPAPPPPQPPPPSPLIPNRTEDKEENRKSTMGGGRQVPQKPPRGTARGPPQLVLPPPPPYPPPDTDVVEPLSFPGEGAGSEASDPIPKLSLPLGSGSHCSPDGAPQVLSEAEETVSVGSCFASEDTTEDSGVMSSPSDIVSLDSQQDSMKYKDKWATDQEDCSDQDLAGTPDLGPQKSPLWEKNGSENSHLRTEKAVTASNDEEDLLIAGEFRKTLAELDEDLEEMEDSYETDTSSLTSSIHGASNHCPQDAMIPHGDTDAIPVTFIGEVSDDPVDSGLFSNRNNNAGSFDSEGVASRRDSLAPLQAEHSQPHEKAREEVPALHPASHDVGKGIRVALSNISKDGNLMETAPRVTSFASNLHTDNLNAKVKDKVYGCADGERTQATERVNSQPVNEKDSNDKNAALAPTSWHQRGQNPGKSYRLKHGLTTYKIIPPKSEMRCYDRDVSLSTGAIKIDELGNLVSPHATGIRIISLSSSVPEAESQPIGKVREFWRCNSVEKHLGRPSESSARGPPSTPVPTQTQNPESRLQADPKPISPQQKSAHHEGRNPLGEGRNQPPTMGMGHVRVPAAHTTEVTFLKPQRRTSSQYVASAIAKRIGAPKVHADVVRPHGYAEKGYAGKAPVLAAPPVTVKDDRTSSPHSETQGWKDGAQWPCVTPPNNHGEDLAVGAPPRGEVIGPHRKLSTQDRPAAIHRSSCFSLVQSSQRDRVSVGQSCGFSGKQSTSSQEASSASEPRRAPDGTDPPPPHTSDTQACSRELVNGSVRAPGHGEPSHPPGGSGTESHILLEREEKPSVFSTDGNETDSIWPPSIFGPKKKFKPVVQRPVPKDTSLHSALMEAIHSAGGKDRLRKTAEHTGEGRPAKLSYTEAEGERSALLAAIRGHSGTCSLRKALSAPRTASRFSTGTLSNTADARQALMDAIRSGTGAARLRKVPLLV

SEQ ID NO: 12170 - protein, 508 aa, Homo sapiens
VGGRWVSAEKVNEGGSGGGGSQRLTRRARSTARVPAPGTMDAPRASAAKPPTGRKMKARAPPPPGKAATLHVHSDQKPPHDGALGSQQNLVRMKEALRASTMDVTVVLPSGLEKRSVLNGSHAMMDLLVELCLQNHLNPSHHALEIRSSETQQPLSFKPNTLIGTLNVHTVFLKEKVPEEKVKPGPPKVPEKSVRLVVNYLRTQKAVVRVSPEVPLQNILPVICAKCEVSPEHVVLLRDNIAGEELELSKSLNELGIKELYAWDNRRETFRKSSLGNDETDKEKKKFLGFFKVNKRSNSKGCLTTPNSPSMHSRSLTLGPSLSLGSISGVSVKSEMKKRRAPPPPGSGPPVQDKASEKVSLGSQIDLQKKKRRAPAPPPPQPPPPSPLIPNRTEDKEENRKSTMVYGAAEAVIRLLSLLLNTTAPGTAKPRTLWMSEGRSSLHNPEIKCSCFSSSSPFPQSLLSLLLGLSSICECMCTLRHTHAHTHNPSCVLPTSEILAFGRQSLIS

SEQ ID NO: 12171 - protein, 418 aa, Homo sapiens
VGGRWVSAEKVNEGGSGGGGSQRLTRRARSTARVPAPGTMDAPRASAAKPPTGRKMKARAPPPPGKAATLHVHSDQKPPHDGALGSQQNLVRMKEALRASTMDVTVVLPSGLEKRSVLNGSHAMMDLLVELCLQNHLNPSHHALEIRSSETQQPLSFKPNTLIGTLNVHTVFLKEKVPEEKVKPGPPKVPEKSVRLVVNYLRTQKAVVRVSPEVPLQNILPVICAKCEVSPEHVVLLRDNIAGEELELSKSLNELGIKELYAWDNRRETFRKSSLGNDETDKEKKKFLGFFKVNKRSNSKGCLTTPNSPSMHSRSLTLGPSLSLGSISGVSVKSEMKKRRAPPPPGSGPPVQDKASEKVSLGSQIDLQKKKRRAPAPPPPQPPPPSPLIPNRTEDKEENRKSTMVYCCASFPTQAKRF

SEQ ID NO: 12172 - protein, 433 aa, Homo sapiens
VGGRWVSAEKVNEGGSGGGGSQRLTRRARSTARVPAPGTMDAPRASAAKPPTGRKMKARAPPPPGKAATLHVHSDQKPPHDGALGSQQNLVRMKEALRASTMDVTVVLPSGLEKRSVLNGSHAMMDLLVELCLQNHLNPSHHALEIRSSETQQPLSFKPNTLIGTLNVHTVFLKEKVPEEKVKPGPPKVPEKSVRLVVNYLRTQKAVVRVSPEVPLQNILPVICAKCEVSPEHVVLLRDNIAGEELELSKSLNELGIKELYAWDNRRVRLSKTQSEPSLSCQETFRKSSLGNDETDKEKKKFLGFFKVNKRSNSKGCLTTPNSPSMHSRSLTLGPSLSLGSISGVSVKSEMKKRRAPPPPGSGPPVQDKASEKVSLGSQIDLQKKKRRAPAPPPPQPPPPSPLIPNRTEDKEENRKSTMVYCCASFPTQAKRF

SEQ ID NO: 12173 - protein, 8 aa, Homo sapiens
MGQRGKSE

SEQ ID NO: 12174 - protein, 142 aa, Homo sapiens
LHSLGGGDQSHVMSVVRSSVHARWIVGKVIGTKMQKTAKVRVTRLVLDPYLLKYFNKRKTYFAHDALQQCTVGDIVLLRALPVPRAKHVKHELAEIVFKVGKVIDPVTGKPCAGTTYLESPLSSETTQLSKNLEELNISSAQ

SEQ ID NO: 12175 - protein, 167 aa, Homo sapiens
LTLACGGVALNSFDDLSPDCLGHAGLVYEYTLGEEKFTFIEKCNNPRSVTLLIKGPNKHTLTQIKDAVRDGLRAVKNAIDDGCVVPGAGAVEVAMAEALIKHKPSVKGRAQLGVQAFADALLIIPKVLAQNSGFDLQETLVKIQAEHSESGQLVGVDLNTGKRMQLL

SEQ ID NO: 12176 - protein, 33 aa, Homo sapiens
VVTDLRLWMRQTCSTLSGLLWELIRTMVDRAEA

SEQ ID NO: 12177 - protein, 99 aa, Homo sapiens
MFASQASILPSSPSHLHTALRKLPQVQASGEPCPQADPTAFSEPSLPSSEVADEPPTLTKEEPVPLETQVVEEEEDSGAPPLKRFCVDQPTVPQTASES

SEQ ID NO: 12178 - protein, 44 aa, Homo sapiens
MTPSPQRWARRSWRVVEEEEDSGAPPLKRFCVDQPTVPQTASES

SEQ ID NO: 12179 - protein, 150 aa, Homo sapiens
LYPWLPKVMPGPWLCPEFLLRKMTTLSCCLCSVWFSDENSNQSSVSDVYQLKVDSSTNSSPSPQQSESLSPAHTSDFRTDDSQPPTLGQEILEEPSLPSSEVADEPPTLTKEEPVPLETQVVEEEEDSGAPPLKRFCVDQPTVPQTASES

SEQ ID NO: 12180 - protein, 123 aa, Homo sapiens
VGSCDRQQGDENSNQSSVSDVYQLKVDSSTNSSPSPQQSESLSPAHTSDFRTDDSQPPTLGQEILEEPSLPSSEVADEPPTLTKEEPVPLETQVVEEEEDSGAPPLKRFCVDQPTVPQTASES

SEQ ID NO: 12181 - protein, 149 aa, Homo sapiens
VGSCDRQQGETESGYVVQAGCELLASSSPPALTSQDENSNQSSVSDVYQLKVDSSTNSSPSPQQSESLSPAHTSDFRTDDSQPPTLGQEILEEPSLPSSEVADEPPTLTKEEPVPLETQVVEEEEDSGAPPLKRFCVDQPTVPQTASES

SEQ ID NO: 12182 - protein, 68 aa, Homo sapiens
VPKQRNSTSACFLGLRPLYQRFPLRMSRRGMVRKSRAWVLEKKERHRRQGREVRPDTQYTGRKRKPRF

SEQ ID NO: 12183 - protein, 53 aa, Homo sapiens
LCLRHRFPLRMSRRGMVRKSRAWVLEKKERHRRQGREVRPDTQYTGRKRKPRF

SEQ ID NO: 12184 - protein, 183 aa, Homo sapiens
LALPWAAAPELGAKQGPGEKAISWVFLPDPASSRYQNFSKGSRHGSEEAYIDPIAMEYYNWGRFSKPPEDDDANSYENVLICKQKTTETGAQQEGIGGLCRGDLSLSLALKTGPTSGLCPSASPEEDEESEDYQNSASIHQWRESRKVMGQLQREASPGPVGSPDEEDGEPDYVNGEVAATEA

SEQ ID NO: 12185 - protein, 314 aa, Homo sapiens
VARTAAAAASRPVPRSQLQPPPPRSRRLSCSLCGSVLSGTWAPVAPSKPFRPPQCPPPSPARPSPAKMVDREQLVQKARLAEQAERYDDMAAAMKNVTELNEPLSNEERNLLSVAYKNVVGARRSSWRVISSIEQKTSADGNEKKIEMVRAYREKIEKELEAVCQDVLSLLDNYLIKNCSETQYESKVFYLKMKGDYYRYLAEVATGEKRATVVESSEKAYSEAHEISKEHMQPTHPIRLGLALNYSVFYYEIQNAPEQACHLAKTAFDDAIAELDTLNEDSYKDSTLIMQLLRDNLTLWTSDQQDDDGGEGNN

SEQ ID NO: 12186 - protein, 104 aa, Homo sapiens
LSVSGTHSSRSRLAPGPAVAAPAASSAQPPPQLLALWVGPLRHLGSSRALQALQAAPVSSSFSGQTQPREDGGPRATGAESPAGRAGGALRRHGRGHEERDRAE

SEQ ID NO: 12187 - protein, 684 aa, Homo sapiens
VCVCVCVCVCIPYREMEKKKIVLEQEVKTLNDSLKKVENKVSAIVDEKENVIKEVEGKRALLEIKEREHNQLVKLLELARENEATSLTERGILDLNLRNSLIDKQNYHDELSRKQREKERDFRNLRKMELLLKVSWDALRQTQALHQRLLLEKIISEMESKLVEQQLAEENKLLKEQENMKELVVNLLRMTQIKIDEKEQKSKDFLKAQQKYTNIVKEMKAKDLEIRIHKKKKCEIYRRLREFAKLYDTIRNERNKFVNLLHKAHQKVNEIKERHKMSLNELEILRNSAVSQERKLQNSMLKHANNVTIRESMQNDVRKIVSKLQEMKEKKEAQLNNIDRLANTITMIEEEMVQLRKRYEKAVQHRNESGVQLIEREEEICIFYEKINIQEKMKLNGEIEIHLLEEKIQFLKMKIAEKQRQICVTQKLLPAKRSLDADLAVLQIQFSQCTDRIKDLEKQFVKPDGENRARFLPGKDLTEKEMIQKLDKLELQLAKKEEKLLEKDFIYEQVSRLTDRLCSKTQGCKQDTLLLAKKMNGYQRRIKNATEKMMALVAELSMKQALTIELQKEVREKEDFIFTCNSRIEKGLPLNKEIEKEWLKVLRDEEMHALAIAEKSQEFLEADNRQLPNGVYTTAEQRPNAYIPEADATLPLPKPYGALAPFKPSEPGANMRHIRKPVIKPVEI

SEQ ID NO: 12188 - protein, 470 aa, Homo sapiens
LQVFSCSVNSERTLLAASLVQSTKEGKRNELQPGSKCLTLLVEIHPVNNVKVLKAVDSYIWVQFLYPHIESHPLPENHLLLISEEKYIEQFRIHVAQEDGNRVVIKNSGHLPRDRIAEDFVWAQWDMSEQRLYYIDLKKSRSILKCIQFYADESYNLMFEVPLDISLSNSGFKLVNFGCDYHQYRDKFSKHLTLCVFTNHTGSLCVCYSPKCASWGQITYSVFYIHKGHSKTFTTSLENVGSHMTKGITFLNLDYYVAVYLPGHFFHLLNVQHPDLICHNLFLTGNNEMIDMLPHCPLQSLSGSLVLDCCSGKLYRALLSQSSLLQLLQNTCLDCEKMAALHCALYCGQGAQFLEAQIIQWISENVSACHSFDLIQEFIIASSYWSVYSETSNMDKLLPHSSVLTWNTEIPGITLVTEDIALPLMKVLSFKGYWEKLNSNLEYVKYAKPHFHYNNSVVRREWHNLISEEV

SEQ ID NO: 12189 - protein, 757 aa, Homo sapiens
LALLGTDSEQDSFTQASPPEGSASPSSSTMWVTKLLPALLLQHVLLHLLLLPIAIPYAEGQRKRRNTIHEFKKSAKTTLIKIDPALKIKTKKVNTADQCANRCTRNKGLPFTCKAFVFDKARKQCLWFPFNSMSSGVKKEFGHEFDLYENKDYIRNCIIGKGRSYKGTVSITKSGIKCQPWSSMIPHEHSFLPSSYRGKDLQENYCRNPRGEEGGPWCFTSNPEVRYEVCDIPQCSEVECMTCNGESYRGLMDHTESGKICQRWDHQTPHRHKFLPERYPDKGFDDNYCRNPDGQPRPWCYTLDPHTRWEYCAIKTCADNTMNDTDVPLETTECIQGQGEGYRGTVNTIWNGIPCQRWDSQYPHEHDMTPENFKCKDLRENYCRNPDGSESPWCFTTDPNIRVGYCSQIPNCDMSHGQDCYRGNGKNYMGNLSQTRSGLTCSMWDKNMEDLHRHIFWEPDASKLNENYCRNPDDDAHGPWCYTGNPLIPWDYCPISRCEGDTTPTIVNLDHPVISCAKTKQLRVVNGIPTRTNIGWMVSLRYRNKHICGGSLIKESWVLTARQCFPSRDLKDYEAWLGIHDVHGRGDEKCKQVLNVSQLVYGPEGSDLVLMKLARPAVLDDFVSTIDLPNYGCTIPEKTSCSVYGWGYTGLINYDGLLRVAHLYIMGNEKCSQHHRGKVTLNESEICAGAEKIGSGPCEGDYGGPLVCEQHKMRMVLGVIVPGRGCAIPNRPGIFVRVAYYAKWIHKIILTYKVPQS

SEQ ID NO: 12190 - protein, 457 aa, Homo sapiens
LHAIYRGQMKEMKSPPYIFSPIPFLGHAIAFGKSPIEFLENAYEKYGPVFSFTMVGKTFTYLLGSDAAALLFNSKNEDLNAEDVYSRLTTPVFGKGVAYDVPNPVFLEQKKMLKSGLNIAHFKQHVSIIEKETKEYFESWGESGEKNVFEALSELIILTASHCLHGKEIRSQLNEKVAQLYADLDGGFSHAAWLLPGWLPLPSFRRRDRAHREIKDIFYKAIQKRRQSQEKIDDILQTLLDATYKDGRPLTDDEVAGMLIGLLLAGQHTSSTTSAWMGFFLARDKTLQKKCYLEQKTVCGENLPPLTYDQLKDLNLLDRCIKETLRLRPPIMIMMRMARTPQTVAGYTIPPGHQVCVSPTVNQRLKDSWVERLDFNPDRYLQDNPASGEKFAYVPFGAGRHRCIGENFAYVQIKTIWSTMLRLYEFDLIDGYFPTVNYTTMIHTPENPVIRYKRRSK

SEQ ID NO: 12191 - protein, 130 aa, Homo sapiens
VGLGLVGDLGQGPLWTTICQLLSFRRLGGAVATSAFSVSDGVNGGGGWDAAAGLAAGGWVGAGPGDGEGDRRQPLVHAADRLRLHPQPGLPDPSGRRPPGPAARRGEKSSIHFLPNSIPWACHSIWEKSN

SEQ ID NO: 12192 - protein, 50 aa, Homo sapiens
LFLFLDWAGLDEDEDAHVWEDNWDDDNVEDDFSNQLRAELEKHGYKMETS

SEQ ID NO: 12193 - protein, 546 aa, Homo sapiens
LKCLSAMKIAHRGPDAFRFENVNGYTNCCFGFHRLAVVDPLFGMQPIRVKKYPYLWLCYNGEIYNHKKMQQHFEFEYQTKVDGEIILHLYDKGGIEQTICMLDGVFAFVLLDTANKKVFLGRDTYGVRPLFKAMTEDGFLAVCSEAKGLVTLKHSATPFLKVEPFLPGHYEVLDLKPNGKVASVEMVKYHHCRDVPLHALYDNVEKLFPGFEIETVKNNLRILFNNAVKKRLMTDRRIGCLLSGGLDSSLVAATLLKQLKEAQVQYPLQTFAIGMEDSPDLLAARKVADHIGSEHYEVLFNSEEGIQALDEVIFSLETYDITTVRASVGMYLISKYIRKNTDSVVIFSGEGSDELTQGYIYFHKAPSPEKAEEESERLLRELYLFDVLRADRTTAAHGLELRVPFLDHRFSSYYLSLPPEMRIPKNGIEKHLLRETFEDSNLIPKEILWRPKEAFSDGITSVKNSWFKILQEYVEHQVDDAMMANAAQKFPFNTPKTKEGYYYRQVFERHYPGRADWLSHYWMPKWINATDPSARTLTHYKSAVKA

SEQ ID NO: 12194 - protein, 181 aa, Homo sapiens
MCGIWALFGSDDCLSVQCLSAMKIAHRGPDAFRFENVNGYTNCCFGFHRLAVVDPLFGMQPIRVKKYPYLWLCYNGEIYNHKKMQQHFEFEYQTKVDGEIILHLYDKGGIEQTICMLDGVFAFVLLDTANKKVFLGRDTYGVRPLFKAMTEDGFLAVCSEAKGNNKFFYRFSLLSWLYVFF

SEQ ID NO: 12195 - protein, 103 aa, Homo sapiens
LPGDFREVLQQRLGELERQLLRKVAELEDEKSLLHNETSAHRQKTESTLNALLQRVTELERGVCLACFSVWQWPDFHHLWSDMRFWLMDSRDCDTTWAWFPSV

SEQ ID NO: 12196 - protein, 51 aa, Homo sapiens
MEVQGHRLPHLNSCQSGLRVPRAHSPGISKTRAGAVSVTGLFVPYQYSVAV

SEQ ID NO: 12197 - protein, 16 aa, Homo sapiens
MATAALEFYTGIAEDT

SEQ ID NO: 12198 - protein, 13 aa, Homo sapiens
MCFPSVLDYLGNG

SEQ ID NO: 12199 - protein, 12 aa, Homo sapiens
MTRFRHGMFSVV

SEQ ID NO: 12200 - protein, 591 aa, Homo sapiens
LFSPLSELYFQGPSSNKPRVIREVRADSVGKLVTVRGIVTRVSEVKPKMVVATYTCDQCGAETYQPIQSPTFMPLIMCPSQECQTNRSGGRLYLQTRGSRFIKFQEMKMQEHSDQVPVGNIPRSITVLVEGENTRIAQPGDHVSVTGIFLPILRTGFRQVVQGLLSETYLEAHRIVKMNKSEDDESGAGELTREELRQIAEEDFYEKLAASIAPEIYGHEDVKKALLLLLVGGVDQSPRGMKIRGNINICLMGDPGVAKSQLLSYIDRLAPRSQYTTGRGSSGVGLTAAVLRDSVSGELTLEGGALVLADQGVCCIDEFDKMAEADRTAIHEVMEQQTISIAKAGILTTLNARCSILAAANPAYGRYNPRRSLEQNIQLPAALLSRFDLLWLIQDRPDRDNDLRLAQHITYVHQHSRQPPSQFEPLDMKLMRRYIAMCREKQPMVPESLADYITAAYVEMRREAWASKDATYTSARTLLAILRLSTALARLRMVDVVEKEDVNEAIRLMEMSKDSLLGDKGQTARTQRPADVIFATVRELVSGGRSVRFSEAEQRCVSRGFTPAQFQAALDEYEELNVWQVNASRTRITFV

SEQ ID NO: 12201 - protein, 456 aa, Homo sapiens
VIGLRLAGGEEGRLVRLARTQWRRSRGGRRFAPISVGRPQSTARRFSASPGARPLSPPSAAARPSAAMALKDYALEKEKVKKFLQEFYQDDELGKKQFKYGNQLVRLAHREQVALYVDLDDVAEDDPELVDSICENARRYAKLFADAVQELLPQYKEREVVNKDVLDVYIEHRLMMEQRSRDPGMVRSPQNQYPAELMRRFELYFQGPSSNKPRVIREVRADSVGKLVTVRGIVTRVSEVKPKMVVATYTCDQCGAETYQPIQSPTFMPLIMCPSQECQTNRSGGRLYLQTRGSRFIKFQEMKMQEHSDQVPVGNIPRSITVLVEGENTRIAQPGDHVSVTGIFLPILRTGFRQVVQGLLSETYLEAHRIVKMNKSEDDESGAGELTREELRQIADVIFATVRELVSGGRSVRFSEAEQRCVSRGFTPAQFQAALDEYEELNVWQVNASRTRITFV

SEQ ID NO: 12202 - protein, 786 aa, Homo sapiens
VIGLRLAGGEEGRLVRLARTQWRRSRGGRRFAPISVGRPQSTARRFSASPGARPLSPPSAAARPSAAMALKDYALEKEKVKKFLQEFYQDDELGKKQFKYGNQLVRLAHREQVALYVDLDDVAEDDPELVDSICENARRYAKLFADAVQELLPQYKEREVVNKDVLDVYIEHRLMMEQRSRDPGMVRSPQNQYPAELMRRFELYFQGPSSNKPRVIREVRADSVGKLVTVRGIVTRVSEVKPKMVVATYTCDQCGAETYQPIQSPTFMPLIMCPSQECQTNRSGGRLYLQTRGSRFIKFQEMKMQEHSDQVPVGNIPRSITVLVEGENTRIAQPGDHVSVTGIFLPILRTGFRQVVQGLLSETYLEAHRIVKMNKSEDDESGAGELTREELRQIAEEDFYEKLAASIAPEIYGHEDVKKALLLLLVGGVDQSPRGMKIRGNINICLMGDPGVAKSQLLSYIDRLAPRSQYTTGRGSSGVGLTAAVLRDSVSGELTLEGGALVLADQGVCCIDEFDKMAEADRTAIHEVMEQQTISIAKAGILTTLNARCSILAAANPAYGRYNPRRSLEQNIQLPAALLSRFDLLWLIQDRPDRDNDLRLAQHITYVHQHSRQPPSQFEPLDMKLMRRYIAMCREKQPMVPESLADYITAAYVEMRREAWASKDATYTSARTLLAILRLSTALARLRMVDVVEKEDVNEAIRLMEMSKDSLLGDKGQTARTQRPADVIFATVRELVSGGRSVRFSEAEQRCVSRGFTPAQFQAALDEYEELNVWQVNASRTRITFV

SEQ ID NO: 12203 - protein, 168 aa, Homo sapiens
LFSPLSELYFQGPSSNKPRVIREVRADSVGKLVTVRGIVTRVSEVKPKMVVATYTCDQCGAETYQPIQSPTFMPLIMCPSQECQTNRSGGRLYLQTRGSRFIKFQEMKMQEHSDQVPVGNIPRSITVLVEGENTRIAQPGDHVSVTGIFLPILRTGFRQVVQVRKSLT

SEQ ID NO: 12204 - protein, 201 aa, Homo sapiens
VIGLRLAGGEEGRLVRLARTQWRRSRGGRRFAPISVGRPQSTARRFSASPGARPLSPPSAAARPSAAMALKDYALEKEKVKKFLQEFYQDDELGKKQFKYGNQLVRLAHREQVALYVDLDDVAEDDPELVDSICENARRYAKLFADAVQELLPQYKEREVVNKDVLDVYIEHRLMMEQRSRDPGMVRSPQNQYPAELMRRL

SEQ ID NO: 12205 - protein, 108 aa, Homo sapiens
LSPPSAAARPSAAMALKDYALEKEKVKKFLQEFYQDDELGKKQFKYGNQLVRLAHREQVALYVDLDDVAEDDPELVDSICENARRYAKLFADAVQELLPQYKEREVSG

SEQ ID NO: 12206 - protein, 115 aa, Homo sapiens
LLSTELQAELSRTGRSREVLELGQVLDTGKRKRHVPYSVSETRLEEALENLCERILDYSVHAERKGSLRYAKGQSQTMATLKGLVQKGVKVDLGIPLELWDEPSVEVTYLKKQSG

SEQ ID NO: 12207 - protein, 424 aa, Homo sapiens
MTPRSPTSAFRSCTAVSSCLCPSSWPWLHLSVTSPFPVPHGPSLSCQDAAALGTSEPGGGSGSLHDHWLCTPALGRALPEEVLQVMPSDSFFFSIVRDPAALARSAFSYYKSTSSAFRKSPSLAAFLANPRGFYRPGARGDHYARNLLWFDFGLPFPPEKRAKRGNIHPPRDPNPPQLQVLPSGAGPRAQTLNPNALIHPVSTVTDHRSQISSPASFDLGSSSFIQWGLAWLDSVFDLVMVAEYFDESLVLLADALCWGLDDVVGFMHNAQAGHKQGLSTVSNSGLTAEDRQLTARARAWNNLDWALYVHFNRSLWARIEKYGQGRLQTAVAELRARREALAKHCLVGGEASDPKYITDRRFRPFQFGSAKVLGYILRSGLSPQDQEECERLATPELQYKDKLDAKQFPPTVSLPLKTSRPLSP

SEQ ID NO: 12208 - protein, 122 aa, Homo sapiens [sequence omitted]

SEQ ID NO: 12209 - protein, 59 aa, Homo sapiens
LLAPTSFFLWDLGSRLLGLAGEPLSGLAGSGPRAPGGPCGTKRGTQHGRKPRAPRCCGG

SEQ ID NO: 12210 - protein, 108 aa, Homo sapiens
VTSSEAWSSPKLGRKRKKKSQKKFSFLESQTRCGTEEGVKARGSGLQDRCLESPFPGHVGAHLAAPEAAGARQSPSGEGDPPRHPGATTGPRSSTPAPPQGQFLPPSI

SEQ ID NO: 12211 - protein, 203 aa, Homo sapiens
LSSGQCGGCGEDVVGDGAGVVALDRVFHVGCFVCSTCRAQLRGQHFYAVERRAYCEGCYVATLEKCATCSQPILDRILRAMGKAYHPGCFTCVVCHRGLDGIPFTVDATSQIHCIEDFHRKFAPRCSVCGGAIMPEPGQEETVRIVALDRSFHIGCYKCEECGLLLSSEGECQGCYPLDGHILCKACSAWRIQELSATVTTDC

SEQ ID NO: 12212 - protein, 98 aa, Homo sapiens
VSESESESESGQAEEEKEEAEALKEKEKPKEEEWEKPKDAAGLECKPRPLHKTCSLFMRNIAPNISRAEIISVSGDPWSQGRADGEVEGRGKAVGPCL

SEQ ID NO: 12213 - protein, 7 aa, Homo sapiens
LPFVKRW

SEQ ID NO: 12214 - protein, 19 aa, Homo sapiens
LFQSHCHHSCTACHRGGGW

SEQ ID NO: 12215 - protein, 8 aa, Homo sapiens
VCMGYFGV

SEQ ID NO: 12216 - protein, 79 aa, Homo sapiens
LAHTPPDIQRDGAHTATLWPPETLAPPAPLFFPLMEIDHTISSSFRGSKGRSGGTETQMRTEWFPMCSIDLGAEMQGAA

SEQ ID NO: 12217 - protein, 27 aa, Homo sapiens
LGKRGLRGLFSHLHGSRDRHNIFLLCS

SEQ ID NO: 12218 - protein, 11 aa, Homo sapiens
MAQGRGRGGPG

SEQ ID NO: 12219 - protein, 11 aa, Homo sapiens
LPRPSSPPLAS

SEQ ID NO: 12220 - protein, 152 aa, Homo sapiens
LQLPRAGKGKKSSPTKQIHKLGRSNLHRMCRSQWKDTGNVKKQGSGTPPKEPSNSPATDPHPKEIQEMSYRELWKLILTKIRGIQETSEKESKEMSTAILDMVEVFTNQIQSFPEHMANVELKKSLDEIQSILESFNDRLDQAEKKLSKLKI

SEQ ID NO: 12221 - protein, 179 aa, Homo sapiens
LTSSDLPALASQTAEITGVSHCTQPTALLFPFRILEFENPHVTSNNKGTGCEFELWDCGGDAKFESCWPALMKDAHGVVIVFNADIPSHRKEMEMWYSCFVQQPSLQDTQCMLIAHHKPGSGDDKGSLSLSPPLNKLKLVHSNLEDDPEEIRMEFIKYLKSIINSMSESRDREEMSIMT

SEQ ID NO: 12222 - protein, 178 aa, Homo sapiens
LHSFSQSGKTVLANFLTESSDITEYSPTQGVRILEFENPHVTSNNKGTGCEFELWDCGGDAKFESCWPALMKDAHGVVIVFNADIPSHRKEMEMWYSCFVQQPSLQDTQCMLIAHHKPGSGDDKGSLSLSPPLNKLKLVHSNLEDDPEEIRMEFIKYLKSIINSMSESRDREEMSIMT

SEQ ID NO: 12223 - protein, 191 aa, Homo sapiens
LPGGGSGGEPGVNEPRRPKSGKTVLANFLTESSDITEYSPTQGVRILEFENPHVTSNNKGTGCEFELWDCGGDAKFESCWPALMKDAHGVVIVFNADIPSHRKEMEMWYSCFVQQPSLQDTQCMLIAHHKPGSGDDKGSLSLSPPLNKLKLVHSNLEDDPEEIRMEFIKYLKSIINSMSESRDREEMSIMT

SEQ ID NO: 12224 - protein, 33 aa, Homo sapiens
LNSSPLSISRSLRLNMSQDGGQCGIDVSILEAL

SEQ ID NO: 12225 - protein, 40 aa, Homo sapiens
VTMVIVAAAADMEPKQWRRESQGSSLTIFYCPCARWTQRC

SEQ ID NO: 12226 - protein, 157 aa, Homo sapiens
LRKCRYSVGLVLSPFPPVALKSGYSPVSPFLSPSSPSPVWPPALGEPGWGVTRRPLGAEEAPVRRLRAPDKSGAGESSAVSMEEQETEEVGGRSSRKNAATVNAASLPPCFGVKSCRCRRCSCRRCLLYFSWPRGRISPPVGQCAGRGVGIPLYGGD

SEQ ID NO: 12227 - protein, 87 aa, Homo sapiens
LLGVSMPTLLPLPNSGTVSDSAPCARSVSLPLALGKWRRRRRRPRRRRRRRQVHGMHSTIHRRFEEVSVFGGTGSFPLSPSGPQVWI

SEQ ID NO: 12228 - protein, 720 aa, Homo sapiens
VSRLERIWSSARKALLLPGRPSRWLIQVAFAALLRPNQSAGHLAAQLTPRPRSQAPALKMEMTEMTGVSLKRGALVVEDNDSGVPVEETKKQKLSECSLTKGQDGLQNDFLSISEDVPRPPDTVSTGKGGKNSEAQLEDEEEEEEDGLSEECEEEESESFADMMKHGLTEADVGITKFVSSHQGFSGILKERYSDFVVHEIGKDGRISHLNDLSIPVDEEDPSEDIFTVLTAEEKQRLEELQLFKNKETSVAIEVIEDTKEKRTIIHQAIKSLFPGLETKTEDREGKKYIVAYHAAGKKALANPRKHSWPKSRGSYCHFVLYKENKDTMDAINVLSKYLRVKPNIFSYMGTKDKRAITVQEIAVLKITAQRLAHLNKCLMNFKLGNFSYQKNPLKLGELQGNHFTVVLRNITGTDDQVQQAMNSLKEIGFINYYGMQRFGTTAVPTYQVGRAILQNSWTEVMDLILKPRSGAEKGYLVKCREEWAKTKDPTAALRKLPVKRCVEGQLLRGLSKYGMKNIVSAFGIIPRNNRLMYIHSYQSYVWNNMVSKRIEDYGLKPVPGDLVLKGATATYIEEDDVNNYSIHDVVMPLPGFDVIYPKHKIQEAYREMLTADNLDIDNMRHKIRDYSLSGAYRKIIIRPQNVSWEVVAYDDPKIPLFNTDVDNLEGKTPPVFASEGKYRALKMDFSLPPSTYATMAIREVLKMDTSIKNQTQLNTTWLR

SEQ ID NO: 12229 - protein, 728 aa, Homo sapiens
VSRLERIWSSARKALLLPGRPSRWLIQVAFAALLRPNQSAGHLAAQLTPRPRSQAPGFLKCFLGALKMEMTEMTGVSLKRGALVVEDNDSGVPVEETKKQKLSECSLTKGQDGLQNDFLSISEDVPRPPDTVSTGKGGKNSEAQLEDEEEEEEDGLSEECEEEESESFADMMKHGLTEADVGITKFVSSHQGFSGILKERYSDFVVHEIGKDGRISHLNDLSIPVDEEDPSEDIFTVLTAEEKQRLEELQLFKNKETSVAIEVIEDTKEKRTIIHQAIKSLFPGLETKTEDREGKKYIVAYHAAGKKALANPRKHSWPKSRGSYCHFVLYKENKDTMDAINVLSKYLRVKPNIFSYMGTKDKRAITVQEIAVLKITAQRLAHLNKCLMNFKLGNFSYQKNPLKLGELQGNHFTVVLRNITGTDDQVQQAMNSLKEIGFINYYGMQRFGTTAVPTYQVGRAILQNSWTEVMDLILKPRSGAEKGYLVKCREEWAKTKDPTAALRKLPVKRCVEGQLLRGLSKYGMKNIVSAFGIIPRNNRLMYIHSYQSYVWNNMVSKRIEDYGLKPVPGDLVLKGATATYIEEDDVNNYSIHDVVMPLPGFDVIYPKHKIQEAYREMLTADNLDIDNMRHKIRDYSLSGAYRKIIIRPQNVSWEVVAYDDPKIPLFNTDVDNLEGKTPPVFASEGKYRALKMDFSLPPSTYATMAIREVLKMDTSIKNQTQLNTTWLR

SEQ ID NO: 12230 - protein, 141 aa, Homo sapiens
MQRRMGKDQRPNCCPQKTTCQKIPRNNRLMYIHSYQSYVWNNMVSKRIEDYGLKPVPGDLVLKGATATYIEEDDVNNYSIHDVVMPLPGFDVIYPKHKIQEAYREMLTADNLDIDNMRHKIRDYSLSGAYRKIIIRPQNVS

SEQ ID NO: 12231 - protein, 78 aa, Homo sapiens
MDLILKPRSGAEKGYLVKCREEWAKTKDPTAALRKLPVKRCVEGQLLRGLSKYGMKNIVSAFGIVSAICEVRQWLKAF

SEQ ID NO: 12232 - protein, 666 aa, Homo sapiens
VKADGANVKMNSTTTTAVSASSTSSSAVSTPPLIKPVLMSKSVPPSPEKILNGKGILPTTIDKKHQNGTKNSNKPYRRLSEREFDPNKHCGVLDPETKKPCTRSLTCKTHSLSHRRAVPGRKKQFDLLLAEHKAKSREKEVKDKEHLLTSTREILPSQSGPAQDSLLGSSGSSGPEPKVASPAKSRPPNSVLPRPSSANSISSSTSSNHSGHTPEPPLPPVGGDLASRLSSDEGEMDGADESEKLDCQFSTHHPRPLAFCSFGSRLMGRGYYVFDRRWDRFRFALNSMVEKHLNSQMWKKIPPAADSPLPSPAAHITTPVPASVLQPFSNPSAVYLPSAPISSRLTSSYIMTSAMLSNAAFVTSPDPSALMSHTTAFPHVAATLSIMDSTFKAPSAVSPIPAVIPSPSHKPSKTKTSKSSKVKDLSTRSDESPSNKKRKPQSSTSSSSSSSSSSLQTSLSSPLSGPHKKNCVLNASSALNSYQAAPPYNSLSVHNSNNGVSPLSAKLEPSGRTSLPGGPADIVRQVGAVGGSSDSCPLSVPSLALHAGDLSLASHNAVSSLPLSFDKSEGKKRKNSSSSSKACKITKMPGMNSVHKKNPPSLLAPVPDPVNSTSSRQVRDLLAPPSPALGGRGSWAAPLLSRAAPTGNTSLIPVLVFPEGSFHPLL

SEQ ID NO: 12233 - protein, 318 aa, Homo sapiens
LLWDHDSLWERRHGSMCRPSPSPVSPASNPRTSLVQVKTKACLSGHHSASSTSKPFKTPKDNLLTSSSKQHTVFPAKGSRDKPCVPVPVVSLEKIPNLVKADGANVKMNSTTTTAVSASSTSSSAVSTPPLIKPVLMSKSVPPSPEKILNGKGILPTTIDKKHQNGTKNSNKPYRRLSEREFDPNKHCGVLDPETKKPCTRSLTCKTHSLSHRRAVPGRKKQFDLLLAEHKAKSREKEVKDKEHLLTSTREILPSQSGPAQDSLLGSSGSSGPEPKVASPAKSRPPNSVLPSFAHLGVASWDEGTMCLIEDGIVFDSH

SEQ ID NO: 12234 - protein, 241 aa, Homo sapiens
MNPAAEAEFNILLATDSYKKYDGHLPIEIKAVPEGFVIPRGNVLFTVENTDPECYWLTNWIETILVQSWYPITVATNSREQKKILAKYLLETSGNLDGLEYKLHDFGYRGVSSQETAGIGASAHLVNFKGTDTVAGLALIKKYYGTKDPVPGYSVPAAEHSTITAWGKDHEKDAFEHIVTQFSSVPVSVVSDSYDIYNACEKIWGEDLRHLIVSRSTQAPLIIRPDSGNPLDTVLKVNFHM

SEQ ID NO: 12235 - protein, 63 aa, Homo sapiens
LEYKLHDFGYRGVSSQETAGIGASAHLVNFKGTDTVAGLALIKKYYGTKDPVPGYSVPAAEHR

SEQ ID NO: 12236 - protein, 150 aa, Homo sapiens
MNPAAEAEFNILLATDSYKVTHYKQYPPNTSKVYSYFECREKKTENSKLRKVKYEETVFYGLQYILNKYLKGKVVTKEKIQEAKDVYKEHFQDDVFNEKGWNYILEKYDGHLPIEIKAVPEGFVIPRGNVLFTVENTDPECYWLTNWIEI

SEQ ID NO: 12237 - protein, 152 aa, Homo sapiens
MNPAAEAEFNILLATDSYKVTHYKQYPPNTSKVYSYFECREKKTENSKLRKVKYEETVFYGLQYILNKYLKGKVVTKEKIQEAKDVYKEHFQDDVFNEKGWNYILEKYDGHLPIEIKAVPEGFVIPRGNVLFTVENTDPECYWLTNWIEFRS

SEQ ID NO: 12238 - protein, 162 aa, Homo sapiens
MNPAAEAEFNILLATDSYKVTHYKQYPPNTSKVYSYFECREKKTENSKLRKVKYEETVFYGLQYILNKYLKGKVVTKEKIQEAKDVYKEHFQDDVFNEKGWNYILEKYDGHLPIEIKAVPEGFVIPRGNVLFTVENTDPECYWLTNWIEVNCFFNSYLTLIE

SEQ ID NO: 12239 - protein, 79 aa, Homo sapiens [sequence omitted]

SEQ ID NO: 12240 - protein, 36 aa, Homo sapiens
VFPTSSHKRGKLHSLNHEGNQSHRAWSWRTINSPWC

SEQ ID NO: 12241 - protein, 87 aa, Homo sapiens
MEFCRSLESDAEDHKPLKKGSRTPSDRTVKKEDSDDSLVDYGEGVNGQFNEDGSFIGQYSGKKEKEPAEGNESSEAPSPVNAMNSFV

SEQ ID NO: 12242 - protein, 10 aa, Homo sapiens
MKRSRSERMS

SEQ ID NO: 12243 - protein, 29 aa, Homo sapiens
MHDIFGQCNCGTGTYFSEEKLCGSMAFII

SEQ ID NO: 12244 - protein, 156 aa, Homo sapiens
LGGTGRPTMPKNKKRNTPHRGSSAGGGGSGAAAATAATAGGQHRNVQPFSDEDASIETMSHCSGYSDPSSFAEDGPEVLDEEGTQEDLEYKLKGLIDLTLDKSAKTRQAALEGIKNALASKMLYEFILERRMTLTDSIERCLKKGNALIFESQTYN

SEQ ID NO: 12245 - protein, 20 aa, Homo sapiens
LVTAKEEEMAPVRERPWPRQ

SEQ ID NO: 12246 - protein, 762 aa, Homo sapiens
LTSSMEDPAAPGTGGPPANGNGNGGGKGKQAAPKGREAFRSQRRESEGSVDCPTLEFEYGDADGHAAELSELYSYTENLEFTNNRRCFEEDFKTQVQGKEWLELEEDAQKAYIMGLLDRLEVVSRERRLKVARAVLYLAQGTFGECDSEVDVLHWSRYNCFLLYQMGTFSTFLELLHMEIDNSQACSSALRKPAVSIADSTELRVLLSVMYLMVENIRLERETDPCGWRTARETFRTELSFSMHNEEPFALLLFSMVTKFCSGLAPHFPIKKVLLLLWKVVMFTLGGFEHLQTLKVQKRAELGLPPLAEDSIQVVKSMRAASPPSYTLDLGESQLAPPPSKLRGRRGSRRQLLTKQDSLDIYNERDLFKTEEPATEEEEESAGDGERTLDGELDLLEQDPLVPPPPSQAPLSAERVAFPKGLPWAPKVRQKDIEHFLEMSRNKFIGFTLGQDTDTLVGLPRPIHESVKTLKQHKYISIADVQIKNEEELEKCPMSLGEEVVPETPCEILYQGMLYSLPQYMIALLKILLAAAPTSKAKTDSINILADVLPEEMPITVLQSMKLGIDVNRHKEIIVKSISTLLLLLLKHFKLNHIYQFEYVSQHLVFANCIPLILKFFNQNILSYITAKNSISVLDYPCCTIQDLPELTTESLEAGDNSQFCWRNLFSCINLLRLLNKLTKWKHSRTMMLVVFKSAPILKRALKVKQAMLQLYVLKLLKLQTKYLGRQWRKSNMKTMSAIYQKVRHRMNDDWAYGNGESSQSS

SEQ ID NO: 12247 - protein, 838 aa, Homo sapiens
LTSSMEDPAAPGTGGPPANGNGNGGGKGKQAAPKGREAFRSQRRESEGSVDCPTLEFEYGDADGHAAELSELYSYTENLEFTNNRRCFEEDFKTQVQGKEWLELEEDAQKAYIMGLLDRLEVVSRERRLKVARAVLYLAQGTFGECDSEVDVLHWSRYNCFLLYQMGTFSTFLELLHMEIDNSQACSSALRKPAVSIADSTELRVLLSVMYLMVENIRLERETDPCGWRTARETFRTELSFSMHNEEPFALLLFSMVTKFCSGLAPHFPIKKVLLLLWKVVMFTLGGFEHLQTLKVQKRAELGLPPLAEDSIQVVKSMRAASPPSYTLDLGESQLAPPPSKLRGRRGSRRQLLTKQDSLDIYNERDLFKTEEPATEEEEESAGDGERTLDGELDLLEQDPLVPPPPSQAPLSAERVAFPKGLPWAPKVRQKDIEHFLEMSRNKFIGFTLGQDTDTLVGLPRPIHESVKTLKQHKYISIADVQIKNEEELEKCPMSLGEEVVPETPCEILYQGMLYSLPQYMIALLKILLAAAPTSKAKTDSINILADVLPEEMPITVLQSMKLGIDVNRHKEIIVKSISTLLLLLLKHFKLNHIYQFEYVSQHLVFANCIPLILKFFNQNILSYITAKNSISVLDYPCCTIQDLPELTTESLEAGDNSQFCWRNLFSCINLLRLLNKLTKWKHSRTMMLVVFKSAPILKRALKVKQAMLQLYVLKLLKLQTKYLGRQWRKSNMKTMSAIYQKVRHRMNDDWAYGNDIDARPWDFQAEECTLRANIEAFNSRRYDRPQDSEFSPVDNCLQSVLGQRLDLPEDFHYSYELWLEREVFSQPICWEELLQNH

SEQ ID NO: 12248 - protein, 38 aa, Homo sapiens
VQSNGIKSLDFGRKVLLTFFFLKGRKRILELHFLKHHS

SEQ ID NO: 12249 - protein, 99 aa, Homo sapiens
LGGLNEFVVKFYGPQGTPYEGGVWKVRVDLPDKYPFKSPSIGFMNKIFHPNIDEASGTVCLDVINQTWTALYGEFGHGIFFGDVETLPKKMLFGFSFLV

SEQ ID NO: 12250 - protein, 39 aa, Homo sapiens
LAKFFSIESKHEVTILGGLNEFVVKFYGPQGSKYMCCTI

SEQ ID NO: 12251 - protein, 47 aa, Homo sapiens
LRLGILCTPVHWCRSSEQMPPEDFCAWKISVNRLLLHLPIWCYFYSS

SEQ ID NO: 12252 - protein, 40 aa, Homo sapiens
LRLGILCTPVHWCRSSEQMPPEDFCAWKISVNRLLLHLRK

SEQ ID NO: 12253 - protein, 63 aa, Homo sapiens
LSSWDYRRKMEETEILLVKQNKPLNRKNEEAVSTSGRNEPGRGTGTISEAMPLRLELALSPRR

SEQ ID NO: 12254 - protein, 88 aa, Homo sapiens
VGWALLFGEKSRRSLQSSLGVNVCSSSQPAAGRKMEETEILLVKQNKPLNRKNEEAVSTSGRNEPGRGTGTISEAMPLRLELALSPRR

SEQ ID NO: 12255 - protein, 62 aa, Homo sapiens
VRSALGRKMEETEILLVKQNKPLNRKNEEAVSTSGRNEPGRGTGTISEAMPLRLELALSPRR

SEQ ID NO: 12256 - protein, 13 aa, Homo sapiens
LLSRTKKGKMRKL

SEQ ID NO: 12257 - protein, 62 aa, Homo sapiens
VRIIFTSRRAREEGTRQGAKAACVQPWGILLMLLRVRRVGIICHLEFLCLADLSSDLPIYQR

SEQ ID NO: 12258 - protein, 20 aa, Homo sapiens
LLLLFMSVPVVSAPPFLCNV

SEQ ID NO: 12259 - protein, 25 aa, Homo sapiens
VGLRLRDFPGMRAGLLPSFWMHIPL

SEQ ID NO: 12260 - protein, 40 aa, Homo sapiens
VLIQQSCLLALWEPGRRRSREGRCGEATCGFTGCCSAQDC

SEQ ID NO: 12261 - protein, 34 aa, Homo sapiens
VQVSRSCGVVPSACCSLISSSSMTWQVKTGMKGM

SEQ ID NO: 12262 - protein, 129 aa, Homo sapiens [sequence omitted]

SEQ ID NO: 12263 - protein, 257 aa, Homo sapiens
VKFQLKGNVLPRRAQRKKLFRACCLWQGCTIPRVYKGKYKAQTAVVKETLSRIPAAAMAVTMRLGSCIAMINQWNVRRGLTYVAQTGLQLLSSSDPPASASQSAEITGYHVKTEDPDLRTSSWIKQFDTSRFHPQDLSRSQKCIRKEGSSEISQRVQSRNYVDSSGSSLQNGKYMQNSNLTSGACQISNGSLSPERPVGETSFSVPLHPTKRPASNPPPISNQATKGKRPKKGMATAKQRLGKILKLNRNGHARFFV

SEQ ID NO: 12264 - protein, 136 aa, Homo sapiens
VRRKVRKNMAWPNVFQRGSLLSQFSHHHVVVFLLTFFSYSLLHASRKTFSNVKVSISEQWTPSAFNTSVELPVETESRCVAQAGVQWCDLSSLQAPPPRFTPFSCLSLPSSWDHRCPPPRLANFFCIFSRDGVSPC

SEQ ID NO: 12265 - protein, 80 aa, Homo sapiens
VIPCVAGLLGLDRQVREEGIASAKEVLESCVLAARDPAWVGRCFCVGVWPFHQSCGGPRDFLPVLLGFQVVAPSSEKPKD

SEQ ID NO: 12266 - protein, 50 aa, Homo sapiens
VIPCVAGLLGLDRQVREEGIASAKEVLESCVLAARDPAWVGRCFCEKPKD

SEQ ID NO: 12267 - protein, 7 aa, Homo sapiens
MYPGYET

SEQ ID NO: 12268 - protein, 15 aa, Homo sapiens
LMPKLTPLHSPLLHL

SEQ ID NO: 12269 - protein, 11 aa, Homo sapiens
LGRIEQSEVRV

SEQ ID NO: 12270 - protein, 8 aa, Homo sapiens
MKRKQRPS

SEQ ID NO: 12271 - protein, 34 aa, Homo sapiens
LARLDFSACDSAPGYTKEARPGFYCLLRPSSCSH

SEQ ID NO: 12272 - protein, 30 aa, Homo sapiens
LETPGDGGALGHSETALGGDPGRRWSSWAF

SEQ ID NO: 12273 - protein, 35 aa, Homo sapiens
VRRGERQGGPTGRGRGAPGGGEWGSPRGAGTAWGS

SEQ ID NO: 12274 - protein, 171 aa, Homo sapiens [sequence omitted]

SEQ ID NO: 12275 - protein, 55 aa, Homo sapiens
VELVAGSQGSWDRSKSPAWEWESGMWGTNLPLRVRFPKCNGSCTTPRQCARPFLT

SEQ ID NO: 12276 - protein, 98 aa, Homo sapiens
LANTQPRGPPASSPAPAPKFSPVTPKFTPVASKFSPGAPGGSGSQPNQKLGHPEALSAGTGSPQPPSFTYAQQREKPRVQEKQHPVPPPAQNQNQFRK

SEQ ID NO: 12277 - protein, 32 aa, Homo sapiens
VRTGPLQTAVHAPLWTTHTETTCPHLSYCFDV

SEQ ID NO: 12278 - protein, 157 aa, Homo sapiens
LGWLLDPPKDGWSEQQQILNGTPLYMYQDCPMQGRRDTDHWLRSNWIYRGEEASRVHVELQFTVRDCKSFPGGAGPLGCKETFNLLYMESDQDVGIQLRRPLFQKVLLPSMPSGSWCRSLVAPYWVPEKVAETGRGCRGRILKRIWRLKAGHGGLCL

SEQ ID NO: 12279 - protein, 56 aa, Homo sapiens
VKSSRDFTLLCVCEGRFICKMGLRELRIKSAESSTSLWIKRDVWMKLQSQEEAREN

SEQ ID NO: 12280 - protein, 45 aa, Homo sapiens
VKEGRFICKMGLRELRIKSAESSTSLWIKRDVWMKLQSQEEAREN

SEQ ID NO: 12281 - protein, 293 aa, Homo sapiens
LSSWLCDCASCQVYEFRVKESSIIAPAPAEDVDTPPRKKKRKHRLWAAHCRKIQLKKDGSSNHVYNYQPCDHPRQPCDSSCPCVIAQNFCEKFCQCSSECQNRFPGCRCKAQCNTKQCPCYLAVRECDPDLCLTCGAADHWDSKNVSCKNCSIQRGSKKHLLLAPSDVAGWGIFIKDPVQKNEFISEYCGEIISQDEADRRGKVYDKYMCSFLFNLNNDFVVDATRKGNKIRFANHSVNPNCYAKVMMVNGDHRIGIFAKRAIQTGEELFFDYRYSQADALKYVGIEREMEIP

SEQ ID NO: 12282 - protein, 774 aa, Homo sapiens
VEPRRRRRRRAGATRGNNASRRAGRRIIMGQTGKKSEKGPVCWRKRVKSEYMRLRQLKRFRRADEVKSMFSSNRQKILERTEILNQEWKQRRIQPVHILTSVSSLRGTRECSVTSDLDFPTQVIPLKTLNAVASVPIMYSWSPLQQNFMVEDETVLHNIPYMGDEVLDQDGTFIEELIKNYDGKVHGDRECGFINDEIFVELVNALGQYNDDDDDDDGDDPEEREEKQKDLEDHRDDKESRPPRKFPSDKIFEAISSMFPDKGTAEELKEKYKELTEQQLPGALPPECTPNIDGPNAKSVQREQSLHSFHTLFCRRCFKYDCFLHPFHATPNTYKRKNTETALDNKPCGPQCYQHLEGAKEFAAALTAERIKTPPKRPGGRRRGRLPNNSSRPSTPTINVLESKDTDSDREAGTETGGENNDKEEEEKKDETSSSSEANSRCQTPIKMKPNIEPPENVEWSGAEASMFRVLIGTYYDNFCAIARLIGTKTCRQVYEFRVKESSIIAPAPAEDVDTPPRKKKRKHRLWAAHCRKIQLKKDGSSNHVYNYQPCDHPRQPCDSSCPCVIAQNFCEKFCQCSSECQNRFPGCRCKAQCNTKQCPCYLAVRECDPDLCLTCGAADHWDSKNVSCKNCSIQRGSKKHLLLAPSDVAGWGIFIKDPVQKNEFISEYCGEIISQDEADRRGKVYDKYMCSFLFNLNNDFVVDATRKGNKIRFANHSVNPNCYAKVMMVNGDHRIGIFAKRAIQTGEELFFDYRYSQADALKYVGIEREMEIP

SEQ ID NO: 12283 - protein, 735 aa, Homo sapiens
VEPRRRRRRRAGATRGNNASRRAGRRIIMGQTGKKSEKGPVCWRKRVKSEYMRLRQLKRFRRADEVKSMFSSNRQKILERTEILNQEWKQRRIQPVHILTSVSSLRGTREVEDETVLHNIPYMGDEVLDQDGTFIEELIKNYDGKVHGDRECGFINDEIFVELVNALGQYNDDDDDDDGDDPEEREEKQKDLEDHRDDKESRPPRKFPSDKIFEAISSMFPDKGTAEELKEKYKELTEQQLPGALPPECTPNIDGPNAKSVQREQSLHSFHTLFCRRCFKYDCFLHPFHATPNTYKRKNTETALDNKPCGPQCYQHLEGAKEFAAALTAERIKTPPKRPGGRRRGRLPNNSSRPSTPTINVLESKDTDSDREAGTETGGENNDKEEEEKKDETSSSSEANSRCQTPIKMKPNIEPPENVEWSGAEASMFRVLIGTYYDNFCAIARLIGTKTCRQVYEFRVKESSIIAPAPAEDVDTPPRKKKRKHRLWAAHCRKIQLKKDGSSNHVYNYQPCDHPRQPCDSSCPCVIAQNFCEKFCQCSSECQNRFPGCRCKAQCNTKQCPCYLAVRECDPDLCLTCGAADHWDSKNVSCKNCSIQRGSKKHLLLAPSDVAGWGIFIKDPVQKNEFISEYCGEIISQDEADRRGKVYDKYMCSFLFNLNNDFVVDATRKGNKIRFANHSVNPNCYAKVMMVNGDHRIGIFAKRAIQTGEELFFDYRYSQADALKYVGIEREMEIP

SEQ ID NO: 12284 - protein, 779 aa, Homo sapiens
VEPRRRRRRRAGATRGNNASRRAGRRIIMGQTGKKSEKGPVCWRKRVKSEYMRLRQLKRFRRADEVKSMFSSNRQKILERTEILNQEWKQRRIQPVHILTSVSSLRGTRECSVTSDLDFPTQVIPLKTLNAVASVPIMYSWSPLQQNFMVEDETVLHNIPYMGDEVLDQDGTFIEELIKNYDGKVHGDRECGFINDEIFVELVNALGQYNDDDDDDDGDDPEEREEKQKDLEDHRDDKESRPPRKFPSDKIFEAISSMFPDKGTAEELKEKYKELTEQQLPGALPPECTPNIDGPNAKSVQREQSLHSFHTLFCRRCFKYDCFLHRKCNYSFHATPNTYKRKNTETALDNKPCGPQCYQHLEGAKEFAAALTAERIKTPPKRPGGRRRGRLPNNSSRPSTPTINVLESKDTDSDREAGTETGGENNDKEEEEKKDETSSSSEANSRCQTPIKMKPNIEPPENVEWSGAEASMFRVLIGTYYDNFCAIARLIGTKTCRQVYEFRVKESSIIAPAPAEDVDTPPRKKKRKHRLWAAHCRKIQLKKDGSSNHVYNYQPCDHPRQPCDSSCPCVIAQNFCEKFCQCSSECQNRFPGCRCKAQCNTKQCPCYLAVRECDPDLCLTCGAADHWDSKNVSCKNCSIQRGSKKHLLLAPSDVAGWGIFIKDPVQKNEFISEYCGEIISQDEADRRGKVYDKYMCSFLFNLNNDFVVDATRKGNKIRFANHSVNPNCYAKVMMVNGDHRIGIFAKRAIQTGEELFFDYRYSQADALKYVGIEREMEIP

SEQ ID NO: 12285 - protein, 765 aa, Homo sapiens
VEPRRRRRRRAGATRGNNASRRAGRRIIMGQTGKKSEKGPVCWRKRVKSEYMRLRQLKRFRRADEVKSMFSSNRQKILERTEILNQEWKQRRIQPVHILTSCSVTSDLDFPTQVIPLKTLNAVASVPIMYSWSPLQQNFMVEDETVLHNIPYMGDEVLDQDGTFIEELIKNYDGKVHGDRECGFINDEIFVELVNALGQYNDDDDDDDGDDPEEREEKQKDLEDHRDDKESRPPRKFPSDKIFEAISSMFPDKGTAEELKEKYKELTEQQLPGALPPECTPNIDGPNAKSVQREQSLHSFHTLFCRRCFKYDCFLHPFHATPNTYKRKNTETALDNKPCGPQCYQHLEGAKEFAAALTAERIKTPPKRPGGRRRGRLPNNSSRPSTPTINVLESKDTDSDREAGTETGGENNDKEEEEKKDETSSSSEANSRCQTPIKMKPNIEPPENVEWSGAEASMFRVLIGTYYDNFCAIARLIGTKTCRQVYEFRVKESSIIAPAPAEDVDTPPRKKKRKHRLWAAHCRKIQLKKDGSSNHVYNYQPCDHPRQPCDSSCPCVIAQNFCEKFCQCSSECQNRFPGCRCKAQCNTKQCPCYLAVRECDPDLCLTCGAADHWDSKNVSCKNCSIQRGSKKHLLLAPSDVAGWGIFIKDPVQKNEFISEYCGEIISQDEADRRGKVYDKYMCSFLFNLNNDFVVDATRKGNKIRFANHSVNPNCYAKVMMVNGDHRIGIFAKRAIQTGEELFFDYRYSQADALKYVGIEREMEIP

SEQ ID NO: 12286 - protein, 68 aa, Homo sapiens
LLAPSDVAGWGIFIKDPVQKNEFISEYCGEIISQDEADRRGKVYDKYMCSFLFNLNNGMFQSWEAVSS

SEQ ID NO: 12287 - protein, 78 aa, Homo sapiens
VLTFGFVEANSRCQTPIKMKPNIEPPENVEWSGAEASMFRVLIGTYYDNFCAIARLIGTKTCRQVRYPIKMLLKELQT

SEQ ID NO: 12288 - protein, 115 aa, Homo sapiens
LDRRFIEWHLQKEGAKEFAAALTAERIKTPPKRPGGRRRGRLPNNSSRPSTPTINVLESKDTDSDREAGTETGGENNDKEEEEKKDETSSSSGKTRLITGFYCSVKVRVVRIKDV

SEQ ID NO: 12289 - protein, 459 aa, Homo sapiens
VEPRRRRRRRAGATRGNNASRRAGRRIIMGQTGKKSEKGPVCWRKRVKSEYMRLRQLKRFRRADEVKSMFSSNRQKILERTEILNQEWKQRRIQPVHILTSVSSLRGTRECSVTSDLDFPTQVIPLKTLNAVASVPIMYSWSPLQQNFMVEDETVLHNIPYMGDEVLDQDGTFIEELIKNYDGKVHGDRECGFINDEIFVELVNALGQYNDDDDDDDGDDPEEREEKQKDLEDHRDDKESRPPRKFPSDKIFEAISSMFPDKGTAEELKEKYKELTEQQLPGALPPECTPNIDGPNAKSVQREQSLHSFHTLFCRRCFKYDCFLHPFHATPNTYKRKNTETALDNKPCGPQCYQHLEGAKEFAAALTAERIKTPPKRPGGRRRGRLPNNSSRPSTPTINVLESKDTDSDREAGTETGGENNDKEEEEKKDETSSSSGKTRLITGFYCSVKVRVVRIKDV

SEQ ID NO: 12290 - protein, 285 aa, Homo sapiens
LVVYSYNYYFWLDFPLQLPVVQPHSRLLYQLVDCSVTSDLDFPTQVIPLKTLNAVASVPIMYSWSPLQQNFMVEDETVLHNIPYMGDEVLDQDGTFIEELIKNYDGKVHGDRECGFINDEIFVELVNALGQYNDDDDDDDGDDPEEREEKQKDLEDHRDDKESRPPRKFPSDKIFEAISSMFPDKGTAEELKEKYKELTEQQLPGALPPECTPNIDGPNAKSVQREQSLHSFHTLFCRRCFKYDCFLHPFHATPNTYKRKNTETALDNKPCGPQCYQHLPLLPRN

SEQ ID NO: 12291 - protein, 362 aa, Homo sapiens
VEPRRRRRRRAGATRGNNASRRAGRRIIMGQTGKKSEKGPVCWRKRVKSEYMRLRQLKRFRRADEVKSMFSSNRQKILERTEILNQEWKQRRIQPVHILTSVSSLRGTRECSVTSDLDFPTQVIPLKTLNAVASVPIMYSWSPLQQNFMVEDETVLHNIPYMGDEVLDQDGTFIEELIKNYDGKVHGDRECGFINDEIFVELVNALGQYNDDDDDDDGDDPEEREEKQKDLEDHRDDKESRPPRKFPSDKIFEAISSMFPDKGTAEELKEKYKELTEQQLPGALPPECTPNIDGPNAKSVQREQSLHSFHTLFCRRCFKYDCFLHPFHATPNTYKRKNTETALDNKPCGPQCYQHLPLLPRN

SEQ ID NO: 12292 - protein, 193 aa, Homo sapiens
LGCRVWRSVRSRPTPGGTQKAVEPRRRRRRRAGATRGNNASRRAGRRIIMGQTGKKSEKGPVCWRKRVKSEYMRLRQLKRFRRADEVKSMFSSNRQKILERTEILNQEWKQRRIQPVHILTSVSSLRGTREAIHLLFPLRFSITQFLLGTSLLPRVSVWLCTPTTTIFGLTSLSSSQWSSHTVAYCTSWLIVR

SEQ ID NO: 12293 - protein, 628 aa, Homo sapiens
LSSAMGIGVSLLLQFSLTPGGYRSVGRSRRCSRGSIPRNIPKRSWKKPHPQLCSLQAEEEPMLERRCRGPLAMGLAQPRLLSGPSQESPQTLGKESRGLRQQGTSVAQSGAQAPGRAHRCAHCRRHFPGWVALWLHTRRCQARLPLPCPECGRRFRHAPFLALHRQVHAAATPDLGFACHLCGQSFRGWVALVLHLRAHSAAKRPIACPKCERRFWRRKQLRAHLRRCHPPAPEARPFICGNCGRSFAQWDQLVAHKRVHVAEALEEAAAKALGPRPRGRPAVTAPRPGGDAVDRPFQCACCGKRFRHKPNLIAHRRVHTGERPHQCPECGKRFTNKPYLTSHRRIHTGEKPYPCKECGRRFRHKPNLLSHSKIHKRSEGSAQAAPGPGSPQLPAGPQESAAEPTPAVPLKPAQEPPPGAPPEHPQDPIEAPPSLYSCDDCGRSFRLERFLRAHQRQHTGERPFTCAECGKNFGKKTHLVAHSRVHSGERPFACEECGRRFSQGSHLAAHRRDHAPDRPFVCPDCGKAFRHKPYLAAHRRIHTGEKPYVCPDCGKAFSQKSNLVSHRRIHTGERPYACPDCDRSFSQKSNLITHRKSHIRDGAFCCAICGQTFDDEERLLAHQKKHDV

SEQ ID NO: 12294 - protein, 577 aa, Homo sapiens
VATFSAEEEPMLERRCRGPLAMGLAQPRLLSGPSQESPQTLGKESRGLRQQGTSVAQSGAQAPGRAHRCAHCRRHFPGWVALWLHTRRCQARLPLPCPECGRRFRHAPFLALHRQVHAAATPDLGFACHLCGQSFRGWVALVLHLRAHSAAKRPIACPKCERRFWRRKQLRAHLRRCHPPAPEARPFICGNCGRSFAQWDQLVAHKRVHVAEALEEAAAKALGPRPRGRPAVTAPRPGGDAVDRPFQCACCGKRFRHKPNLIAHRRVHTGERPHQCPECGKRFTNKPYLTSHRRIHTGEKPYPCKECGRRFRHKPNLLSHSKIHKRSEGSAQAAPGPGSPQLPAGPQESAAEPTPAVPLKPAQEPPPGAPPEHPQDPIEAPPSLYSCDDCGRSFRLERFLRAHQRQHTGERPFTCAECGKNFGKKTHLVAHSRVHSGERPFACEECGRRFSQGSHLAAHRRDHAPDRPFVCPDCGKAFRHKPYLAAHRRIHTGEKPYVCPDCGKAFSQKSNLVSHRRIHTGERPYACPDCDRSFSQKSNLITHRKSHIRDGAFCCAICGQTFDDEERLLAHQKKHDV

SEQ ID NO: 12295 - protein, 110 aa, Homo sapiens
VLLETPQPPGPAPPGARTRTRPESGAWRWVRAGSSHPHPHPTPPHPAFFRFIKVCAVDPRMKPAWKIPSLETEPDRGRCTGRTLSGFSNQAAILAPQVWDFWVFSWLASC

SEQ ID NO: 12296 - protein, 101 aa, Homo sapiens
LASSPVAEEPRALLGWGGPSPGAQPAADPEECHSLPRGGDRHHLFLRLVGPSLLRDSSWYTSPDFLYIRSWLPCIFFSGGVTVGNIGRQLAMGVPEKPHSD

SEQ ID NO: 12297 - protein, 60 aa, Homo sapiens
LLRYSFFSRSRYTSPDFLYIRSWLPCIFFSGGVTVGNIGRQLAMVSEMIILSSKTCVSLP

SEQ ID NO: 12298 - protein, 439 aa, Homo sapiens
MIEVIMPGVTIYELLFLFLWKWKGPLHPPLPPPHQPQPQQPQQQPPPQHQPPHQPPHQPPPQHQPPPQHPPQHPPQHQHHHHHHHLSVPPPPLMPMSQPQFRPHVQTAQPQASSSRMQCPQRQGLRHNTTSQNVSKRPMQQMQPTAPRNSNLRELPIAPSHVIEMSSSRCSATPSAQVKPIVSASPPSRAVAGSRSSQGKTEVKVKPASPVAQPKEEAKTETEFPDEDEETRLYRLKIEEQKRLREEILKQKELRRQQQAGARKKELLERLAQQQQQLYAPPPPAEQEEQALSPSPTNGNPLLPFPGAQVRQNVKNRLLVKNQDVSISNVQPKTSNFVPSSANMQYQGQQMKALKHLRQTRTVPQSQTQPLHKVLPIKPADVEEPAVPQTPRVASIQGRPQDTKPGVKRTVTHRTNSGGGDGPHISSKVRVIKLSGGVS

SEQ ID NO: 12299 - protein, 271 aa, Homo sapiens
LLLSCVCLLQTYLTVCKDVVMVGLGDHQFQMQLLQRSLGIMQTVKGFFYVSLLLDILKEITGSSLIQKTDSDEEVAMLLDTVQKVFQKMLECIARSFRKQPEEGLRLLYSVQRPLHEFITAVQSRHTDTPVHRGVLSTLIAGPVVEISHQLRKVSDVEELTPPEHLSDLPPFSRCLIGIIIKSSNVVRSFLDELKACVASNDIEGIVCLTAAVHIILVINAGKHKSSKVREVAATVHRKLKTFMEITLEEDSIERFLYESSSRTLGELLNS

SEQ ID NO: 12300 - protein, 1147 aa, Homo sapiens
VPSVMEKRETFVQAVSKELVGEFLQFVQLDKEASDPFSLNELLDELSRKQKEELWQRLKNLLTDVLLESPVDGWQVVEAQGEDNMETEHGSKMRKSIEIIYAITSVILASVSVINESENYEALLECVIILNGILYALPESERKLQSSIQDLCVTWWEKGLPAKEDTGKTAFVMLLRRSLETKTGADVCRLWRIHQALYCFDYDLEESGEIKDMLLECFININYIKKEEGRRFLSCLFNWNINFIKMIHGTIKNQLQGLQKSLMVYIAEIYFRAWKKASGKILEAIENDCIQDFMFHGIHLPRRSPVHSKVREVLSYFHHQKKVRQGVEEMLYRLYKPILWRGLKARNSEVRSNAALLFVEAFPIRDPNLHAIEMDSEIQKQFEELYSLLEDPYPMVRSTGILGVCKITSKYWEMMPPTILIDLLKKVTGELAFDTSSADVRCSVFKCLPMILDNKLSHPLLEQLLPALRYSLHDNSEKVRVAFVDMLLKIKAVRAAKFWKICPMEHILVRLETDSRPVSRRLVSLIFNSFLPVNQPEEVWCERCVTLVQMNHAAARRFYQYAHEHTACTNIAKLIHVIRHCLNACIQRAVREPPEDEEEEDGREKENVTVLDKTLSVNDVACMAGLLEIIVILWKSIDRSMENNKEAKLYTINKFASVLPEYLKVFKDDRCKIPLFMLMSFMPASAVPPFSCGVISTLRSREEGAVDKSYCTLLDCLCSWGQVGHILELVDNWLPTEHAQAKSNTASKGRVQIHDTRPVKPELALVYIEYLLTHPKNRECLLSAPRKKLNHLLKALETSKADLESLLQTPGGKPRGFSEAAAPRAFGLHCRLSIHLQHKFCSEGKVYLSMLEDTGFWLESKILSFIQDQEEDYLKLHRVIYQQIIQTYLTVCKDVVMVGLGDHQFQMQLLQRSLGIMQTVKGFFYVSLLLDILKEITGSSLIQKTDSDEEVAMLLDTVQKVFQKMLECIARSFRKQPEEGLRLLYSVQRPLHEFITAVQSRHTDTPVHRGVLSTLIAGPVVEISHQLRKVSDVEELTPPEHLSDLPPFSRCLIGIIIKSSNVVRSFLDELKACVASNDIEGIVCLTAAVHIILVINAGKHKSSKVREVAATVHRKLKTFMEITLEEDSIERFLYESSSRTLGELLNS

SEQ ID NO: 12301 - protein, 1160 aa, Homo sapiens
VPSVMEKRETFVQAVSKELVGEFLQFVQLDKEASDPFSLNELLDELSRKQKEELWQRLKNLLTDVLLESPVDGWQVVEAQGEDNMETEHGSKMRKSIEIIYAITSVILASVSVINESENYEALLECVIILNGILYALPESERKLQSSIQDLCVTWWEKGLPAKEDTGKTAFVMLLRRSLETKTGADVCRLWRIHQALYCFDYDLEESGEIKDMLLECFININYIKKEEGRRFLSCLFNWNINFIKMIHGTIKNQLQGLQKSLMVYIAEIYFRAWKKASGKILEAIENDCIQDFMFHGIHLPRRSPVHSKVREVLSYFHHQKKVRQGVEEMLYRLYKPILWRGLKARNSEVRSNAALLFVEAFPIRDPNLHAIEMDSEIQKQFEELYSLLEDPYPMVRSTGILGVCKITSKYWEMMPPTILIDLLKKVTGELAFDTSSADVRCSVFKCLPMILDNKLSHPLLEQLLPALRYSLHDNSEKVRVAFVDMLLKIKAVRAAKFWKICPMEHILVRLETDSRPVSRRLVSLIFNSFLPVNQPEEVWCERCVTLVQMNHAAARRFYQYAHEHTACTNIAKLIHVIRHCLNACIQRAVREPPEDEEEEDGREKENVTVLDKTLSVNDVACMAGLLEIIVILWKSIDRSMENNKEAKLYTINKFASVLPEYLKVFKDDRCKIPLFMLMSFMPASAVPPFSCGVISTLRSREEGAVDKSYCTLLDCLCSWGQVGHILELVDNWLPTEHAQAKSNTASKGRVQIHDTRPVKPELALVYIEYLLTHPKNRECLLSAPRKKLNHLLKALETSKADLESLLQTPGGKPRGFSEAAAPRAFGLHCRLSIHLQHKFCSEGKVYLSMLEDTGFWLESKILSFIQDQEEDYLKLHRVIYQQIIQTYLTVCKDVVMVGLGDHQFQMQLLQRSLGIMQTVKGFFYVSLLLDILKEITGSSLIQKTDSDEEVAMLLDTVQKVFQKMLECIARSFRKQPEEGLRLLYSVQRPLHEFITAVQSRHTDTPVHRGVLSTLIAGPVVEISHQLRKVSDVEELTPPEHLSDLPPFSRCLIGIIIKSSNVVRSFLDELKACVASNDIEGIVCLTAAVHIILVINAGKHKSSKVREVAATVHRKLKTFMEITLEEDSIERYEDLLCCPGWALTPGLLDSIYPSASVPIG

SEQ ID NO: 12302 - protein, 393 aa, Homo sapiens
MEHILVRLETDSRPVSRRLVSLIFNSFLPVNQPEEVWCERCVTLVQMNHAAARRFYQYAHEHTACTNIAKLIHVIRHCLNACIQRAVREPPEDEEEEDGREKENVTVLDKTLSVNDVACMAGLLEIIVILWKSIDRSMENNKEAKLYTINKFASVLPEYLKVFKDDRCKIPLFMLMSFMPASAVPPFSCGVISTLRSREEGAVDKSYCTLLDCLCSWGQVGHILELVDNWLPTEHAQAKSNTASKGRVQIHDTRPVKPELALVYIEYLLTHPKNRECLLSAPRKKLNHLLKALETSKADLESLLQTPGGKPRGFSEAAAPRAFGLHCRLSIHLQHKFCSEGKVYLSMLEDTGFWLESKILSFIQDQEEDYLKLHRVIYQQIIQITSTWIGEAL

SEQ ID NO: 12303 - protein, 763 aa, Homo sapiens
METEHGSKMRKSIEIIYAITSVILASVSVINESENYEALLECVIILNGILYALPESERKLQSSIQDLCVTWWEKGLPAKEDTGKTAFVMLLRRSLETKTGADVCRLWRIHQALYCFDYDLEESGEIKDMLLECFININYIKKEEGRRFLSCLFNWNINFIKMIHGTIKNQLQGLQKSLMVYIAEIYFRAWKKASGKILEAIENDCIQDFMFHGIHLPRRSPVHSKVREVLSYFHHQKKVRQGVEEMLYRLYKPILWRGLKARNSEVRSNAALLFVEAFPIRDPNLHAIEMDSEIQKQFEELYSLLEDPYPMVRSTGILGVCKITSKYWEMMPPTILIDLLKKVTGELAFDTSSADVRCSVFKCLPMILDNKLSHPLLEQLLPALRYSLHDNSEKVRVAFVDMLLKIKAVRAAKFWKICPMEHILVRLETDSRPVSRRLVSLIFNSFLPVNQPEEVWCERCVTLVQMNHAAARRFYQYAHEHTACTNIAKLIHVIRHCLNACIQRAVREPPEDEEEEDGREKENVTVLDKTLSVNDVACMAGLLEIIVILWKSIDRSMENNKEAKLYTINKFASVLPEYLKVFKDDRCKIPLFMLMSFMPASAVPPFSCGVISTLRSREEGAVDKSYCTLLDCLCSWGQVGHILELVDNWLPTEHAQAKSNTASKGRVQIHDTRPVKPELALVYIEYLLTHPKNRECLLSAPRKKLNHLLKALETSKADLESLLQTPGGKPRGFSEAAAPRAFGLHCRLSIHLQHKVCLLLALY

SEQ ID NO: 12304 - protein, 104 aa, Homo sapiens
MMPPTILIDLLKKVTGELAFDTSSADVRCSVFKCLPMILDNKLSHPLLEQLLPALRYSLHDNSEKVRVAFVDMLLKIKAVRAAKNVSLKDKHLKPLYHYFIKKE

SEQ ID NO: 12305 - protein, 393 aa, Homo sapiens
VPSVMEKRETFVQAVSKELVGEFLQFVQLDKEASDPFSLNELLDELSRKQKEELWQRLKNLLTDVLLESPVDGWQVVEAQGEDNMETEHGSKMRKSIEIIYAITSVILASVSVINESENYEALLECVIILNGILYALPESERKLQSSIQDLCVTWWEKGLPAKEDTGKTAFVMLLRRSLETKTGADVCRLWRIHQALYCFDYDLEESGEIKDMLLECFININYIKKEEGRRFLSCLFNWNINFIKMIHGTIKNQLQGLQKSLMVYIAEIYFRAWKKASGKILEAIENDCIQDFMFHGIHLPRRSPVHSKVREVLSYFHHQKKVRQGVEEMLYRLYKPILWRGLKARNSEVRSNAALLFVEAFPIRDPNLHAIEMDSEIQKQFEELYGSLVFVK

SEQ ID NO: 12306 - protein, 8 aa, Homo sapiens
MGYKINAI

SEQ ID NO: 12307 - protein, 29 aa, Homo sapiens
LGRRRVRLNLVRARETAGPRAQGYKINAI

SEQ ID NO: 12308 - protein, 43 aa, Homo sapiens
LGRRRVRLNLVRARETAGPRAQYQTSCAKSNLLFGLITGWVTK

SEQ ID NO: 12309 - protein, 332 aa, Homo sapiens [sequence omitted]

SEQ ID NO: 12310 - protein, 1063 aa, Homo sapiens
LLSPERPRMSALRKVLPGILQKHCCILPDRNTESQCTLCGEPEEEEAGDLVQPGISFPGPAEEDLDPQYSWSPTQHFNEERYSPAPRSMKGLSGSRTQPPLCSGHTCGLAPPEDCEHLHHGPDARPPYLLSPADSCPGGRHRCSPRSSVHSECVMMPVVLGDHVSSSTFPRMHYSSHYDTRDDCAVAHAGAKINRIPANLLDQFEKQLPLHRDGFHTLQYQRTSAAAEQRSESPGRIRHLVHSVQKLFTKSHSLEGSSKSNANGTKADGRADDHHHAHHAKHSKRSKSKERKPEGKPRPGMSSWWSSDDNLDSDSTYRTPSVLNRHHLGPVAHCYPDALQSPFGDLSLKTSKSNNDVKCSACEGLALTPDAKYLKRSSWSTLTVSQAKEAYRKSSLNLDKPLLHQDAKPALRPCHYLQVPQDEWGGYPTGGKDEEIPCRRMRSGSYIKAMGDEESGESDSSPKTSPKSAILPEPLLKSIGQRPLGEHQTQTYLQAASDVPVGHSLDPAANYNSPKFRSRNQSYMRAVSTLSQASCVSQVSEAEINGQFESVCESVFSEVESQAMDALDLPGCFRTRSHSYLRAIQAGYSQDDECIPMMTPSDITSTIRSTAAVSYTNYKKTPPPVPPRTTSKPLISVTAQSSTESTQDAYQDSRAQRMSPWPQDSRGLYNSTDSLDSNKAMNLALETAAAQRHLPESQSSSVRTSDKAILVSKAEELLKSRCSSIGIQDSEFPEHQPYPRSDVETATDSDTESRGLREYHSVGVQVEDEKRHGRFKRSNSVTAAVQADLELEGFPGHITTEDKGLQFGSSFQRHSEPSTPTQYSAVRTVRTQGLFSYREDYRTQVDTSTLPPPDPWLEPAIDTVETGRMSPCRRDGSWFLKLLHAETKRMEGWCKEMEREAEENDLSEEILGKIRSAVGSAQLLMSQKFQQFYWLCQQNMDPSAMPRPTSQDLAGYWDMLQLSIEDVSMKFDELQRLRLNDWKMMESPERKEERKVPPPIPKKPPKGKFPITREKSLDLPDRQRQEARRRLMAAKRAASFRQNSASERADSIEIYIPEAQTRL

SEQ ID NO: 12311 - protein, 84 aa, Homo sapiens
MGTAQVLPGILQKHCCILPDRNTGRLQTIVLLDWCTKYGFGVCVIQSIAPTKPQKLPRADVPLSVRLQDTVPLLHGASRCLSLT

SEQ ID NO: 12312 - protein, 116 aa, Homo sapiens
LWPTRAPRSTASRPTCWTSSRSSCRCTGTASTRCSTRGRPRPPSSAARAPGGSATWYTPCRSSSPSRTRWRAPPKATPTAPRRTAGRTTTTTPTTPSTARGARARSASRRASPGPA

SEQ ID NO: 12313 - protein, 165 aa, Homo sapiens
VRTVRTQGLFSYREDYRTQVDTSTLPPPDPWLEPAIDTVETGRMSPCRRDGSWFLKLLHAETKRMEGWCKEMEREAEENDLSEEKLLPAHALQENALALCQREVDGGDDGRRMLGRCCLPRDPQSPQHGCMGLVQVSTAVFRSFTRRLHFSWLAGKSDPRKSSLS

SEQ ID NO: 12314 - protein, 12 aa, Homo sapiens
MRGHVLMPSGAQ

SEQ ID NO: 12315 - protein, 98 aa, Homo sapiens
LPATPGTTLLHTEMRLQDQQLARQLMRLRGDINKLKIEHTCRLHRRMLNDATYELEERDELADLFCDSPLASSFSLSTPLKLIGVTKMNINSRRFSLC

SEQ ID NO: 12316 - protein, 76 aa, Homo sapiens
VAGQGSGLMRFSSLPQGLQPPALPEKRELWAFFLPVWSSSAFRTDRPWHRLPRDSCDAVCSCLLWSMAPTGFQDGS

SEQ ID NO: 12317 - protein, 65 aa, Homo sapiens
LGSRKGLQPPALPEKRELWAFFLPVWSSSAFRTDRPWHRLPRDSCDAVCSCLLWSMAPTGFQDGS

SEQ ID NO: 12318 - protein, 34 aa, Homo sapiens
LLGDLGSPATCPSREERALGLLPASLVFECVQDR

SEQ ID NO: 12319 - protein, 508 aa, Homo sapiens
LPRMGLVSSKKPDKEKPIKEKDKGQWSPLKVSAQDKDAPPLPPLVVFNHLTPPPPDEHLDEDKHFVVALYDYTAMNDRDLQMLKGEKLQVLKGTGDWWLARSLVTGREGYVPSNFVARVESLEMERWFFRSQGRKEAERQLLAPINKAGSFLIRESETNKGAFSLSVKDVTTQGELIKHYKIRCLDEGGYYISPRITFPSLQALVQHYSKKGDGLCQRLTLPCVRPAPQNPWAQDEWEIPRQSLRLVRKLGSGQFGEVWMGYYKNNMKVAIKTLKEGTMSPEAFLGEANVMKALQHERLVRLYAVVTKEPIYIVTEYMARGCLLDFLKTDEGSRLSLPRLIDMSAQIAEGMAYIERMNSIHRDLRAANILVSEALCCKIADFGLARIIDSEYTAQEGAKFPIKWTAPEAIHFGVFTIKADVWSFGVLLMEVVTYGRVPYPGMSNPEVIRNLERGYRMPRPDTCPPELYRGVIAECWRSRPEERPTFEFLQSVLEDFYTATERQYELQP

SEQ ID NO: 12320 - protein, 200 aa, Homo sapiens
MAAAACGTKAMALFKRTLVLSPAAAPRGPGAGTAPRGCCLPPAAWPCKDWPRGEGGRLWSRLPQSHSHSHSHSHSHSCSSTSPTAVCVVCPQDSLSSSLKTCYKYLNQTSRSFAAVIQALDGEMRNAVCIFYLVLRALDTLEDDMTISVEKKVPLLHNFHSFLYQPDWRFMESKEKDRQVLEDFPTVSGVTHLVYGLLCS

SEQ ID NO: 12321 - protein, 138 aa, Homo sapiens
LKTCYKYLNQTSRSFAAVIQALDGEMRNAVCIFYLVLRALDTLEDDMTISVEKKVPLLHNFHSFLYQPDWRFMESKEKDRQVLEDFPTISLEFRNLAEKYQTVIADICRRMGIGMAEFLDKHVTSEQEWDKPQSLKTP

SEQ ID NO: 12322 - protein, 76 aa, Homo sapiens
MFSVSLSSLFGYHCWLVSKNKSTLEAFRSPVFRHGTDKNGFSLGFSKNMRQVFGDEKKYWLLPIFSRYFFVKIFRL

SEQ ID NO: 12323 - protein, 10 aa, Homo sapiens
MAVAAAVGAA

SEQ ID NO: 12324 - protein, 436 aa, Homo sapiens
LLSPPAPLGTPLPFPPSLPRRLLAAKWMWRVIEPPCPGAPSTENGKSVHWKLGADKEVWVWVMGEHHLDKPYDVLCNEIIAERARLKAEQEAEEPRKTHSEEFTNSLKTKSQYHDLQAPDNQQTKDIWKKVAEKEELEQGSRPAPTLEEEKIRSLSSSSRNIQQMLADSINRMKAYAFHQKKESMKKKQDEEINQIEEERTKQICKSWKEDSEWQASLRKSKAADEKRRSLAKQAREDYKRLSLGAQKGRGGERLQSPLRVPQKPERPPLPPKPQFLNSGAYPQKPLRNQGVVRTLSSSAQEDIIRWFKEEQLPLRAGYQKTSDTIAPWFHGILTLKKANELLLSTGMPGSFLIRVSERIKGYALSYLSEDGCKHFLIDASADAYSFLGVDQLQHATLADLVEYHKEEPITSLGKELLLYPCGQQDQLPDYLELFE

SEQ ID NO: 12325 - protein, 512 aa, Homo sapiens
LVPGLSSQFAELLSQSARIVSCLGSFVETPKCQHRWRDTWRPVSGTFATSIKDFRSAKMLKQILSEMYIDPDLLAELSEEQKQILFFKMREEQIRRWKEREAAMERKESLPVKPRPKKENGKSVHWKLGADKEVWVWVMGEHHLDKPYDVLCNEIIAERARLKAEQEAEEPRKTHSEEFTNSLKTKSQYHDLQAPDNQQTKDIWKKVAEKEELEQGSRPAPTLEEEKIRSLSSSSRNIQQMLADSINRMKAYAFHQKKESMKKKQDEEINQIEEERTKQICKSWKEDSEWQASLRKSKAADEKRRSLAKQAREDYKRLSLGAQKGRGGERLQSPLRVPQKPERPPLPPKPQFLNSGAYPQKPLRNQGVVRTLSSSAQEDIIRWFKEEQLPLRAGYQKTSDTIAPWFHGILTLKKANELLLSTGMPGSFLIRVSERIKGYALSYLSEDGCKHFLIDASADAYSFLGVDQLQHATLADLVEYHKEEPITSLGKELLLYPCGQQDQLPDYLELFE

SEQ ID NO: 12326 - protein, 284 aa, Homo sapiens
LIFYFFFFEMESYSVTQAGVQWHELCSLQPSPPRFREMCIEQDGRVHLTVVYFGKEEINEVKGILENTSKAANFRNFTFIQLNGEFSRGKGLDVGARFWKGSNVLLFFCDVDIYFTSEFLNTCRLNTQPGKKVFYPVLFSQYNPGIIYGHHDAVPPLEQQLVIKKETGFWRDFGFGMTCQYRSDFINIGGFDLDIKGWGGEDVHLYRKYLHSNLIVVRTPVRGLFHLWHEKRCMDELTPEQYKMCMQSKAMNEASHGQLGMLVFRHEIEAHLRKQKQKTSSKKT

SEQ ID NO: 12327 - protein, 81 aa, Homo sapiens [sequence omitted]

SEQ ID NO: 12328 - protein, 619 aa, Homo sapiens
LPLAATAFPRPCPALPHPQPRVTMGSVSSLISGHSFHSKHCRASQYKLRKSSHLKKLNRYSDGLLRFGFSQDSGHGKSSSKMGKSEDFFYIKVSQKARGSHHPDYTALSSGDLGGQAGVDFDPSTPPKLMPFSNQLEMGSEKGAVRPTAFKPVLPRSGAILHSSPESASHQLHPAPPDKPKEQELKPGLCSGALSDSGRNSMSSLPTHSTSSSYQLDPLVTPVGPTSRFGGSAHNITQGIVLQDSNMMSLKALSFSDGGSKLGHSNKADKGPSCVRSPISTDECSIQELEQKLLEREGALQKLQRSFEEKELASSLAYEERPRRCRDELEGPEPKGGNKLKQASQKSQRAQQVLHLQVLQLQQEKRQLRQELESLMKEQDLLETKLRSYEREKTSFGPALEETQWEVCQKSGEISLLKQQLKESQTEVNAKASEILGLKAQLKDTRGKLEGLELRTQDLEGALRTKGLELEVCENELQRKKNEAELLREKVNLLEQELQELRAQAALARDMGPPTFPEDVPALQRELERLRAELREERQGHDQMSSGFQHERLVWKEEKEKVIQYQKQLQQSYVAMYQRNQRLEKALQQLARGDSAGEPLEVDLEGADIPYEDIIATEI

SEQ ID NO: 12329 - protein, 420 aa, Homo sapiens
LGLRDGQRMGDGAVKQGFLYLQQQQTFGKKWRRFGASLYGGSDCALARLELQEGPEKPRRCEAARKVIRLSDCLRVAEAGGEASSPRDTSAFFLETKERLYLLAAPAAERGDWVQAICLLAFPGQRKELSGPEGKQSRPCMEENELYSSAVTVGPHKEFAVTMRPTEASERCHLRGSYTLRAGESALELWGGPEPGTQLYDWPYRFLRRFGRDKVTFSFEAGRRCVSGEGNFEFETRQGNEIFLALEEAISAQKNAAPATPQPQPATIPASLPRPDSPYSRPHDSLPPPSPTTPVPAPRPRGQEGEYAVPFDAVARSLGKNFRGILAVPPQLLADPLYDSIEETLPPRPDHIYDEPEGVAALSLYDSPQEPRGEAWRRQATADRDPAGLQHVQPAGQDFSASGWQPGTEYDNVVLKKGPK

SEQ ID NO: 12330 - protein, 285 aa, Homo sapiens
LVLSSSGMALTVDVAGPAPWGFRITGGRDFHTPIMVTKVAERGKAKDADLRPGDIIVAINGESAEGMLHAEAQSKIRQSPSPLRLQLDRSQATSPGQTNGDSSLEVLATRFQGSVRTYTESQSSLRSSYSSPTSLSPRAGSPFSPPPSSSSLTGEAAISRSFQSLACSPGLPAADRLSYSGRPGSRQAGLGRAGDSAVLVLPPSPGPRSSRPSMDSEGGSLLLDEDSEVFKMLQENREGRAAPRQSSSFRLLQEALEAEERGTRLCASRRAGTATPAATPVPTVG

SEQ ID NO: 12331 - protein, 132 aa, Homo sapiens
LEVLATRFQGSVRTYTESQSSLRSSYSSPTSLSPRAGSPFSPPPSSSSLTGEAAISRSFQSLACSPGLPAADRLSYSGRPGSRQVRLPGGGQAGGTEAPPVPVGCQCPGTAGGQAHLGSHGLLLLATGMLCS

SEQ ID NO: 12332 - protein, 33 aa, Homo sapiens
MIFFERLLYKVEYLEKRQTRCNIFCGCFYFLDL

SEQ ID NO: 12333 - protein, 467 aa, Homo sapiens
LRHPRGLPPGALSRPPKKRRSPLLAHPFPSSLPPPPELSLSHAFPLHHGSPLGCRLPGSCVRSERRRWRRWRRRRQLGSAMTGKLAEKLPVTMSSLLNQLPDNLYPEEIPSALNLFSGSSDSVVHYNQMATENVMDIGLTNEKPNPELSYSGSFQPAPGNKTVTYLGKFAFDSPSNWCQDNIISLMSAGILGVPPASGALSTQTSTASMVQPPQGDVEAMYPALPPYSNCGDLYSEPVSFHDPQGNPGLAYSPQDYQSAKPALDSNLFPMIPDYNLYHHPNDMGSIPEHKPFQGMDPIRVNPPPITPLETIKAFKDKQIHPGFGSLPQPPLTLKPIRPRKYPNRPSKTPLHERPHACPAEGCDRRFSRSDELTRHLRIHTGHKPFQCRICMRSFSRSDHLTTHIRTHTGEKPFACEFCGRKFARSDERKRHAKIHLKQKEKKAEKGGAPSASSAPPVSLAPVVTTCA

SEQ ID NO: 12334 - protein, 60 aa, Homo sapiens
LYQFAFPPAMNESSCCSASSPAFGVVSILDFHHSNRDSRIHPGGPGTTGAPLRLFPSSIF

SEQ ID NO: 12335 - protein, 1014 aa, Homo sapiens
LLPERMSGVSEPLSRVKLGTLRRPEGPAEPMVVVPVDVEKEDVRILKVCFYSNSFNPGKNFKLVKCTVQTEIREIITSILLSGRIGPNIRLAECYGLRLKHMKSDEIHWLHPQMTVGEVQDKYECLHVEAEWRYDLQIRYLPEDFMESLKEDRTTLLYFYQQLRNDYMQRYASKVSEGMALQLGCLELRRFFKDMPHNALDKKSNFELLEKEVGLDLFFPKQMQENLKPKQFRKMIQQTFQQYASLREEECVMKFFNTLAGFANIDQETYRCELIQGWNITVDLVIGPKGIRQLTSQDAKPTCLAEFKQIRSIRCLPLEEGQAVLQLGIEGAPQALSIKTSSLAEAENMADLIDGYCRLQGEHQGSLIIHPRKDGEKRNSLPQIPMLNLEARRSHLSESCSIESDIYAEIPDETLRRPGGPQYGIAREDVVLNRILGEGFFGEVYEGVYTNHKGEKINVAVKTCKKDCTLDNKEKFMSEAVIMKNLDHPHIVKLIGIIEEEPTWIIMELYPYGELGHYLERNKNSLKVLTLVLYSLQICKAMAYLESINCVHRDIAVRNILVASPECVKLGDFGLSRYIEDEDYYKASVTRLPIKWMSPESINFRRFTTASDVWMFAVCMWEILSFGKQPFFWLENKDVIGVLEKGDRLPKPDLCPPVLYTLMTRCWDYDPSDRPRFTELVCSLSDVYQMEKDIAMEQERNARYRTPKILEPTAFQEPPPKPSRPKYRPPPQTNLLAPKLQFQVPEGLCASSPTLTSPMEYPSPVNSLHTPPLHRHNVFKRHSMREEDFIQPSSREEAQQLWEAEKVKMRQILDKQQKQMVEDYQWLRQEEKSLDPMVYMNDKSPLTPEKEVGYLEFTGPPQKPPRLGAQSIQPTANLDRTDDLVYLNVMELVRAVLELKNELCQLPPEGYVVVVKNVGLTLRKLIGSVDDLLPSLPSSSRTEIEGTQKLLNKDLAELINKMRLAQQNAVTSLSEECKRQMLTASHTLAVDAKNLLDAVDQAKVLANLAHPPAE

SEQ ID NO: 12336 - protein, 972 aa, Homo sapiens
LLPERMSGVSEPLSRVKLGTLRRPEGPAEPMVVVPVDVEKEDVRILKVCFYSNSFNPGKNFKLVKCTVQTEIREIITSILLSGRIGPNIRLAECYGLRLKHMKSDEIHWLHPQMTVGEVQDKYECLHVEAEWRYDLQIRYLPEDFMESLKEDRTTLLYFYQQLRNDYMQRYASKVSEGMALQLGCLELRRFFKDMPHNALDKKSNFELLEKEVGLDLFFPKQMQENLKPKQFRKMIQQTFQQYASLREEECVMKFFNTLAGFANIDQETYRCELIQGWNITVDLVIGPKGIRQLTSQDAKPTCLAEFKQIRSIRCLPLEEGQAVLQLGIEGAPQALSIKTSSLAEAENMADLIDGYCRLQGEHQGSLIIHPRKDGEKRNSLPQIPMLNLEARRSHLSESCSIESDIYAEIPDETLRRPGGPQYGIAREDVVLNRILGEGFFGEVYEGVYTNHKGEKINVAVKTCKKDCTLDNKEKFMSEAVIMKNLDHPHIVKLIGIIEEEPTWIIMELYPYGELGHYLERNKNSLKVLTLVLYSLQICKAMAYLESINCVHRDIAVRNILVASPECVKLGDFGLSRYIEDEDYYKASVTRLPIKWMSPESINFRRFTTASDVWMFAVCMWEILSFGKQPFFWLENKDVIGVLEKGDRLPKPDLCPPVLYTLMTRCWDYDPSDRPRFTELVCSLSDVYQMEKDIAMEQERNARYRTPKILEPTAFQEPPPKPSRPKYRPPPQTNLLAPKLQFQEEDFIQPSSREEAQQLWEAEKVKMRQILDKQQKQMVEDYQWLRQEEKSLDPMVYMNDKSPLTPEKEVGYLEFTGPPQKPPRLGAQSIQPTANLDRTDDLVYLNVMELVRAVLELKNELCQLPPEGYVVVVKNVGLTLRKLIGSVDDLLPSLPSSSRTEIEGTQKLLNKDLAELINKMRLAQQNAVTSLSEECKRQMLTASHTLAVDAKNLLDAVDQAKVLANLAHPPAE

SEQ ID NO: 12337 - protein, 384 aa, Homo sapiens
LRVRVLGCRPAAMTLRAAVFDLDGVLALPAVFGVLGRTEEALALPRGLLNDAFQKGGPEGATTRLMKGEITLSQPRVRLHFVELGSGPAVCLCHGFPESWYSWRYQIPALAQAGYRVLAMDMKGYGESSAPPEIEEYCMEVLCKEMVTFLDKLGLSQAVFIGHDWGGMLVWYMALFYPERVRAVASLNTPFIPANPNMSPLESIKANPVFDYQLYFQEPGVAEAELEQNLSRTFKSLFRASDESVLSMHKVCEAGGLFVNSPEEPSLSRMVTEEEIQFYVQQFKKSGFRGPLNWYRNMERNWKWACKSLGRKILIPALMVTAEKDFVLVPQMSQHMEDWIPHLKRGHIEDCGHWTQMDKPTEVNQILIKWLDSDARNPPVVSKM

SEQ ID NO: 12338 - protein, 670 aa, Homo sapiens
LETATRVGGARAGAPPITEPAPGSAEPWPIGTQRLPPSLARDYLKTLTERLARLRRARRALRRRNSIKKMAALTPRKRKQDSLKCDSLLHFTENLFPSPNKKHCFYQNSDKNEENLHCSQQEHFVLSALKTTEINRLPSANQGSPFKSALSTVSFYNQNKWYLNPLERKLIKESRSTCLKTNDEDKSFPIVTEKMQGKPVCSKKNNKKPQKSLTAKYQPKYRHIKPVSRNSRNSKQNRVIYKPIVEKENNCHSAENNSNAPRVLSQKIKPQVTLQGGAAFFVRKKSSLRKSSLENEPSLGRTQKSKSEVIEDSDVETVSEKKTFATRQVPKCLVLEEKLKIGLLSASSKNKEKLIKDSSDDRVSSKEHKVDKNEAFSSEDSLGENKTISPKSTVYPIFSASSVNSKRSLGEEQFSVGSVNFMKQTNIQKNTNTRDTSKKTKDQLIIDAGQKHFGATVCKSCGMIYTASNPEDEMQHVQHHHRFLEGIKYVGWKKERVVAEFWDGKIVLVLPHDPSFAIKKVEDVQELVDNELGFQQVVPKCPNKIKTFLFISDEKRVVGCLIAEPIKQAFRVLSEPIGPESPSSTECPRAWQCSDVPEPAVCGISRIWVFRLKRRKRIARRLVDTLRNCFMFGCFLSTDEIAFSDPTPDGKLFATKYCNTPNFLVYNFNS

SEQ ID NO: 12339 - protein, 309 aa, Homo sapiens
LARLRRARRALRRRNSIKKMAALTPRKRKQDSLKCDSLLHFTENLFPSPNKKHCFYQNSDKNEENLHCSQQEHFVLSALKTTEINRLPSANQGSPFKSALSTVSFYNQNKWYLNPLERKLIKESRSTCLKTNDEDKSFPIVTEKMQGKPVCSKKNNKKPQKSLTAKYQPKYRHIKPVSRNSRNSKQNRVIYKPIVEKENNCHSAENNSNAPRVLSQKIKPQVTLQGGAAFFVRKKSSLRKSSLENEPSLGRTQKSKSEVIEDSDVETVSEKKTFATRQVPKCLVLEEKLKIGLLSASSKNKEKLIKIFR

SEQ ID NO: 12340 - protein, 294 aa, Homo sapiens
MAALTPRKRKQDSLKCDSLLHFTENLFPSPNKKHCFYQNSDKNEENLHCSQQEHFVLSALKTTEINRLPSANQGSPFKSALSTVSFYNQNKWYLNPLERKLIKESRSTCLKTNDEDKSFPIVTEKMQGKPVCSKKNNKKPQKSLTAKYQPKYRHIKPVSRNSRNSKQNRVIYKPIVEKENNCHSAENNSNAPRVLSQKIKPQVTLQGGAAFFVRKKSSLRKSSLENEPSLGRTQKSKSEVIEDSDVETVSEKKTFATRQVPKCLVLEEKLKIGLLSASSKNKEKLIKVKLNISL

SEQ ID NO: 12341 - protein, 197 aa, Homo sapiens
MFNSNYKYPGLSVYAEAWLWYWGKCVPNEKYLHQEKKLLHGDIKSSNVVIKGDFETIKICDVGVSLPLDENMTVTDPEACYIGTEPWKPKEAVEENGVITDKADIFAFGLTLWEMMTLSIPHINLSNDDDDEDKTFDESDFDDEAYYAALGTRPPINMEELDESYQKVIELFSVCTNEDPKDRPSAAHIVEALETDV

SEQ ID NO: 12342 - protein, 328 aa, Homo sapiens
LRVAFTMEGISNFKTPSKLSEKKKSVLCSTPTINIPASPFMQKLGFGTGVNVYLMKRSPRGLSHSPWAVKKINPICNDHYRSVYQKRLMDEAKILKSLHHPNIVGYRAFTEANDGSLCLAMEYGGEKSLNDLIEERYKASQDPFPAAIILKVALNMARGLKYLHQEKKLLHGDIKSSNVVIKGDFETIKICDVGVSLPLDENMTVTDPEACYIGTEPWKPKEAVEENGVITDKADIFAFGLTLWEMMTLSIPHINLSNDDDDEDKTFDESDFDDEAYYAALGTRPPINMEELDESYQKVIELFSVCTNEDPKDRPSAAHIVEALETDV

SEQ ID NO: 12343 - protein, 339 aa, Homo sapiens
LRVAFTMEGISNFKTPSKLSEKKKSVLCSTPTINIPASPFMQKLGFGTGVNVYLMKRSPRGLSHSPWAVKKINPICNDHYRSVYQKRLMDEAKILKSLHHPNIVGYRAFTEANDGSLCLAMEYGGEKSLNDLIEERYKASQDPFPAAIILKVALNMARGLKYLHQEKKLLHGDIKSSNVVIKGDFETIKICDVGVSLPLDENMTAPAFITILLVSVTDPEACYIGTEPWKPKEAVEENGVITDKADIFAFGLTLWEMMTLSIPHINLSNDDDDEDKTFDESDFDDEAYYAALGTRPPINMEELDESYQKVIELFSVCTNEDPKDRPSAAHIVEALETDV

SEQ ID NO: 12344 - protein, 37 aa, Homo sapiens
LRVAFTMEGISNFKTPSKLSEKKKSGKIADYYVQLQL

SEQ ID NO: 12345 - protein, 19 aa, Homo sapiens
LSTLVLAMKDRMLIGCSVE

SEQ ID NO: 12346 - protein, 33 aa, Homo sapiens
LIPGSPVGSAAEKALGPSSRETGQRGCLGGEGR

SEQ ID NO: 12347 - protein, 39 aa, Homo sapiens
VLLENWVQFKFSYSKSFGKASHWGNQTTRDNPEMNPFVN

SEQ ID NO: 12348 - protein, 24 aa, Homo sapiens
LGAPEPELAPSKGRTGRMRAESWD

SEQ ID NO: 12349 - protein, 49 aa, Homo sapiens
LLSLSSVPQEGNGIKQHSSGGCQYCIPFLPKGKMTRFSACKYGSFCLQM

SEQ ID NO: 12350 - protein, 146 aa, Homo sapiens
LSRKAWRLSGARSWLGHQGGRPRHCLSLSALVGEMRAIPLGRKSPRMAGAGRDVPRTALPSSPPDGERGRAFLRWRPNPGPARTQQGWDWVPAPRGVWICFVVFCFPSWKKSRGDRPRAAAPGPRPLGFRGCSHLGPAPGERGIIF

SEQ ID NO: 12351 - protein, 7 aa, Homo sapiens
VGVRAIV

SEQ ID NO: 12352 - protein, 60 aa, Homo sapiens
LSTREEGSWKGGGNLSPPKSTTKLFSAEEPGSPLPDSGGLCSPQLFPAHLTCQLLGKRCC

SEQ ID NO: 12353 - protein, 24 aa, Homo sapiens
VRRSRVRPCRTAGGFVPRSCFLPI

SEQ ID NO: 12354 - protein, 28 aa, Homo sapiens
LAPVATGAARPAKIHGRPSPKRVRGPLS

SEQ ID NO: 12355 - protein, 32 aa, Homo sapiens
VACACTPATREDRLSPVKLQRAVRMPPHSGLG

SEQ ID NO: 12356 - protein, 99 aa, Homo sapiens
MQSDDVIWDTLGNKQFCSFKIRTKTQSFCRNEYSLTGLCNRSSCPLANSQYATIKEEKGNSPVLTSRRTAPQLLQGCSLVSVNNTKAILLYLQDSATCI

SEQ ID NO: 12357 - protein, 142 aa, Homo sapiens
LPLVWLTGCRLCSGQLLSFAMTGGSKDPFPLLFRLHPVKPMNAMATKVANCSLGTATIISENLNNEVMMKKYSPSDPAFAYAQLTHDELIQLVLKQKETISKKEFQVRELEDYIDNLLVRVMEETPNILRIPTQVGKKAGKM

SEQ ID NO: 12358 - protein, 752 aa, Homo sapiens
LQILFCPFCRLEVSPEAQPTARLPSPTDSPSSLPPLPSSSGQASVPSELGHGADTQSSESPSVFSSLSSPIAAPISTSTPIESWPLVDRGQAKSEGPPLLPKAELQTESLTPVPNSGSSALGSLFKQPSFPANKGTEDSLMGRTRETGTEKNTSSLELEESLPEQPETGRQEEELPRFPCKKQDYSPSSGEAQEVPFALSLSSDGAVSPVGELAAGGDRDLESQAGSLVESKARDAAEEVAPPLPMGASVPSIDSMMRKLEEMGLNLRKDQKKTKKRVSFSEQLFTEEAVAGAALLVEGHSSCPQELNPAWSVAGNASDGEPPESPHAEDSERESVTTPGPATCGAPASPADHLLLPSQEESFSEVPMSEASSAKDTPLFRMEGEDALVTQYQSKASDHEGLLSDPLSDLQLVSDFKSPIMADLNLSLPSIPEVASDDERIDQVEDDGDQVEDDGETAKSSTLDIGALSLGLVVPCPERGKGPSGEADRLVLGEGLCDFRLQAPQASVTAPSEQTTEFGIHKPHLGKSSSLDKQLPGPSGGEEEKPMGNGSPSPPPGTSLDNPVPSPSPSEIFPVTHSFPSSAHSDTHHTSTAESQKKATAEGSAGRVENFGKRKPLLQAWVSPSETHPVSAQPGAGTGSAKHRLHPVKPMNAMATKVANCSLGTATIISENLNNEVMMKKYSPSDPAFAYAQLTHDELIQLVLKQKETISKKEFQVRELEDYIDNLLVRVMEETPNILRIPTQVGKKAGKM

SEQ ID NO: 12359 - protein, 644 aa, Homo sapiens
LQILFCPFCRLEVSPEAQPTARLPSPTDSPSSLPPLPSSSGQASVPSELGHGADTQSSESPSVFSSLSSPIAAPISTSTPIESWPLVDRGQAKSEGPPLLPKAELQTESLTPVPNSGSSALGSLFKQPSFPANKGTEDSLMGRTRETGTEKNTSSLELEESLPEQPETGRQEEELPRFPCKKQDYSPSSGEAQEVPFALSLSSDGAVSPVGELAAGGDRDLESQAGSLVESKARDAAEEVAPPLPMGASVPSIDSMMRKLEEMGLNLRKDQKKTKKRVSFSEQLFTEEAVAGAALLVEGHSSCPQELNPAWSVAGNASDGEPPESPHAEDSERESVTTPGPATCGAPASPADHLLLPSQEESFSEVPMSEASSAKDTPLFRMEGEDALVTQYQSKASDHEGLLSDPLSDLQLVSDFKSPIMADLNLSLPSIPEVASDDERIDQVEDDGDQVEDDGETAKSSTLDIGALSLGLVVPCPERGKGPSGEADRLVLGEGLCDFRLQAPQASVTAPSEQTTEFGIHKPHLGKSSSLDKQLPGPSGGEEEKPMGNGSPSPPPGTSLDNPVPSPSPSEIFPVTHSFPSSAHSDTHHTSTAESQKKATAEGSAGRVENFGKRKPLLQAWVSPSETHPVSAQPGAGTGSAKHR

SEQ ID NO: 12360 - protein, 206 aa, Homo sapiens
VGRPSPQAATWWAALPFFPPDPARSASCSSHQSMIQASDSFQFPPRSPPPTTSSPPVPQHSANSEARPLLPLPRTARSVLFSVPGPASFSSASFPTTPIIHEGRRSRACPTSAPENQSISPRPRRMQAAHTSGAPKPPGEEAEGAFCSRVVMGKAEGAREQRAWGGANASASGVRRPGAPGPERINRRLRCRLLPAKHHPPLVSLC

SEQ ID NO: 12361 - protein, 83 aa, Homo sapiens
LVEDLDRIVALTSNQVLHPDLTTHLLPLRCFWKVRKRRCLLRGQEPHPCSRGAGQRVKAQQPSTMDGFLQGNRWGWAGEGAPT

SEQ ID NO: 12362 - protein, 23 aa, Homo sapiens
VYKSEYIFTCLFKRVVTRDLPIG

SEQ ID NO: 12363 - protein, 104 aa, Homo sapiens
LPPTRPPQTPPSAVTLTHSPCWAHHLSVPVPFPAGRSRLPTRGLPVWPAFTPLSSPLPPPPLHLLVRGAKRQIFAASHFIPSQMLDQHPSLPPGTAWRAGSGSQ

SEQ ID NO: 12364 - protein, 102 aa, Homo sapiens
LHQRASCRRYMMMRDCWHAVPSQRPTFKQLVEDLDRIVALTSNQEYLDLSMPLDQYSPSFPDTRSSTCSSGEDSVFSHEPLPEEPCLPRHPAQLANGGLKRR

SEQ ID NO: 12365 - protein, 32 aa, Homo sapiens
MVLLPKSSQGTGDRCCFSNGAGPRMDGALQAC

SEQ ID NO: 12366 - protein, 54 aa, Homo sapiens [sequence omitted]

SEQ ID NO: 12367 - protein, 81 aa, Homo sapiens
VEVQDSVPADSGLYACVTSSPSGSDTTYFSVNVSDALPSSEDDDDDDDSSSEEKETDNTKPNRMRETLFPILLPFGSGHWV

SEQ ID NO: 12368 - protein, 131 aa, Homo sapiens
LSPTSNCRTGMWSWKCLLFWAVLVTATLCTARPSPTLPEQAQPWGAPVEVESFLVHPGDLLQLRCRLRDDVQSINWLRDGVQLAESNRTRITGEEVEVQDSVPADSGLYACVTSSPSGSDTTYFSVNVSGW

SEQ ID NO: 12369 - protein, 32 aa, Homo sapiens
MEMSLDNMGQFEKEDRAHCGVSMEMWSLVTNL

SEQ ID NO: 12370 - protein, 11 aa, Homo sapiens
LSTLYVGSVLQ

SEQ ID NO: 12371 - protein, 40 aa, Homo sapiens
VGRALVWVITPTPGSSTFLSVTEVQQPLLLPAVFADGLPP

SEQ ID NO: 12372 - protein, 61 aa, Homo sapiens
LRRPRLPRPRARRCLKSRGTQGLFSGPSSGRPAGRTVPVLQSGTPRRRGLRRAMEPGLQGK

SEQ ID NO: 12373 - protein, 26 aa, Homo sapiens
VQPQRAEEPGCAGSWAATSGRDRDPS

SEQ ID NO: 12374 - protein, 162 aa, Homo sapiens
MFIAKHLPDLIESGQLRERVEKLNMLSIDHLTDHKSQRLARLVLGCITMAYVWGKGHGDVRKVLPRNIAVPYCQLSKKLELPPILVYADCVLANWKKKDPNKPLTYENMDVLFSFRDGDCSKGFFLVSLLVEIAAASAIKVRLSSLQNLYVNLRKQSNHFGA

SEQ ID NO: 12375 - protein, 55 aa, Homo sapiens
LSWSRQVLEQFVPLSSRFLVPRLRPHERPVLTAGCCGVPRCLPGPRVSVEWDLCG

SEQ ID NO: 12376 - protein, 50 aa, Homo sapiens
LSWSRQVLEQFVPLSSRFLVPRLRPHERPVLTAGCCGVPRCLPGSWFQRR

SEQ ID NO: 12377 - protein, 145 aa, Homo sapiens
LSSLFLCLPASWCPDCVPTNAPSLPPAAVECLAVSQVPEFLVSEKMTEEVDFLGQDSDGGSEEVVLTPAELIERLEQAWMNEKFAPELLESKPEIVECVMEQLEHMEENLRRAKREDLKVSIHQMEMERIRYVLSSYLRCRLMKV

SEQ ID NO: 12378 - protein, 149 aa, Homo sapiens
LSSLFLCLPASWCPDCVPTNAPSLPPAAVECLAVSQVPEFLVSEKMTEEVDFLGQDSDGGSEEVVLTPAELIERLEQAWMNEKFAPELLESKPEIVECVMEQLEHMEENLRRAKREDLKVSIHQMEMERIRYVLSSYLRCRLMKFPNQI

SEQ ID NO: 12379 - protein, 117 aa, Homo sapiens
LQSIGSFPLIRFLVSEKMTEEVDFLGQDSDGGSEEVVLTPAELIERLEQAWMNEKFAPELLESKPEIVECVMEQLEHMEENLRRAKREDLKVSIHQMEMERIRYVLSSYLRCRLMKV

SEQ ID NO: 12380 - protein, 116 aa, Homo sapiens
LSLTIATMIHSLFLINSSGDIFLEKHWKSVVSRSVCDYFFEAQERATEAENVPPVIPTPHHYLLSVYRHKIFFVAVIQTEVPPLFVIEFLHRVVDTFQYYCSGISVLMQHTGPFAQ

SEQ ID NO: 12381 - protein, 30 aa, Homo sapiens
VQAAMSKRKAPQETLNGGITDMLTEKQHLL

SEQ ID NO: 12382 - protein, 20 aa, Homo sapiens
LKTFSVALAEQRQALGVEFL

SEQ ID NO: 12383 - protein, 28 aa, Homo sapiens
LKTFSVALAEQRQALGVEICVTHQRTVT

SEQ ID NO: 12384 - protein, 283 aa, Homo sapiens
VTASLGRRARPDAAMSAALFSLDGPARGAPWPAEPAPFYEPGRAGKPGRGAEPGALGEPGAAAPAMYDDESAIDFSAYIDSMAAVPTLELCHDELFADLFNSNHKAGGAGPLELLPGGPARPLGPGPAAPRLLKREPDWGDGDAPGSLLPAQVAACAQTVVSLAAAGQPTPPTSPEPPRSSPRQTPAPGPAREKSAGKRGPDRGSPEYRQRRERNNIAVRKSRDKAKRRNQEMQQKLVELSAENEKLHQRVEQLTRDLAGLRQFFKQLPSPPFLPAAGTADCR

SEQ ID NO: 12385 - protein, 898 aa, Homo sapiens
VARSRRERPRCGAGQGSREAGPARACPCRAGTPSTMSSPASTPSRRGSRRGRATPAQTPRSEDARSSPSQRRRGEDSTSTGELQPMPTSPGVDLQSPAAQDVLFSSPPQMHSSAIPLDFDVSSPLTYGTPSSRVEGTPRSGVRGTPVRQRPDLGSAQKGLQVDLQSDGAAAEDIVASEQSLGQKLVIWGTDVNVAACKENFQRFLQRFIDPLAKEEENVGIDITEPLYMQRLGEINVIGEPFLNVNCEHIKSFDKNLYRQLISYPQEVIPTFDMAVNEIFFDRYPDSILEHQIQVRPFNALKTKNMRNLNPEDIDQLITISGMVIRTSQLIPEMQEAFFQCQVCAHTTRVEMDRGRIAEPSVCGRCHTTHSMALIHNRSLFSDKQMIKLQESPEDMPAGQTPHTVILFAHNDLVDKVQPGDRVNVTGIYRAVPIRVNPRVSNVKSVYKTHIDVIHYRKTDAKRLHGLDEEAEQKLFSEKRVELLKELSRKPDIYERLASALAPSIYEHEDIKKGILLQLFGGTRKDFSHTGRGKFRAEINILLCGDPGTSKSQLLQYVYNLVPRGQYTSGKGSSAVGLTAYVMKDPETRQLVLQTGALVLSDNGICCIDEFDKMNESTRSVLHEVMEQQTLSIAKAGIICQLNARTSVLAAANPIESQWNPKKTTIENIQLPHTLLSRFDLIFLLLDPQDEAYDRRLAHHLVALYYQSEEQAEEELLDMAVLKDYIAYAHSTIMPRLSEEASQALIEAYVDMRKIGSSRGMVSAYPRQLESLIRLAEAHAKVRLSNKVEAIDVEEAKRLHREALKQSATDPRTGIVDISILTTGMSATSRKRKEELAEALKKLILSKGKTPALKYQQLFEDIRGQSDIAITKDMFEEALRALADDDFLTVTGKTVRLL

SEQ ID NO: 12386 - protein, 35 aa, Homo sapiens
LRGLLFPVVCADLIRGAKEKNLKVKGPVRMPTKVK

SEQ ID NO: 12387 - protein, 59 aa, Homo sapiens
MAFKDTGKTPVEPEVAIHRIRITLTSRNVKSLEKGQCIRYAGGRGNWAKSDELYSLMLV

SEQ ID NO: 12388 - protein, 149 aa, Homo sapiens
MAFIRKKQQEQQLQLYSKERFSLLLLNLEEYYFEQHRANHILHKGSHHERKIRGSLKICSKSVIFEPDSISQPIIKIPLRDCIKIGKHGENGANRHFTKAKSGGISLIFSQVYFIKEHNVVAPYKIERVSKAFHVFPAIYIVILNNKIL

SEQ ID NO: 12389 - protein, 85 aa, Homo sapiens
MNEKLKKFFNVLTTNTDGKIEFISTMEGYKYPVYGVQWHPEKAPYEWKNLDGISHAPNAVKTAFYLAEFFVNEGNMRVHNFVILG

SEQ ID NO: 12390 - protein, 196 aa, Homo sapiens
LDLTEKDYEILFKSINGILFPGGSVDLRRSDYAKVAKIFYNLSIQSFDDGDYFPVWGTCLGFEELSLLISGECLLTATDTVDVAMPLNFTGGQLHSRMFQNFPTELLLSLAVEPLTANFHKWSLSVKNFTMNEKLKKFFNVLTTNTDGKIEFISTMEVFLGIFLNGVVKKKSKRIKGARMKKEMKKMTSVSSNIAD

SEQ ID NO: 12391 - protein, 493 aa, Homo sapiens
VSPLFCLGTAGIYQTPKKFSLLPSRRERLCSGLLIDPMGITLIWCLALVLIKWITSKRRGAISYDSSDQTALYIRMLGDVRVRSRAGFESERRGSHPYIDFRIFHSQSEIEVSVSARNIRRLLSFQRYLRSSRFFRGTAVSNSLNILDDDYNGQAKCMLEKVGNWNFDIFLFDRLTNGNSLVSLTFHLFSLHGLIEYFHLDMMKLRRFLVMIQEDYHSQNPYHNAVHAADVTQAMHCYLKEPKLANSVTPWDILLSLIAAATHDLDHPGVNQPFLIKTNHYLATLYKNTSVLENHHWRSAVGLLRESGLFSHLPLESRQQMETQIGALILATDISRQNEYLSLFRSHLDRGDLCLEDTRHRHLVLQMALKCADICNPCRTWELSKQWSEKVTEEFFHQGDIEKKYHLGVSPLCDRHTESIANIQIGFMTYLVEPLFTEWARFSNTRLSQTMLGHVGLNKASWKGLQREQSSSEDTDAAFELNSQLLPQENRLS

SEQ ID NO: 12392 - protein, 153 aa, Homo sapiens
VSVSARNIRRLLSFQRYLRSSRFFRGTAVSNSLNILDDDYNGQAKCMLEKVGNWNFDIFLFDRLTNGNSLVSLTFHLFSLHGLIEYFHLDMMKLRRFLVMIQEDYHSQNPYHNAVHAADVTQAMHCYLKEPKAELMWIIKHFVQVEPKVSLID

SEQ ID NO: 12393 - protein, 66 aa, Homo sapiens
LGLAAGSSCLFLHCFAPFVLRSNSAVRAGPPARPQPPRSHQLQLQLRSLRLPQSPAALSEAWSYFL

SEQ ID NO: 12394 - protein, 13 aa, Homo sapiens
LHVVMLPEFGPPL

SEQ ID NO: 12395 - protein, 26 aa, Homo sapiens
MFLAVMFKNTSASLPQVWHAAFWKEN

SEQ ID NO: 12396 - protein, 23 aa, Homo sapiens
MPVWWRRRRLRARSWALRAYRLL

SEQ ID NO: 12397 - protein, 49 aa, Homo sapiens
LSSDVALPFPRDRRGRKKREEPLVMPVWWRRRRLRARSWALRGARKPLR

SEQ ID NO: 12398 - protein, 1643 aa, Homo sapiens
LAEAATFHSRRRGPGSSGRAGQRSARRAAPRCAPPPTMSEDSRGDSRAESAKDLEKQLRLRVCVLSELQKTERDYVGTLEFLVSAFLHRMNQCAASKVDKNVTEETVKMLFSNIEDILAVHKEFLKVVEECLHPEPNAQQEVGTCFLHFKDKFRIYDEYCSNHEKAQKLLLELNKIRTIRTFLLNCMLLGGRKNTDVPLEGYLVTPIQRICKYPLILKELLKRTPRKHSDYAAVMEALQAMKAVCSNINEAKRQMEKLEVLEEWQSHIEGWEGSNITDTCTEMLMCGVLLKISSGNIQERVFFLFDNLLVYCKRKHRRLKNSKASTDGHRYLFRGRINTEVMEVENVDDGTADFHSSGHIVVNGWKIHNTAKNKWFVCMAKTPEEKHEWFEAILKERERRKGLKLGMEQDTWVMISEQGEKLYKMMCRQGNLIKDRKRKLTTFPKCFLGSEFVSWLLEIGEIHRPEEGVHLGQALLENGIIHHVTDKHQFKPEQMLYRFRYDDGTFYPRNEMQDVISKGVRLYCRLHSLFTPVIRDKDYHLRTYKSVVMANKLIDWLIAQGDCRTREEAMIFGVGLCDNGFMHHVLEKSEFKDEPLLFRFFSDEEMEGSNMKHRLMKHDLKVVENVIAKSLLIKSNEGSYGFGLEDKNKVPIIKLVEKGSNAEMAGMEVGKKIFAINGDLVFMRPFNEVDCFLKSCLNSRKPLRVLVSTKPRETVKIPDSADGLGFQIRGFGPSVVHAVGRGTVAAAAGLHPGQCIIKVNGINVSKETHASVIAHVTACRKYRRPTKQDSIQWVYNSIESAQEDLQKSHSKPPGDEAGDAFDCKVEEVIDKFNTMAIIDGKKEHVSLTVDNVHLEYGVVYEYDSTAGIKCNVVEKMIEPKGFFSLTAKILEALAKSDEHFVQNCTSLNSLNEVIPTDLQSKFSALCSERIEHLCQRISSYKKFSRVLKNRAWPTFKQAKSKISPLHSSDFCPTNCHVNVMEVSYPKTSTSLGSAFGVQLDSRKHNSHDKENKSSEQGKLSPMVYIQHTITTMAAPSGLSLGQQDGHGLRYLLKEEDLETQDIYQKLLGKLQTALKEVEMCVCQIDDLLSSITYSPKLERKTSEGIIPTDSDNEKGERNSKRVCFNVAGDEQEDSGHDTISNRDSYSDCNSNRNSIASFTSICSSQCSSYFHSDEMDSGDELPLSVRISHDKQDKIHSCLEHLFSQVDSITNLLKGQAVVRAFDQTKYLTPGRGLQEFQQEMEPKLSCPKRLRLHIKQDPWNLPSSVRTLAQNIRKFVEEVKCRLLLALLEYSDSETQLRRDMVFCQTLVATVCAFSEQLMAALNQMFDNSKENEMETWEASRRWLDQIANAGVLFHFQSLLSPNLTDEQAMLEDTLVALFDLEKVSFYFKPSEEEPLVANVPLTYQAEGSRQALKVYFYIDSYHFEQLPQRLKNGGGFKIHPVLFAQALESMEGYYYRDNVSVEEFQAQINAASLEKVKQYNQKLRAFYLDKSNSPPNSTSKAAYVDKLMRPLNALDELYRLVASFIRSKRTAACANTACSASGVGLLSVSSELCNRLGACHIIMCSSGVHRCTLSVTLEQAIILARSHGLPPRYIMQATDVMRKQGARVQNTAKNLGVRDRTPQSAPRLYKLCEPPPPAGEE

SEQ ID NO: 12399 - protein, 979 aa, Homo sapiens
MSEDSRGDSRAESAKDLEKQLRLRVCVLSELQKTERDYVGTLEFLVSAFLHRMNQCAASKVDKNVTEETVKMLFSNIEDILAVHKEFLKVVEECLHPEPNAQQEVGTCFLHFKDKFRIYDEYCSNHEKAQKLLLELNKIRTIRTFLLNCMLLGGRKNTDVPLEGYLVTPIQRICKYPLILKELLKRTPRKHSDYAAVMEALQAMKAVCSNINEAKRQMEKLEVLEEWQSHIEGWEGSNITDTCTEMLMCGVLLKISSGNIQERVFFLFDNLLVYCKRKHRRLKNSKASTDGHRYLFRGRINTEVMEVENVDDGTADFHSSGHIVVNGWKIHNTAKNKWFVCMAKTPEEKHEWFEAILKERERRKGLKLGMEQDTWVMISEQGEKLYKMMCRQGNLIKDRKRKLTTFPKCFLGSEFVSWLLEIGEIHRPEEGVHLGQALLENGIIHHVTDKHQFKPEQMLYRFRYDDGTFYPRNEMQDVISKGVRLYCRLHSLFTPVIRDKDYHLRTYKSVVMANKLIDWLIAQGDCRTREEAMIFGVGLCDNGFMHHVLEKSEFKDEPLLFRFFSDEEMEGSNMKHRLMKHDLKVVENVIAKSLLIKSNEGSYGFGLEDKNKVPIIKLVEKGSNAEMAGMEVGKKIFAINGDLVFMRPFNEVDCFLKSCLNSRKPLRVLVSTKPRETVKIPDSADGLGFQIRGFGPSVVHAVGRGTVAAAAGLHPGQCIIKVNGINVSKETHASVIAHVTACRKYRRPTKQDSIQWVYNSIESAQEDLQKSHSKPPGDEAGDAFDCKVEEVIDKFNTMAIIDGKKEHVSLTVDNVHLEYGVVYEYDSTAGIKCNVVEKMIEPKGFFSLTAKILEALAKSDEHFVQNCTSLNSLNEVIPTDLQSKFSALCSERIEHLCQRISSYKKVQASERFYNFTARHAVWEHSFDLHSVSSTFPVPVTMEFLLLPPPLLGISQDGRQHCIPEDLPSQEMLLAERAPV

SEQ ID NO: 12400 - protein, 943 aa, Homo sapiens
LEFLVSKDKFRIYDEYCSNHEKAQKLLLELNKIRTIRTFLLNCMLLGGRKNTDVPLEGYLVTPIQRICKYPLILKELLKRTPRKHSDYAAVMEALQAMKAVCSNINEAKRQMEKLEVLEEWQSHIEGWEGSNITDTCTEMLMCGVLLKISSGNIQERVFFLFDNLLVYCKRKHRRLKNSKASTDGHRYLFRGRINTEVMEVENVDDGTADFHSSGHIVVNGWKIHNTAKNKWFVCMAKTPEEKHEWFEAILKERERRKGLKLGMEQDTWVMISEQGEKLYKMMCRQGNLIKDRKRKLTTFPKCFLGSEFVSWLLEIGEIHRPEEGVHLGQALLENGIIHHVTDKHQFKPEQMLYRFRYDDGTFYPRNEMQDVISKGVRLYCRLHSLFTPVIRDKDYHLRTYKSVVMANKLIDWLIAQGDCRTREEAMIFGVGLCDNGFMHHVLEKSEFKDEPLLFRFFSDEEMEGSNMKHRLMKHDLKVVENVIAKSLLIKSNEGSYGFGLEDKNKVPIIKLVEKGSNAEMAGMEVGKKIFAINGDLVFMRPFNEVDCFLKSCLNSRKPLRVLVSTKPRETVKIPDSADGLGFQIRGFGPSVVHAVGRGTVAAAAGLHPGQCIIKVNGINVSKETHASVIAHVTACRKYRRPTKQDSIQWVYNSIESAQEDLQKSHSKPPGDEAGDAFDCKVEEVIDKFNTMAIIDGKKEHVSLTVDNVHLEYGVVYEYDSTAGIKCNVVEKMIEPKGFFSLTAKILEALAKSDEHFVQNCTSLNSLNEVIPTDLQSKFSALCSERIEHLCQRISSYKKFSRVLKNRAWPTFKQAKSKISPLHSSDFCPTNCHVNVMEVSYPKTSTSLGSAFGVQLDSRKHNSHDKENKSSEQGKLSPMVYIQHTITTMAAPSGLSLGQQDGHGLRYLLKEEDLETQDIYQKLLGKLQTALKEVEMCVCQIDE

SEQ ID NO: 12401 - protein, 153 aa, Homo sapiens
LDKSNSPPNSTSKAAYVDKLMRPLNALDELYRLVASFIRSKRTAACANTACSASGVGLLSVSSELCNRLGACHIIMCSSGVHRCTLSVTLEQAIILARSHGLPPRYIMQATDVMRKQILCIYFSYSCYFNSLLEFEGKIKDRREGYYVFMMFC

SEQ ID NO: 12402 - protein, 74 aa, Homo sapiens
MRPLNALDELYRLVASFIRSKRTAACANTACSASGVGLLSVSSELCNRLGACHIIMCSSGVHRYVTLPPCLPLC

SEQ ID NO: 12403 - protein, 27 aa, Homo sapiens
MKRLYKGKIKQYINYGSSGESLQCFRL

SEQ ID NO: 12404 - protein, 61 aa, Homo sapiens
MTFNFTQHKREMEFKLDLFCFEFQVPFHYNTVQNYLPISSFLSICPLYFNVNPNSDKSATS

SEQ ID NO: 12405 - protein, 31 aa, Homo sapiens
LPNCDGKNKQMLAQNSRTSPWAEAHVAYNSV

SEQ ID NO: 12406 - protein, 77 aa, Homo sapiens
LIPIELRIPALEACLFCSPATLASKMGENASVFKLIADITTDLTSAMCFLFCFLAVLTKPKFCKVHKIQFICKQAII

SEQ ID NO: 12407 - protein, 78 aa, Homo sapiens
LLKTLPVWRAVSICFNPTDLPAGSARADRPGPGSQGGVHSAVAGGAASSLDSLKLASRQSLSLFTAFTLVQLRSLLQK

SEQ ID NO: 12408 - protein, 456 aa, Homo sapiens
MNMGGPQYSQQQAPPNQTAPWPESILPIDQASFASQNRQPFGSSPDDLLCPHPAAESPSDEGALLDQLYLALRNFDGLEEIDRALGIPELVSQSQAVDPEQFSSQDSNIMLEQKAPVFPQQYASQAQMAQGSYSPMQDPNFHTMGQRPSYATLRMQPRPGLRPTGLVQNQPNQLRLQLQHRLQAQQNRQPLMNQISNVSNVNLTLRPGVPTQAPINAQMLAQRQREILNQHLRQRQMHQQQQVQQRTLMMRGQGLNMTPSMVAPSGMPATMSNPRIPQANAQQFPFPPNYGISQQPDPGFTGATTPQSPLMSPRMAHTQSPMMQQSQANPAYQAPSDINGWAQGNMGGNSMFSQQSPPHFGQQANTSMYSNNMNINVSMATNTGGMSSMNQMTGQISMTSVTSVPTSGLSSMGPEQVSAQGEATQWLHITAFFLLLHQIYLSINIADTAEASCFFS

SEQ ID NO: 12409 - protein, 47 aa, Homo sapiens
MNIGPSELEMNMGGPQYSQQQAPPNQTAPWPESILPIDQASFASQNR

SEQ ID NO: 12410 - protein, 34 aa, Homo sapiens
MIEEISGGVLSMCLGLHQDVMLVWVNRGDLSLRQ

SEQ ID NO: 12411 - protein, 42 aa, Homo sapiens
LEPPSAGPELDWASRVLGPSLVGETFPNQRPSLNTFLRHLVL

SEQ ID NO: 12412 - protein, 24 aa, Homo sapiens
MAAAASATASAAKVSADGSRHLTA

SEQ ID NO: 12413 - protein, 19 aa, Homo sapiens
MLLMGLVQFVKIHDFVHLC

SEQ ID NO: 12414 - protein, 66 aa, Homo sapiens
MGRSFRWILLDPSPFPGTVIVTGGGCGCHCTAPTATAAPDLGDHVLPLQKELPFVTRRGRRSTLGP

SEQ ID NO: 12415 - protein, 286 aa, Homo sapiens
VRADSGLGRQLVVHAPRGQQRGAHALATHLAFSPRASRPGFLVFLGALSGLRLRQGAEGGDSETGQGGGKRTRVGKGDNGMSTGSVSDPEEMELRGLQREYPVPASKRPPLRGVERSYASPSDNSSAEEEDPDGEEERCALGTAGSAEGCKRKRPRVAGGGGAGGSAGGGGKKPLPAKGSAAECKQSQRNAANARERARMRVLSKAFSRLKTSLPWVPPDTKLSKLDTLRLASSYIAHLRQLLQEDRYENGYVHPVNLTWPFVVSGRPDSDTKEVSAANRLCGTTA

SEQ ID NO: 12416 - protein, 257 aa, Homo sapiens
LHVFSSSGLLRTAGNGEEEILPHCNLQVFTYTCDVGKRENVYLTAERVRKEVGEVSVLVNNAGVVSGHHLLECPDELIERTMMVNCHAHFWTTKAFLPTMLEINHGHIVTVASSLGLFSTAGVEDYCASKFGVVGFHESLSHELKAAEKDGIKTTLVCPYLVDTGMFRGCRIRKEIEPFLPPLKPDYCVKQAMKAILTDQPMICTPRLMYIVTFMKSILPFEAVVCMYRFLGADKCMYPFIAQRKQATNNNEAKNGI

SEQ ID NO: 12417 - protein, 76 aa, Homo sapiens
LQSVPGKKMFSVQLSLGEQTWESEGSSIKKAQQAVANKALTESTLPKPVQKPPKSNVNNNPGIIAQCLRSFMFSSL

SEQ ID NO: 12418 - protein, 60 aa, Homo sapiens
MHVGIGISQFSRARACTMFHLLGFVTYLLVCLGDSGVGRGESSSPINKLILYLPDSQLPC

SEQ ID NO: 12419 - protein, 38 aa, Homo sapiens
LSVKIVARLMGHFPSLQTPPLTDFRRGRELQTVPAGLL

SEQ ID NO: 12420 - protein, 20 aa, Homo sapiens
LSRSCPGLPLQVLERAFPTE

SEQ ID NO: 12421 - protein, 462 aa, Homo sapiens
LTDNLTSSEVYSPPSGGKNGLRLSVCPGVRANCFEAPDFRRLWVGSIKREMTFTFQSEDLKRDCGKKMSHQHVFSLAMEEDVKTADTKKASRILDHEKENTRSICLLEQKRKVVSSNIDVPPARKSSEELDMDKVTAAMVLTSLSTSPLVRSPPVRPNESLSGSWKEGGCVPSSTSSSGYWSWSAPSDQSNPSTPSPPLSADSFKPFRSPAQPDDGIDEAEASNLLFDEPIPRKRKNSMKVMFKCLWKNCGKVLSTAAGIQKHIRTIHLGRVGDSDYSDGEEDFYYTEIKLNTDSVADGLSSLAPVSPSQSLASPPTFPIPDSSRTETPCAKTETKLMTPLSRSAPTTLYLVHTDHAYQATPPVTIPGSAKFTPNGSSFSISWQSPPVTFTGIPVSPTHHPVGTGEQRQHAHTVLSSPPRGTVSLRKPRGEGKKCRKVYGMENRDMWCTACRWKKACQRFLD

SEQ ID NO: 12422 - protein, 59 aa, Homo sapiens
MTCSKSLRSKSNFDRQPYFQRSLLPSLRREEWAAVKRLPWCQGQLLRSARLSETVGGEH

SEQ ID NO: 12423 - protein, 293 aa, Homo sapiens
LVPARPADTQCRRPSRRRQIGADSCPAPTASATMSHHWGYGKHNGPEHWHKDFPIAKGERQSPVDIDTHTAKYDPSLKPLSVSYDQATSLRILNNGHAFNVEFDDSQDKAVLKGGPLDGTYRLIQFHFHWGSLDGQGSEHTVDKKKYAAELHLVHWNTKYGDFGKAVQQPDGLAVLGIFLKVGSAKPGLQKVVDVLDSIKTKGKSADFTNFDPRGLLPESLDYWTYPGSLTTPPLLECVTWIVLKEPISVSSEQVLKFRKLNFNGEGEPEELMVDNWRPAQPLKNRQIKASFK

SEQ ID NO: 12424 - protein, 159 aa, Homo sapiens
MVMLSTWSLMTLRTKQLHLVHWNTKYGDFGKAVQQPDGLAVLGIFLKVGSAKPGLQKVVDVLDSIKTKGKSADFTNFDPRGLLPESLDYWTYPGSLTTPPLLECVTWIVLKEPISVSSEQVLKFRKLNFNGEGEPEELMVDNWRPAQPLKNRQIKASFK

SEQ ID NO: 12425 - protein, 526 aa, Homo sapiens
LPASLVQGRIWAPERGVGALGAAAAGGTPGTGLSARDHERGGHLQRPAHHSLPQTRRPALPEPRRLWHCVVRPPRRLARPGGREAPAHPHSAARQKTEYPDVAWPLRFRILHEIALGVNYLHNMTPPLLHHDLKTQNILLDNEFHVKIADFGLSKWRMMSLSQSRSSKSAPEGGTIIYMPPENYEPGQKSRASIKHDIYSYAVITWEVLSRKQPFEDVTNPLQIMYSVSQGHRPVINEESLPYDIPHRARMISLIESGWAQNPDERPSFLKCLIELEPVLRTFEEITFLEAVIQLKKTKLQSVSSAIHLCDKKKMELSLNIPVNHGPQEESCGSSQLHENSGSPETSRSLPAPQDNDFLSRKAQDCYFMKLHHCPGNHSWDSTISGSQRAAFCDHKTTPCSSAIINPLSTAGNSERLQPGIAQQWIQSKREDIVNQMTEACLNQSLDALLSRDLIMKEDYELVSTKPTRTSKVRQLLDTTDIQGEEFAKVIVQKLKDNKQMGLQPYPEILVVSRSPSLNLLQNKSM

SEQ ID NO: 12426 - protein, 11 aa, Homo sapiens
MPTAGAVSALV

SEQ ID NO: 12427 - protein, 45 aa, Homo sapiens
LTMLNVIKFDGGEEVLISGEFNDLRKVTKEQWDTIEELIRKTKGS

SEQ ID NO: 12428 - protein, 322 aa, Homo sapiens
LARVSQRGPTRYADAPTPIRPSQDSTMTLNNVTMRQGTVGMQPQQQRWSIPADGRHLMVQKEPHQYSHRNRHSATPEDHCRRSWSSDSTDSVISSESGNTYYRVVLIGEQGVGKSTLANIFAGVHDSMDSDCEVLGEDTYERTLMVDGESATIILLDMWENKGENEWLHDHCMQVGDAYLIVYSITDRASFEKASELRIQLRRARQTEDIPIILVGNKSDLVRCREVSVSEGRACAVVFDCKFIETSAAVQHNVKELFEGIVRQVRLRRDSKEKNERRLAYQKRKESMPRKARRFWGKIVAKNNKNMAFKLKSKSCHDLSVL

SEQ ID NO: 12429 - protein, 137 aa, Homo sapiens
LDSTMTLNNVTMRQGTVGMQPQQQRWSIPADGRHLMVQKEPHQYSHRNRHSATPEDHCRRSWSSDSTDSVISSESGNTYYRVVLIGEQGVGKSTLANIFAGVHDSMDSDCEVLGGRCPSPSGLLSTRGGPGRKSEGG

SEQ ID NO: 12430 - protein, 159 aa, Homo sapiens
LARVSQRGPTRYADAPTPIRPSQDSTMTLNNVTMRQGTVGMQPQQQRWSIPADGRHLMVQKEPHQYSHRNRHSATPEDHCRRSWSSDSTDSVISSESGNTYYRVVLIGEQGVGKSTLANIFAGVHDSMDSDCEVLGGRCPSPSGLLSTRGGPGRKSEGG

SEQ ID NO: 12431 - protein, 46 aa, Homo sapiens
LARVSQRGPTRYADAPTPIRPSQVRGTARDGEGREWEFPSPQNFRS

SEQ ID NO: 12432 - protein, 412 aa, Homo sapiens
LITIEAGQGKVGSQDILKEYFYNAKKNLCLGEECWSLGQCGGVFLSCTDKLNRRTLLVRPISKQDPFSNCSGFFPSTTTKLLDGTHQQHGFLSLTYTKAVTKNVRHKLTSRNERRSFHKLSEGLMDGSPHFLHEILLSAQAFDIVLYFPLLNAIASIFQAKLPKTQKEKRKSPGQPMRTHTLTSRNLPLIYVNTSVIRIFIPKTEEMQPTVEANQAAKEDTVVLKIGSVAMAPQADNPLGRSVLRKDIYQRALNLGILRDPGSEIEDRQYQIDLQSINIGTAQWHQLKPEKESVSGGVVTETERNSQNPALEWNMASSIRRHQERRAILTPVLTDFSVRITGAPAVIFTKVVSPENLHTEEILVCGHSLEVNITTNLDFFLSVAQVQLLHQLIVANMTGLEPSNKAAEVTVT

SEQ ID NO: 12433 - protein, 565 aa, Homo sapiens [sequence omitted]

SEQ ID NO: 12434 - protein, 31 aa, Homo sapiens
LCVMYQRRKLVSTPGLAGLYLETRSEFFRAV

SEQ ID NO: 12435 - protein, 946 aa, Homo sapiens
VQPEPVRRPRLPRRGALRSTMTTKDYPSLWGFGTTKTFKIPIEHLDFKYIEKCSDVKHLEKILCVLRSGEEGYYPELTEFCEKHLQALAPESRALRKDKPAATAASFTAEEWEKIDGDIKSWVSEIKKEEDKMHFHETETFPAMKDNLPPVRGSNSCLHVGKEKYSKRPTKKKTPRDYAEWDKFDVEKECLKIDEDYKEKTVIDKSHLSKIETRIDTAGLTEKEKDFLATREKEKGNEAFNSGDYEEAVMYYTRSISALPTVVAYNNRAQAEIKLQNWNSAFQDCEKVLELEPGNVKALLRRATTYKHQNKLREATEDLSKVLDVEPDNDLAKKTLSEVERDLKNSEAASETQTKGKRMVIQEIENSEDEEGKSGRKHEDGGGDKKPAEPAGAARAAQPCVMGNIQKKLTGKAEGGKRPARGAPQRGQTPEAGADKRSPRRASAAAAAGGGATGHPGGGQGAENPAGLKSQGNELFRSGQFAEAAGKYSAAIALLEPAGSEIADDLSILYSNRAACYLKEGNCSGCIQDCNRALELHPFSMKPLLRRAMAYETLEQYGKAYVDYKTVLQIDCGLQLANDSVNRLSRILMELDGPNWREKLSPIPAVPASVPLQAWHPAKEMISKQAGDSSSHRQQGITDEKTFKALKEEGNQCVNDKNYKDALSKYSECLKINNKECAIYTNRALCYLKLCQFEEAKQDCDQALQLADGNVKAFYRRALAHKGLKNYQKSLIDLNKVILLDPSIIEAKMELEEVTRLLNLKDKTAPFNKEKERRKIEIQEVNEGKEEPGRPAGEVSMGCLASEKGGKSSRSPEDPEKLPIAKPNNAYEFGQIINALSTRKDKEACAHLLAITAPKDLPMFLSNKLEGDTFLLLIQSLKNNLIEKDPSLVYQHLLYLSKAERFKMMLTLISKGQKELIEQLFEDLSDTPNNHFTLEDIQALKRQYEL

SEQ ID NO: 12436 - protein, 32 aa, Homo sapiens
VGARPSWILDFWPPELTSMIAVFCKSNFSRIL

SEQ ID NO: 12437 - protein, 58 aa, Homo sapiens
LTGEIGSNGTDFRASLQIWSRDIAPQAVLPGALGRGAVFGGRTSMIAVFCKSNFSRIL

SEQ ID NO: 12438 - protein, 145 aa, Homo sapiens [sequence omitted]

SEQ ID NO: 12439 - protein, 48 aa, Homo sapiens
LDASLPFPSHKRSRTASPEPAAFDVIVRVVPLLPGLVIGGNPVSAERL

SEQ ID NO: 12440 - protein, 25 aa, Homo sapiens
LRRRRARGGGGRARLLCSRLSCFPS

SEQ ID NO: 12441 - protein, 9 aa, Homo sapiens
MTFGFVEYG

SEQ ID NO: 12442 - protein, 17 aa, Homo sapiens
LMIGGFHLPTCPFCCIF

SEQ ID NO: 12443 - protein, 95 aa, Homo sapiens
LIAAAVFPFFFCRRLLCLFSSFLALLLCSVTSPNPLPTQPAPFFFCLRCSISPSAAAATAAHSWCRCRAFTPKSFPQPMAQAALGISAQGNHIPL

SEQ ID NO: 12444 - protein, 206 aa, Homo sapiens
LIIVVSTISHVLISPISESRRVLQESCEFFLKHNSKVKHKKKHYKPSSHKLKVISKSMGTSTGATANHGTSAVAITSHDYLGQETLTEIQTSPETSMREVKADGASTPRLREQDCGEPASPAASISRLSGEQVDGKGQAGSVSESARSEGRISPKSDITDTGLAQSNNLQVPSSSEPSSLKGSTSLLVHPVSGVRKEQGGGCHSDT

SEQ ID NO: 12445 - protein, 100 aa, Homo sapiens
MKVKMLSRNPDNYVRETKLDLQRVPRNYDPALHPFEVPREYIRALNATKLERVFAKPFLASLDGHRDGVNCLAKHPEKLATVLSGACDGEASVNLDDIFN

SEQ ID NO: 12446 - protein, 25 aa, Homo sapiens
MKVKMLSRNPDNYVRETKLDLQRGW

SEQ ID NO: 12447 - protein, 455 aa, Homo sapiens
VSTDSLFFGKMAEYDLTTRIAHFLDRHLVFPLLEFLSVKEIYNEKELLQGKLDLLSDTNMVDFAMDVYKNLYSDDIPHALREKRTTVVAQLKQLQAETEPIVKMFEDPETTRQMQSTRDGRMLFDYLADKHGFRQEYLDTLYRYAKFQYECGNYSGAAEYLYFFRVLVPATDRNALSSLWGKLASEILMQNWDAAMEDLTRLKETIDNNSVSSPLQSLQQRTWLIHWSLFVFFNHPKGRDNIIDLFLYQPQYLNAIQTMCPHILRYLTTAVITNKDVRKRRQVLKDLVKVIQQESYTYKDPITEFVECLYVNFDFDGAQKKLRECESVLVNDFFLVACLEDFIENARLFIFETFCRIHQCISINMLADKLNMTPEEAERWIVNLIRNARLDAKIDSKLGHVVMGNNAVSPYQQVIEKTKSLSFRSQMLAMNIEKKLNQNSRSEAPNWATQDSGFY

SEQ ID NO: 12448 - protein, 69 aa, Homo sapiens
LASEILMQNWDAAMEDLTRLKETIDNNSVSSPLQSLQQRTWLIHWSLFVFFNHPKGRDNIIDLFLYQPQ

SEQ ID NO: 12449 - protein, 26 aa, Homo sapiens
LTTRIAHFLDRHLVFPLLEFLSVKEL

SEQ ID NO: 12450 - protein, 30 aa, Homo sapiens
MAEYDLTTRIAHFLDRHLVFPLLEFLSVKE

SEQ ID NO: 12451 - protein, 50 aa, Homo sapiens
LLGKMASRKEGTGSTATSSSSTAGAAGKGKGKGGSGDSAVKQVQIDGLFS

SEQ ID NO: 12452 - protein, 60 aa, Homo sapiens
LLGKMASRKEGTGSTATSSSSTAGAAGKGKGKGGSGDSAVKQVQIDGLGNAFKYVDRKYC

SEQ ID NO: 12453 - protein, 30 aa, Homo sapiens
VESVRCQRLVMPRIPLGSREAKLRGTASCR

SEQ ID NO: 12454 - protein, 464 aa, Homo sapiens
VGHGGARAPRSRQAFPRAGPQRAPPRKHAHGRLGALSNAQVSYLPAAWELLSCPPSPQPPGRGGTPRPGAAMKRTRDEVDATLQIAKLNAAELLPAVHCLGFGPGASGAAAGDFCLLELEPTLCQQLEDGHSLVIRGDKDEQAVLCSKDKTYDLKIADTSNMLLFIPGCKTPDQLKKEDSHCNIIHTEIFGFSNNYWELRRRRPKLKKLKKLLMENPYEGPDSQKEKDSNSSKYTTEDLLDQIQASEEEIMTQLQVLNACKIGGYWRILEFDYEMKLLNHVTQLVDSESWSFGKVPLNTCLQELGPLEPEEMIEHCLKCYGKKYVDEGEVYFELDADKICRAAARMLLQNAVKFNLAEFQEVWQQSVPEGMVTSLDQLKGLALVDRHSRPEIIFLLKVDDLPEDNQERFNSLFSLREKWTEEDIAPYIQDLCGEKQTIGALLTKYSHSSMQNGVKVYNSRRPIS

SEQ ID NO: 12455 - protein, 123 aa, Homo sapiens
MKRTRDEVDATLQIAKLNAAELLPAVHCLGFGPGASGAAAGDFCLLELEPTLCQQLEDGHSLVIRGDKDEQAVLCSKDKTYDLKIADTSNMLLFIPGCKTPDQLKKEDSHCNIIHTEVLFSVL

SEQ ID NO: 12456 - protein, 168 aa, Homo sapiens
LRKDAQNSSDSSFEKNVEITEQLANGRHFTRQLARQQADKKKEEHREDKVIPVTRSLRARNIVQSTEHLHEDNGDVEVRRSCRIRSRYSGVNQSMLFDKLITNTAEAVLQKMDDMKKMRRQRMRELEDLGVFNETEESNLNMYTRGKQKDIQRTDEETTDNQEGSVVI

SEQ ID NO: 12457 - protein, 145 aa, Homo sapiens
LSPFSLQPAFKGLTFTDLPLCLQLNIMQRLSDGRDLVSLGQAAPDLHVLSEDRLLWKKLCQYHFSERQIRKRLILSDKGQLDWKKMYFKLVRCYPRKEQYGDTLQLCKHCHILSWKGTDHPCTANNPESCSVSLSPQDFINLFKF

SEQ ID NO: 12458 - protein, 270 aa, Homo sapiens
LCLCFHVQRHGYCTLGEAFNRLDFSTAILDSRRFNYVVRLLELIAKSQLTSLSGIAQKNFMNILEKVVLKVLEDQQNIRLIRELLQTLYTSLCTLVQRVGKSVLVGNINMWVYRMETILHWQQQLNNIQITRPAFKGLTFTDLPLCLQLNIMQRLSDGRDLVSLGQAAPDLHVLSEDRLLWKKLCQYHFSERQIRKRLILSDKGQLDWKKMYFKLVRCYPRKEQYGDTLQLCKHCHILSWKGTDHPCTANNPESCSVSLSPQDFINLFKF

SEQ ID NO: 12459 - protein, 177 aa, Homo sapiens [sequence omitted]

SEQ ID NO: 12460 - protein, 134 aa, Homo sapiens [sequence omitted]

SEQ ID NO: 12461 - protein, 568 aa, Homo sapiens
LVGSEGEGVPSSRTAGGAGRLGCSTQNRFLISNLAVIIVMEQEKKLLVSDSNSFMERESLKSPFTGDTSMNNLETVHHNNSKADKLKEKPSEWSKRHRPQHYKHEDAKEMPLTWVQDEIWCHDSYESDGKSENWGNFIAKEEEKPNHQEWDSGEHTNACVQQNSSFVDRPYKCSECWKSFSNSSHLRTHQRTHSGEKPYKCSECAKCFCNSSHLIQHLRMHTGEKPYQCGECGKSFSNTSHLIIHERTHTGEKPYKCPECGKRFSSSSHLIQHHRSHTGEKPYECSVCGKGFSHSYVLIEHQRTHTGEKPYKCPDCGKSFSQSSSLIRHQRTHTGEKPYKCLECEKSFGCNSTLIKHQRIHTGEKPYQCPECGKNFSRSSNLITHQKMHTGEKSYESSEYEESLGQNCNVIEECRIQLGEKPYRCCECGKSFGLSSHLIRHQRTHTGEKPYRCSECWKTFSQSSTLVIHQRTHTGEKPYKCPDCGESFSQSFNLIRHRRTHIGEKPYKCTSCEKCFSRSAYLSQHRKIHVEKPFESPDVGDFPHEWTWKNCSGEMPFISSFSVSNSSS

SEQ ID NO: 12462 - protein, 40 aa, Homo sapiens
LAASGGVRRLLWLLGPRRAGESRRPRGMLVRKPSGAAAAI

SEQ ID NO: 12463 - protein, 36 aa, Homo sapiens [sequence omitted]

SEQ ID NO: 12464 - protein, 160 aa, Homo sapiens
MPRNLREYMVEKIYPQIPDHLKEPFLEATDNSHLRSMPASFLPPSSVKKRGVLLLGDAYNMRHPLTGGGMTVAFKDIKLWRKLLKGIPDLYDDAAIFEAKKSFYWARKTSHSFVVNILAQALYELFSATDDSLHQLRKACFLYFKLGGECVAGPVGLLSV

SEQ ID NO: 12465 - protein, 119 aa, Homo sapiens
LFCLKGCSKIKSSLPLFIGVLLLGDAYNMRHPLTGGGMTVAFKDIKLWRKLLKGIPDLYDDAAIFEAKKSFYWARKTSHSFVVNILAQALYELFSATDGKCRHFLVNITQLQIFSVGKE

SEQ ID NO: 12466 - protein, 258 aa, Homo sapiens
LFWDKHVFPIKHYQDKIRPYIQLPSHSNITGIVEVILGETKAYVFFEKDFGDMHSYVRSRKRLREEEAARLFKQIVSAVAHCHQSAIVLGDLKLRKFVFSTEERTQLRLESLEDTHIMKGEDDALSDKHGCPAYVSPEILNTTGTYSGKAADVWSLGVMLYTLLVGRYPFHDSDPSALFSKIRRGQFCIPEHISPKARCLIRSLLRREPSERLTAPEILLHPWFESVLEPGYIDSEIGTSDQIVPEYQEDSDISSFFC

SEQ ID NO: 12467 - protein, 17 aa, Homo sapiens
VLGDLKLRKFVFSTEER

SEQ ID NO: 12468 - protein, 182 aa, Homo sapiens
VLVQNKVKGSYVPDLVFRASVPEESQPRTQLRLESLEDTHIMKGEDDALSDKHGCPAYVSPEILNTTGTYSGKAADVWSLGVMLYTLLVGRYPFHDSDPSALFSKIRRGQFCIPEHISPKARCLIRSLLRREPSERLTAPEILLHPWFESVLEPGYIDSEIGTSDQIVPEYQEDSDISSFFC

SEQ ID NO: 12469 - protein, 29 aa, Homo sapiens
LAWYQPDNDCIRMKAAELGMAPPLLCWDE

SEQ ID NO: 12470 - protein, 13 aa, Homo sapiens
MGEKANRTMTYFE

SEQ ID NO: 12471 - protein, 14 aa, Homo sapiens
VKQQTPNLQSWKEL

SEQ ID NO: 12472 - protein, 9 aa, Homo sapiens
LFCCLCLSE

SEQ ID NO: 12473 - protein, 35 aa, Homo sapiens
LLTHPFSDLGFEHLSVMLLPHSYCNTPLLKKVFLD

SEQ ID NO: 12474 - protein, 12 aa, Homo sapiens
LDFFRVVENQEL

SEQ ID NO: 12475 - protein, 17 aa, Homo sapiens
MYRISQLMSTPVAIEVS

SEQ ID NO: 12476 - protein, 28 aa, Homo sapiens
MYRISQLMSTPVASKCRRTVIRNYLLND

SEQ ID NO: 12477 - protein, 54 aa, Homo sapiens
LPKTKLLCKHLCTAMCVGICEKKEASYFSNNFVLCQLEEEAGNSLWKEHRICEV

SEQ ID NO: 12478 - protein, 48 aa, Homo sapiens
LTFPRTIHSFIPGNRQENKRLPKTKLLCKHLCTAMCVGICEKKRICEV

SEQ ID NO: 12479 - protein, 27 aa, Homo sapiens
LPKTKLLCKHLCTAMCVGICEKKECPG

SEQ ID NO: 12480 - protein, 130 aa, Homo sapiens
LATGPRPHRPSDNEEEDKEAAQLREERLRQYAEKKAKKPALVAKSSILLDVKPWDDETDMAQLEACVRSIQLDGLVWGASKLVPVGYGIRKLQIQCVVEDDKVGTDLLEEEITKFEEHVQSVDIAAFNKI

SEQ ID NO: 12481 - protein, 654 aa, Homo sapiens
LAEAPSFMRSGKASCTLETVWEDKHKYEEAERRFYEHEATQAAASAQQLPAEGPAMNGPGQDDPEDADEAEAPDGGSRRDPRKSQDSRKPLQKKRKRSPKSGLGPADLALLGLSAERVWLDKSLFDQAESSYRQKLADVAAQAAWPPALAPWGLCTHGNQVACHHVTWGIWVNKSSFDQAERAFVEWSQALLLAPDGSRRQGTPNTGQQVAVPDLAHQPSPPVNGQPPLGSLQALVREVWLEKPRYDAAERGFYEALFDGHPPGKVRLQERAGLAEGARRGRRDRRGRNILGNKRAGLRRADGEAPSALPYCYFLQKDAEAPWLSKPAYDSAECRHHAAEALRVAWCLEAASLSHRPGPRSGLSVSSLRPNRKMATNFLAHEKIWFDKFKYDDAERRFYEQMNGPVAGASRQENGASVILRDIARARENIQKSLAGSSGPGASSGTSGDHGELVVRIASLEVENQSLRGVVQELQQAISKLEARLNVLEKSSPGHRATAPQTQHVSPMRQVEPPAKKPATPAEDDEDDDIDLFGSDNEEEDKEAAQLREERLRQYAEKKAKKPALVAKSSILLDVKPWDDETDMAQLEACVRSIQLDGLVWGASKLVPVGYGIRKLQIQCVVEDDKVGTDLLEEEITKFEEHVQSVDIAAFNKI

SEQ ID NO: 12482 - protein, 312 aa, Homo sapiens
LCGLSCHLGLWWRRVCLALSFHLHQCHLHTTSPSSFWKGPRPPRADLLLCLTRRKMATNFLAHEKIWFDKFKYDDAERRFYEQMNGPVAGASRQSSGPGASSGTSGDHGELVVRIASLEVENQSLRGVVQELQQAISKLEARLNVLEKSSPGHRATAPQTQHVSPMRQVEPPAKKPATPAEDDEDDDIDLFGSDNEEEDKEAAQLREERLRQYAEKKAKKPALVAKSSILLDVKPWDDETDMAQLEACVRSIQLDGLVWGASKLVPVGYGIRKLQIQCVVEDDKVGTDLLEEEITKFEEHVQSVDIAAFNKI

SEQ ID NO: 12483 - protein, 351 aa, Homo sapiens
VEAPRPGCWGLRPVFAAVSVGDQTSAPAVSLACRPSYTTSLSSTSYCTHQLSTEGIGTDATLLELRRYRKMATNFLAHEKIWFDKFKYDDAERRFYEQMNGPVAGASRQENGASVILRDIARARENIQKSLAGSSGPGASSGTSGDHGELVVRIASLEVENQSLRGVVQELQQAISKLEARLNVLEKSSPGHRATAPQTQHVSPMRQVEPPAKKPATPAEDDEDDDIDLFGSDNEEEDKEAAQLREERLRQYAEKKAKKPALVAKSSILLDVKPWDDETDMAQLEACVRSIQLDGLVWGASKLVPVGYGIRKLQIQCVVEDDKVGTDLLEEEITKFEEHVQSVDIAAFNKI

SEQ ID NO: 12484 - protein, 273 aa, Homo sapiens
LVAASLAGVRKMATNFLAHEKIWFDKFKYDDAERRFYEQMNGPVAGASRQENGASVILRDIARARENIQKSLAGSSGPGASSGTSGDHVVQELQQAISKLEARLNVLEKSSPGHRATAPQTQHVSPMRQVEPPAKKPATPAEDDEDDDIDLFGSDNEEEDKEAAQLREERLRQYAEKKAKKPALVAKSSILLDVKPWDDETDMAQLEACVRSIQLDGLVWGASKLVPVGYGIRKLQIQCVVEDDKVGTDLLEEEITKFEEHVQSVDIAAFNKI

SEQ ID NO: 12485 - protein, 268 aa, Homo sapiens
LVAASLAGVRKMATNFLAHEKIWFDKFKYDDAERRFYEQMNGPVAGASRQSSGPGASSGTSGDHGELVVRIASLEVENQSLRGVVQELQQAISKLEARLNVLEKSSPGHRATAPQTQHVSPMRQVEPPAKKPATPAEDDEDDDIDLFGSDNEEEDKEAAQLREERLRQYAEKKAKKPALVAKSSILLDVKPWDDETDMAQLEACVRSIQLDGLVWGASKLVPVGYGIRKLQIQCVVEDDKVGTDLLEEEITKFEEHVQSVDIAAFNKI

SEQ ID NO: 12486 - protein, 249 aa, Homo sapiens
LVAASLAGVRKMATNFLAHEKIWFDKFKYDDAERRFYEQMNGPVAGASRQSSGPGASSGTSGDHVVQELQQAISKLEARLNVLEKSSPGHRATAPQTQHVSPMRQVEPPAKKPATPAEDDEDDDIDLFGSDNEEEDKEAAQLREERLRQYAEKKAKKPALVAKSSILLDVKPWDDETDMAQLEACVRSIQLDGLVWGASKLVPVGYGIRKLQIQCVVEDDKVGTDLLEEEITKFEEHVQSVDIAAFNKI

SEQ ID NO: 12487 - protein, 719 aa, Homo sapiens
VSGHGASRVLAARRGVCKGRVPPPGPRPVALGRAQCFISRARPGRPSLSSVFPRPPIPPPWSPRPWLACVRKMRSGKASCTLETVWEDKHKYEEAERRFYEHEATQAAASAQQLPAEGPAMNGPGQDDPEDADEAEAPDGGSRRDPRKSQDSRKPLQKKRKRSPKSGLGPADLALLGLSAERVWLDKSLFDQAESSYRQKLADVAAQAAWPPALAPWGLCTHGNQVACHHVTWGIWVNKSSFDQAERAFVEWSQALLLAPDGSRRQGTPNTGQQVAVPDLAHQPSPPVNGQPPLGSLQALVREVWLEKPRYDAAERGFYEALFDGHPPGKVRLQERAGLAEGARRGRRDRRGRNILGNKRAGLRRADGEAPSALPYCYFLQKDAEAPWLSKPAYDSAECRHHAAEALRVAWCLEAASLSHRPGPRSGLSVSSLRPNRKMATNFLAHEKIWFDKFKYDDAERRFYEQMNGPVAGASRQENGASVILRDIARARENIQKSLAGSSGPGASSGTSGDHGELVVRIASLEVENQSLRGVVQELQQAISKLEARLNVLEKSSPGHRATAPQTQHVSPMRQVEPPAKKPATPAEDDEDDDIDLFGSDNEEEDKEAAQLREERLRQYAEKKAKKPALVAKSSILLDVKPWDDETDMAQLEACVRSIQLDGLVWGASKLVPVGYGIRKLQIQCVVEDDKVGTDLLEEEITKFEEHVQSVDIAAFNKI

SEQ ID NO: 12488 - protein, 297 aa, Homo sapiens
VEAPRPGCWGLRPVFAAVSVGDQTSAPAVSLACRPSYTTSLSSTSYCTHQLSTEGIGTDATLLELRRYRKMATNFLAHEKIWFDKFKYDDAERRFYEQMNGPVAGASRQENGASVILRDIARARENIQKSLAGSSGPGASSGTSGDHGELVVRIASLEVENQSLRGVVQELQQAISKLEARLNVLEKSSPGHRATAPQTQHVSPMRQVEPPAKKPATPAEDDEDDDIDLFGSDNEEEDKEAAQLREERLRQYAEKKAKKPALVAKSSILLDVKPVSGRGGASGGQALPWCPPSRLSL

SEQ ID NO: 12489 - protein, 117 aa, Homo sapiens
LVAASLAGVRKMATNFLAHEKIWFDKFKYDDAERRFYEQMNGPVAGASRQSSGPGASSGTSGDHGELVVRIASLEVENQSLRGVVQELQQAISKLEARLNVLEKSSPGHRATAPQTQ

SEQ ID NO: 12490 - protein, 141 aa, Homo sapiens
LVAASLAGVRKMATNFLAHEKIWFDKFKYDDAERRFYEQMNGPVAGASRQENGASVILRDIARARENIQKSLAGSSGPGASSGTSGDHGELVVRIASLEVENQSLRGVVQELQQAISKLEARLNVLEKSSPGHRATAPQTQ

SEQ ID NO: 12491 - protein, 78 aa, Homo sapiens
LVAASLAGVKMATNFLAHEKIWFDKFKYDDAERRFYEQMNGPVAGASRQENGASVILRDIARARENIQKSLAGCCLVP

SEQ ID NO: 12492 - protein, 153 aa, Homo sapiens
MRFLQLYHEDLLAGLGDVALLPLEGPDMTGFRLCGAQASCQAAEEFLRSLLGSISCHVLCLEHPGSARFLLGPEGQHLLQGLEAQFQCVFGTERLATATLDTGLEEVDPTEALPVLPGNAHTLWTPDSTGGDQEDVSLGRAPWEPSAHPVALT

SEQ ID NO: 12493 - protein, 292 aa, Homo sapiens
VTGALVLGPQVESTAVVSFLEEAGSRMRKLWLTYSSQTTAILGALLGSCCPQLQVLEVSTGINRNSIPLQLPVEALQKGCPQLQVLRLLNLMWLPKPPGRGVAPGPGFPSLEELCLASSTCNFVSNEVLGRLLHGSPNLRLLDLRGCARITPAGLQDLPCRELEQLHLGLYGTSDRLTLAKEGSPFLTQKWCHTLRELDLSGQGFSEKDLEQALAAFLSTPGGSHPALCSLNLRGTRVTPSTVSSVISGCPGLLYLNLESCRCLPRGLKRAYRGLEEVQWCLEQLLTSPSPS

SEQ ID NO: 12494 - protein, 349 aa, Homo sapiens
LSVSLVDLSLSSPNPSCPSVSPQLVGECCPRLTFLKLSGCHGVTADALVMLAKACCQLHSLDLQHSMVESTAVVSFLEEAGSRMRKLWLTYSSQTTAILGALLGSCCPQLQVLEVSTGINRNSIPLQLPVEALQKGCPQLQVLRLLNLMWLPKPPGRGVAPGPGFPSLEELCLASSTCNFVSNEVLGRLLHGSPNLRLLDLRGCARITPAGLQDLPCRELEQLHLGLYGTSDRLTLAKEGSPFLTQKWCHTLRELDLSGQGFSEKDLEQALAAFLSTPGGSHPALCSLNLRGTRVTPSTVSSVISGCPGLLYLNLESCRCLPRGLKRAYRGLEEVQWCLEQLLTSPSPS

SEQ ID NO: 12495 - protein, 535 aa, Homo sapiens
VVMAAPASRQVRRRARAAPRPRSAEDWWWDRLAPRGSGYHLLQSDSMLLVLSEPGPARPRAQRRASRRTPRQPPRGPSAAAKPKAGLRSEAAAAPAPAPAPTPTPEEGPDAGWGDRIPLEILVQIFGLLVAADGPMPFLGRAARVCRRWQEAASQPALWHTVTLSSPLVGRPAKGGVKAEKKLLASLEWLMPNRFSQLQRLTLIHWKSQLVGECCPRLTFLKLSGCHGVTADALVMLAKACCQLHSLDLQHSMVESTAVVSFLEEAGSRMRKLWLTYSSQTTAILGALLGSCCPQLQVLEVSTGINRNSIPLQLPVEALQKGCPQLQVLRLLNLMWLPKPPGRGVAPGPGFPSLEELCLASSTCNFVSNEVLGRLLHGSPNLRLLDLRGCARITPAGLQDLPCRELEQLHLGLYGTSDRLTLAKEGSPFLTQKWCHTLRELDLSGQGFSEKDLEQALAAFLSTPGGSHPALCSLNLRGTRVTPSTVSSVISGCPGLLYLNLESCRCLPRGLKRAYRGLEEVQWCLEQLLTSPSPS

SEQ ID NO: 12496 - protein, 173 aa, Homo sapiens
LVMLAKACCQLHSLDLQHSMVESTAVVSFLEEAGSRMRKLWLTYSSQTTAILGALLGSCCPQLQVLEVSTGINRNSIPLQLPVEALQKGCPQLQVLRLLNLMWLPKPPGRGVAPGPGFPSLEELCLASSTCNFVSNEVLGRLLHGSPNLRLLDLRGCARITPAGLQDLPCRAL

SEQ ID NO: 12497 - protein, 66 aa, Homo sapiens
MPGAGPEPPRVSRVVAAAGSCALRTEVASLGRTAVSRRGGKPALERERTGRGTGRRRDRTAPESPT

SEQ ID NO: 12498 - protein, 887 aa, Homo sapiens
LGGREGPVRLTRPGQGGSPWPHWHCPQLRFAELLDRPGAERAIIHVSLATTLGDMKDHHGAVRHYEEELRLRSGNVLEEAKTWLNIALSREEAGDAYELLAPCFQKALSCAQQAQRPQLQRQVLQHLHTVQLRLQPQEAPETETRLRELSVAEDEDEEEEAEEAAATAESEALEAGEVELSEGEDDTDGLTPQLEEDEELQGHLGRRKGSKWNRRNDMGETLLHRACIEGQLRRVQDLVRQGHPLNPRDYCGWTPLHEACNYGHLEIVRFLLDHGAAVDDPGGQGCEGITPLHDALNCGHFEVAELLLERGASVTLRTRKGLSPLETLQQWVKLYRRDLDLETRQKARAMEMLLQAAASGQDPHSSQAFHTPSSLLFDPETSPPLSPCPEPPSNSTRLPEASQAHVRVSPGQAAPAMARPRRSRHGPASSSSSSEGEDSAGPARPSQKRPRCSATAQRVAAWTPGPASNREAATASTSRAAYQAAIRGVGSAQSRLGPGPPRGHSKALAPQAALIPEEECLAGDWLELDMPLTRSRRPRPRGTGDNRRPSSTSGSDSEESRPRARAKQVRLTCMQSCSAPVNAGPSSLASEPPGSPSTPRVSEPSGDSSAAGQPLGPAPPPPIRVRVQVQDHLFLIPVPHSSDTHSVAWLAEQAAQRYYQTCGLLPRLTLRKEGALLAPQDLIPDVLQSNDEVLAEVTSWDLPPLTDRYRRACQSLGQGEHQQVLQAVELQGLGLSFSACSLALDQAQLTPLLRALKLHTALRELRLAGNRLGDKCVAELVAALGTMPSLALLDLSSNHLGPEGLRQLAMGLPGQATLQSLEELDLSMNPLGDGCGQSLASLLHACPLLSTLRLQACGFGPSFFLSHQTALGSAFQGELTRHSLSTP

SEQ ID NO: 12499 - protein, 555 aa, Homo sapiens
VTSFHTQHQHQYLELAHSLRNHTELQRAWATIGRTHLDIYDHCQSRDALLQAQAAFEKSLAIVDEELEGTLAQGELNEMRTRLYLNLGLTFESLQQTALCNDYFRKSIFLAEQNHLYEDLFRARYNLGTIHWRAGQHSQAMRCLEGARECAHTMSLGDSAKPLLLCSPGPPRPGRLFGCQASPEEGLQAGLPEACAEGSHLSEPPACAAVVRLQQQLEEAEGRDPQGAMVICEQLGDLFSKAGDFPRAAEAYQKQLRFAELLDRPGAERAIIHVSLATTLGDMKDHHGAVRHYEEELRLRSGNVLEEAKTWLNIALSREEARCLRAAGPVLPESAQLCPAGPASPAAEAGLAASPYRAAESPRAPETETRLRELSVAEDEDEEEEAEEAAHSGERSPGGRRGGALRGRGRHRWPDPAAGGGRGASGPPGPAKGSKWNRRNDMGETLLHRACIEGQLRRVQDLVRQGHPLNPRDYCGWTPLHEACNYGHLEIVRFLLDHGAAVDDPGGQGCEGITPLHDALNCGHFEVAELLLERGASVTLRTRKASARWRRCSSG

SEQ ID NO: 12500 - protein, 1222 aa, Homo sapiens
LDDRKRGGRAGARAMERLRDVRERLQAWERAFRRQRGRRPSQDDVEAAPEETRALYREYRTLKRTTGQAGGGLRSSESLPAAAEEAPEPRCWGPHLNRAATKSPQSTPGRSRQGSVPDYGQRLKANLKGTLQAGPALGRRPWPLGRASSKASTPKPPGTGPVPSFAEKVSDEPPQLPEPQPRPGRLQHLQASLSQRLGSLDPGWLQRCHSEVPDFLGAPKACRPDLGSEESQLLIPGESAVLGPGAGSQGPEASAFQEVSIRVGSPQPSSSGGEKRRWNEEPWESPAQVQQESSQAGPPSEGAGAVAVEEDPPGEPVQAQPPQPCSSPSNPRYHGLSPSSQARAGKAEGTAPLHIFPRLARHDRGNYVRLNMKQKHYVRGRALRSRLLRKQAWKQKWRKKGECFGGGGATVTTKESCFLNEQFDHWAAQCPRPASEEDTDAVGPEPLVPSPQPVPEVPSLDPTVLPLYSLGPSGQLAETPAEVFQALEQLGHQAFRPGQERAVMRILSGISTLLVLPTGAGKSLCYQLPALLYSRRSPCLTLVVSPLLSLMDDQVSGLPPCLKAACIHSGMTRKQRESVLQKIRAAQVHVLMLTPEALVGAGGLPPAAQLPPVAFACIDEAHCLSQWSHNFRPCYLRVCKVLRERMGVHCFLGLTATATRRTASDVAQHLAVAEEPDLHGPAPVPTNLHLSVSMDRDTDQALLTLLQGKRFQNLDSIIIYCNRREDTERIAALLRTCLHAAWVPGSGGRAPKTTAEAYHAGMCSRERRRVQRAFMQGQLRVVVATVAFGMGLDRPDVRAVLHLGLPPSFESYVQAVGRAGRDGQPAHCHLFLQPQGEDLRELRRHVHADSTDFLAVKRLVQRVFPACTCTCTRPPSEQEGAVGGERPVPKYPPQEAEQLSHQAAPGPRRVCMGHERALPIQLTVQALDMPEEAIETLLCYLELHPHHWLELLATTYTHCRLNCPGGPAQLQALAHRCPPLAVCLAQQLPEDPGQGSSSVEFDMVKLVDSMGWELASVRRALCQLQWDHEPRTGVRRGTGVLVEFSELAFHLRSPGDLTAEEKDQICDFLYGRVQARERQALARLRRTFQAFHSVAFPSCGPCLEQQDEERSTRLKDLLGRYFEEEEGQEPGGMEDAQGPEPGQARLQDWEDQVRCDIRQFLSLRPEEKFSSRAVARIFHGIGSPCYPAQVYGQDRRFWRKYLHLSFHALVGLATEELLQVAR

SEQ ID NO: 12501 - protein, 1249 aa, Homo sapiens
LRGRFAGRSQARRPGGRARHGAAAGRAGAAAGVGARVPTAARAATEPGAGCPGAEGLRARPAADAFPLQDDVEAAPEETRALYREYRTLKRTTGQAGGGLRSSESLPAAAEEAPEPRCWGPHLNRAATKSPQSTPGRSRQGSVPDYGQRLKANLKGTLQAGPALGRRPWPLGRASSKASTPKPPGTGPVPSFAEKVSDEPPQLPEPQPRPGRLQHLQASLSQRLGSLDPGWLQRCHSEVPDFLGAPKACRPDLGSEESQLLIPGESAVLGPGAGSQGPEASAFQEVSIRVGSPQPSSSGGEKRRWNEEPWESPAQVQQESSQAGPPSEGAGAVAVEEDPPGEPVQAQPPQPCSSPSNPRYHGLSPSSQARAGKAEGTAPLHIFPRLARHDRGNYVRLNMKQKHYVRGRALRSRLLRKQAWKQKWRKKGECFGGGGATVTTKESCFLNEQFDHWAAQCPRPASEEDTDAVGPEPLVPSPQPVPEVPSLDPTVLPLYSLGPSGQLAETPAEVFQALEQLGHQAFRPGQERAVMRILSGISTLLVLPTGAGKSLCYQLPALLYSRRSPCLTLVVSPLLSLMDDQVSGLPPCLKAACIHSGMTRKQRESVLQKIRAAQVHVLMLTPEALVGAGGLPPAAQLPPVAFACIDEAHCLSQWSHNFRPCYLRVCKVLRERMGVHCFLGLTATATRRTASDVAQHLAVAEEPDLHGPAPVPTNLHLSVSMDRDTDQALLTLLQGKRFQNLDSIIIYCNRREDTERIAALLRTCLHAAWVPGSGGRAPKTTAEAYHAGMCSRERRRVQRAFMQGQLRVVVATVAFGMGLDRPDVRAVLHLGLPPSFESYVQAVGRAGRDGQPAHCHLFLQPQGEDLRELRRHVHADSTDFLAVKRLVQRVFPACTCTCTRPPSEQEGAVGGERPVPKYPPQEAEQLSHQAAPGPRRVCMGHERALPIQLTVQALDMPEEAIETLLCYLELHPHHWLELLATTYTHCRLNCPGGPAQLQALAHRCPPLAVCLAQQLPEDPGQGSSSVEFDMVKLVDSMGWELASVRRALCQLQWDHEPRTGVRRGTGVLVEFSELAFHLRSPGDLTAEEKDQICDFLYGRVQARERQALARLRRTFQAFHSVAFPSCGPCLEQQDEERSTRLKDLLGRYFEEEEGQEPGGMEDAQGPEPGQARLQDWEDQVRCDIRQFLSLRPEEKFSSRAVARIFHGIGSPCYPAQVYGQDRRFWRKYLHLSFHALVGLATEELLQVAR

SEQ ID NO: 12502 - protein, 97 aa, Homo sapiens
LKRTTGQAGGGLRSSESLPAAAEEAPEPRCWGPHLNRAATKSPQSTPGRSRQGSVPDYGQRLKANLKGTLQKKSVMSLHSSLSPSQGQAGSSICRHP

SEQ ID NO: 12503 - protein, 728 aa, Homo sapiens
LDPVLWEGPFRARCDCAAPRRFLGGFPGSSKQVSSGRLQARAVSCLLLETTAAHAHRMAATFQLPGHQEMPLTFQDVAVYFSQAEGRQLGPQQRALYRDVMLENYGNVASLGFPVPKPELISQLEQGKELWVLNLLGAEEPDILKSCQKDSEVGTKKELSILNQKFSEEVKTPEFVSRRLLRDNAQAAEFREAWGREGKLKERVGNSAGQSLNKPNIHKRVLTEATVGRERSLGERTQECSAFDRNLNLDQNVVRLQRNKTGERVFKCDICSKTFKYNSDLSRHQRSHTGEKPYECGRCGRAFTHSSNLVLHHHIHTGNKPFKCDECGKTFGLNSHLRLHRRIHTGEKPFGCGECGKAFSRSSTLIQHRIIHTGEKPYKCNECGRGFSQSPQLTQHQRIHTGEKPHECSHCGKAFSRSSSLIQHERIHTGEKPHKCNQCGKAFSQSSSLFLHHRVHTGEKPYVCNECGRAFGFNSHLTEHVRIHTGEKPYVCNECGKAFRRSSTLVQHRRVHTGEKPYQCVECGKAFSQSSQLTLHQRVHTGEKPYDCGDCGKAFSRRSTLIQHQKVHSGETRKCRKHGPAFVHGSSLTADGQIPTGEKHGRAFNHGANLILRWTVHTGEKSFGCNEYGKAFSPTSRPTEDQIMHAGEKPYKCQECGNAFSGKSTLIQHQVTHTGQKPCHCSVYGKAFSQSSQLTPPQQTRVGEKPALNDGSKRYFIHIKKIFQERHF

SEQ ID NO: 12504 - protein, 119 aa, Homo sapiens
LSGRPDVSHMVRGVLPCAWSSASILGDGGVVAGGGRIDKPILKAGRAYHKYKAKRNCWPRVRGVAMNPVEHPFGGGNHQHIGKPSTIRRDAPAGRKVGLIAARRTGRLRGTKTVQEKEN

SEQ ID NO: 12505 - protein, 72 aa, Homo sapiens
VKHRKGAARLRAVDFAERHGYIKGIVKDIIHDPGRGAPLAKVVFRDPYRLSPQPTELWLVWWLEVAELTNPS

SEQ ID NO: 12506 - protein, 89 aa, Homo sapiens
LMLLPLAAQLNIGNVLPVGTMPEGTIVCCLEEKPGDRGKLARASGNYATVISHNPETKKTRVKLPSGSKKVISSANRAVVGEYQAAVEC

SEQ ID NO: 12507 - protein, 94 aa, Homo sapiens
MGRVIRGQRKGAGSVFRAHVKHRKGAARLRAVDFAERHGYIKGIVKDIIHDPGRGAPLAKVVFRDPYRFKKRTELFIAAEGIHTGQFVYCGKKG

SEQ ID NO: 12508 - protein, 80 aa, Homo sapiens
MGRVIRGQRKGAGSVFRAHVKHRKGAARLRAVDFAERHGYIKGIVKVVFRDPYRFKKRTELFIAAEGIHTGQFVYCGKKG

SEQ ID NO: 12509 - protein, 67 aa, Homo sapiens
LPAPGAGGDSDSGSVGWSRMESPSRAGGVGLGKAASPLCSESSGYCGAFPRRSARRHLHLGPTSWAG

SEQ ID NO: 12510 - protein, 52 aa, Homo sapiens
LLLSPTAAYSAQVQPVDGATRKKSQRVCRPRSIWRAKATLDMPDEEFRFNFF

SEQ ID NO: 12511 - protein, 62 aa, Homo sapiens
LVGVACACGCECVCVRARAAENQEVTAAKRTQHTDMFDCRDMTRAREEAAAAGAGPRAVARA

SEQ ID NO: 12512 - protein, 684 aa, Homo sapiens [sequence omitted]

SEQ ID NO: 12513 - protein, 78 aa, Homo sapiens
VRKMLRHAEASAIVEYAYNDKAILEQRNMLTEELYGNTFQLYKSADHRTLDKVLEVQPEKLELIMDEMKQILTPMAQK

SEQ ID NO: 12514 - protein, 126 aa, Homo sapiens
LLHPRVPWCPFQIVPSFINKDTETIIIMLEFIANLPPELKAALSERQPSLPELQQYVPALKDSNLSFEEFKKLIRNRQSEAADSNPSELKYLGLDTHSQKKRRPYVALFEKCCLIGCTKRSLAKYC

SEQ ID NO: 12515 - protein, 104 aa, Homo sapiens
LVVDPVTSEHELTCQAEGYPKAEVIWTSSDHQVLSGKTTTTNSKREEKLFNVTSTLRINTTTNEIFYCTFRRLDPEENHTAELVIPGNILNVSIKICLTLSPST

SEQ ID NO: 12516 - protein, 267 aa, Homo sapiens
MINFIYLAKSTKKTMLTLTLVCAITFLLVCSGTFFPYSSNPANPKPKRVFLQHMTRTFHDLEGNAVKRDSGIWINGFDYTGISHITPHIPEINDSIRAHCEENAPLCGFPWYLPVHFLIRKNWYLPAPEVSPRNPPHFRLISKEQTPWDSIKLTFEATGPSHMSFYVRAHKGSTLSQWSLGNGTPVTSKGGDYFVFYSHGLQASAWQFWIEVQVSEEHPEGMVTVAIAAHYLSGEDKRSPQLDALKEKFPDWTFPSAWVCTYDLFVF

SEQ ID NO: 12517 - protein, 1338 aa, Homo sapiens
LPHSSQCYAGAVIPIPDYCSRMQLFFSCEGKWYHRRQAVKELHSTLIRLLNELLPWEPKLMKAFQRNRSRLKKDYDDFRRQPDHDTFNRELWTTDEGEGDLGKDSPKGEISKSIDSTEPLDILEKDHFDSDDMKLSEIDFPMARSKLLKKELPSKDLPKTLLKTLKRQSKQTDYVDDSTKELSPRKKAKLSTNETTVENLESDVQIDCFSESKHTEPSFPESFASLDSVPVSTLQKGTKPIQALLAKNIGNKVTLTNQLPPSTGRNALAVEKPVLSPPEASPIKPALTCHTNTKGPLQMVYKMPCGQWLPIDLQNSSVKIQVQPMVDPKTGEKIMQQVLILPKNFVIQHKEGKAVAKEVPPLQQKGTEQHCSSFPQTTNINSSLASVFVNSPGTVSTQLPNTAFNKTITPLSNISSARPQPLSPVTSVSNLLTPSVKTSQSEAGKAKNAVSAATFSLPSASPTISSTGQPLSSTTTLNGSTNPGSSFNCFAQQTADSSEAKQELKTVCIRDSQSILVRTRGGNTGVVKVQTNPDQNSPNTVSSSSVFTFAPQLQAFLVPKSTTSSSAFSPVAGTTTTSSLSPFSQTPTSVSIPASFAPSMGKNLKLTLGHTTGSGDLGHVIDKTSHMPSSPLKSSICSSTLLPSTTSSSVSVISISAANFGQNNANIIHTPTKQQQVDYITKSYPVTRSEATAATNGDVISGTPVQKLMLVSAPSILSSGNGTAINMTPALTSTGVSAQKLVFINAPVPSGTSTPTLVAESLKQTLPPPLHKAYVKTPEQPQIVLIPSTVGTPIKINSSPAVSQIKDVKIGLNIGQAIVNTSGTVPAIPSINILQNVTPKGEDKSSKGYILPLSTSGNSVPVSSNFVSQNITPVNESVVSSARAVNVLSVTGANLSLGSFPVTSASASAGAQPPVLVSGNDTSSRIMPILSNRLCSSSLGNTVAISTVKTGHLASSVLISTTQPVVSPKCLTSALQIPVTVALPTPATTSPKIINTVPHSAAVPGATRSVSISKRQSRTSLQFHSPGISTTVPTNVNTNKPQTELSSLSTSPGKITNTSNFASLPNQQALVKTPSYSSAPGGTTIHTASAPSNVTSLVGSQFSEPCIQQKIVINTSTPLAPGTQIMINGTRFIVPPQGLGAGSHVLLISTNPKYGAPLVLNSGQGIQSTPIDNSAQKITLASNNSLSGQPLQHPLRSPTKFINSFGNASSIPTVHTSPQLINTTAKVPVPPPVPTVSLTSVIKSPATLLAKTSLVSAICPSNPPLPSSTSVFHLDPPVKKLLVSPEGAILNTINTPASKVSSLSPSLSQIVVSASRSPASVFPAFQSSGLEKPDRAAS

SEQ ID NO: 12518 - protein, 415 aa, Homo sapiens
VRVTRNGVTQVFGAQGEYAGLATIRAYLNQKGEGHRTVCLIPKSAHGTNPASAHMAGMKIQPVEVDKYGNIDAVHLKAMVDKHKENLAAIMITYPSTNGVFEENISDVCDLIHQHGGQVYLDGANMNAQVGICRPGDFGSDVSHLNLHKTFCIPHGGGGPGMGPIGVKKHLAPFLPNHPVISLKRNEDACPVGTVSAAPWGSSSILPISWAYIKMMGGKGLKQATETAILNANYMAKRLETHYRILFRGARGYVGHEFILDTRPFKKSANIEAVDVAKRLQDYGFHAPTMSWPVAGTLMVEPTESEDKAELDRFCDAMISIRQEIADIEEGRIDPRVNPLKMSPHSLTCVTSSHWDRPYSREVAAFPLPFVKPENKFWPTIARIDDIYGDQHLVCTCPPMEVYESPFSEQKRASS

SEQ ID NO: 12519 - protein, 413 aa, Homo sapiens
MTGVREGTQAGAQGEYAGLATIRAYLNQKGEGHRTVCLIPKSAHGTNPASAHMAGMKIQPVEVDKYGNIDAVHLKAMVDKHKENLAAIMITYPSTNGVFEENISDVCDLIHQHGGQVYLDGANMNAQVGICRPGDFGSDVSHLNLHKTFCIPHGGGGPGMGPIGVKKHLAPFLPNHPVISLKRNEDACPVGTVSAAPWGSSSILPISWAYIKMMGGKGLKQATETAILNANYMAKRLETHYRILFRGARGYVGHEFILDTRPFKKSANIEAVDVAKRLQDYGFHAPTMSWPVAGTLMVEPTESEDKAELDRFCDAMISIRQEIADIEEGRIDPRVNPLKMSPHSLTCVTSSHWDRPYSREVAAFPLPFVKPENKFWPTIARIDDIYGDQHLVCTCPPMEVYESPFSEQKRASS

SEQ ID NO: 12520 - protein, 788 aa, Homo sapiens
VCRVPRYTGVLTELKLPCEMDFSGKDVSGVLFQYPDTEGKVEDFTELVERAHQSGSLACCATDLLALCILRPPGEFGVDIALGSSQRFGVPLGYGGPHAAFFAVRESLVRMMPGRMVGVTRDATGKEVYRLALQTREQHIRRDKATSNICTAQALLANMAAMFAIYHGSHGLEHIARRVHNATLILSEGLKRAGHQLQHDLFFDTLKIQCGCSVKEVLGRAAQRQINFRLFEDGTLGISLDETVNEKDLDDLLWIFGCESSAELVAESMGEECRGIPGSVFKRTSPFLTHQVFNSYHSETNIVRYMKKLENKDISLVHSMIPLGSCTMKLNSSSELAPITWKEFANIHPFVPLDQAQGYQQLFRELEKDLCELTGYDQVCFQPNSGAQGEYAGLATIRAYLNQKGEGHRTVCLIPKSAHGTNPASAHMAGMKIQPVEVDKYGNIDAVHLKAMVDKHKENLAAIMITYPSTNGVFEENISDVCDLIHQHGGQVYLDGANMNAQVGICRPGDFGSDVSHLNLHKTFCIPHGGGGPGMGPIGVKKHLAPFLPNHPVISLKRNEDACPVGTVSAAPWGSSSILPISWAYIKMMGGKGLKQATETAILNANYMAKRLETHYRILFRGARGYVGHEFILDTRPFKKSANIEAVDVAKRLQDYGFHAPTMSWPVAGTLMVEPTESEDKAELDRFCDAMISIRQEIADIEEGRIDPRVNPLKMSPHSLTCVTSSHWDRPYSREVAAFPLPFVKPENKFWPTIARIDDIYGDQHLVCTCPPMEVYESPFSEQKRASS

SEQ ID NO: 12521 - protein, 915 aa, Homo sapiens
LKIELWGENEILATLHAISSKNQIWRSYIGMGYYNCSVPQTILRNLLENSGWITQYTPYQPEVSQGRLESLLNYQTMVCDITGLDMANASLLDEGTAAAEALQLCYRHNKRRKFLVDPRCHPQTIAVVQTRAKYTGVLTELKLPCEMDFSGKDVSGVLFQYPDTEGKVEDFTELVERAHQSGSLACCATDLLALCILRPPGEFGVDIALGSSQRFGVPLGYGGPHAAFFAVRESLVRMMPGRMVGVTRDATGKEVYRLALQTREQHIRRDKATSNICTAQALLANMAAMFAIYHGSHGLEHIARRVHNATLILSEGLKRAGHQLQHDLFFDTLKIQCGCSVKEVLGRAAQRQINFRLFEDGTLGISLDETVNEKDLDDLLWIFGCESSAELVAESMGEECRGIPGSVFKRTSPFLTHQVFNSYHSETNIVRYMKKLENKDISLVHSMIPLGSCTMKLNSSSELAPITWKEFANIHPFVPLDQAQGYQQLFRELEKDLCELTGYDQVCFQPNSGAQGEYAGLATIRAYLNQKGEGHRTVCLIPKSAHGTNPASAHMAGMKIQPVEVDKYGNIDAVHLKAMVDKHKENLAAIMITYPSTNGVFEENISDVCDLIHQHGGQVYLDGANMNAQVGICRPGDFGSDVSHLNLHKTFCIPHGGGGPGMGPIGVKKHLAPFLPNHPVISLKRNEDACPVGTVSAAPWGSSSILPISWAYIKMMGGKGLKQATETAILNANYMAKRLETHYRILFRGARGYVGHEFILDTRPFKKSANIEAVDVAKRLQDYGFHAPTMSWPVAGTLMVEPTESEDKAELDRFCDAMISIRQEIADIEEGRIDPRVNPLKMSPHSLTCVTSSHWDRPYSREVAAFPLPFVKPENKFWPTIARIDDIYGDQHLVCTCPPMEVYESPFSEQKRASS

SEQ ID NO: 12522 - protein, 864 aa, Homo sapiens
LITQYTPYQPEVSQGRLESLLNYQTMVCDITGLDMANASLLDEGTAAAEALQLCYRHNKRRKFLVDPRCHPQTIAVVQTRAKYTGVLTELKLPCEMDFSGKDVSGVLFQYPDTEGKVEDFTELVERAHQSGSLACCATDLLALCILRPPGEFGVDIALGSSQRFGVPLGYGGPHAAFFAVRESLVRMMPGRMVGVTRDATGKEVYRLALQTREQHIRRDKATSNICTAQALLANMAAMFAIYHGSHGLEHIARRVHNATLILSEGLKRAGHQLQHDLFFDTLKIQCGCSVKEVLGRAAQRQINFRLFEDGTLGISLDETVNEKDLDDLLWIFGCESSAELVAESMGEECRGIPGSVFKRTSPFLTHQVFNSYHSETNIVRYMKKLENKDISLVHSMIPLGSCTMKLNSSSELAPITWKEFANIHPFVPLDQAQGYQQLFRELEKDLCELTGYDQVCFQPNSGAQGEYAGLATIRAYLNQKGEGHRTVCLIPKSAHGTNPASAHMAGMKIQPVEVDKYGNIDAVHLKAMVDKHKENLAAIMITYPSTNGVFEENISDVCDLIHQHGGQVYLDGANMNAQVGICRPGDFGSDVSHLNLHKTFCIPHGGGGPGMGPIGVKKHLAPFLPNHPVISLKRNEDACPVGTVSAAPWGSSSILPISWAYIKMMGGKGLKQATETAILNANYMAKRLETHYRILFRGARGYVGHEFILDTRPFKKSANIEAVDVAKRLQDYGFHAPTMSWPVAGTLMVEPTESEDKAELDRFCDAMISIRQEIADIEEGRIDPRVNPLKMSPHSLTCVTSSHWDRPYSREVAAFPLPFVKPENKFWPTIARIDDIYGDQHLVCTCPPMEVYESPFSEQKRASS

SEQ ID NO: 12523 - protein, 1081 aa, Homo sapiens
VSWLSAAPIHCPRASIHLSGRLSSERGSRPGAAATRGTEARRGAKSAADPCGPGQGTVAAAMQSCARAWGLRLGRGVGGGRRLAGGSGPCWAPRSRDSSSGGGDSAAAGASRLLERLLPRHDDFARRHIGPGDKDQREMLQTLGLASIDELIEKTVPANIRLKRPLKMEDPVCENEILATLHAISSKNQIWRSYIGMGYYNCSVPQTILRNLLENSGWITQYTPYQPEVSQGRLESLLNYQTMVCDITGLDMANASLLDEGTAAAEALQLCYRHNKRRKFLVDPRCHPQTIAVVQTRAKYTGVLTELKLPCEMDFSGKDVSGVLFQYPDTEGKVEDFTELVERAHQSGSLACCATDLLALCILRPPGEFGVDIALGSSQRFGVPLGYGGPHAAFFAVRESLVRMMPGRMVGVTRDATGKEVYRLALQTREQHIRRDKATSNICTAQALLANMAAMFAIYHGSHGLEHIARRVHNATLILSEGLKRAGHQLQHDLFFDTLKIQCGCSVKEVLGRAAQRQINFRLFEDGTLGISLDETVNEKDLDDLLWIFGCESSAELVAESMGEECRGIPGSVFKRTSPFLTHQVFNSYHSETNIVRYMKKLENKDISLVHSMIPLGSCTMKLNSSSELAPITWKEFANIHPFVPLDQAQGYQQLFRELEKDLCELTGYDQVCFQPNSGAQGEYAGLATIRAYLNQKGEGHRTVCLIPKSAHGTNPASAHMAGMKIQPVEVDKYGNIDAVHLKAMVDKHKENLAAIMITYPSTNGVFEENISDVCDLIHQHGGQVYLDGANMNAQVGICRPGDFGSDVSHLNLHKTFCIPHGGGGPGMGPIGVKKHLAPFLPNHPVISLKRNEDACPVGTVSAAPWGSSSILPISWAYIKMMGGKGLKQATETAILNANYMAKRLETHYRILFRGARGYVGHEFILDTRPFKKSANIEAVDVAKRLQDYGFHAPTMSWPVAGTLMVEPTESEDKAELDRFCDAMISIRQEIADIEEGRIDPRVNPLKMSPHSLTCVTSSHWDRPYSREVAAFPLPFVKPENKFWPTIARIDDIYGDQHLVCTCPPMEVYESPFSEQKRASS

SEQ ID NO: 12524 - protein, 90 aa, Homo sapiens
LDTRPFKKSANIEAVDVAKRLQDYGFHAPTMSWPVAGTLMVEPTESEDKAELDRFCDAMISIRQEIADIEEGRIDPRVNPLKVRRPWNIA

SEQ ID NO: 12525 - protein, 26 aa, Homo sapiens
MLHLSSIHLYPSIAPQSFFPTSVPGQ

SEQ ID NO: 12526 - protein, 617 aa, Homo sapiens
LIEKTVPANIRLKRPLKMEDPVCENEILATLHAISSKNQIWRSYIGMGYYNCSVPQTILRNLLENSGWITQYTPYQPEVSQGRLESLLNYQTMVCDITGLDMANASLLDEGTAAAEALQLCYRHNKRRKFLVDPRCHPQTIAVVQTRAKYTGVLTELKLPCEMDFSGKDVSGVLFQYPDTEGKVEDFTELVERAHQSGSLACCATDLLALCILRPPGEFGVDIALGSSQRFGVPLGYGGPHAAFFAVRESLVRMMPGRMVGVTRDATGKEVYRLALQTREQHIRRDKATSNICTAQALLANMAAMFAIYHGSHGLEHIARRVHNATLILSEGLKRAGHQLQHDLFFDTLKIQCGCSVKEVLGRAAQRQINFRLFEDGTLGISLDETVNEKDLDDLLWIFGCESSAELVAESMGEECRGIPGSVFKRTSPFLTHQVFNSYHSETNIVRYMKKLENKDISLVHSMIPLGSCTMKLNSSSELAPITWKEFANIHPFVPLDQAQGYQQLFRELEKDLCELTGYDQVCFQPNSGAQGEYAGLATIRAYLNQKGEGHRTVCLIPKSAHGTNPASAHMAGMKIQPVEVDKYGNIDAVHLKAMVLVFSLADGRGRDGECWWGSGT

SEQ ID NO: 12527 - protein, 26 aa, Homo sapiens
VMGTVTIPILHISQAHRHREMKLLVM

SEQ ID NO: 12528 - protein, 65 aa, Homo sapiens
VRVGAQEDVWRVDYIRSSPAGPQPALPGKVLCTCFLLLREYLSPPERMGYACVQRTRRCAPASLS

SEQ ID NO: 12529 - protein, 200 aa, Homo sapiens
VRSEQLSPSAEQVSQISQISLGRRPLSSLPPPPSRALAPTRAPDTALTIMEVAEVESPLNPSCKIMTFRPSMEEFREFNKYLAYMESKGAHRAGLAKVIPPKEWKPRQCYDDIDNLLIPAPIQQMVTGQSGLFTQYNIQKKAMTVKEFRQLANSGKYCTPRYLDYEDLERKYWKNLTFVAPIYGADINGSIYDEVHSYLQ

SEQ ID NO: 12530 - protein, 114 aa, Homo sapiens
LLIPAPIQQMVTGQSGLFTQYNIQKKAMTVKEFRQLANSGKYCTPRYLDYEDLERKYWKNLTFVAPIYGADINGSIYDEFLPVRCNLANVQASEKKVELMGHPDPGLKVACLSA

SEQ ID NO: 12531 - protein, 200 aa, Homo sapiens
LWSWAVILSPLEETKSSSTVKEEKSKACEKVISVGQTVITKHRNTRYYSCRVMAVTSQTFYEVMFDDGSFSRDTFPEDIVSRDCLKLGPPAEGEVVQVKWPDGKLYGAKYFGSNIAHMYQVEFEDGSQIAMKREDIYTLDEELPKRVKARFVSAGRCHLGTCQVNSLSSPHVSQAQQETYLGFWINSKKSQCNIFLSGTY

SEQ ID NO: 12532 - protein, 70 aa, Homo sapiens
LQSVVTRVVNLPLVSSTYDLMSSAYLSTKDQYPYLKSVCEMAENGVKTITSVAMTSALPIIQKLEPQSEF

SEQ ID NO: 12533 - protein, 92 aa, Homo sapiens
MIESFEFLGKKPRTKAPKIQRLVTPRVLQHKRRRIALKKQRTKKNKEEAAEYAKLLAKRMKEAKEKRQEQIAKRRRLSSLRASTSKSESSQK

SEQ ID NO: 12534 - protein, 482 aa, Homo sapiens
VMSTLCPPPSPAVAKTEIALSGKSPLLAATFAYWDNILGPRVRHIWAPKTEQVLLSDGEITFLANHTLNGEILRNAESGAIDVKFFVLSEKGVIIVSLIFDGNWNGDRSTYGLSIILPQTELSFYLPLHRVCVDRLTHIIRKGRIWMHKERQENVQKIILEGTERMEDQGQSIIPMLTGEVIPVMELLSSMKSHSVPEEIDIADTVLNDDDIGDSCHEGFLLNAISSHLQTCGCSVVVGSSAEKVNKIVRTLCLFLTPAERKCSRLCEAESSFKYESGLFVQGLLKDSTGSFVLPFRQVMYAPYPTTHIDVDVNTVKQMPPCHEHIYNQRRYMRSELTAFWRATSEEDMAQDTIIYTDESFTPDLNIFQDVLHRDTLVKAFLDQVFQLKPGLSLRSTFLAQFLLVLHRKALTLIKYIEDDTQKGKKPFKSLRNLKIDLDLTAEGDLNIIMALAEKIKPGLHSFIFGRPFYTSVQERDVLMTF

SEQ ID NO: 12535 - protein, 253 aa, Homo sapiens
VMSTLCPPPSPAVAKTEIALSGKSPLLAATFAYWDNILGPRVRHIWAPKTEQVLLSDGEITFLANHTLNGEILRNAESGAIDVKFFVLSEKGVIIVSLIFDGNWNGDRSTYGLSIILPQTELSFYLPLHRVCVDRLTHIIRKGRIWMHKERQENVQKIILEGTERMEDQGQSIIPMLTGEVIPVMELLSSMKSHSVPEEIDIADTVLNDDDIGDSCHEGFLLNAISSHLQTCGCSVVVGSSAEKVNKVVYFII

SEQ ID NO: 12536 - protein, 223 aa, Homo sapiens
VMSTLCPPPSPAVAKTEIALSGKSPLLAATFAYWDNILGPRVRHIWAPKTEQVLLSDGEITFLANHTLNGEILRNAESGAIDVKFFVLSEKGVIIVSLIFDGNWNGDRSTYGLSIILPQTELSFYLPLHRVCVDRLTHIIRKGRIWMHKERQENVQKIILEGTERMEDQGQSIIPMLTGEVIPVMELLSSMKSHSVPEEIDIADTVLNDDDIGDSCHEGFLLK

SEQ ID NO: 12537 - protein, 81 aa, Homo sapiens
LLLTHNSWEGGEGTPEREVWAQASPPTHCVSNLSPDAIWHFADNQLFVSGPNGTAGIFATYPSGHLDMINGFFDQVWAGDV

SEQ ID NO: 12538 - protein, 1024 aa, Homo sapiens
VMGPAPAGEQLRGATGEPEVMEPALEGTGKEGKKASSRKRTLAEPPAKGLLQPVKLSRAELYKEPTNEELNRLRETEILFHSSLLRLQVEELLKEVRLSEKKKDRIDAFLREVNQRVVRVPSVPETELTDQAWLPAGVRVPLHQVPYAVKGCFRFLPPAQVTVVGSYLLGTCIRPDINVDVALTMPREILQDKDGLNQRYFRKRALYLAHLAHHLAQDPLFGSVCFSYTNGCHLKPSLLLRPRGKDERLVTVRLHPCPPPDFFRPCRLLPTKNNVRSAWYRGQSPAGDGSPEPPTPRYNTWVLQDTVLESHLQLLSTILSSAQGLKDGVALLKVWLRQRELDKGQGGFTGFLVSMLVVFLVSTRKIHTTMSGYQVLRSVLQFLATTDLTVNGISLCLSSDPSLPALADFHQAFSVVFLDSSGHLNLCADVTASTYHQVQHEARLSMMLLDSRADDGFHLLLMTPKPMIRAFDHVLHLRPLSRLQAACHRLKLWPELQDNGGDYVSAALGPLTTLLEQGLGARLNLLAHSRPPVPEWDISQDPPKHKDSGTLTLGLLLRPEGLTSVLELGPEADQPEAAKFRQFWGSRSELRRFQDGAIREAVVWEAASMSQKRLIPHQVVTHLLALHADIPETCVHYVGGPLDALIQGLKETSSTGEEALVAAVRCYDDLSRLLWGLEGLPLTVSAVQGAHPVLRYTEVFPPTPVRPAFSFYETLRERSSLLPRLDKPCPAYVEPMTVVCHLEGSGQWPQDAEAVQRVRAAFQLRLAELLTQQHGLQCRATATHTDVLKDGFVFRIRVAYQREPQILKEVQSPEGMISLRDTAASLRLERDTRQLPLLTSALHGLQQQHPAFSGVARLAKRWVRAQLLGEGFADESLDLVAAALFLHPEPFTPPSSPQVGFLRFLFLVSTFDWKNNPLFVNLNNELTVEEQVEIRSGFLAARAQLPVMVIVTPQDRKNSVWTQDGPSAQILQQLVVLAAEALPMLEKQLMDPRGPGDIRMGPSENVALLSHITDTEQWKGAICV

SEQ ID NO: 12539 - protein, 210 aa, Homo sapiens
VVRGTHWAEGIAWDGKSGGEGTEARRPQVWGDRMGSPLAPRAPAESQHSLSLAGKDERLVTVRLHPCPPPDFFRPCRLLPTKNNVRSAWYRGQSPAGDGSPEPPTPRYNTWVLQDTVLESHLQLLSTILSSAQGLKDGVALLKVWLRQRELDKGQGGFTGFLVSMLVVFLVSTRKIHTTMSGYQDLCLDLACPSLQCQAFRWDPAKMWPF

SEQ ID NO: 12540 - protein, 700 aa, Homo sapiens
VMGPAPAGEQLRGATGEPEVMEPALEGTGKEGKKASSRKRTLAEPPAKGLLQPVKLSRAELYKEPTNEELNRLRETEILFHSSLLRLQVEELLKEVRLSEKKKDRIDAFLREVNQRVVRVPSVPETELTDQAWLPAGVRVPLHQVPYAVKGCFRFLPPAQVTVVGSYLLGTCIRPDINVDVALTMPREILQDKDGLNQRYFRKRALYLAHLAHHLAQDPLFGSVCFSYTNGCHLKPSLLLRPRGKDERLVTVRLHPCPPPDFFRPCRLLPTKNNVRSAWYRGQSPAGDGSPEPPTPRYNTWVLQDTVLESHLQLLSTILSSAQGLKDGVALLKVWLRQRELDKGQGGFTGFLVSMLVVFLVSTRKIHTTMSGYQVLRSVLQFLATTDLTVNGISLCLSSDPSLPALADFHQAFSVVFLDSSGHLNLCADVTASTYHQVQHEARLSMMLLDSRADDGFHLLLMTPKPMIRAFDHVLHLRPLSRLQAACHRLKLWPELQDNGGDYVSAALGPLTTLLEQGLGARLNLLAHSRPPVPEWDISQDPPKHKDSGTLTLGLLLRPEGLTSVLELGPEADQPEAAKFRQFWGSRSELRRFQDGAIREAVVWEAASMSQKRLIPHQVVTHLLALHADIPETCVHYVGGPLDALIQGLKEASSTKGRMVMSRGGELVMVPNVEAILEDFAVLGEGLVQTVEARSERWTV

SEQ ID NO: 12541 - protein, 119 aa, Homo sapiens
LELCSPDMRTGPSVANRGSGTSVSRGALALSPWFHLGPQLHKHLCAWPSLLPWPLQEILQDKDGLNQRYFRKRALYLAHLAHHLAQDPLFGSVCFSYTNGCHLKPSLLLRPRGERHTLG

SEQ ID NO: 12542 - protein, 73 aa, Homo sapiens
LSKALGPSHLPCQVLRPLHGLISNAQVCFTATILSIFALEEQFILSQVALLEQVNALVPMLDSAHIKGISLGL

SEQ ID NO: 12543 - protein, 94 aa, Homo sapiens
LLYLVAALKEGSAWGPPLLEASRLYQQLGDTTAELESLELLVEALNVPCSSKAPQFLIEVELLLPPPDLASPLHCGTQSQTKHILASRCLQTGR

SEQ ID NO: 12544 - protein, 121 aa, Homo sapiens
LRCSSGESVEEVPLYGNLHYLQTGRLSQDPEPDQQDPTLGGPARAAEEVMCYTSLQLRPPQGRIPGPGTPVKYSEVVLDSEPKSQASGPEPELYASVCAQTRRARASFPDQAYANSQPAAS

SEQ ID NO: 12545 - protein, 125 aa, Homo sapiens
LHGSTRTGSGESVEEVPLYGNLHYLQTGRLSQDPEPDQQDPTLGGPARAAEEVMCYTSLQLRPPQGRIPGPGTPVKYSEVVLDSEPKSQASGPEPELYASVCAQTRRARASFPDQAYANSQPAAS

SEQ ID NO: 12546 - protein, 12 aa, Homo sapiens
MGVRSAVETVRP

SEQ ID NO: 12547 - protein, 49 aa, Homo sapiens
LKTQVPTALTINSSHLSFPHEKLLLMSTDQEELSRWYHSLTWAISSQKN

SEQ ID NO: 12548 - protein, 371 aa, Homo sapiens
LRAALPGPASAAPARERLGFESAADCSRKCRSLSQGMELSCPGSRCPVQEQRARWERKRACTARELLETERRYQEQLGLVATYFLGILKAKGTLRPPERQALFGSWELIYGASQELLPYLEGGCWGQGLEGFCRHLELYNQFAANSERSQTTLQEQLKKNKGFRRFVRLQEGRPEFGGLQLQDLLPLPLQRLQQYENLVVALAENTGPNSPDHQQLTRAARLISETAQRVHTIGQKQKNDQHLRRVQALLSGRQAKGLTSGRWFLRQGWLLVVPPHGEPRPRMFFLFTDVLLMAKPRPPLHLLRSGTFACKALYPMAQCHLSRVFGHSGGPCGGLLSLSFPHEKLLLMSTDQEELSRWYHSLTWAISSQKN

SEQ ID NO: 12549 - protein, 158 aa, Homo sapiens
LRPPERQALFGSWELIYGASQELLPYLEGGCWGQGLEGFCRHLELYNQFAANSERSQTTLQEQLKKNKGFRRFVRLQEGRPEFGGLQLQDLLPLPLQRLQQYENLVVALAENTGPNSPDHQQLTRRFLLLGNAGWRLPLLYSFLILTSNNVWYDPIFH

SEQ ID NO: 12550 - protein, 71 aa, Homo sapiens
MELSCPGSRCPVQEQRARWERKRACTARELLETERRYQEQLGLVATGAASLPGRRMLGPRAGGLLPPLGAL

SEQ ID NO: 12551 - protein, 73 aa, Homo sapiens
VGDVPRTEVAERVSKGGRGRSPRATREAAGRRAGGRGAEPGSAGIARLEKRSCHHGCTFTEDQHWECGEDDAV

SEQ ID NO: 12552 - protein, 127 aa, Homo sapiens
VSSPGGPRGGPGRLRPQLSLLIRRGPGGAGGGAAASARSWALGRRWAGRAQCSAAAGSEERAEPAMGKSASKQFHNEVLKAHNEYRQKHGVPPLKLCKNLNREAQQTLHGHGMEEHQEDGRGEGVRK

SEQ ID NO: 12553 - protein, 60 aa, Homo sapiens
LIPLAGGSGHNPAIEKILRNAVPAASLRTAGPCPSVGRRSAVPSAPQVLFLIPNKLARGL

SEQ ID NO: 12554 - protein, 198 aa, Homo sapiens
VPSAPQSDLPRIKTEIEALKNLRHQHICQLYHVLETANKIFMVLEYCPGGELFDYIISQDRLSEEETRVVFRQIVSAVAYVHSQGYAHRDLKPENLLFDEYHKLKLIDFGLCAKPKGNKDYHLQTCCGSLAYAAPELIQGKSYLGSEAGVQWRDLGSLQPPTLGFKRFSCLSLPSSWDCRCLEHGHTVICSYVWISTI

SEQ ID NO: 12555 - protein, 561 aa, Homo sapiens
VPSAPQSDLPRIKTEIEALKNLRHQHICQLYHVLETANKIFMVLEENLLFDEYHKLKLIDFGLCAKPKGNKDYHLQTCCGSLAYAAPELIQGKSYLGSEADVWSMGILLYVLMCGFLPFDDDNVMALYKKIMRGKYDVPKWLSPSSILLLQQMLQVDPKKRISMKNLLNHPWIMQDYNYPVEWQSKNPFIHLDDDCVTELSVHHRNNRQTMEDLISLWQYDHLTATYLLLLAKKARGKPVRLRLSSFSCGQASATPFTDIKSNNWSLEDVTASDKNYVAGLIDYDWCEDDLSTGAATPRTSQFTKYWTESNGVESKSLTPALCRTPANKLKNKENVYTPKSAVKNEEYFMFPEPKTPVNKNQHKREILTTPNRYTTPSKARNQCLKETPIKIPVNSTGTDKLMTGVISPERRCRSVELDLNQAHMEETPKRKGAKVFGSLERGLDKVITVLTRSKRKGSARDGPRRLKLHYNVTTTRLVNPDQLLNEIMSILPKKHVDFVQKGYTLKCQTQSDFGKVTMQFELEVCQLQKPDVVGIRRQRLKGDAWVYKRLVEDILSSCKV

SEQ ID NO: 12556 - protein, 27 aa, Homo sapiens
MKDYDELLKYYELHETIGTVLPWRRAV

SEQ ID NO: 12557 - protein, 216 aa, Homo sapiens
MMNFSNIMNYMKLLGQSDLPRIKTEIEALKNLRHQHICQLYHVLETANKIFMVLEYCPGGELFDYIISQDRLSEEETRVVFRQIVSAVAYVHSQGYAHRDLKPENLLFDEYHKLKLIDFGLCAKPKGNKDYHLQTCCGSLAYAAPELIQGKSYLGSEMEFHCVAQAGVQWRDLGSLQPPTLGFKRFSCLSLPSSWDCRCLEHGHTVICSYVWISTI

SEQ ID NO: 12558 - protein, 59 aa, Homo sapiens
LAIFSIQVCSGPKRYDWTGKNWVYSHDGVSLHELLAAELTKALKTKLDLSSLAYSGKDA

SEQ ID NO: 12559 - protein, 1082 aa, Homo sapiens
LRLPPGARAPRTLRSQGSRVRSTTLLSSPCEWDWHPGCSSRSKYSRKHRAVPVHGPRCQAPGMEELIWEQYTVTLQKDSKRGFGIAVSGGRDNPHFENGETSIVISDVLPGGPADGLLQENDRVVMVNGTPMEDVLHSFAVQQLRKSGKVAAIVVKRPRKVQVAALQASPPLDQDDRAFEVMDEFDGRSFRSGYSERSRLNSHGGRSRSWEDSPERGRPHERARSRERDLSRDRSRGRSLERGLDQDHARTRDRSRGRSLERGLDHDFGPSRDRDRDRSRGRSIDQDYERAYHRAYDPDYERAYSPEYRRGARHDARSRGPRSRSREHPHSRSPSPEPRGRPGPIGVLLMKSRANEEYGLRLGSQIFVKEMTRTGLATKDGNLHEGDIILKINGTVTENMSLTDARKLIEKSRGKLQLVVLRDSQQTLINIPSLNDSDSEIEDISEIESNRSFSPEERRHQYSDYDYHSSSEKLKERPSSREDTPSRLSRMGATPTPFKSTGDIAGTVVPETNKEPRYQEDPPAPQPKAAPRTFLRPSPEDEAIYGPNTKMVRFKKGDSVGLRLAGGNDVGIFVAGIQEGTSAEQEGLQEGDQILKVNTQDFRGLVREDAVLYLLEIPKGEMVTILAQSRADVYRDILACGRGDSFFIRSHFECEKETPQSLAFTRGEVFRVVDTLYDGKLGNWLAVRIGNELEKGLIPNKSRAEQMASVQNAQRDNAGDRADFWRMRGQRSGVKKNLRKSREDLTAVVSVSTKFPAYERVLLREAGFKRPVVLFGPIADIAMEKLANELPDWFQTAKTEPKDAGSEKSTGVVRLNTVRQIIEQDKHALLDVTPKAVDLLNYTQWFPIVIFFNPDSRQGVKTMRQRLNPTSNKSSRKLFDQANKLKKTCAHLFTATINLNSANDSWFGSLKDTIQHQQGEAVWVSEGKMEGMDDDPEDRMSYLTAMGADYLSCDSRLISDFEDTDGEGGAYTDNELDEPAEEPLVSSITRSSEPVQHEEIEIAQKHPDIYAVPIKTHKPDPGTPQHTSSRPPEPQKAPSRPYQDTRGSYGSDAEEEEYRQQLSEHSKRGYYGQSARYRDTEL

SEQ ID NO: 12560 - protein, 1261 aa, Homo sapiens
LKFTGPCTERDKMRYKKYIGILEAAVGITPLNKRELLPESRRHVNLWQQPGVRSTTLLSSPCEWDWHPGCSSRSKYSRKHRAVPVHGPRCQAPGMEELIWEQYTVTLQKDSKRGFGIAVSGGRDNPHFENGETSIVISDVLPGGPADGLLQENDRVVMVNGTPMEDVLHSFAVQQLRKSGKVAAIVVKRPRKVQVAALQASPPLDQDDRAFEVMDEFDGRSFRSGYSERSRLNSHGGRSRSWEDSPERGRPHERARSRERDLSRDRSRGRSLERGLDQDHARTRDRSRGRSLERGLDHDFGPSRDRDRDRSRGRSIDQDYERAYHRAYDPDYERAYSPEYRRGARHDARSRGPRSRSREHPHSRSPSPEPRGRPGPIGVLLMKSRANEEYGLRLGSQIFVKEMTRTGLATKDGNLHEGDIILKINGTVTENMSLTDARKLIEKSRGKLQLVVLRDSQQTLINIPSLNDSDSEIEDISEIESNRSFSPEERRHQYSDYDYHSSSEKLKERPSSREDTPSRLSRMGATPTPFKSTGDIAGTVVPETNKEPRYQEDPPAPQPKAAPRTFLRPSPEDEAIYGPNTKMVRFKKGDSVGLRLAGGNDVGIFVAGIQEGTSAEQEGLQEGDQILKVNTQDFRGLVREDAVLYLLEIPKGEMVTILAQSRADVYRDILACGRGDSFFIRSHFECEKETPQSLAFTRGEVFRVVDTLYDGKLGNWLAVRIGNELEKGLIPNKSRAEQMASVQNAQRDNAGDRADFWRMRGQRSGVKKNLRKSREDLTAVVSVSTKFPAYERVLLREAGFKRPVVLFGPIADIAMEKLANELPDWFQTAKTEPKDAGSEKSTGVVRLNTVRQIIEQDKHALLDVTPKAVDLLNYTQWFPIVIFFNPDSRQGVKTMRQRLNPTSNKSSRKLFDQANKLKKTCAHLFTATINLNSANDSWFGSLKDTIQHQQGEAVWVSEGKMEGMDDDPEDRMSYLTAMGADYLSCDSRLISDFEDTDGEGGAYTDNELDEPAEEPLVSSITRSSEPVQHEESIRKPSPEPRAQMRRAASSDQLRDNSPPPAFKPEPPKAKTQNKEESYDFSKSYEYKSNPSAVAGNETPGASTKGYPPPVAAKPTFGRSILKPSTPIPPQEGEEVGESSEEQDNAPKSVLGKVKIFEKMDHKARLQRMQELQEAQNARIEIAQKHPDIYAVPIKTHKPDPGTPQHTSSRPPEPQKAPSRPYQDTRGSYGSDAEEEEYRQQLSEHSKRGYYGQSARYRDTEL

SEQ ID NO: 12561 - protein, 144 aa, Homo sapiens
VRSTTLLSSPCEWDWHPGCSSRSKYSRKHRAVPVHGPRCQAPGMEELIWEQYTVTLQKDSKRGFGIAVSGGRDNPHFENGETSIVISDVLPGGPADGLLQENDRVVMVNGTPMEDVLHSFAVQQLRKSGKVAAIVSTGFAFSLP

SEQ ID NO: 12562 - protein, 1003 aa, Homo sapiens
LRAYAGPVSEMPVRGDRGFPPRRELSGWLRAPGMEELIWEQYTVTLQKDSKRGFGIAVSGGRDNPHFENGETSIVISDVLPGGPADGLLQENDRVVMVNGTPMEDVLHSFAVQQLRKSGKVAAIVVKRPRKVQVAALQASPPLDQDDRAFEVMDEFDGRSFRSGYSERSRLNSHGGRSRSWEDSPERGRPHERARSRERDLSRDRSRGRSLERGLDQDHARTRDRSRGRSLERGLDHDFGPSRDRDRDRSRGRSIDQDYERAYHRAYDPDYERAYSPEYRRGARHDARSRGPRSRSREHPHSRSPSPEPRGRPGPIGVLLMKSRANEEYGLRLGSQIFVKEMTRTGLATKDGNLHEGDIILKINGTVTENMSLTDARKLIEKSRGKLQLVVLRDSQQTLINIPSLNDSDSEIEDISEIESNRSFSPEERRHQYSDYDYHSSSEKLKERPSSREDTPSRLSRMGATPTPFKSTGDIAGTVVPETNKEPRYQEDPPAPQPKAAPRTFLRPSPEDEAIYGPNTKMVRFKKGDSVGLRLAGGNDVGIFVAGIQEGTSAEQEGLQEGDQILKVNTQDFRGLVREDAVLYLLEIPKGEMVTILAQSRADVYRDILACGRGDSFFIRSHFECEKETPQSLAFTRGEVFRVVDTLYDGKLGNWLAVRIGNELEKGLIPNKSRAEQMASVQNAQRDNAGDRADFWRMRGQRSGVKKNLRKSREDLTAVVSVSTKFPAYERVLLREAGFKRPVVLFGPIADIAMEKLANELPDWFQTAKTEPKDAGSEKSTGVVRLNTVRQIIEQDKHALLDVTPKAVDLLNYTQWFPIVIFFNPDSRQGVKTMRQRLNPTSNKSSRKLFDQANKLKKTCAHLFTATINLNSANDSWFGSLKDTIQHQQGEAVWVSEGKMEGMDDDPEDRMSYLTAMGADYLSCDSRLISDFEDTDGEGGAYTDNELDEPAEEPLVSSITRSSEPVQHEEVRRGRPRAGTGEPGVFLALSWTAVCSGCCGRHS

SEQ ID NO: 12563 - protein, 1053 aa, Homo sapiens
LRAYAGPVSEMPVRGDRGFPPRRELSGWLRAPGMEELIWEQYTVTLQKDSKRGFGIAVSGGRDNPHFENGETSIVISDVLPGGPADGLLQENDRVVMVNGTPMEDVLHSFAVQQLRKSGKVAAIVVKRPRKVQVAALQASPPLDQDDRAFEVMDEFDGRSFRSGYSERSRLNSHGGRSRSWEDSPERGRPHERARSRERDLSRDRSRGRSLERGLDQDHARTRDRSRGRSLERGLDHDFGPSRDRDRDRSRGRSIDQDYERAYHRAYDPDYERAYSPEYRRGARHDARSRGPRSRSREHPHSRSPSPEPRGRPGPIGVLLMKSRANEEYGLRLGSQIFVKEMTRTGLATKDGNLHEGDIILKINGTVTENMSLTDARKLIEKSRGKLQLVVLRDSQQTLINIPSLNDSDSEIEDISEIESNRSFSPEERRHQYSDYDYHSSSEKLKERPSSREDTPSRLSRMGATPTPFKSTGDIAGTVVPETNKEPRYQEDPPAPQPKAAPRTFLRPSPEDEAIYGPNTKMVRFKKGDSVGLRLAGGNDVGIFVAGIQEGTSAEQEGLQEGDQILKVNTQDFRGLVREDAVLYLLEIPKGEMVTILAQSRADVYRDILACGRGDSFFIRSHFECEKETPQSLAFTRGEVFRVVDTLYDGKLGNWLAVRIGNELEKGLIPNKSRAEQMASVQNAQRDNAGDRADFWRMRGQRSGVKKNLRKSREDLTAVVSVSTKFPAYERVLLREAGFKRPVVLFGPIADIAMEKLANELPDWFQTAKTEPKDAGSEKSTGVVRLNTVRQIIEQDKHALLDVTPKAVDLLNYTQWFPIVIFFNPDSRQGVKTMRQRLNPTSNKSSRKLFDQANKLKKTCAHLFTATINLNSANDSWFGSLKDTIQHQQGEAVWVSEGKMEGMDDDPEDRMSYLTAMGADYLSCDSRLISDFEDTDGEGGAYTDNELDEPAEEPLVSSITRSSEPVQHEEIEIAQKHPDIYAVPIKTHKPDPGTPQHTSSRPPEPQKAPSRPYQDTRGSYGSDAEEEEYRQQLSEHSKRGYYGQSARYRDTEL

SEQ ID NO: 12564 - protein, 1165 aa, Homo sapiens
LAHASPETMKTAQALHRMWIQAVKKLRRWKGRAPGMEELIWEQYTVTLQKDSKRGFGIAVSGGRDNPHFENGETSIVISDVLPGGPADGLLQENDRVVMVNGTPMEDVLHSFAVQQLRKSGKVAAIVVKRPRKVQVAALQASPPLDQDDRAFEVMDEFDGRSFRSGYSERSRLNSHGGRSRSWEDSPERGRPHERARSRERDLSRDRSRGRSLERGLDQDHARTRDRSRGRSLERGLDHDFGPSRDRDRDRSRGRSIDQDYERAYHRAYDPDYERAYSPEYRRGARHDARSRGPRSRSREHPHSRSPSPEPRGRPGPIGVLLMKSRANEEYGLRLGSQIFVKEMTRTGLATKDGNLHEGDIILKINGTVTENMSLTDARKLIEKSRGKLQLVVLRDSQQTLINIPSLNDSDSEIEDISEIESNRSFSPEERRHQYSDYDYHSSSEKLKERPSSREDTPSRLSRMGATPTPFKSTGDIAGTVVPETNKEPRYQEDPPAPQPKAAPRTFLRPSPEDEAIYGPNTKMVRFKKGDSVGLRLAGGNDVGIFVAGIQEGTSAEQEGLQEGDQILKVNTQDFRGLVREDAVLYLLEIPKGEMVTILAQSRADVYRDILACGRGDSFFIRSHFECEKETPQSLAFTRGEVFRVVDTLYDGKLGNWLAVRIGNELEKGLIPNKSRAEQMASVQNAQRDNAGDRADFWRMRGQRSGVKKNLRKSREDLTAVVSVSTKFPAYERVLLREAGFKRPVVLFGPIADIAMEKLANELPDWFQTAKTEPKDAGSEKSTGVVRLNTVRQIIEQDKHALLDVTPKAVDLLNYTQWFPIVIFFNPDSRQGVKTMRQRLNPTSNKSSRKLFDQANKLKKTCAHLFTATINLNSANDSWFGSLKDTIQHQQGEAVWVSEGKMEGMDDDPEDRMSYLTAMGADYLSCDSRLISDFEDTDGEGGAYTDNELDEPAEEPLVSSITRSSEPVQHEEAKTQNKEESYDFSKSYEYKSNPSAVAGNETPGASTKGYPPPVAAKPTFGRSILKPSTPIPPQEGEEVGESSEEQDNAPKSVLGKVKIFEKMDHKARLQRMQELQEAQNARIEIAQKHPDIYAVPIKTHKPDPGTPQHTSSRPPEPQKAPSRPYQDTRGSYGSDAEEEEYRQQLSEHSKRGYYGQSARYRDTEL

SEQ ID NO: 12565 - protein, 11 aa, Homo sapiens
VGGRGVRPRLG

SEQ ID NO: 12566 - protein, 16 aa, Homo sapiens
VDAACGGAAGYVKMRG

SEQ ID NO: 12567 - protein, 32 aa, Homo sapiens
MSWGFGSTARRPRACTSLAVSSPSASGAFSVE

SEQ ID NO: 12568 - protein, 23 aa, Homo sapiens
LAARLSSRRTSPPKAVLTGRGRK

SEQ ID NO: 12569 - protein, 13 aa, Homo sapiens
LKFSFAIGTSATD

SEQ ID NO: 12570 - protein, 248 aa, Homo sapiens
LRELPRPTPSSVLSPPRPTSACPSLTRSVLALRPPQLSALGLPRLAGSARASGPMAKRRAAEPVTFHVPWKRLLLCDFAEQPPPPPLWIRPPGVAHAGQLLGVPEQHRKRKIDAGTMAEPSASPSKRRDSGDNSAPSGQEREDHGLETGDPPLPPPPVLPGPGEELPGARLPGGGGDDGAGRAGPPRGDWGVASRQHNEEFWQYNTFQYWRNPLPPIDLADIEDLSEDTLTEATLQGRNEGAEVDMES

SEQ ID NO: 12571 - protein, 19 aa, Homo sapiens
LGCPECQVAGKRWAFRRGL

SEQ ID NO: 12572 - protein, 158 aa, Homo sapiens
LRFGPPPPPTPLTPGTYFGCLRCPPAETQLLRRPAVFVGSAASGIRSGLWSASSGHWCAPAAGRAHAPVPRLVRGLGAASTAAPQDAQTGPQPIPRADCIMRHLPYFCRGQVVRGFGRGSKQLGIPTGNTYHAYLQRGLLWGNPQCGHCWLPETRKEL

SEQ ID NO: 12573 - protein, 24 aa, Homo sapiens
MRRAPTAWAAGREAAREWGVEGPA

SEQ ID NO: 12574 - protein, 11 aa, Homo sapiens
LFSGMLKAIKT

SEQ ID NO: 12575 - protein, 300 aa, Homo sapiens
LRCRPGCGQQRAMDAELAEVRALQAEIAALRRACEDPPAPWEEKSRVQKSFQAIHQFNLEGWKSSKDLKNQLGHLESELSFLSTLTGINIRNHSKQTEDLTSTEMTEKSIRKVLQRHRLSGNCHMVTFQLEFQILEIQNKERLSSAVTDLNIIMEPTECSELSEFVSRAEERKDLFMFFRSLHFFVEWFEYRKRTFKHLKEKYPDAVYLSEGPSSCSMGIRSASRPGFELVIVWRIQIDEDGKVFPKLDLLTKVPQRALELDKNRAIETAPLSFRTLVGLLGIEAALESLIKSLCAEENN

SEQ ID NO: 12576 - protein, 99 aa, Homo sapiens
LELVDRAADRGADARRGRPLGTAGGAVSVAMTDQTYCDRLVQDTPFLTGHGRLSEQQVDRIILQLNRYYPQILTNKEAEKVLRSSGTPRHPCVCGSVTS

SEQ ID NO: 12577 - protein, 258 aa, Homo sapiens
LELVDRAADRGADARRGRPLGTAGGAVSVAMTDQTYCDRLVQDTPFLTGHGRLSEQQVDRIILQLNRYYPQILTNKEAEKFRNPKASLRVRLCDLLSHLQRSGERDCQEFYRALYIHAQPLHSRLPSRHALRKFHITNHACLVLARGGHPSLPLMAWMSSMTTQVCCSPGLASPLASAPPQRPPSGPEGRVWQAQAVQMLVSVSHFLPLPPSLSHGSFHTAWGILYVHSCPSFSNLIPRGSLHVCVDSNLVPTAAWRS

SEQ ID NO: 12578 - protein, 131 aa, Homo sapiens
LVDRAADRGADARRGRPLGTAGGAVSVAMTDQTYCDRLVQDTPFLTGHGRLSEQQVDRIILQLNRYYPQILTNKEAEKVLRRCHVQGYPEGWGISWNNEVGPQQNRSQHGPCYWLSSGTPRHPCVCGSVTS

SEQ ID NO: 12579 - protein, 174 aa, Homo sapiens
LGTAGGAVSVAMTDQTYCDRLVQDTPFLTGHGRLSEQQVDRIILQLNRYYPQILTNKEAEKFRNPKASLRVRLCDLLSHLQRSGERDCQEFYRALYIHAQPLHSRLPSRHALRPMSFLAGLGLAVGLALLLYCYPPDPKGLPGTRRVLGFSPVIIDRHVSRYLLAFLADDLGGL

SEQ ID NO: 12580 - protein, 486 aa, Homo sapiens
VWSRRLPSRRLAVLASAPPSRCFGVMSREGAGAALVAEVIKDRLCFAILYSRPKSASNVHYFSIDNELEYENFYADFGPLNLAMVYRYCCKINKKLKSITMLRKKIVHFTGSDQRKQANAAFLVGCYMVIYLGRTPEEAYRILIFGETSYIPFRDAAYGSCNFYITLLDCFHAVKKAMQYGFLNFNSFNLDEYEHYEKAENGDLNWIIPDRFIAFCGPHSRARLESGYHQHSPETYIQYFKNHNVTTIIRLNKRMYDAKRFTDAGFDHHDLFFADGSTPTDAIVKEFLDICENAEGAIAVHCKAGLGRTGTLIACYIMKHYRMTAAETIAWVRICRPGSVIGPQQQFLVMKQTNLWLEGDYFRQKLKGQENGQHRAAFSKLLSGVDDISINGVENQDQQEPEPYSDDDEINGVTQGDRLRALKSRRQSKTNAIPLTVILQSSVQSCKTSEPNISGSAGITKRTTRSASRKSSVKSLSISRTKTVLR

SEQ ID NO: 12581 - protein, 70 aa, Homo sapiens
MTCRESERTRSRESGVSCLPPPTPPAPAPPPLPIHRRAHTRSLTRTHRHKRAHRLRTHTSLSRALTPLLP

SEQ ID NO: 12582 - protein, 101 aa, Homo sapiens
LLLLRSPYTDALTPAPSLAHTDTSAHTGSAHTLRSPARSHPSCPEPLPVQRGAAAGRPSRAHFATLTVPAVAVEVGTAAASSPLVTAQARTPAEPLGCALP

SEQ ID NO: 12583 - protein, 51 aa, Homo sapiens
LCSPMSRDRSIPHQPLTASGSRWACTPQPFRDSSCDSPPVQISGQLSRNSL

SEQ ID NO: 12584 - protein, 482 aa, Homo sapiens
VPGSTAGASPRRTSAPPTLSASAGETPSPTIQRARYPPDMPCVQAQYSPSPPGSSYAAQTYSSEYTTEIMNPDYTKLTMDLGSTEITATATTSLPSISTFVEGYSSNYELKPSCVYQMQRPLIKVEEGRAPSYHHHHHHHHHHHHHHQQQHQQPSIPPASSPEDEVLPSTSMYFKQSPPSTPTTPAFPPQAGALWDEALPSAPGCIAPGPLLDPPMKAVPTVAGARFPLFHFKPSPPHPPAPSPAGGHHLGYDPTAAAALSLPLGAAAAAGSQAAALESHPYGLPLAKRAAPLAFPPLGLTPSPTASSLLGESPSLPSPPSRSSSSGEGTCAVCGDNAACQHYGVRTCEGCKGFFKRTVQKNAKYVCLANKNCPVDKRRRNRCQYCRFQKCLSVGMVKEVVRTDSLKGRRGRLPSKPKSPLQQEPSQPSPPSPPICMMNALVRALTDSTPRDLDYSRVSFMISCFQMNDQGLYLWLLVIRVD

SEQ ID NO: 12585 - protein, 665 aa, Homo sapiens
VPGSTAGASPRRTSAPPTLSASAGETPSPTIQRARYPPDMPCVQAQYSPSPPGSSYAAQTYSSEYTTEIMNPDYTKLTMDLGSTEITATATTSLPSISTFVEGYSSNYELKPSCVYQMQRPLIKVEEGRAPSYHHHHHHHHHHHHHHQQQHQQPSIPPASSPEDEVLPSTSMYFKQSPPSTPTTPAFPPQAGALWDEALPSAPGCIAPGPLLDPPMKAVPTVAGARFPLFHFKPSPPHPPAPSPAGGHHLGYDPTAAAALSLPLGAAAAAGSQAAALESHPYGLPLAKRAAPLAFPPLGLTPSPTASSLLGESPSLPSPPSRSSSSGEGTCAVCGDNAACQHYGVRTCEGCKGFFKRTVQKNAKYVCLANKNCPVDKRRRNRCQYCRFQKCLSVGMVKEVVRTDSLKGRRGRLPSKPKSPLQQEPSQPSPPSPPICMMNALVRALTDSTPRDLDYSRYCPTDQAAAGTDAEHVQQFYNLLTASIDVSRSWAEKIPGFTDLPKEDQTLLIESAFLELFVLRLSIRSNTAEDKFVFCNGLVLHRLQCLRGFGEWLDSIKDFSLNLQSLNLDIQALACLSALSMITERHGLKEPKRVEELCNKITSSLKDHQSKGQALEPTESKVLGALVELRKICTLGLQRIFYLKLEDLVSPPSIIDKLFLDTLPF

SEQ ID NO: 12586 - protein, 689 aa, Homo sapiens
VPGSTAGASPRRTSAPPTLSASAGETPSPTIQRARYPPGPHHLFSSQDFIPYMHDSIRFGNVDMPCVQAQYSPSPPGSSYAAQTYSSEYTTEIMNPDYTKLTMDLGSTEITATATTSLPSISTFVEGYSSNYELKPSCVYQMQRPLIKVEEGRAPSYHHHHHHHHHHHHHHQQQHQQPSIPPASSPEDEVLPSTSMYFKQSPPSTPTTPAFPPQAGALWDEALPSAPGCIAPGPLLDPPMKAVPTVAGARFPLFHFKPSPPHPPAPSPAGGHHLGYDPTAAAALSLPLGAAAAAGSQAAALESHPYGLPLAKRAAPLAFPPLGLTPSPTASSLLGESPSLPSPPSRSSSSGEGTCAVCGDNAACQHYGVRTCEGCKGFFKRTVQKNAKYVCLANKNCPVDKRRRNRCQYCRFQKCLSVGMVKEVVRTDSLKGRRGRLPSKPKSPLQQEPSQPSPPSPPICMMNALVRALTDSTPRDLDYSRYCPTDQAAAGTDAEHVQQFYNLLTASIDVSRSWAEKIPGFTDLPKEDQTLLIESAFLELFVLRLSIRSNTAEDKFVFCNGLVLHRLQCLRGFGEWLDSIKDFSLNLQSLNLDIQALACLSALSMITERHGLKEPKRVEELCNKITSSLKDHQSKGQALEPTESKVLGALVELRKICTLGLQRIFYLKLEDLVSPPSIIDKLFLDTLPF

SEQ ID NO: 12587 - protein, 96 aa, Homo sapiens
LVCQLVQPLKIHRGANWGPLKGEELLKVKQLVTESRLRPNLPFHTLFFSQLHLYKIRLLNITTNIYLKITMSKVYFCINFLSLYANIINIIKYQES

SEQ ID NO: 12588 - protein, 21 aa, Homo sapiens
MLHISLYRVDDHTSTEENNMY

SEQ ID NO: 12589 - protein, 19 aa, Homo sapiens
LGFGVGGQPGIASDMLLGS

SEQ ID NO: 12590 - protein, 32 aa, Homo sapiens
LLAPKFKGINSSGAGVESGVAGVVAAMVKFAL

SEQ ID NO: 12591 - protein, 26 aa, Homo sapiens
LEKRGKSLSKSKKLENMRYISSLVNT

SEQ ID NO: 12592 - protein, 68 aa, Homo sapiens
LIFFSCVTSAPIPFFHRCAPVNISCYAKFAEALITFVSDNSVLHRLISGVMTSKEIILGLCLLSLGST

SEQ ID NO: 12593 - protein, 65 aa, Homo sapiens
LASSDPPALASQSAEITGVLGPNSTANSIMASYQQQKTSVPVLDAELFIPPKINRRTQWKLSLLD

SEQ ID NO: 12594 - protein, 33 aa, Homo sapiens
VKPDTNCLNSFQLQMENNGWVSVTNKDTMDSKT

SEQ ID NO: 12595 - protein, 205 aa, Homo sapiens
LILLFTRTPLSLVQKNNANLKSLKPDKPDSEEQAKIAKLGLKLGLLTSDADCEIEKWEDQENEIVQYGRNMSSMAYSLYLFTRGEGPLKTSQDLIHQLEVFAAEGLKLTSSVQAFSKQLKDDDKLMLLLEINKLIPLCHQLQTVTKTSLQNKVFLKVDKCITKTRSMMALLVQLLSLCYKLLKKLQMENNGWVSVTNKDTMDSKT

SEQ ID NO: 12596 - protein, 725 aa, Homo sapiens
LRDRPRAMAASPGPAGVGGAGAVYGSGSSGFALDSGLEIKTRSVEQTLLPLVSQITTLINHKDNTKKSDKTLQAIQRVGQAVNLAVGRFVKVGEAIANENWDLKEEINIACIEAKQAGETIAALTDITNLNHLESDGQITIFTDKTGVIKAARLLLSSVTKVLLLADRVVIKQIITSRNKVLATMERLEKVNSFQEFVQIFSQFGNEMVEFAHLSGDRQNDLKDEKKKAKMAAARAVLEKCTMMLLTASKTCLRHPNCESAHKNKEGVFDRMKVALDKVIEIVTDCKPNGETDISSISIFTGIKEFKMNIEALRENLYFQSKENLSVTLEVILERMEDFTDSAYTSHEHRERILELSTQARMELQQLISVWIQAQSKKTKSIAEELELSILKISHSLNELKKELHSTATQLAADLLKYHADHVVLKALKLTGVEGNLEALAEYACKLSEQKEQLVETCRLLRHISGTEPLEITCIHAEETFQVTGQQIISAAETLTLHPSSKIAKENLDVFCEAWESQISDMSTLLREINDVFEGRRGEKYGYLSLPKPMKNNANLKSLKPDKPDSEEQAKIAKLGLKLGLLTSDADCEIEKWEDQENEIVQYGRNMSSMAYSLYLFTRGEGPLKTSQDLIHQLEVFAAEGLKLTSSVQAFSKQLKDDDKLMLLLEINKLIPLCHQLQTVTKTSLQNKVFLKVDKCITKTRSMMALLVQLLSLCYKLLKKSETRY

SEQ ID NO: 12597 - protein, 190 aa, Homo sapiens
LRDRPRAMAASPGPAGVGGAGAVYGSGSSGFALDSGLEIKTRSVEQTLLPLVSQITTLINHKDNTKKSDKTLQAIQRVGQAVNLAVGRFVKVGEAIANENWDLKEEINIACIEAKQAGETIAALTDITNLNHLESDGQITIFTDKTGVIKAARLLLSSVTKVLLLADRVVIKQIITSRNKRLTIYNLRHS

SEQ ID NO: 12598 - protein, 1095 aa, Homo sapiens
VPFSRMAEAELHKERLQAIAEKRKRQTEIEGKRQQLDEQILLLQHSKSKVLREKWLLQGIPAGTAEEEEARRRQSEEDEFRVKQLEDNIQRLEQEIQTLESEESQISAKEQIILEKLKETEKSFKDFQKGFSSTDGDAVNYISSQLPDLPILCSRTAEPSPGQDGTSRAAGVGWENVLLKEGESASNATETSGPDMTIKKPPQLSEDDIWLKSEGDNYSATLLEPAASSLSPDHKNMEIEVSVAECKSVPGITSTPHPMDHPSAFYSPPHNGLLTDHHESLDNDVAREIRYLDEVLEANCCDSAVDGTYNGTSSPEPGAVVLVGGLSPPVHEATQPEPTERTASRQAPPHIELSNSSPDPMAEAERTNGHSPSQPRDALGDSLQVPVSPSSTTSSRCSSRDGEFTLTTLKKEAKFELRAFHEDKKPSKLFEDDEHEKEQYCIRKVRPSEEMLELEKERRELIRSQAVKKNPGIAAKWWNPPQEKTIEEQLDEEHLESHKKYKERKERRAQQEQLLLQKQLQQQQQQPPSQLCTAPASSHERASMIDKAKEDIVTEQIDFSAARKQFQLMENSRQAVAKGQSTPRLFSIKPFYRPLGSVNSDKPLTNPRPPSVGGPPEDSGASAAKGQKSPGALETPSAAGSQGNTASQGKEGPYSEPSKRGPLSKLWAEDGEFTSARAVLTVVKDDDHGILDQFSRSVNVSLTQEELDSGLDELSVRSQDTTVLETLSNDFSMDNISDSGASNETTNALQENSLADFSLPQTPQTDNPSEGRGEGVSKSFSDHGFYSPSSTLGDSPLVDDPLEYQAGLLVQNAIQQAIAEQVDKAVSKTSRDGAEQQGPEATVEEAEAAAFGSEKPQSMFEPPQVSSPVQEKRDVLPKILPAEDRALRERGPPQPLPAVQPSGPINMEETRPEGSYFSKYSEAAELRSTASLLATQESDVMVGPFKLRSRKQRTLSMIEEEIRAAQEREEELKRQRQVLQSTQSPRTKNAPSLPSRTCYKTAPGKIEKVKPPPSPTTEGPSLQPDLAPEEAAGTQRPKNLMQTLMEDYETHKSKRRERMDDSSVLEATRVNRRKSALALRWEAGIYANQEEEDNE

SEQ ID NO: 12599 - protein, 963 aa, Homo sapiens
LQMRWPQPGAAARLPPESPGPPESPGPPEREAAAARRWTGAEPQDCAPGSGRPEKPPQLSEDDIWLKSEGDNYSATLLEPAASSLSPDHKNMEIEVSVAECKSVPGITSTPHPMDHPSAFYSPPHNGLLTDHHESLDNDVAREIRYLDEVLEANCCDSAVDGTYNGTSSPEPGAVVLVGGLSPPVHEATQPEPTERTASRQAPPHIELSNSSPDPMAEAERTNGHSPSQPRDALGDSLQVPVSPSSTTSSRCSSRDGEFTLTTLKKEAKFELRAFHEDKKPSKLFEDDEHEKEQYCIRKVRPSEEMLELEKERRELIRSQAVKKNPGIAAKWWNPPQEKTIEEQLDEEHLESHKKYKERKERRAQQEQLLLQKQLQQQQQQPPSQLCTAPASSHERASMIDKAKEDIVTEQIDFSAARKQFQLMENSRQAVAKGQSTPRLFSIKPFYRPLGSVNSDKPLTNPRPPSVGGPPEDSGASAAKGQKSPGALETPSAAGSQGNTASQGKEGPYSEPSKRGPLSKLWAEDGEFTSARAVLTVVKDDDHGILDQFSRSVNVSLTQEELDSGLDELSVRSQDTTVLETLSNDFSMDNISDSGASNETTNALQENSLADFSLPQTPQTDNPSEGRGEGVSKSFSDHGFYSPSSTLGDSPLVDDPLEYQAGLLVQNAIQQAIAEQVDKAVSKTSRDGAEQQGPEATVEEAEAAAFGSEKPQSMFEPPQVSSPVQEKRDVLPKILPAEDRALRERGPPQPLPAVQPSGPINMEETRPEGSYFSKYSEAAELRSTASLLATQESDVMVGPFKLRSRKQRTLSMIEEEIRAAQEREEELKRQRQVLQSTQSPRTKNAPSLPSRTCYKTAPGKIEKVKPPPSPTTEGPSLQPDLAPEEAAGTQRPKNLMQTLMEDYETHKSKRRERMDDSSYTSKLLSCKVTSEVLEATRVNRRKSALALRWEAGIYANQEEEDNE

SEQ ID NO: 12600 - protein, 142 aa, Homo sapiens
LAPARGCRSPSPGVSWTPGVSWTPGAGGSGRAALDWSRTPGLRPRERAPRGKIEKVKPPPSPTTEGPSLQPDLAPEEAAGTQRPKNLMQTLMEDYETHKSKRRERMDDSSVLEATRVNRRKSALALRWEAGIYANQEEEDNE

SEQ ID NO: 12601 - protein, 926 aa, Homo sapiens
LSSLSQGARRNLSGKRQFSLRRFEARALGRKPPQLSEDDIWLKSEGDNYSATLLEPAASSLSPDHKNMEIEVSVAECKSVPGITSTPHPMDHPSAFYSPPHNGLLTDHHESLDNDVAREIRYLDEVLEANCCDSAVDGTYNGTSSPEPGAVVLVGGLSPPVHEATQPEPTERTASRQAPPHIELSNSSPDPMAEAERTNGHSPSQPRDALGDSLQVPVSPSSTTSSRCSSRDGEFTLTTLKKEAKFELRAFHEDKKPSKLFEDDEHEKEQYCIRKVRPSEEMLELEKERRELIRSQAVKKNPGIAAKWWNPPQEKTIEEQLDEEHLESHKKYKERKERRAQQEQLLLQKQLQQQQQQPPSQLCTAPASSHERASMIDKAKEDIVTEQIDFSAARKQFQLMENSRQAVAKGQSTPRLFSIKPFYRPLGSVNSDKPLTNPRPPSVGGPPEDSGASAAKGQKSPGALETPSAAGSQGNTASQGKEGPYSEPSKRGPLSKLWAEDGEFTSARAVLTVVKDDDHGILDQFSRSVNVSLTQEELDSGLDELSVRSQDTTVLETLSNDFSMDNISDSGASNETTNALQENSLADFSLPQTPQTDNPSEGRGEGVSKSFSDHGFYSPSSTLGDSPLVDDPLEYQAGLLVQNAIQQAIAEQVDKAVSKTSRDGAEQQGPEATVEEAEAAAFGSEKPQSMFEPPQVSSPVQEKRDVLPKILPAEDRALRERGPPQPLPAVQPSGPINMEETRPEGSYFSKYSEAAELRSTASLLATQESDVMVGPFKLRSRKQRTLSMIEEEIRAAQEREEELKRQRQVLQSTQSPRTKNAPSLPSRTCYKTAPGKIEKVKPPPSPTTEGPSLQPDLAPEEAAGTQRPKNLMQTLMEDYETHKSKRRERMDDSSVLEATRVNRRKSALALRWEAGIYANQEEEDNE

SEQ ID NO: 12602 - protein, 739 aa, Homo sapiens
LRAPGGGAGAPGGTGGGMGRGPWDAGPSRRLLPLLLLLGLARGAAGAPGPDGLDVCATCHEHATCQQREGKKICICNYGFVGNGRTQCVDKNECQFGATLVCGNHTSCHNTPGGFYCICLEGYRATNNNKTFIPNDGTFCTDIDECEVSGLCRHGGRCVNTHGSFECYCMDGYLPRNGPEPFHPTTDATSCTEIDCGTPPEVPDGYIIGNYTSSLGSQVRYACREGFFSVPEDTVSSCTGLGTWESPKLHCQEINCGNPPEMRHAILVGNHSSRLGGVARYVCQEGFESPGGKITSVCTEKGTWRESTLTCTEILTKINDVSLFNDTCVRWQINSRRINPKISYVISIKGQRLDPMESVREETVNLTTDSRTPEVCLALYPGTNYTVNISTAPPRRSMPAVIGFQTAEVDLLEDDGSFNISIFNETCLKLNRRSRKVGSEHMYQFTVLGQRWYLANFSHATSFNFTTREQVPVVCLDLYPTTDYTVNVTLLRSPKRHSVQITIATPPAVKQTISNISGFNETCLRWRSIKTADMEEMYLFHIWGQRWYQKEFAQEMTFNISSSSRDPEVCLDLRPGTNYNVSLRALSSELPVVISLTTQITEPPLPEVEFFTVHRGPLPRLRLRKAKEKNGPISSYQVLVLPLALQSTFSCDSEGASSFFSNASDADGYVAAELLAKDVPDDAMEIPIGDRLYYGEYYNAPLKRGSDYCIILRITSEWNKIRHSCCCRWRVLDWVPWLL

SEQ ID NO: 12603 - protein, 476 aa, Homo sapiens
VQGLGLSGGRAGLGPGCSGSSPRRAAGGSGGGASRAVRAMAGGPPKALPSTGPHSLRDMPHPLAGSSSEEAVGGDSTPSPDLLMARSFGDKDLILPNGGTPAGTSSPASSSSLLNRLQLDDDIDGETRDLFVIVDDPKKHVCTMETYITYRITTKSTRVEFDLPEYSVRRRYQDFDWLRSKLEESQPTHLIPPLPEKFVVKGVVDRFSEEFVETRRKALDKFLKRITDHPVLSFNEHFNIFLTAKDLNAYKKQGIALLTRMGESVKHVTGGYKLRTRPLEFAAIGDYLDTFALKLGTIDRIAQRIIKEEIEYLVELREYGPVYSTWSALEGELAEPLEGVSACIGNCSTALEELTDDMTEDFLPVLREYILYSDSMKSVLKKRDQVQAEYEAKLEAVALRKEDRPKVPADVEKCQDRMECFNADLKADMERWQNNKRQDFRQLLMGMADKNIQYYEKCLMAWESIIPLLQEKQEAK

SEQ ID NO: 12604 - protein, 38 aa, Homo sapiens
LQPLPPRFNRFFCLSLQRNSDYRQSLQPMPQEPSVPTN

SEQ ID NO: 12605 - protein, 20 aa, Homo sapiens
LCGFGQSLQPMPQEPSVPTN

SEQ ID NO: 12606 - protein, 614 aa, Homo sapiens
LQTLLSGSQWDAMERSLHRVSLGSRRAHPDLSFYLTTFGQLRLSIDAQDRVLLLHIIEGKGLISKQPGTCDPYVKISLIPEDSRLRHQKTQTVPDCRDPAFHEHFFFPVQEEDDQKRLLVTVWNRASQSRQSGLIGCMSFGVKSLLTPDKEISGWYYLLGEHLGRTKHLKVARRRLRPLRDPLLRMPGGGDTENGKKLKITIPRGKDGFGFTICCDSPVRVQAVDSGGPAERAGLQQLDTVLQLNERPVEHWKCVELAHEIRSCPSEIILLVWRMVPQVKPGPDGGVLRRASCKSTHDLQSPPNKREKNCTHGVQARPEQRHSCHLVCDSSDGLLLGGWERYTEVAKRGGQHTLPALSRATAPTDPNYIILAPLNPGSQLLRPVYQEDTIPEESGSPSKGKSYTGLGKKSRLMKTVQTMKGHGNYQNCPVVRPHATHSSYGTYVTLAPKVLVFPVFVQPLDLCNPARTLLLSEELLLYEGRNKAAEVTLFAYSDLLLFTKEDEPGRCDVLRNPLYLQSVKLQEGSSEDLKFCVLYLAEKAECLFTLEAHSQEQKKRVCWCLSENIAKQQQLAASPPDSKKLHPFGSLQQEMGPVNSTNATQDRSFTSPGQTLIG

SEQ ID NO: 12607 - protein, 962 aa, Homo sapiens
VISCHSSVGRASQGAHARLTGPVRAPAAGGELGFHGAAAEAGPAAMNRFNGLCKVCSERRYRQITIPRGKDGFGFTICCDSPVRVQAVDSGGPAERAGLQQLDTVLQLNERPVEHWKCVELAHEIRSCPSEIILLVWRMVPQVKPGPDGGVLRRASCKSTHDLQSPPNKREKNCTHGVQARPEQRHSCHLVCDSSDGLLLGGWERYTEVAKRGGQHTLPALSRATAPTDPNYIILAPLNPGSQLLRPVYQEDTIPEESGSPSKGKSYTGLGKKSRLMKTVQTMKGHGNYQNCPVVRPHATHSSYGTYVTLAPKVLVFPVFVQPLDLCNPARTLLLSEELLLYEGRNKAAEVTLFAYSDLLLFTKEDEPGRCDVLRNPLYLQSVKLQEGSSEDLKFCVLYLAEKAECLFTLEAHSQEQKKRVCWCLSENIAKQQQLAASPPDSKMFETEADEKREMALEEGKGPGAEDSPPSKEPSPGQELPPGQDLPPNKDSPSGQEPAPSQEPLSSKDSATSEGSPPGPDAPPSKDVPPCQEPPPAQDLSPCQDLPAGQEPLPHQDPLLTKDLPAIQESPTRDLPPCQDLPPSQVSLPAKALTEDTMSSGDLLAATGDPPAAPRPAFVIPEVRLDSTYSQKAGAEQGCSGDEEDAEEAEEVEEGEEGEEDEDEDTSDDNYGERSEAKRSSMIETGQGAEGGLSLRVQNSLRRRTHSEGSLLQEPRGPCFASDTTLHCSDGEGAASTWGMPSPSTLKKELGRNGGSMHHLSLFFTGHRKMSGADTVGDDDEASRKRKSKNLAKDMKNKLGIFRRRNESPGAPPAGKADKMMKSFKPTSEEALKWGESLEKLLVHKYGLAVFQAFLRTEFSEENLEFWLACEDFKKVKSQSKMASKAKKIFAEYIAIQACKEVNLDSYTREHTKDNLQSVTRGCFDLAQKRIFGLMEKDSYPRFLRSDLYLDLINQKKMSPPL

SEQ ID NO: 12608 - protein, 636 aa, Homo sapiens
VISCHSSVGRASQGAHARLTGPVRAPAAGGELGFHGAAAEAGPAAMNRFNGLCKVCSERRYRQITIPRGKDGFGFTICCDSPVRVQAVDSGGPAERAGLQQLDTVLQLNERPVEHWKCVELAHEIRSCPSEIILLVWRMVPQVKPGPDGGVLRRASCKSTHDLQSPPNKREKNCTHGVQARPEQRHSCHLVCDSSDGLLLGGWERYTEVAKRGGQHTLPALSRATAPTDPNYIILAPLNPGSQLLRPVYQEDTIPEESGSPSKGKSYTGLGKKSRLMKTVQTMKGHGNYQNCPVVRPHATHSSYGTYVTLAPKVLVFPVFVQPLDLCNPARTLLLSEELLLYEGRNKAAEVTLFAYSDLLLFTKEDEPGRCDVLRNPLYLQSVKLQEGSSEDLKFCVLYLAEKAECLFTLEAHSQEQKKRVCWCLSENIAKQQQLAASPPDSKMSGADTVGDDDEASRKRKSKNLAKDMKNKLGIFRRRNESPGAPPAGKADKMMKSFKPTSEEALKWGESLEKLLVHKYGLAVFQAFLRTEFSEENLEFWLACEDFKKVKSQSKMASKAKKIFAEYIAIQACKEVNLDSYTREHTKDNLQSVTRGCFDLAQKRIFGLMEKDSYPRFLRSDLYLDLINQKKMSPPL

SEQ ID NO: 12609 - protein, 22 aa, Homo sapiens
LPGPSCCQRSCCCMKGGTRLPR

SEQ ID NO: 12610 - protein, 62 aa, Homo sapiens
LLLPEDISAHPLIFHLYTLAHSFDGYFGCIYFMPGSMLGAGDTVEKKSDMVSLSSRFQSSWE

SEQ ID NO: 12611 - protein, 28 aa, Homo sapiens
MDASPPEQHFGASLGPGDEPQGTHSLCV

SEQ ID NO: 12612 - protein, 397 aa, Homo sapiens
LRNHRVFCLMEERNPASLQSGGGRLDRMFETEADEKREMALEEGKGPGAEDSPPSKEPSPGQELPPGQDLPPNKDSPSGQEPAPSQEPLSSKDSATSEGSPPGPDAPPSKDVPPCQEPPPAQDLSPCQDLPAGQEPLPHQDPLLTKDLPAIQESPTRDLPPCQDLPPSQVSLPAKALTEDTMSSGDLLAATGDPPAAPRPAFVIPEVRLDSTYSQKAGAEQGCSGDEEDAEEAEEVEEGEEGEEDEDEDTSDDNYGERSEAKRSSMIETGQGAEGGLSLRVQNSLRRRTHSEGSLLQEPRGPCFASDTTLHCSDGEGAASTWGMPSPSTLKKELGRNGGSMHHLSLFFTGHRKMSGADTVGDDDEASRKRKSKNLYVGKIPGFCAPLPPLPQGLSLL

SEQ ID NO: 12613 - protein, 48 aa, Homo sapiens
LTPLCDSRLPLAPLWASAFLSMQWGFRIAVVSESEAMRSERALVWSHL

SEQ ID NO: 12614 - protein, 368 aa, Homo sapiens
VLNSAASLGTGKAKNGSWLKIASPATPVVGSASPGSLLPFQQFADLSPTPHHCLPAAMVTRRPVTNSWDWLPAGAAPEAVPCRHMPLSRLPLRVGQKEFFFPLPLLVPPISWLLLSESQPRLVPGSPVIRPGFQRACVAAACTVAARCPGRGVGDRSQSGASYRPICGPKVGGPTEMLRGMYLTRNGNLQRRHTMKEAKDMKNKLGIFRRRNESPGAPPAGKADKMMKSFKPTSEEALKWGESLEKLLVHKYGLAVFQAFLRTEFSEENLEFWLACEDFKKVKSQSKMASKAKKIFAEYIAIQACKEVNLDSYTREHTKDNLQSVTRGCFDLAQKRIFGLMEKDSYPRFLRSDLYLDLINQKKMSPPL

SEQ ID NO: 12615 - protein, 60 aa, Homo sapiens
VAAACTVAARCPGRGVGDRSQSGASYRPICGPKVGGPTEMLRGMYLTRNGNLQRRHTMKE

SEQ ID NO: 12616 - protein, 130 aa, Homo sapiens
LSLPLTPGSVLLTDGLAVFQAFLRTEFSEENLEFWLACEDFKKVKSQSKMASKAKKIFAEYIAIQACKEVNLDSYTREHTKDNLQSVTRGCFDLAQKRIFGLMEKDSYPRFLRSDLYLDLINQKKMSPPL

SEQ ID NO: 12617 - protein, 71 aa, Homo sapiens [sequence omitted]

SEQ ID NO: 12618 - protein, 123 aa, Homo sapiens
LPGEPRGEEQIVPPGRQRARSSSVPREVLRLSLSSESELPSLPLFSEKSKTTKDSPQAARDGKRGVGSAGWPDRVTFRGQYTGRSGGRAGMGAAPGVSGGSSVMRSPFHIPSGPFKYHFLSVL

SEQ ID NO: 12619 - protein, 220 aa, Homo sapiens
LNPQPRPTRQGRPLPRQGATLAGRSSSNAPKYGRGQLNYPLPDFSKVGPRVRFPKDESYRPPKSRSHNRKPQAPARPLIFKSPAEIVQEVLLSSGEAALAKDTPPAHPITRVPQEFQTPEQATELVHQLQEDYHRLLTKYAEAENTIDQLRLGAKVNLFSDPPQPNHSIHTGMVPQGTKVLSFTIPQPRSAEWWPGPAEDPQASAASAWGQPWPCHLASW

SEQ ID NO: 12620 - protein, 28 aa, Homo sapiens
LKTEVPKVRRKHHTEGTGRMADADRNQR

SEQ ID NO: 12621 - protein, 31 aa, Homo sapiens
LGWQNGLEVGQGAMETGGSLGLEQRIHRQVP

SEQ ID NO: 12622 - protein, 13 aa, Homo sapiens
MGPELNQMKRDKV

SEQ ID NO: 12623 - protein, 55 aa, Homo sapiens
LAMKNEPLPHPCCRLSPHAPREEFLHQAAGEGFFPSHMIQDSGGESFLEQRWAQN

SEQ ID NO: 12624 - protein, 196 aa, Homo sapiens
LRMLQCYRCRQWFHEACTQCLNEPMMFGDRFYLFFCSVCNQGPEYIERLPLRWVDVVHLALYNLGVQSKKKYFDFEEILAFVNHHWELLQLGKLTSTPVTDRGPHLLNALNSYKSRFLCGKEIKKKKCIFRLRIRVPPNPPGKLLPDKGLLPNENSASSELRKRGKSKPGVTSPQPGAPTTTWLAYLTSRWMKFKV

SEQ ID NO: 12625 - protein, 208 aa, Homo sapiens
LMENRALDPGTRDSYGATSHLPNKGALAKVKNNFKDLMSKLTEGQYVLCRWTDGLYYLGKIKRVSSSKQSCLVTFEDNSKYWVLWKDIQHAGVPGEEPKCNICLGKTSGPLNEILICGKCGLGYHQQCHIPIAGSADQPLLTPWFCRRCIFALAVRVSLPSSPVPASPASSSGADQRLPSQSLSSKQKGHTWALETDSASATVLGQDL

SEQ ID NO: 12626 - protein, 86 aa, Homo sapiens
LCVAVVESMWRDLEPVSGEADGESSSGSRDSGLLWCHQPPPQQGGPGEGQEQLQRLDVQTDGGPVCAVPVDRWPVLPREDQEGQQL

SEQ ID NO: 12627 - protein, 79 aa, Homo sapiens
LAARTPPGVSGEADGESSSGSRDSGLLWCHQPPPQQGGPGEGQEQLQRLDVQTDGGPVCAVPVDRWPVLPREDQEGQQL

SEQ ID NO: 12628 - protein, 138 aa, Homo sapiens
LSAPAPPSAASPSSPRRPRPAPPPPRPRPRPHGRTLGRAAAGRAQPPPPPMRLVARLQVGPADTQPRVSGEADGESSSGSRDSGLLWCHQPPPQQGGPGEGQEQLQRLDVQTDGGPVCAVPVDRWPVLPREDQEGQQL

SEQ ID NO: 12629 - protein, 87 aa, Homo sapiens
LHYAGLGNPWSLSQRPVSGEADGESSSGSRDSGLLWCHQPPPQQGGPGEGQEQLQRLDVQTDGGPVCAVPVDRWPVLPREDQEGQQL

SEQ ID NO: 12630 - protein, 56 aa, Homo sapiens
LAEGRVCVAGWGRESEGSDELECRQHQMQQCPPPPPPPPALPTEHLLVTLGLLKAG

SEQ ID NO: 12631 - protein, 54 aa, Homo sapiens
VKAGMIQARLRGRLRAGHLVRMAGRGLGPQRQRVQKETGRAAPLCTDHATLGGQ

SEQ ID NO: 12632 - protein, 356 aa, Homo sapiens
VDCALTGEIAVLPRITAHPEVAEAGIGCPFAGVGCSFKGSPQSVQEHEVTSQTSHLNLLLGFMKQWKARLGCGLESGPMALEQNLSDLQLQAAVEVAGDLEVDCYRAPCSESQEELALQHFMKEKLLAELEGKLRVFENIVAVLNKEVEASHLALATSIHQSQLDRERILSLEQRVVELQQTLAQKDQALGKLEQSLRLMEEASFDGTFLWKITNVTRRCHESACGRTVSLFSPAFYTAKYGYKLCLRLYLNGDGTGKRTHLSLFIVIMRGEYDALLPWPFRNKVTFMLLDQNNREHAIDAFRPDLSSASFQRPQSETNVASGCPLFFPLSKLQSPKHAYVKDDTMFLKCIVETST

SEQ ID NO: 12633 - protein, 431 aa, Homo sapiens
LEQLKQALWPAWNPEMASSSGSSPRPAPDENEFPFGCPPTVCQDPKEPRALCCAGCLSENPRNGEDQICPKCRGEDLQSISPGSRLRTQEKAHPEVAEAGIGCPFAGVGCSFKGSPQSVQEHEVTSQTSHLNLLLGFMKQWKARLGCGLESGPMALEQNLSDLQLQAAVEVAGDLEVDCYRAPCSESQEELALQHFMKEKLLAELEGKLRVFENIVAVLNKEVEASHLALATSIHQSQLDRERILSLEQRVVELQQTLAQKDQALGKLEQSLRLMEEASFDGTFLWKITNVTRRCHESACGRTVSLFSPAFYTAKYGYKLCLRLYLNGDGTGKRTHLSLFIVIMRGEYDALLPWPFRNKVTFMLLDQNNREHAIDAFRPDLSSASFQRPQSETNVASGCPLFFPLSKLQSPKHAYVKDDTMFLKCIVETST

SEQ ID NO: 12634 - protein, 8 aa, Homo sapiens
LVPCPGAT

SEQ ID NO: 12635 - protein, 32 aa, Homo sapiens
LGISTRKPSVTIQGIFIATKGNSCSIPAVTQL

SEQ ID NO: 12636 - protein, 237 aa, Homo sapiens
LRSPPSHESFLSNLGDSCGCFQGLSSVMALGLKCFRMVHPTFRNYLAASIRPVSEVTLKTVHERQHGHRQYMAYSAVPVRHFATKKAKGSLDKIAVVTADGKLALNQISQISMKSPQLILVNMASFPECTAAAIKAIRESGMNLNPEVEGTLIRVPIPQVTREHREMLVKLAKQNTNKAKDSLRKVRTNSMNKLKKSKDTVSEDTIRLIEKQISQMADDTVAELDRHLAVKTKELLG

SEQ ID NO: 12637 - protein, 56 aa, Homo sapiens
VYSCSYQGYKRKWNESEPRSGRDANSGTHSPISQMADDTVAELDRHLAVKTKELLG

SEQ ID NO: 12638 - protein, 58 aa, Homo sapiens
LSLSFLSISSATRHQKRSLLLWFLLFLLLLPPLPVLLADPGAPTPGASLGGSRRHQGK

SEQ ID NO: 12639 - protein, 27 aa, Homo sapiens
LVIQSVVFLADDPEQWLVSQICQHLAV

SEQ ID NO: 12640 - protein, 34 aa, Homo sapiens
LSASGCLECGFDSFSCSVRYHRDGDPKVQQECIP

SEQ ID NO: 12641 - protein, 70 aa, Homo sapiens
LHTDGQSTASAPSMLLLTRAEGKKYKPLDLRPKKTRAMRRRLNKHEENLKTKKQQRKERLYPLRKYAVKA

SEQ ID NO: 12642 - protein, 131 aa, Homo sapiens
LRHTLSCAQAKIKARDLRGKKKEELLKQLDDLKVELSQLRVAKVTGGAASKLSKIRVVRKSIARVLTVINQTQKENLRKFYKGKKYKPLDLRPKKTRAMRRRLNKHEENLKTKKQQRKERLYPLRKYAVKA

SEQ ID NO: 12643 - protein, 129 aa, Homo sapiens
LAACAAMAKIKARDLRGKKKEELLKQLDDLKVELSQLRVAKVTGGAASKLSKIRVVRKSIARVLTVINQTQKENLRKFYKGKKYKPLDLRPKKTRAMRRRLNKHEENLKTKKQQRKERLYPLRKYAVKA

SEQ ID NO: 12644 - protein, 740 aa, Homo sapiens
LGLSLWRMGWMGEKTGKILTEFLQFYEDQYGVALFNSMRHEIEGTGLPQAQLLWRKVPLDERIVFSGNLFQHQEDSKKWRNRFSLVPHNYGLVLYENKAAYERQVPPRAVINSAGYKILTSVDQYLELIGNSLPGTTAKSGSAPILKCPTQFPLILWHPYARHYYFCMMTEAEQDKWQAVLQDCIRHCNNGIPEDSKVEGPAFTDAIRMYRQSKELYGTWEMLCGNEVQILSNLVMEELGPELKAELGPRLKGKPQERQRQWIQISDAVYHMVYEQAKARFEEVLSKVQQVQPAMQAVIRTDMDQIITSKEHLASKIRAFILPKAEVCVRNHVQPYIPSILEALMVPTSQGFTEVRDVFFKEVTDMNLNVINEGGIDKLGEYMEKLSRLAYHPLKMQSCYEKMESLRLDGLQQRFDVSSTSVFKQRAQIHMREQMDNAVYTFETLLHQELGKGPTKEELCKSIQRVLERVLKKYDYDSSSVRKRFFREALLQISIPFLLKKLAPTCKSELPRFQELIFEDFARFILVENTYEEVVLQTVMKDILQAVKEAAVQRKHNLYRDSMVMHNSDPNLHLLAEGAPIDWGEEYSNSGGGGSPSPSTPESATLSEKRRRAKQVVSVVQDEEVGLPFEASPESPPPASPDGVTEIRGLLAQGLRPESPPPAGPLLNGAPAGESPQPKAAPEASSPPASPLQHLLPGKAVDLGPPKPSDQETGEQVSSPSSHPALHTTTEDSAGVQTEF

SEQ ID NO: 12645 - protein, 101 aa, Homo sapiens
LVLYENKAAYERQVPPRAVINSAGYKILTSVDQYLELIGNSLPGKGAPIPGHNALHRHLELARGGVALSPLLSAPCLRRDQLGLELWMETSLFAFRISLSP

SEQ ID NO: 12646 - protein, 639 aa, Homo sapiens
VPRRWGLRAGSCAPESTVSWAGAERRPRGRWEGGKAKDAVGRAQSWAAEIMHDVIKKVKKKGEWKVLVVDQLSMRMLSSCCKMTDIMTEGITIVEDINKRREPLPSLEAVYLITPSEKSVHSLISDFKDPPTAKYRAAHVFFTDSCPDALFNELVKSRAAKVIKTLTEINIAFLPYESQVYSLDSADSFQSFYSPHKAQMKNPILERLAEQIATLCATLKEYPAVRYRGEYKDNALLAQLIQDKLDAYKADDPTMGEGPDKARSQLLILDRGFDPSSPVLHELTFQAMSYDLLPIENDVYKYETSGIGEARVKEVLLDEDDDLWIALRHKHIAEVSQEVTRSLKDFSSSKRMNTGEKTTMRDLSQMLKKMPQYQKELSKYSTHLHLAEDCMKHYQGTVDKLCRVEQDLAMGTDAEGEKIKDPMRAIVPILLDANVSTYDKIRIILLYIFLKNGITEENLNKLIQHAQIPPEDSEIITNMAHLGVPIVTDSTLRRRSKPERKERISEQTYQLSRWTPIIKDIMEDTIEDKLDTKHYPYISTRSSASFSTTAVSARYGHWHKNKAPGEYRSGPRLIIFILGGVSLNEMRCAYEVTQANGKWEVLIGSTHILTPTKFLMDLRHPDFRESSRVSFEDQAPTME

SEQ ID NO: 12647 - protein, 28 aa, Homo sapiens
MAPIGLKAVVGERYIPRNGVAGSLCLVI

SEQ ID NO: 12648 - protein, 69 aa, Homo sapiens
MAPIGLKAVVGEKIMHDVIKKVKKKGEWKVLVVDQLSMRMLSSCCKMTDIMTEGITNSSSNLCAKTRSS

SEQ ID NO: 12649 - protein, 126 aa, Homo sapiens
MAPIGLKAVVGEKIMHDVIKKVKKKGEWKVLVVDQLSMRMLSSCCKMTDIMTEGITRAGLLDHMLWKISISAESRSPAWRLCISSLHPRSPSTLSSVTLRTRRLLNTGLHTSSSLTLVQMPCLMNW

SEQ ID NO: 12650 - protein, 64 aa, Homo sapiens
LTEINIAFLPYESQVYSLDSADSFQSFYSPHKAQMKNPILERLAEQIATLCATLKEYPAVRYRG

SEQ ID NO: 12651 - protein, 462 aa, Homo sapiens
LETNKIIKQIKVYSLDSADSFQSFYSPHKAQMKNPILERLAEQIATLCATLKEYPAVRYRGEYKDNALLAQLIQDKLDAYKADDPTMGEGPDKARSQLLILDRGFDPSSPVLHELTFQAMSYDLLPIENDVYKYETSGIGEARVKEVLLDEDDDLWIALRHKHIAEVSQEVTRSLKDFSSSKRMNTGEKTTMRDLSQMLKKMPQYQKELSKYSTHLHLAEDCMKHYQGTVDKLCRVEQDLAMGTDAEGEKIKDPMRAIVPILLDANVSTYDKIRIILLYIFLKNGITEENLNKLIQHAQIPPEDSEIITNMAHLGVPIVTDSTLRRRSKPERKERISEQTYQLSRWTPIIKDIMEDTIEDKLDTKHYPYISTRSSASFSTTAVSARYGHWHKNKAPGEYRSGPRLIIFILGGVSLNEMRCAYEVTQANGKWEVLIGSTHILTPQKLLDTLKKLNKTDEEISS

SEQ ID NO: 12652 - protein, 227 aa, Homo sapiens
LSMDLAMGTDAEGEKIKDPMRAIVPILLDANVSTYDKIRIILLYIFLKNGITEENLNKLIQHAQIPPEDSEIITNMAHLGVPIVTDSTLRRRSKPERKERISEQTYQLSRWTPIIKDIMEDTIEDKLDTKHYPYISTRSSASFSTTAVSARYGHWHKNKAPGEYRSGPRLIIFILGGVSLNEMRCAYEVTQANGKWEVLIGSTHILTPQKLLDTLKKLNKTDEEISS

SEQ ID NO: 12653 - protein, 122 aa, Homo sapiens
MQERHCLCLVSTRLMDTIEDKLDTKHYPYISTRSSASFSTTAVSARYGHWHKNKAPGEYRSGPRLIIFILGGVSLNEMRCAYEVTQANGKWEVLIGSTHILTPQKLLDTLKKLNKTDEEISS

SEQ ID NO: 12654 - protein, 214 aa, Homo sapiens
LDVGGGRQTVGNTIGCCGVMTSGGGVGVNGGSMRPGGFLGAGQRLSRAMSRCVLEPRPPGKRWMVAGLGNPGLPGTRHSVGMAVLGQLARRLGVAESWTRDRHCAADLALAPLGDAQLVLLRPRRLMNANGRSVARAAELFGLTAEEVYLVHDELDKPLGRLALKLGGSARQCQGCGWVSGARRTLRRFRPMCWAASPLLSRSCCLCCWIEPPT

SEQ ID NO: 12655 - protein, 251 aa, Homo sapiens
LALKQHQACLTLITNELKQDTTNADVYIFRARLYNFLQKPHLCYRDLHSALLLNPKHPQARMLLQKMVAQAQQARQDAGILAVQGKLQHALQRINRAIENNPLDPSLFLFRGTMYRRLQEFDGAVEDFLKVLDMVTEDQEDMVRQAQRQLLLTYNDFAVHCYRQGAYQEGVLLLNKALRDEQQEKGLYINRGGSSRRQRTTSPRPSGTTPRRPSTTCTGPRAGSCCRTFLGPARMWPLSCSSTPSNQSCPC

SEQ ID NO: 12656 - protein, 221 aa, Homo sapiens
LKQDTTNADVYIFRARLYNFLQKPHLCYRDLHSALLLNPKHPQARMLLQKMVAQAQQARQDAGILAVQGKLQHALQRINRAIENNPLDPSLFLFRGTMYRRLQEFDGAVEDFLKVLDMVTEDQEDMVRQAQRQLLLTYNDFAVHCYRQGAYQEGVLLLNKALRDEQQEKGLYINRGGAQRPGHWGGGVRGSLAISKAPTGHLRPLGGRRKGERKEAREEEM

SEQ ID NO: 12657 - protein, 541 aa, Homo sapiens
LRRGVISHQFQALAPGLEPAGLGLPGTGSWGSTHPRLRTLDCFFQLGNLAFAEADYQQALALSPQDEGANTRMGLLQEKMGFCEQRRKQFQKAENHFSTAIRHNPQKAQYYLYRAKSRQLLQNIFGARQDVATVLLLNPKQPKLSLLMTNLFPGMSVEEVLSTQIAHLARLQLEQMVEGSLQAGSPQGIVGMLKRHELERQKALALQHSWKQGEPLIATSEELKATPEIPQVKPGSSEGEAEAPEEEEEKEKEKKEEKKSELIPSKVASLSDSYLDQTSSASSMSFRTTGTSETEMSAICQEYRSTSATAVTFSDSSLLKTQSSDSGNNREALSHGPRKIKATQGQRQSLSKTEPTQSQRRNSSKTKATIHKRNSSKTKATQSQRRNSSKTRATQGQGQSSSKTEATQGQRQSSSEIEATQGPRQEPSKTKTTRSPRQRPRKVKAARGRSWRPSKVDATQGRSRGLLRSSTKTEAFYDSNWSLSKTEYAQGQGQRSSKAEGAQGKSQGMSSTSSKAESTWGPSPSLSKTEVDQDLTYYEAV

SEQ ID NO: 12658 - protein, 737 aa, Homo sapiens
LRGTRSRCLAGWSLRPCPAGHRPPTPSRPRQPGPTMTERCSLWSALSAAACCFYRGSFVQVQFSKEKYILDSSPEKLHKELEEELKLSSTDLRSHAWYHGRIPREVSETLVQRNGDFLIRDSLTSLGDYVLTCRWRNQALHFKINKVVVKAGESYTHIQYLFEQESFDHVPALVRYHVGSRKAVSEQSGAIIYCPVNRTFPLRYLEASYGLGQGSSKPASPVSPSGPKGSHMKRRSVTMTDGLTADKVTRSDGCPTSTSLPRPRDSIRSCALSMDQIPDLHSPMSPISESPSSPAYSTVTRVHAAPAAPSATALPASPVARRSSEPQLCPGSAPKTHGESDKGPHTSPSHTLGKASPSPSLSSYSDPDSGHYCQLQPPVRGSREWAATETSSQQARSYGERLKELSENGAPEGDWGKTFTVPIVEVTSSFNPATFQSLLIPRDNRPLEVGLLRKVKELLAEVDARTLARHVTKVDCLVARILGVTKEMQTLMGVRWGMELLTLPHGRQLRLDLLERFHTMSIMLAVDILGCTGSAEERAALLHKTIQLAAELRGTMGNMFSFAAVMGALDMAQISRLEQTWVTLRQRHTEGAILYEKKLKPFLKSLNEGKEGPPLSNTTFPHVLPLITLLECDSAPPEGPEPWGSTEHGVEVVLAHLEAARTVAHHGGLYHTNAEVKLQGFQARPELLEVFSTEFQMRLLWGSQGASSSQARRYEKFDKVLTALSHKLEPAVRSSEL

SEQ ID NO: 12659 - protein, 735 aa, Homo sapiens
LRGTRSRCLAGWSLRPCPAGHRPPTPSRPRQPGPTMTERCSLWSALSAAACCFYRGSFVQFSKEKYILDSSPEKLHKELEEELKLSSTDLRSHAWYHGRIPREVSETLVQRNGDFLIRDSLTSLGDYVLTCRWRNQALHFKINKVVVKAGESYTHIQYLFEQESFDHVPALVRYHVGSRKAVSEQSGAIIYCPVNRTFPLRYLEASYGLGQGSSKPASPVSPSGPKGSHMKRRSVTMTDGLTADKVTRSDGCPTSTSLPRPRDSIRSCALSMDQIPDLHSPMSPISESPSSPAYSTVTRVHAAPAAPSATALPASPVARRSSEPQLCPGSAPKTHGESDKGPHTSPSHTLGKASPSPSLSSYSDPDSGHYCQLQPPVRGSREWAATETSSQQARSYGERLKELSENGAPEGDWGKTFTVPIVEVTSSFNPATFQSLLIPRDNRPLEVGLLRKVKELLAEVDARTLARHVTKVDCLVARILGVTKEMQTLMGVRWGMELLTLPHGRQLRLDLLERFHTMSIMLAVDILGCTGSAEERAALLHKTIQLAAELRGTMGNMFSFAAVMGALDMAQISRLEQTWVTLRQRHTEGAILYEKKLKPFLKSLNEGKEGPPLSNTTFPHVLPLITLLECDSAPPEGPEPWGSTEHGVEVVLAHLEAARTVAHHGGLYHTNAEVKLQGFQARPELLEVFSTEFQMRLLWGSQGASSSQARRYEKFDKVLTALSHKLEPAVRSSEL

SEQ ID NO: 12660 - protein, 692 aa, Homo sapiens
VSAGAAGEPEAGSDYVKFSKEKYILDSSPEKLHKELEEELKLSSTDLRSHAWYHGRIPREVSETLVQRNGDFLIRDSLTSLGDYVLTCRWRNQALHFKINKVVVKAGESYTHIQYLFEQESFDHVPALVRYHVGSRKAVSEQSGAIIYCPVNRTFPLRYLEASYGLGQGSSKPASPVSPSGPKGSHMKRRSVTMTDGLTADKVTRSDGCPTSTSLPRPRDSIRSCALSMDQIPDLHSPMSPISESPSSPAYSTVTRVHAAPAAPSATALPASPVARRSSEPQLCPGSAPKTHGESDKGPHTSPSHTLGKASPSPSLSSYSDPDSGHYCQLQPPVRGSREWAATETSSQQARSYGERLKELSENGAPEGDWGKTFTVPIVEVTSSFNPATFQSLLIPRDNRPLEVGLLRKVKELLAEVDARTLARHVTKVDCLVARILGVTKEMQTLMGVRWGMELLTLPHGRQLRLDLLERFHTMSIMLAVDILGCTGSAEERAALLHKTIQLAAELRGTMGNMFSFAAVMGALDMAQISRLEQTWVTLRQRHTEGAILYEKKLKPFLKSLNEGKEGPPLSNTTFPHVLPLITLLECDSAPPEGPEPWGSTEHGVEVVLAHLEAARTVAHHGGLYHTNAEVKLQGFQARPELLEVFSTEFQMRLLWGSQGASSSQARRYEKFDKVLTALSHKLEPAVRSSEL

SEQ ID NO: 12661 - protein, 854 aa, Homo sapiens
LQLSGPRKAGAAGFRRSPGCRRRQRGKHDCCGPKVPRAGVPRVLRLGWQLSGPSILSSALGRMAPALPSPHKAVARPELLLDTAAHSGKLRAPDGGEGAECAGHNGGPSWGVGQGQSQEPSRQGIPQAPWLVSWQRRGFPPSSFCPGPLRTEKLRAGRCPLLLCGGAAGEPEAGSDYVKFSKEKYILDSSPEKLHKELEEELKLSSTDLRSHAWYHGRIPREVSETLVQRNGDFLIRDSLTSLGDYVLTCRWRNQALHFKINKVVVKAGESYTHIQYLFEQESFDHVPALVRYHVGSRKAVSEQSGAIIYCPVNRTFPLRYLEASYGLGQGSSKPASPVSPSGPKGSHMKRRSVTMTDGLTADKVTRSDGCPTSTSLPRPRDSIRSCALSMDQIPDLHSPMSPISESPSSPAYSTVTRVHAAPAAPSATALPASPVARRSSEPQLCPGSAPKTHGESDKGPHTSPSHTLGKASPSPSLSSYSDPDSGHYCQLQPPVRGSREWAATETSSQQARSYGERLKELSENGAPEGDWGKTFTVPIVEVTSSFNPATFQSLLIPRDNRPLEVGLLRKVKELLAEVDARTLARHVTKVDCLVARILGVTKEMQTLMGVRWGMELLTLPHGRQLRLDLLERFHTMSIMLAVDILGCTGSAEERAALLHKTIQLAAELRGTMGNMFSFAAVMGALDMAQISRLEQTWVTLRQRHTEGAILYEKKLKPFLKSLNEGKEGPPLSNTTFPHVLPLITLLECDSAPPEGPEPWGSTEHGVEVVLAHLEAARTVAHHGGLYHTNAEVKLQGFQARPELLEVFSTEFQMRLLWGSQGASSSQARRYEKFDKVLTALSHKLEPAVRSSEL

SEQ ID NO: 12662 - protein, 760 aa, Homo sapiens
VEWGRARSAGACLGAWSTGQSPPPESGTELCSSVARERQEPLGLGGPRVAGGDSGGSMTAVGRRCPALGSRGAAGEPEAGSDYVKFSKEKYILDSSPEKLHKELEEELKLSSTDLRSHAWYHGRIPREVSETLVQRNGDFLIRDSLTSLGDYVLTCRWRNQALHFKINKVVVKAGESYTHIQYLFEQESFDHVPALVRYHVGSRKAVSEQSGAIIYCPVNRTFPLRYLEASYGLGQGSSKPASPVSPSGPKGSHMKRRSVTMTDGLTADKVTRSDGCPTSTSLPRPRDSIRSCALSMDQIPDLHSPMSPISESPSSPAYSTVTRVHAAPAAPSATALPASPVARRSSEPQLCPGSAPKTHGESDKGPHTSPSHTLGKASPSPSLSSYSDPDSGHYCQLQPPVRGSREWAATETSSQQARSYGERLKELSENGAPEGDWGKTFTVPIVEVTSSFNPATFQSLLIPRDNRPLEVGLLRKVKELLAEVDARTLARHVTKVDCLVARILGVTKEMQTLMGVRWGMELLTLPHGRQLRLDLLERFHTMSIMLAVDILGCTGSAEERAALLHKTIQLAAELRGTMGNMFSFAAVMGALDMAQISRLEQTWVTLRQRHTEGAILYEKKLKPFLKSLNEGKEGPPLSNTTFPHVLPLITLLECDSAPPEGPEPWGSTEHGVEVVLAHLEAARTVAHHGGLYHTNAEVKLQGFQARPELLEVFSTEFQMRLLWGSQGASSSQARRYEKFDKVLTALSHKLEPAVRSSEL

SEQ ID NO: 12663 - protein, 875 aa, Homo sapiens
VATRKLAKGFTQFAKMTEGTKKTSKKFKFFKFKGFGSLSNLPRSFTLRRSSASISRQSHLEPDTFEATQDDMVTVPKSPPAYARSSDMYSHMGTMPRPSIKKAQNSQAARQAQEAGPKPNLVPGGVPDPPGLEAAKEVMVKATGPLEDTPAMEPNPSAVEVDPIRKPEVPTGDVEEERPPRDVHSERAAGEPEAGSDYVKFSKEKYILDSSPEKLHKELEEELKLSSTDLRSHAWYHGRIPREVSETLVQRNGDFLIRDSLTSLGDYVLTCRWRNQALHFKINKVVVKAGESYTHIQYLFEQESFDHVPALVRYHVGSRKAVSEQSGAIIYCPVNRTFPLRYLEASYGLGQGSSKPASPVSPSGPKGSHMKRRSVTMTDGLTADKVTRSDGCPTSTSLPRPRDSIRSCALSMDQIPDLHSPMSPISESPSSPAYSTVTRVHAAPAAPSATALPASPVARRSSEPQLCPGSAPKTHGESDKGPHTSPSHTLGKASPSPSLSSYSDPDSGHYCQLQPPVRGSREWAATETSSQQARSYGERLKELSENGAPEGDWGKTFTVPIVEVTSSFNPATFQSLLIPRDNRPLEVGLLRKVKELLAEVDARTLARHVTKVDCLVARILGVTKEMQTLMGVRWGMELLTLPHGRQLRLDLLERFHTMSIMLAVDILGCTGSAEERAALLHKTIQLAAELRGTMGNMFSFAAVMGALDMAQISRLEQTWVTLRQRHTEGAILYEKKLKPFLKSLNEGKEGPPLSNTTFPHVLPLITLLECDSAPPEGPEPWGSTEHGVEVVLAHLEAARTVAHHGGLYHTNAEVKLQGFQARPELLEVFSTEFQMRLLWGSQGASSSQARRYEKFDKVLTALSHKLEPAVRSSEL

SEQ ID NO: 12664 - protein, 78 aa, Homo sapiens
LIPRDNRPLEVGLLRKVKELLAEVDARTLARHVTKVDCLVARILGVTKEMQTLMGVRWGMELLTLPHGRQLRLDLLER

SEQ ID NO: 12665 - protein, 118 aa, Homo sapiens
VMVKATGPLEDTPAMEPNPSAVEVDPIRKPEVPTGDVEEERPPRDVHSESSPRRSTSWTHRQRNSTRNWRRSSNSAARISAAMPGTMAASPESNPCPCRPCSPFCHSIACLPCRPPFQ

SEQ ID NO: 12666 - protein, 53 aa, Homo sapiens
VATRKLAKGFTQFAKMTEGTKKTSKKVLQVQGLWESLQPPSVLHSETILSFHQ

SEQ ID NO: 12667 - protein, 63 aa, Homo sapiens
LQRPRLQRMPYHYYEPKGPDECVTYIQNEHSRKGNHHRFITEKRVFSSWAQLYGITFSHPSWT

SEQ ID NO: 12668 - protein, 148 aa, Homo sapiens
LPSSPSSSSTAPTVPMRSSITAPCGAVAADLSTSRSGASLTAMSPFSATREKSHSWLSTGWFTMVIAVELCDHVHVYGMVPPNYCSQRPRLQRMPYHYYEPKGPDECVTYIQNEHSRKGNHHRFITEKRVFSSWAQLYGITFSHPSWT

SEQ ID NO: 12669 - protein, 147 aa, Homo sapiens
LPSTSSCAAGPACPSAWPPAWTTTSPQAPGPLCRDPCTSVDIAVCQMGRRQSGSFLSTGWFTMILALELCEEIVVYGMVSDSYCREKSHPSVPYHYFEKGRLDECQMYLAHEQAPRSAHRFITEKAVFSRWAKKRPIVFAHPSWRTE

SEQ ID NO: 12670 - protein, 24 aa, Homo sapiens
LGDSLGLFISYVMLKTKRVTKKAQ

SEQ ID NO: 12671 - protein, 24 aa, Homo sapiens
LPEPDCIRRGVSMARPWPPTSTTS

SEQ ID NO: 12672 - protein, 163 aa, Homo sapiens
VLSPRKLEATSAQNIEFLQVIAKREEAIHQSQLRLEEKTRECGTLARQLESAIEDARRQVEQTKEHALSKERAAQNKILDLETQLSRTKTELSQLRRSRDDADRRYQSRLQDLKDRLEQSESTNRSMQNYVQFLKSSYANVFGDGPYSTFLTSSPIRSRSPPA

SEQ ID NO: 12673 - protein, 548 aa, Homo sapiens
LSASAREGGTVSMATRAQPGPLSQAGSAGVAALATVGVASGPGPGRPGPLQDETLGVASVPSQWRAVQGIRWETKSCQTASIATASASAQARNHVDAQVQTEAPVPVSVQPPSQYDIPRLAAFLRRVEAMVIRELNKNWQSHAFDGFEVNWTEQQQMVSCLYTLGYPPAQAQGLHVTSISWNSTGSVVACAYGRLDHGDWSTLKSFVCAWNLDRRDLRPQQPSAVVEVPSAVLCLAFHPTQPSHVAGGLYSGEVLVWDLSRLEDPLLWRTGLTDDTHTDPVSQVVWLPEPGHSHRFQVLSVATDGKVLLWQGIGVGQLQLTEGFALVMQQLPRSTKLKKHPRGETEVGATAVAFSSFDPRLFILGTEGGFPLKCSLAAGEAALTRMPSSVPLRAPAQFTFSPHGGPIYSVSCSPFHRNLFLSAGTDGHVHLYSMLQAPPLTSLQLSLKYLFAVRWSPVRPLVFAAASGKGDVQLFDLQKSSQKPTVLIKQTQDESPVYCLEFNSQQTQLLAAGDAQGTVKVWQLSTEFTEQGPREAEDLDCLAAEVAA

SEQ ID NO: 12674 - protein, 137 aa, Homo sapiens
VSCLYTLGYPPAQAQGLHVTSISWNSTGSVVACAYGRLDHGDWSTLKSFVCAWNLDRRDLRPQQPSAVVEVPSAVLCLAFHPTQPSHVAGGLYSGEVLVWDLSRLEDPLLWRTGLTDDTHTDPVSQVRAGAAGRGGP

SEQ ID NO: 12675 - protein, 261 aa, Homo sapiens
LATVGVASGPGPGRPGPLQDETLGVASVPSQWRAVQGIRWETKSCQTASIATASASAQARNHVDAQVQTEAPVPVSVQPPSQYDIPRLAAFLRRVEAMVIRELNKNWQSHAFDGFEVNWTEQQQMVSCLYTLGYPPAQAQGLHVTSISWNSTGSVVACAYGRLDHGDWSTLKSFVCAWNLDRRDLRPQQPSAVVEVPSAVLCLAFHPTQPSHVAGELPAVSASSPLRTQLPALQRAQGSFPWALWPGDRKAGPDPLSLEPR

SEQ ID NO: 12676 - protein, 140 aa, Homo sapiens
LRSGRARRPCGHAMDFNMKKLASDAGIFFTRAVQFTEEKFGQAEKTELDAHFENLLARADSTKNWTEKILRQTEVLLQPNPSARVEEFLYEKLDRKVPSRVTNGELLAQYMADAASELGPTTPYDRILLCHPDWSAVVQS

SEQ ID NO: 12677 - protein, 413 aa, Homo sapiens
LLRRRLRGSMECALDAQSLISISLRKIHSSRTQRGGIKLHKNLLVSYVLRNARQLYLSERYAELYRRQQQQQQQQPPHHQHQHLAYAAPGMPASAADFGPLQLGGGGDAEAREPAARHQLHQLHQLHQLHLQQQLHQHQHPAPRGCAAAAAAGAPAGGAGALSELPGCAALQPPHGAPHRGQPLEPLQPGPAPLPLPLPPPAPAALCPRDPRAPAACSAPPGAAPPAAAASPPASPAPASSPGFYRGAYPTPSDFGLHCSSQTTVLDLDTHVVTTVENGYLHQDCCASAHCPCCGQGAPGPGLASAAGCKRKYYPGQEEEEDDEEDAGGLGAEPPGGAPFAPCKRARFEDFCPDSSPDASNISNLISIFGSGFSGLVSRQPDSSEQPPPLNGQLCAKQALASLGAWTRAIVAF

SEQ ID NO: 12678 - protein, 64 aa, Homo sapiens
LRRLFVQSEAPPAGLDVRLAGPGTAPHRGPLGAGRHRWGPRAGHAFGIRLRSRPPDLGQVLSTL

SEQ ID NO: 12679 - protein, 71 aa, Homo sapiens
LTWGKCFQLSELRFLICQLADAQQIFLDSRGELYSWVNRGPEMAKGPSKVVQPPGITILFCRVTRCHPRVT

SEQ ID NO: 12680 - protein, 36 aa, Homo sapiens
VLRKLPHIICSRTGELEPWSGHSATDHSFLISKKAQ

SEQ ID NO: 12681 - protein, 87 aa, Homo sapiens
LLLTTVFSSLKRRSNNIITVCSPPGYRVKGEHNHRSWKPMGQQGPGHSEHTIDISCCGVLISSPVQMHLTYETSVTPALCQTLKMEQ

SEQ ID NO: 12682 - protein, 38 aa, Homo sapiens
LAKRAKLHPKKKKKTKLQLREVETLAQGPTARPWPSWG

SEQ ID NO: 12683 - protein, 25 aa, Homo sapiens
VNSTDPACPPVACRPDAVPLFADFH

SEQ ID NO: 12684 - protein, 61 aa, Homo sapiens
LSSCCLQARSKVSLCYPGWSAVATYRHDHSILQPRTPGLEQFSCLSLQSSWDCRHAPQSPA

SEQ ID NO: 12685 - protein, 54 aa, Homo sapiens
MRSKVSLCYPGWSAVATYRHDHSILQPRTPGLEQFSCLSLQSSWDCRHAPQSPA

SEQ ID NO: 12686 - protein, 57 aa, Homo sapiens
LRLQTSKVSLCYPGWSAVATYRHDHSILQPRTPGLEQFSCLSLQSSWDCRHAPQSPA

SEQ ID NO: 12687 - protein, 45 aa, Homo sapiens
MSHRARSIFIFFVETGFHHVGQAGVELPTSGDCRPWPPKVLGLQA

SEQ ID NO: 12688 - protein, 124 aa, Homo sapiens
MLARLVSNSRPQVIVGLGLPKCWDYRREPPRPAGGQPVVFREEEDTLERQWGQTLNCLWKQVGATAKVCWLRSKVSLCYPGWSAVATYRHDHSILQPRTPGLEQFSCLSLQSSWDCRHAPQSPA

SEQ ID NO: 12689 - protein, 29 aa, Homo sapiens
LNTSGVRSGTDTGRSIGELPPATSGPALR

SEQ ID NO: 12690 - protein, 26 aa, Homo sapiens
LNTSGVRSGTDTGRSIDAVPLFADFH

SEQ ID NO: 12691 - protein, 53 aa, Homo sapiens
VSSRLPPLGLHCGDRAKGLGLQFSRLAKMLSAGLVGNCRQAEAAPGLCLCLAQ

SEQ ID NO: 12692 - protein, 22 aa, Homo sapiens
MCLAHTEKQSPADAVPLFADFH

SEQ ID NO: 12693 - protein, 434 aa, Homo sapiens
VVHCTVKTDSRRRELTPPIPDAMSSKGSVVLAYSGGLDTSCILVWLKEQGYDVIAYLANIGQKEDFEEARKKALKLGAKKVFIEDVSREFVEEFIWPAIQSSALYEDRYLLGTSLARPCIARKQVEIAQREGAKYVSHGATGKGNDQVRFELSCYSLAPQIKVIAPWRMPEFYNRFKGRNDLMEYAKQHGIPIPVTPKNPWSMDENLMHISYEAGILENPKNQAPPGLYTKTQDPAKAPNTPDILEIEFKKGVPVKVTNVKDGTTHQTSLELFMYLNEVAGKHGVGRIDIVENRFIGMKSRGIYETPAGTILYHAHLDIEAFTMDREVRKIKQGLGLKFAELVYTGFWHSPECEFVRHCIAKSQERVEGKVQVSVLKGQVYILGRESPLSLYNEELVSMNVQGDYEPTDATGFININSLRLKEYHRLQSKVTAK

SEQ ID NO: 12694 - protein, 488 aa, Homo sapiens [sequence omitted]

SEQ ID NO: 12695 - protein, 176 aa, Homo sapiens
MGNVYHPPTYHDMLPAFMCSPKSSENQGTVERGSFPLPQLRLEPRVPFRQFQMNDQDGKENRLGLSRPLRPLRQLVERAPRPTIINAENLKGLDDLDADADDGWAGGQRSTGGLDGQDQSPYVLTRDGNPLAPPCVFPWQDRDEEPDREADLMPSFLIYSLTRGSFLAKPLASFGL

SEQ ID NO: 12696 - protein, 83 aa, Homo sapiens
LRRGLWEYFVGRTLAGPARRTGMAAEAADLGLGAAVPVELRRERRMVCVEYPGVVRDVAKMLPTLGGEEGVSRGRLQQSPHLR

SEQ ID NO: 12697 - protein, 896 aa, Homo sapiens
VSGREAGPQGLMCLWGHSTAPAHTLSSPPLLFCSLPCALHLQPGTGHPPGQVPRKSSTQEIGEELINGVIYSISLRKVQLHHGGNKGQRWLGYENESALNLYETCKVRTVKAGTLEKLVEHLVPAFQGSDLSYVTIFLCTYRAFTTTQQVLDLLFKRYGCILPYSDEDGGPQDQLKNAISSILGTWLDQYSEDFCQPPDFPCLKQLVAYVQLNMPGSDLERRAHLLLAQLEHSEPIEAEPEALSPVPALKPTPELELALTPARAPSPVPAPAPEPEPAPTPAPGSELEVAPAPAPELQQAPEPAVGLESAPAPALELEPAPEQDPAPSQTLELEPAPAPVPSLQPSWPSPVVAENGLSEEKPHLLVFPPDLVAEQFTLMDAELFKKVVPYHCLGSIWSQRDKKGKEHLAPTIRATVTQFNSVANCVITTCLGNRSTKAPDRARVVEHWIEVARECRILKNFSSLYAILSALQSNSIHRLKKTWEDVSRDSFRIFQKLSEIFSDENNYSLSRELLIKEGTSKFATLEMNPKRAQKRPKETGIIQGTVPYLGTFLTDLVMLDTAMKDYLYGRLINFEKRRKEFEVIAQIKLLQSACNNYSIAPDEQFGAWFRAVERLSETESYNLSCELEPPSESASNTLRTKKNTAIVKRWSDRQAPSTELSTSGSSHSKSCDQLRCGPYLSSGDIADALSVHSAGSSSSDVEEINISFVPESPDGQEKKFWESASQSSPETSGISSASSSTSSSSASTTPVAATRTHKRSVSGLCNSSSALPLYNQQVGDCCIIRVSLDVDNGNMYKSILVTSQDKAPAVIRKAMDKHNLEEEEPEDYELLQILSDDRKLKIPENANVFYAMNSTANYDFVLKKRTFTKGVKVKHGASSTLPRMKQKGLKIAKGIF

SEQ ID NO: 12698 - protein, 962 aa, Homo sapiens
LRAGWGGAAAVPAHPGPSPGSRGGTERRGPSGRSAARRRQWERRWRLPGRPRGPQSPGPGGDRRPRHEPRSRAHPCAARGPRRAASASPGSRPGAGDVPPRLRMMVDCQSSTQEIGEELINGVIYSISLRKVQLHHGGNKGQRWLGYENESALNLYETCKVRTVKAGTLEKLVEHLVPAFQGSDLSYVTIFLCTYRAFTTTQQVLDLLFKRYGRCDALTASSRYGCILPYSDEDGGPQDQLKNAISSILGTWLDQYSEDFCQPPDFPCLKQLVAYVQLNMPGSDLERRAHLLLAQLEHSEPIEAEPEALSPVPALKPTPELELALTPARAPSPVPAPAPEPEPAPTPAPGSELEVAPAPAPELQQAPEPAVGLESAPAPALELEPAPEQDPAPSQTLELEPAPAPVPSLQPSWPSPVVAENGLSEEKPHLLVFPPDLVAEQFTLMDAELFKKVVPYHCLGSIWSQRDKKGKEHLAPTIRATVTQFNSVANCVITTCLGNRSTKAPDRARVVEHWIEVARECRILKNFSSLYAILSALQSNSIHRLKKTWEDVSRDSFRIFQKLSEIFSDENNYSLSRELLIKEGTSKFATLEMNPKRAQKRPKETGIIQGTVPYLGTFLTDLVMLDTAMKDYLYGRLINFEKRRKEFEVIAQIKLLQSACNNYSIAPDEQFGAWFRAVERLSETESYNLSCELEPPSESASNTLRTKKNTAIVKRWSDRQAPSTELSTSGSSHSKSCDQLRCGPYLSSGDIADALSVHSAGSSSSDVEEINISFVPESPDGQEKKFWESASQSSPETSGISSASSSTSSSSASTTPVAATRTHKRSVSGLCNSSSALPLYNQQVGDCCIIRVSLDVDNGNMYKSILVTSQDKAPAVIRKAMDKHNLEEEEPEDYELLQILSDDRKLKIPENANVFYAMNSTANYDFVLKKRTFTKGVKVKHGASSTLPRMKQKGLKIAKGIF

SEQ ID NO: 12699 - protein, 745 aa, Homo sapiens
LDQYSEDFCQPPDFPCLKQLVAYVQLNMPGSDLERRAHLLLAQLEHSEPIEAEPEALSPVPALKPTPELELALTPARAPSPVPAPAPEPEPAPTPAPGSELEVAPAPAPELQQAPEPAVGLESAPAPALELEPAPEQDPAPSQTLELEPAPAPVPSLQPSWPSPVVAENGLSEEKPHLLVFPPDLVAEQFTLMDAELFKKVVPYHCLGSIWSQRDKKGKEHLAPTIRATVTQFNSVANCVITTCLGNRSTKAPDRARVVEHWIEVARECRILKNFSSLYAILSALQSNSIHRLKKTWEDVSRDSFRIFQKLSEIFSDENNYSLSRELLIKEGTSKFATLEMNPKRAQKRPKETGIIQGTVPYLGTFLTDLVMLDTAMKDYLYGRLINFEKRRKEFEVIAQIKLLQSACNNYSIAPDEQFGAWFRAVERLSETESYNLSCELEPPSESASNTLRTKKNTAIVKRWSDRQAPSTELSTSGSSHSKSCDQLRCGPYLSSGDIADALSVHSAGSSSSDVEEINISFVPESPDGQEKKVTACPSPQYPFPSPHSKSMHGARKPWILNTASRRFPIWQLAWGAPTGQWDLLILPSPSVLGISLTVIPGDLRHQLSLQQHLVLLSLHHARGCHTHPQALCLRALQLQLRAAALQPAGGRLLYHPRQPGRGQWQHVQEHPGKPAGVAWVPPSTGGKCTLNTVHHPCPPGVYLVVGGEGQMSARYRNEEGSDQGQGWPEGRGGGKEQPCKAPRS

SEQ ID NO: 12700 - protein, 824 aa, Homo sapiens
MVQRMWAEAAGPAGGAEPLFPGSRRSRSVWDAVRLEVGVPDSCPVVLHSFTQLDPDLPRPESSTQEIGEELINGVIYSISLRKVQLHHGGNKGQRWLGYENESALNLYETCKVRTVKAGTLEKLVEHLVPAFQGSDLSYVTIFLCTYRAFTTTQQVLDLLFKRYGCILPYSDEDGGPQDQLKNAISSILGTWLDQYSEDFCQPPDFPCLKQLVAYVQLNMPGSDLERRAHLLLAQLEHSEPIEAEPEALSPVPALKPTPELELALTPARAPSPVPAPAPEPEPAPTPAPGSELEVAPAPAPELQQAPEPAVGLESAPAPALELEPAPEQDPAPSQTLELEPAPAPVPSLQPSWPSPVVAENGLSEEKPHLLVFPPDLVAEQFTLMDAELFKKVVPYHCLGSIWSQRDKKGKEHLAPTIRATVTQFNSVANCVITTCLGNRSTKAPDRARVVEHWIEVARECRILKNFSSLYAILSALQSNSIHRLKKTWEDVSRDSFRIFQKLSEIFSDENNYSLSRELLIKEGTSKFATLEMNPKRAQKRPKETGIIQGTVPYLGTFLTDLVMLDTAMKDYLYGRLINFEKRRKEFEVIAQIKLLQSACNNYSIAPDEQFGAWFRAVERLSETESYNLSCELEPPSESASNTLRTKKNTAIVKRWSDRQAPSTELSTSGSSHSKSCDQLRCGPYLSSGDIADALSVHSAGSSSSDVEEINISFVPESPDGQEKKFWESASQSSPETSGISSASSSTSSSSASTTPVAATRTHKRSVSGLCNSSSALPLYNQQVGDCCIIRVSLDVDNGNMYKSILVSRRGWPGCLPPLAANAP

SEQ ID NO: 12701 - protein, 283 aa, Homo sapiens
LLLLALGEPHSVWHGDTEPKGKKAKGKKVAPAPAVVKKQEAKKVVNPLFEKRPKNFGIGQDIQPKRDLTRFVKWPRYIRLQRQRAILYKRLKVPPAINQFTQALDRQTATQLLKLAHKYRPETKQEKKQRLLARAEKKAAGKGDVPTKRPPVLRAGVNTVTTLVENKKAQLVVIAHDVDPIELVVFLPALCRKMGVPYCIIKGKARLGRLVHRKTCTTVAFTQVNSEDKGALAKLVEAIRTNYNDRYDEIRRHWGGNVLGPKSVARIAKLEKAKAKELATKLG

SEQ ID NO: 12702 - protein, 117 aa, Homo sapiens
LLLLVKIQSSANAFFQLVVFLPALCRKMGVPYCIIKGKARLGRLVHRKTCTTVAFTQVNSEDKGALAKLVEAIRTNYNDRYDEIRRHWGGNVLGPKSVARIAKLEKAKAKELATKLG

SEQ ID NO: 12703 - protein, 102 aa, Homo sapiens
LPRILGAGARAPSRWLGFLGKATPRPARPSRRTLGSATALMIRESEDSTGNTGRPAELGGNEERPAAAGDANPRGAWALHAVETARSAGLLPLPCSPPLGPA

SEQ ID NO: 12704 - protein, 121 aa, Homo sapiens [sequence omitted]

SEQ ID NO: 12705 - protein, 41 aa, Homo sapiens
VNLGLSRVDDAVAAKHPAPAWPLACRCSFRGSFHTLCSGAS

SEQ ID NO: 12706 - protein, 42 aa, Homo sapiens
MAGRVAGRVPVEGAVLPLLPGGPRRAPTPSGHVLVRGVPAAV

SEQ ID NO: 12707 - protein, 271 aa, Homo sapiens
VAPRGGPLGQGGRGAQGDLKSSPGPHPRLTAAAPTMAETKLQLFVKASEDGESVGHCPSCQRLFMVLLLKGVPFTLTTVDTRRSPDVLKDFAPGSQLPILLYDSDAKTDTLQIEDFLEETLGPPDFPSLAPRYRESNTAGNDVFHKFSAFIKNPVPAQDEALYQQLLRALARLDSYLRAPLEHELAGEPQLRESRRRFLDGDRLTLADCSLLPKLHIVDTVCAHFRQAPIPAELRGVRRYLDSAMQEKEFKYTCPHSAEILAAYRPAVHPR

SEQ ID NO: 12708 - protein, 133 aa, Homo sapiens
VGHCPSCQRLFMVLLLKGVPFTLTTVDTRRSPDVLKDFAPGSQLPILLYDSDAKTDTLQIEDFLEETLGPPDFPSLAPRYRESNTAGNDVFHKFSAFIKNPVPAQDEGEAGSGGRVPRREGALGLVLTAPPAP

SEQ ID NO: 12709 - protein, 275 aa, Homo sapiens
LGTKSLPWLHGPLCPSQELLLAPALLEQLTCTPGSGELGRILTVPESQKGALQGYRDAVCSGQAAARARRFSGLSAELRNQLDVAKVSQQLGLDAPNGSDSSPQAPPPRRLQALLGDLLDAQKVLQDVDVLSALALLLPQGACTGRTPGPPASGAGGAANGTGAGAVMGPNATAEEGAPSAAALATPDTLQGQCSAFVQLWAGLQPILCGNNRTIEPEALRRGNMSSLGFTSKEQRNLGLLVHLMTSNPKILYAPAGSEVDRVILKVHGSGTLHV

SEQ ID NO: 12710 - protein, 425 aa, Homo sapiens
LSPWAELAGPAPPWGRAGTHAGGRGDRSRAPMAGAAMAERGRVPPPAPAPSTEGLPRAFLQSLRTLFDILDDRRRGCVHLREIESRWQGTDARELPRGVLEGLRQVAPASGYLTFERFVAGLRTSLLSADGGPRDPTRAPARPGDQPPPPPQRLVFAPADEPRTVLERKPLPLGVRAPLAGPSAAARSPEQLCAPAEAAPCPAEPERSQSAALEPSSSADAGAVACRALEADSGDARRAPRARGERRRHTIASGVDCGLLKQMKELEQEKEVLLQGLEMMARGRDWYQQQLQRVQERQRRLGQSRASADFGAAGSPRPLGRLLPKVQEVARCLGELLAAACASRALPPSSSGPPCPALTSTSPPVWQQQTILMLKEQNRLLTQEVTEKSERITQLEQEKSALIKQLFEARALSQQDGGPLDSTFI

SEQ ID NO: 12711 - protein, 207 aa, Homo sapiens
LSTSSCFPAAAAAIMREIVHLQAGQCGNQIGAKFWEVISDEHGIDPTGTYHGDSDLQLERINVYYNEATGGKYVPRAVLVDLEPGTMDSVRSGPFGQIFRPDNFVFGEPWLGTGRRLKGQGAAPRAPPWELRSRGPWTPSSSLSHSIPSTKSALGARSSCLPRRGAATHVISLQGAELGQWLFLCPWELAVAPPGRGLLSCQVWPLT

SEQ ID NO: 12712 - protein, 459 aa, Homo sapiens
LSTSSCFPAAAAAIMREIVHLQAGQCGNQIGAKFWEVISDEHGIDPTGTYHGDSDLQLERINVYYNEATGGKYVPRAVLVDLEPGTMDSVRSGPFGQIFRPDNFVFGQSGAGNNWAKGHYTEGAELVDSVLDVVRKEAESCDCLQGFQLTHSLGGGTGSGMGTLLISKIREEYPDRIMNTFSVVPSPKVSDTVVEPYNATLSVHQLVENTDETYCIDNEALYDICFRTLKLTTPTYGDLNHLVSATMSGVTTCLRFPGQLNADLRKLAVNMVPFPRLHFFMPGFAPLTSRGSQQYRALTVPELTQQMFDAKNMMAACDPRHGRYLTVAAVFRGRMSMKEVDEQMLNVQNKNSSYFVEWIPNNVKTAVCDIPPRGLKMSATFIGNSTAIQELFKRISEQFTAMFRRKAFLHWYTGEGMDEMEFTEAESNMNDLVSEYQQYQDATAEEEGEFEEEAEEEVA

SEQ ID NO: 12713 - protein, 199 aa, Homo sapiens
VNAGALVWERGRRARFEAALSSAGRTAPPPRSPRPASPRSSRGAGPVPCAAPPQRAVLASPRSVRGGPKPPGRGGARASGGAAGPAPAMPPGKVLQPVLKMKVDELFLYWLSEASTQRMLQDCLRRIKAPGRDQPTPGDGEQPGAWPTAPLAAPRPSGLEPPGTPGPGPALPLGAASSPRNAPHVRGTRRSAGTRVMVF

SEQ ID NO: 12714 - protein, 309 aa, Homo sapiens
LSSRSAARPATMTEQAISFAKDFLAGGIAAAISKTAVAPIERVKLLLQVQHASKQIAADKQYKGIVDCIVRIPKEQGVLSFWRGNLANVIRYFPTQALNFAFKDKYKQIFLGGVDKHTQFWRYFAGNLASGGAAGATSLCFVYPLDFARTRLAADVGKSGTEREFRGLGDCLVKITKSDGIRGLYQGFSVSVQGIIIYRAAYFGVYDTAKGMLPDPKNTHIVVSWMIAQTVTAVAGVVSYPFDTVRRRMMMQSGRKGADIMYTGTVDCWRKIFRDEGGKAFFKGAWSNVLRGMGGAFVLVLYDELKKVI

SEQ ID NO: 12715 - protein, 68 aa, Homo sapiens
LSSRSAARPATMTEQAISFAKDFLAGGIAAAISKTAVAPIERVKLLLQQGGMSQRFKRPREDHLSSGV

SEQ ID NO: 12716 - protein, 314 aa, Homo sapiens
LDFAEQLKWSAELARLGESIMDGKQGGMDGSKPAGPRDFPGIRLLSNPLMGDAVSDWSPMHEAAIHGHQLSLRNLISQGWAVNIITADHVSPLHEACLGGHLSCVKILLKHGAQVNGVTADWHTPLFNACVSGSWDCVNLLLQHGASVQPESDLASPIHEAARRGHVECVNSLIAYGGNIDHKISHLGTPLYLACENQQRACVKKLLESGADVNQGKGQDSPLHAVARTASEELACLLMDFGADTQAKNAEGKRPVELVPPESPLAQLFLEREGPPSLMQLCRLRIRKCFGIQQHHKITKLVLPEDLKQFLLHL

SEQ ID NO: 12717 - protein, 285 aa, Homo sapiens
LDFAEQLKWSAELARLGESIMDGKQGGMDGSKPAGPRDFPGIRLLSNPLMGDAVSDWSPMHEAAIHGHQLSLRNLISQGWAVNIITADHVSPLHEACLGGHLSCVKILLKHGAQHGASVQPESDLASPIHEAARRGHVECVNSLIAYGGNIDHKISHLGTPLYLACENQQRACVKKLLESGADVNQGKGQDSPLHAVARTASEELACLLMDFGADTQAKNAEGKRPVELVPPESPLAQLFLEREGPPSLMQLCRLRIRKCFGIQQHHKITKLVLPEDLKQFLLHL

SEQ ID NO: 12718 - protein, 272 aa, Homo sapiens
LDFAEQLKWSAELARLGESIMDGKQGGMDGSKPAGPRDFPGIRLLSNPLMGDAVSDWSPMHEAAIHGHQLSLRNLISQGWAVNIITADHVSPLHEACLGGHLSCVKILLKHGAQVNGVTADWHTPLFNACVSGSWDCVNLLLQHGASVQPESDLASPIHEAARRAYGGNIDHKISHLGTPLYLACENQQRACVKKLLESGADVNQGKGQDSPLHAVARTASEELACLLMDFGADTQAKNAEGKRPVELVPPESPLAQLFLEREGASLPKPKP

SEQ ID NO: 12719 - protein, 282 aa, Homo sapiens
LDFAEQLKWSAELARLGESIMDGKQGGMDGSKPAGPRDFPGIRLLSNPLMGDAVSDWSPMHEAAIHGHQLSLRNLISQGWAVNIITADHVSPLHEACLGGHLSCVKILLKHGAQVNGVTADWHTPLFNACVSGSWDCVNLLLQHGASVQPESDLASPIHEAARRGHVECVNSLIAYGGNIDHKISHLGTPLYLACENQQRACVKKLLESGADVNQGKGQDSPLHAVARTASEELACLLMDFGADTQAKNAEGKRPVELVPPESPLAQLFLEREGASLPKPKP

SEQ ID NO: 12720 - protein, 324 aa, Homo sapiens
VPLPQREYLGLLQGSTSPPSSTAQHQNTLFLDSDMGSSKKVTLSVLSREQSEGVGARVRRSIGRPELKNLDPFLLFDEFKGGRPGGFPDHPHRGFETVSYLLEGGSMAHEDFCGHTGKMNPGDLQWMTAGRGILHAEMPCSEEPAHGLQLWVNLRSSEKMVEPQYQELKSEEIPKPSKDGVTVAVISGEALGIKSKVYTRTPTLYLDFKLDPGAKHSQPIPKGWTSFIYTISGDVYIGPDDAQQKIEPHHTAVLGEGDSVQVENKDPKRSHFVLIAGEPLREPVIQHGPFVMNTNEEISQAILDFRNAKNGFERAKTWKSKIGN

SEQ ID NO: 12721 - protein, 343 aa, Homo sapiens
VRLLDPHSLNLPSLHSLPAALRVTPAAKAPGAATAAPPSSTAQHQNTLFLDSDMGSSKKVTLSVLSREQSEGVGARVRRSIGRPELKNLDPFLLFDEFKGGRPGGFPDHPHRGFETVSYLLEGGSMAHEDFCGHTGKMNPGDLQWMTAGRGILHAEMPCSEEPAHGLQLWVNLRSSEKMVEPQYQELKSEEIPKPSKDGVTVAVISGEALGIKSKVYTRTPTLYLDFKLDPGAKHSQPIPKGWTSFIYTISGDVYIGPDDAQQKIEPHHTAVLGEGDSVQVENKDPKRSHFVLIAGEPLREPVIQHGPFVMNTNEEISQAILDFRNAKNGFERAKTWKSKIGN

SEQ ID NO: 12722 - protein, 51 aa, Homo sapiens
VLGEGDSVQVENKDPKRSHFVLIAGEPLREPVIQHGKTKMTMIFLVDFPFL

SEQ ID NO: 12723 - protein, 185 aa, Homo sapiens
LDPFLLFDEFKGGRPGGFPDHPHRGFETVSYLLEGGSMAHEDFCGHTGKMNPGDLQWMTAGRGILHAEMPCSEEPAHGLQLWVNLRSSEKMVEPQYQELKSEEIPKPSKDGVTVAVISGEALGIKSLALPPRLECSGRISAHCKLCLPGSRPSTASASRVAGTTDDHRHARLIFCIFNRDGVSPC

SEQ ID NO: 12724 - protein, 120 aa, Homo sapiens
LDPHSLNLPSLHSLPAALRVTPAAKAPGAATAAPPSSTAQHQNTLFLDSDMGSSKKVTLSVLSREQSEGVGARVRRSIGRPELKNLDPFLLFDEFKGGRPGGFPDHPHRGFETFPSLLTR

SEQ ID NO: 12725 - protein, 72 aa, Homo sapiens
LGTDQDFKLKMVVMNSLRVILQASPGKLLWRKFQIPRFMPARPCSLYTCTYKTRNRACEYTTSLKRTKRAPA

SEQ ID NO: 12726 - protein, 96 aa, Homo sapiens
LGTDQDFKLKMVVMNSLRVILQASPGKLLWRKFQIPRFMPARPCSLYTCTYKTRNRAFFLLFLILPIHGTSKGQGNGPPQTDVHWFCSSHLGVSTG

SEQ ID NO: 12727 - protein, 150 aa, Homo sapiens
LGTDQDFKLKMVVMNSLRVILQASPGKLLWRKFQIPRFMPARPCSLYTCTYKTRNRALHPLWESVDLVPGGDRQSPINIRWRDSVYDPGLKPLTISYDPATCLHVWNNGYSFLVEFEDSTDKSGEGKIWWSCKELKKQCHVNRGHIKLSP

SEQ ID NO: 12728 - protein, 83 aa, Homo sapiens
MVFQLHLVHWNAVRFENFEDAALEENGLAVIGVFLKLGKHHKELQKLVDTLPSIKHKVLFVFLNYLKYTFMFQSQSGDITKAL

SEQ ID NO: 12729 - protein, 95 aa, Homo sapiens
LPGRAGRRGLKSLVPSLERERRAPQTSVPASGEEAGKKDAASGEHPGSKTGPGLSTVGSVTRLGKAGAPAVGLLLANERSPRRRRGANDPTQDGE

SEQ ID NO: 12730 - protein, 1664 aa, Homo sapiens
LPDSCPLPAQVGAPGLQLTGALGGDQKVAAWLRGMPFAKRIVEPQWLCRQRRPAPGPAVDASGGSAEPPPPLQPPGRRDLDEVEAPGPEEPARAVPAPSGLPPPPPPLPAPADQTQPPHGEASVAGEESTAGIPEAAPAAGEASSAAAAAAVLLMLDLCAVSNAALARVLRQLSDVARHACSLFQELESDIQLTHRRVWALQGKLGGVQRVLSTLDPKQEAVPVSNLDIESKLSVYYRAPWHQQRNIFLPATRPPCVEELHRHARQSLQALRREHRSRSDRREQRAAAPLSIAAPPLPAYPPAHSQRRREFKDRHFLTSHPPEDEDTDVMLGQRPKNPIHNIPSTLDKQTNWSKALPLPTPEEKMKQDAQVISSCIIPINVTGVGFDREASIRCSLVHSQSVLQRRRKLRRRKTISGIPRRVQQEIDSDESPVARERNVIVHTNPDPSNTVNRISGTRDSECQTEDILIAAPSRRRIRAQRGQSIAASLSHSAGNISALADKGDTMFTPAVSSRTRSRSLPREGNRGGDAEPKVGAKPSAYEEGESFVGDHERTPNDFSEAPSSPSAQDHQPTLGLACSQHLHSPQHKLSERGRSRLSRMAADSGSCDISSNSDTFGSPIHCISTAGVLLSSHMDQKDDHQSSSGNWSGSSSTCPSQTSETIPPAASPPLTGSSHCDSELSLNTAPHANEDASVFVTEQYNDHLDKVRGHRANSFTSTVADLLDDPNNSNTSDSEWNYLHHHHDASCRQDFSPERPKADSLGCPSFTSMATYDSFLEKSPSDKADTSSHFSVDTEGYYTSMHFDCGLKGNKSYVCHYAALGPENGQGVGASPGLPDCAWQDYLDHKRQGRPSISFRKPKAKPTPPKRSSSLRKSDGNADISEKKEPKISSGQHLPHSSREMKLPLDFANTPSRMENANLPTKQEPSWINQSEQGIKEPQLDASDIPPFKDEVAESTHYADLWLLNDLKTNDPYRSLSNSSTATGTTVIECIKSPESSESQTSQSESRATTPSLPSVDNEFKLASPEKLAGLASPSSGYSSQSETPTSSFPTAFFSGPLSPGGSKRKPKVPERKSSLQQPSLKDGTISLSKDLELPIIPPTHLDLSALHNVLNKPFHHRHPLHVFTHNKQNTVGETLRSNPPPSLAITPTILKSVNLRSINKSEEVKQKEENNTDLPYLEESTLTTAALSPSKIRPHTANKSVSRQYSTEDTILSFLDSSAVEMGPDKLHLEKNSTFDVKNRCDPETITSAGSSLLDSNVTKDQVRTETEPIPENTPTKNCAFPTEGFQRVSAARPNDLDGKIIQYGPGPDETLEQVQKAPSAGLEEVAQPESVDVITSQSDSPTRATDVSNQFKHQFVMSRHHDKVPGTISYESEITSVNSFPEKCSKQENIASGISAKSASDNSKAEETQGNVDEASLKESSPSDDSIISPLSEDSQAEAEGVFVSPNKPRTTEDLFAVIHRSKRKVLGRKDSGDMSVRSKSRAPLSSSSSSASSITSPSSNVTTPNSQRSPGLIYRNAKKSNTSNEEFKLLLLKKGSRSDSSYRMSATEILKSPILPKPPGELTAESPQSTDDAHQGSQGAEALSPLSPCSPRVNAEGFSSKSFATSASARVGRSRAPPAASSSRYSVRCRLYNTPMQAISEGETENSDGSPHDDRSSQSST

SEQ ID NO: 12731 - protein, 1537 aa, Homo sapiens
LVSWSLPCLGSGAKVVPISIINAKPFSGLELVLNVNAVVWTSTPPRLYSCPLPHPRVGQKHNLKPLMDNALFLAAVSNLDIESKLSVYYRAPWHQQRNIFLPATRPPCVEELHRHARQSLQALRREHRSRSDRREQRAAAPLSIAAPPLPAYPPAHSQRRREFKDRHFLTFNSTRSPSPTECCHMTPWSRKSHPPEDEDTDVMLGQRPKNPIHNIPSTLDKQTNWSKALPLPTPEEKMKQDAQVISSCIIPINVTGVGFDREASIRCSLVHSQSVLQRRRKLRRRKTISGIPRRVQQEIDSDESPVARERNVIVHTNPDPSNTVNRISGTRDSECQTEDILIAAPSRRRIRAQRGQSIAASLSHSAGNISALADKGDTMFTPAVSSRTRSRSLPREGNRGGDAEPKVGAKPSAYEEGESFVGDHERTPNDFSEAPSSPSAQDHQPTLGLACSQHLHSPQHKLSERGRSRLSRMAADSGSCDISSNSDTFGSPIHCISTAGVLLSSHMDQKDDHQSSSGNWSGSSSTCPSQTSETIPPAASPPLTGSSHCDSELSLNTAPHANEDASVFVTEQYNDHLDKVRGHRANSFTSTVADLLDDPNNSNTSDSEWNYLHHHHDASCRQDFSPERPKADSLGCPSFTSMATYDSFLEKSPSDKADTSSHFSVDTEGYYTSMHFDCGLKGNKSYVCHYAALGPENGQGVGASPGLPDCAWQDYLDHKRQGRPSISFRKPKAKPTPPKRSSSLRKSDGNADISEKKEPKISSGQHLPHSSREMKLPLDFANTPSRMENANLPTKQEPSWINQSEQGIKEPQLDASDIPPFKDEVAESTHYADLWLLNDLKTNDPYRSLSNSSTATGTTVIECIKSPESSESQTSQSESRATTPSLPSVDNEFKLASPEKLAGLASPSSGYSSQSETPTSSFPTAFFSGPLSPGGSKRKPKVPERKSSLQQPSLKDGTISLSKDLELPIIPPTHLDLSALHNVLNKPFHHRHPLHVFTHNKQNTVGETLRSNPPPSLAITPTILKSVNLRSINKSEEVKQKEENNTDLPYLEESTLTTAALSPSKIRPHTANKSVSRQYSTEDTILSFLDSSAVEMGPDKLHLEKNSTFDVKNRCDPETITSAGSSLLDSNVTKDQVRTETEPIPENTPTKNCAFPTEGFQRVSAARPNDLDGKIIQYGPGPDETLEQVQKAPSAGLEEVAQPESVDVITSQSDSPTRATDVSNQFKHQFVMSRHHDKVPGTISYESEITSVNSFPEKCSKQENIASGISAKSASDNSKAEETQGNVDEASLKESSPSDDSIISPLSEDSQAEAEGVFVSPNKPRTTEDLFAVIHRSKRKVLGRKDSGDMSVRSKSRAPLSSSSSSASSITSPSSNVTTPNSQRSPGLIYRNAKKSNTSNEEFKLLLLKKGSRSDSSYRMSATEILKSPILPKPPGELTAESPQSTDDAHQGSQGAEALSPLSPCSPRVNAEGFSSKSFATSASARVGRSRAPPAASSSRYSVRCRLYNTPMQAISEGETENSDGSPHDDRSSQSST

SEQ ID NO: 12732 - protein, 751 aa, Homo sapiens
VAVAGHARLRARLLKHGGGGVKLGAGSRDRWDRISLFSPTRLEETTPNRDTMGQTVNEDSMDVKKENQEKTPQSSTSSVQRDDFHWEEYLKETGSISAPSECFRQSQIPPVNDFKVGMKLEARDPRNATSVCIATVIGITGARLRLRLDGSDNRNDFWRLVDSPDIQPVGTCEKEGDLLQPPLGYQMNTSSWPMFLLKTLNGSEMASATLFKKEPPKPPLNNFKVGMKLEAIDKKNPYLICPATIGDVKGDEVHITFDGWSGAFDYWCKYDSRDIFPAGWCRLTGDVLQPPGTSVPIVKNIAKTESSPSEASQHSMQSPQKTTLILPTQQVRRSSRIKPPGPTAVPKRSSSVKNITPRKKGPNSGKKEKPLPVICSTSAASLKSLTRDRGMLYKDVASGPCKIVMSTVCVYVNKHGNFGPHLDPKRIQQLPDHFGPGPVNVVLRRIVQACVDCALETKTVFGYLKPDNRGGEVITASFDGETHSIQLPPVNSASFALRFLENFCHSLQCDNLLSSQPFSSSRGHTHSSAEHDKNQSAKEDVTERQSTKRSPQQTVPYVVPLSPKLPKTKEYASEGEPLFAGGSAIPKEENLSEDSKSSSLNSGNYLNPACRNPMYIHTSVSQDFSRSVPGTTSSPLVGDISPKSSPHEVKFQMQRKSEAPSYIAVPDPSVLKQGFSKDPSTWSVDEVIQFMKHTDPQISGPLADLFRQHEIDGKALFLLKSDVMMKYMGLKLGPALKLCYYIEKLKEGKYS

SEQ ID NO: 12733 - protein, 18 aa, Homo sapiens
LMKTIQASRMILATELHD

SEQ ID NO: 12734 - protein, 17 aa, Homo sapiens
LSISRRARKPWMSTPRS

SEQ ID NO: 12735 - protein, 108 aa, Homo sapiens
MVDTAVLLGANSSRAEHDMKSVLRLEIKIAEIMIPHENRTSEAMYNKMNISELSAMIPQFDWLGYIKKVIDTRLYPHLKDISPSENVVVRVPQYFKDLFRILGSERKK

SEQ ID NO: 12736 - protein, 211 aa, Homo sapiens
LLWQVMKAFSLPECELQQTAEWPVHSCSLTSVSSDVCFLQIHVLRTVRSSSSGLDCTHIKIMRQPWLLVSVIHACVFFKTYDRPLILQLQLLWNVFLLHISCDALITGHSIVGFAMYYFTYDPWIGKLLYLEDFFVMSDYRGFGIGSEILKNLSQVAMRCRCSSMHFLVAEWNEPSINFYKRRGASDLSSEEGWRLFKIDKEYLLKMATEE

SEQ ID NO: 12737 - protein, 75 aa, Homo sapiens
LQLQLLWNVFLLHISCDALITGHSIVGFAMYYFTYDPWIGKLLYLEDFFVMSDYRGTIEFGAEGLKRVQSYKCLQ

SEQ ID NO: 12738 - protein, 76 aa, Homo sapiens
LYSFFLGFGIGSEILKNLSQVAMRCRCSSMHFLVAEWNEPSINFYKRRGASDLSSEEGWRLFKIDKEYLLKMATEE

SEQ ID NO: 12739 - protein, 218 aa, Homo sapiens
VRRPPSPGPLPWARDPPRPTRSPHPKVLRFGVGGVARSARIRRWGRGRVGRTRPDLGARSGHGVTGAALLPGGPRKRVFPLLPPSLGFLSAGAAAPMARSLGVLVALPFPLPVGFNAEEAHNIVKECVDGVLGGEDYNHNNINQWTASIVEQSLTHLVKLGKAYKYIVTCAVVQKSAYGFHTASSCFWDTTSDGTCTVRWENRTMNCIVNVFAIAIVL

SEQ ID NO: 12740 - protein, 143 aa, Homo sapiens
VGPPRRPVRGRGALPACRSAPGRAGATMEEYHRHCDEVGFNAEEAHNIVKECVDGVLGGEDYNHNNINQWTASIVEQSLTHLVKLGKAYKYIVTCAVVQKSAYGFHTASSCFWDTTSDGTCTVRWENRTMNCIVNVFAIAIVL

SEQ ID NO: 12741 - protein, 54 aa, Homo sapiens
LEFPRRVLVLVAPSQNFIQKTIRKMVFYGKYLSVGLNVKERGRERNPFIMFSLP

SEQ ID NO: 12742 - protein, 171 aa, Homo sapiens
LETLKIDILMSLTVGNLAEQEFVTIARHYRVPEGTCSDMDFLIALAHEKFKKNMFENFDTFIYSCVYEDREKKNVLPTKDIKRLCKSSRLPLSDDLLESLLSRFEDSEKQIDYKSFFSALNWRKNPVPELQPASYLKERCEDVWLGMPSPIPAKYIDYWTFLKDAFGLEEE

SEQ ID NO: 12743 - protein, 757 aa, Homo sapiens
LDFRTLSAMALPLLPGNSFNRNVGKEKFHKSQHWGFCNNVMMLVSDEKPGIGGEPLLGQKIKPKCSIYPKGDGSDVPSWVAFDKQVLSFDAYLEEEVLDKSQTNYRIRYYKIYFYPEDDTIQVNEPEVKNSGLLQGTSIRRHRITLPPPDEDQFYTVYHFNVGTEVVFYGRTFKIYDCDAFTRNFLRKIGVKVNPPVQCPEDPYMKIRREVVEHVEPLRPYESLDTLKQFLQYHGKILCFFCLWDDSVSMFGDRRELILHYFLCDDTIEIKELLPHSSGRDALKMFLRRSKLPKNCPPRVYQPGQITDRAVLNSYGDFIKNQADGYLFDRYKLGKVDQEFYKDSDLSLGVTINVWGRKVLLYDCDEFTKSYYKSKYGIENFTSVSCKPPSPPPKIERKFPPYNGFGSEEDSLRNCIDLKPTPHRRNFKKFMEKDSYGSKSNILRFFAKLVTDKCVDLDRMFVISYYLGDDTISVFEPIERNSGIAGGMFLKRSRVKKPGQEVFKSELSEYIKAEELYIGVTVNVNGYLFRLLNADEYTLNYMEQNTDKYPFSNLKLALQKLKQEEGKSRELKQVFKAADSKHTNMVDYNTFRDILMSLTVGNLAEQEFVTIARHYRVPEGTCSDMDFLIALAHEKFKKNMFENFDTFIYSCVYEDREKKNVLPTKDIKRLCKSSRLPLSDDLLESLLSRFEDSEKQIDYKSFFSALNWRKNPVPELQPASYLKERCEDVWLGMPSPIPAKYIDYWTFLKDAFGLEEE

SEQ ID NO: 12744 - protein, 314 aa, Homo sapiens
LGLLYHSPRKMVTRFCPQAEHYQKHGVPGSRHLGHWRWRTHPRATARARRCDTLRPHPAFPGGGGKRKCSADPGGRSLVHTGCCQRPLRFQALGGEGQSADLRPLLTDFRLQFICAPASSLSLRRLRLRPQKEISILCPEQNRMAMSQESLTFKDVFVDFTLEEWQQLDSAQKNLYRDVMLENYSHLVSVGYLVAKPDVIFRLGPGEESWMADGGTPVRTCAGEDRPEVWQVDEQIDHYKESQDKLPWQAAFIGKETLKDESGQESRTCRKSIYLSTEFDSVRQRLPKYYSWEKAFKTSFKLSWSKWKLCKKER

SEQ ID NO: 12745 - protein, 222 aa, Homo sapiens
LRFQALGGEGQSADLRPLLTDFRLQFICAPASSLSLRRLRLRPQKEISILCPEQNRMAMSQESLTFKDVFVDFTLEEWQQLDSAQKNLYRDVMLENYSHLVSVGYLVAKPDVIFRLGPGEESWMADGGTPVRTCAEVWQVDEQIDHYKESQDKLPWQAAFIGKETLKDESGQESRTCRKSIYLSTEFDSVRQRLPKYYSWEKAFKTSFKLSWSKWKLCKKER

SEQ ID NO: 12746 - protein, 94 aa, Homo sapiens [sequence omitted]

SEQ ID NO: 12747 - protein, 36 aa, Homo sapiens
LLLPAQRGRERPQERTWHGISEEREKTGARPALEGR

SEQ ID NO: 12748 - protein, 29 aa, Homo sapiens
LEKQRCGGNLSHSQSLGLDLLPTTAVQFC

SEQ ID NO: 12749 - protein, 7 aa, Homo sapiens
MKFPVRK

SEQ ID NO: 12750 - protein, 9 aa, Homo sapiens
METAAAVAA

SEQ ID NO: 12751 - protein, 43 aa, Homo sapiens
LMGMVPLEMGTTPISVYQKAGPLAAWQLSQSQAACRSPPRLSP

SEQ ID NO: 12752 - protein, 11 aa, Homo sapiens
LGHRQSRMSGH

SEQ ID NO: 12753 - protein, 9 aa, Homo sapiens
VDYEHKLKP

SEQ ID NO: 12754 - protein, 45 aa, Homo sapiens [sequence omitted]

SEQ ID NO: 12755 - protein, 68 aa, Homo sapiens
MSSEEGKLFVGGLNFNTDEQALEDHFSSFGPISEVSGWSSDPCGSCRQVCSGNQRRWLWGPWAWSQLL

SEQ ID NO: 12756 - protein, 471 aa, Homo sapiens
VVFLLGIKAKLFLIRDSFPQARLILFCQSTSPSLPLDKDPMPNPRPGKPSAPSLALGPSPGASPSWRAAPKASDLLGARGPGGTFQGRDLRGGAHASSSSLNPMPPSQLQLPTLPLVMVAPSGARLGPLPHLQALLQDRPHFMHQLSTVDAHARTPVLQVHPLESPAMISLTPPTTATGVFSLKARPGLPPGINVASLEWVSREPALLCTFPNPSAPRKDSTLSAVPQSSYPLLANGVCKWPGCEKVFEEPEDFLKHCQADHLLDEKGRAQCLLQREMVQSLEQQLVLEKEKLSAMQAHLAGKMALTKASSVASSDKGSCCIVAAGSQGPVVPAWSGPREAPDSLFAVRRHLWGSHGNSTFPEFLHNMDYFKFHNMRPPFTYATLIRWAILEAPEKQRTLNEIYHWFTRMFAFFRNHPATWKNAIRHNLSLHKCFVRVESEKGAVWTVDELEFRKKRSQRPSRCSNPTPGP

SEQ ID NO: 12757 - protein, 436 aa, Homo sapiens
VVFLLGIKAKLFLIRDSFPQARLILFCQSTSPSLPLDKDPMPNPRPGKPSAPSLALGPSPGASPSWRAAPKASDLLGARGPGGTFQGRDLRGGAHASSSSLNPMPPSQLQLSTVDAHARTPVLQVHPLESPAMISLTPPTTATGVFSLKARPGLPPGINVASLEWVSREPALLCTFPNPSAPRKDSTLSAVPQSSYPLLANGVCKWPGCEKVFEEPEDFLKHCQADHLLDEKGRAQCLLQREMVQSLEQQLVLEKEKLSAMQAHLAGKMALTKASSVASSDKGSCCIVAAGSQGPVVPAWSGPREAPDSLFAVRRHLWGSHGNSTFPEFLHNMDYFKFHNMRPPFTYATLIRWAILEAPEKQRTLNEIYHWFTRMFAFFRNHPATWKNAIRHNLSLHKCFVRVESEKGAVWTVDELEFRKKRSQRPSRCSNPTPGP

SEQ ID NO: 12758 - protein, 494 aa, Homo sapiens
VVFLLGIKAKLFLIRDSFPQARLILFCQSTSPSLPLDKDPMPNPRPGKPSAPSLALGPSPGASPSWRAAPKASDLLGARGPGGTFQGRDLRGGAHASSSSLNPMPPSQLQLPTLPLVMVAPSGARLGPLPHLQALLQDRPHFMHQLSTVDAHARTPVLQVHPLESPAMISLTPPTTATGVFSLKARPGLPPGINVASLEWVSREPALLCTFPNPSAPRKDRSVDRAGKDPRPPIPSPDTLCPPSTLSAVPQSSYPLLANGVCKWPGCEKVFEEPEDFLKHCQADHLLDEKGRAQCLLQREMVQSLEQQLVLEKEKLSAMQAHLAGKMALTKASSVASSDKGSCCIVAAGSQGPVVPAWSGPREAPDSLFAVRRHLWGSHGNSTFPEFLHNMDYFKFHNMRPPFTYATLIRWAILEAPEKQRTLNEIYHWFTRMFAFFRNHPATWKNAIRHNLSLHKCFVRVESEKGAVWTVDELEFRKKRSQRPSRCSNPTPGP

SEQ ID NO: 12759 - protein, 127 aa, Homo sapiens
LLVALPFPSLHALSAFFCLYDPSPSIPSFPWLALSTLEDLDCATPSRAGKGTAALWPPLGSDGSLLSPTEMLRDIIREYTDVYPEIIERACFVLEKKFGIQLKEIDKEEHLYILISTPESLAGILGT

SEQ ID NO: 12760 - protein, 46 aa, Homo sapiens
LLAQPSCRVALASQIPAGSVSKKLLSSFLTMCAHLDGRAVRIVYWM

SEQ ID NO: 12761 - protein, 16 aa, Homo sapiens
LGGTLLSAIEVERPSI

SEQ ID NO: 12762 - protein, 19 aa, Homo sapiens
VIALKLRVKEESSLLFGES

SEQ ID NO: 12763 - protein, 100 aa, Homo sapiens
LENQPTMMVMTRKAPDITWGQLKKLNQQASIQLAAVEAPATADNRFLTYLVAIGETSEKVRQTWMLGWQALADGSVLPPDASMTREESWKLTLHWMTSTL

SEQ ID NO: 12764 - protein, 1263 aa, Homo sapiens
LLHPELGPPLRGARARGAARGEPAAPPDWSPAPAPAAGMPFYRRTVVPQRLCPRNPPQQLAELRDVSHLAALSLLRQLADLCGHSLALLEDLEGHLLALGRRTDSLYRRTVRLRRRLPCRLLGPEEDEEELAAANSGRENATATAHSRSSWRQPVNVFLSSGRPPSVEELLREAQLNLQSLLQEEYEEQYSEARLVGQTFRSSDEATKPTPNPRPQSARRLEFILMPTKRQLSEDETTTQGVRAPEASLSLSTTADKQTAWNSLFPLPILEEKRWPQLCSTQSDIVPINISGQQFDKHASLRHSLFNTETAVNPKSTLRRRRTIIGFSNFSQRDQGHSNSPAGSVAHSTTSDIRPSHSVPEGVHGRVAVGQDARFPSLTSPVLRTPSSEPDEPHQARSGPNPPGMESMGMVYSVPSSCNGPTESTFSTSWKGDAFTYMTPSATSQSNQVNENGKNPSCGNSWVSLNKVPPLVPKEAATLLVARDNPAGCSGSAGYPERLIQQRHMPERPSKIGLLTSGTSRLETGPGGASRFRERSLSVPTDSGTTDVDYDEEQKANEACALPFASTSSEGSNSADNIASLSAQQEAQHRRQRSKSISLRKAKKKPSPPTRSVSLVKDEPGLLPEGGSALPKDQRPKSLCLSLEHQGHHSSHPDAQGHPAIPNHKDPESTQFSHHWYLTDWKSGDTYQSLSSSSTATGTTVIECTQVQGSSESLASPSTSRATTPSQLSIEVEAREISSPGRPPGLMSPSSGYSSQSETPTPTVSMSLTLGHLPPPSSSVRVRPVVPERKSSLPPTSPMEKFPKSRLSFDLPLTSSPNLDLSGMSISIRSKTKVSRHHSETNFGVKLAQKTNPNQPIMPMVTQSDLRSVRLRSVSKSEPEDDIESPEYAEEPRAEEVFTLPERKTKPPVAEKPPVARRPPSLVHKPPSVPEEYALTSPTLAMPPRSSIQHARPLPQDSYTVVRKPKPSSFPDGRSPGESTAPSSLVFTPFASSSDAFFSGTQQPPQGSVEDEGPKVRVLPERISLQSQEEAEKKKGKIPPPVPKKPSVLYLPLTSPTAQMEAYVAEPRLPLSPIITLEEDTKCPATGDDLQSLGQRVTSTPQADSEREASPLGSSVEPGTEEKSLISDKTAEWIAEDDDDVFVASRTTEDLFTVIHRSKRKLLGWKEPGEAFVGGRTSSHSPIKNTAESPISESTATAGSGSSANLDAGRNDDFKALLQKKGSKATPRSRPSAAELLKTTNPLARRIIAQFSKDYETTDNPST

SEQ ID NO: 12765 - protein, 956 aa, Homo sapiens
LPVQSRMMGNSHHKQPRSKSQSRMHSATGHSNSPAGSVAHSTTSDIRPSHSVPEGVHGRVAVGQDARFPSLTSPVLRTPSSEPDEPHQARSGPNPPGMESMGMVYSVPSSCNGPTESTFSTSWKGDAFTYMTPSATSQSNQVNENGKNPSCGNSWVSLNKVPPLVPKEAATLLVARDNPAGCSGSAGYPERLIQQRHMPERPSKIGLLTSGTSRLETGPGGASRFRERSLSVPTDSGTTDVDYDEEQKANEACALPFASTSSEGSNSADNIASLSAQQEAQHRRQRSKSISLRKAKKKPSPPTRSVSLVKDEPGLLPEGGSALPKDQRPKSLCLSLEHQGHHSSHPDAQGHPAIPNHKDPESTQFSHHWYLTDWKSGDTYQSLSSSSTATGTTVIECTQVQGSSESLASPSTSRATTPSQLSIEVEAREISSPGRPPGLMSPSSGYSSQSETPTPTVSMSLTLGHLPPPSSSVRVRPVVPERKSSLPPTSPMEKFPKSRLSFDLPLTSSPNLDLSGMSISIRSKTKVSRHHSETNFGVKLAQKTNPNQPIMPMVTQSDLRSVRLRSVSKSEPEDDIESPEYAEEPRAEEVFTLPERKTKPPVAEKPPVARRPPSLVHKPPSVPEEYALTSPTLAMPPRSSIQHARPLPQDSYTVVRKPKPSSFPDGRSPGESTAPSSLVFTPFASSSDAFFSGTQQPPQGSVEDEGPKVRVLPERISLQSQEEAEKKKGKIPPPVPKKPSVLYLPLTSPTAQMEAYVAEPRLPLSPIITLEEDTKCPATGDDLQSLGQRVTSTPQADSEREASPLGSSVEPGTEEKSLISDKTAEWIAEDDDDVFVASRTTEDLFTVIHRSKRKLLGWKEPGEAFVGGRTSSHSPIKNTAESPISESTATAGSGSSANLDAGRNDDFKALLQKKGSKATPRSRPSAAELLKTTNPLARRIIAQFSKDYETTDNPST

SEQ ID NO: 12766 - protein, 658 aa, Homo sapiens
LAPPGPVPPPALSGPGDEVTRPGPSRRALRPERRPPSSPRWVWPGLARAPLPHFGPSRAPPPHFGLLRPPVVPVPLSPPRSPRAPGLVEMSEASGNLNSLRMANVALREELNALRGENANLGLQLGRALAEVNSLRGNVSSYIRWPVPIVPVLAEENLEFALSEIEVIPGGELPFLCRPPPRAEPDCISDDLLINVIQDRSTPDGPADPPLLPIPPPPALPPPASKEPPPQPPLAPLERPEIEPFSGDPVYLAEFLMQLETFIADHEVHFPGGAERVAFLISFFTGEAKDWAISVTQEGSPLHANFPRFLDEIRKEFCGPIPPRVAKKAIRKLKQGHCTLGSYADAFQFLAQFLSWDDCRLQNQFLKGLSEFFRKELLWSTEMADLDELILECVEIERKVRVPKPIPLPGVRNIIFPFAPSPNEEESEDEEYYSEDEDQEARRHRLHSKDQRKRMRAFQQEMKEKEEEEMKKEEEMKKKEEKEEEEEEEMKQKEEEEEIRNKNEEEGESKDEEDEDEDGGQKPEGEPQQDPGTEETYGEVEEEPLDEAQDDDLDELMEMEPTFVHASSQTSGPTSGYHAENFLGASPPIIQPSRRRNQNRVPLLEGLPGTNSPFYSSPQLIRRTGRLGQRQVRRRPPVLFRLTPRQGGHRAARGRIRV

SEQ ID NO: 12767 - protein, 849 aa, Homo sapiens
LEFILMPTKRQLSEDETTTQGVRAPEASLSLSTTADKQTAWNSLFPLPILEEKRWPQLCSTQSDIVPINISGHSNSPAGSVAHSTTSDIRPSHSVPEGVHGRVAVGQDARFPSLTSPVLRTPSSEPDEPHQARSGPNPPGMESMGMVYSVPSSCNGPTESTFSTSWKGDAFTYMTPSATSQSNQVNENGKNPSCGNSWVSLNKVPPLVPKEAATLLVARDNPAGCSGSAGYPERLIQQRHMPERPSKIGLLTSGTSRLETGPGGASRFRERSLSVPTDSGTTDVDYDEEQKANEACALPFASTSSEGSNSADNIASLSAQQEAQHRRQRSKSISLRKAKKKPSPPTRSVSLVKDEPGLLPEGGSALPKDQRPKSLCLSLEHQGHHSSHPDAQGHPAIPNHKDPESTQFSHHWYLTDWKSGDTYQSLSSSSTATGTTVIECTQVQGSSESLASPSTSRATTPSQLSIEVEAREISSPGRPPGLMSPSSGYSSQSETPTPTVSMSLTLGHLPPPSSSVRVRPVVPERKSSLPPTSPMEKFPKSRLSFDLPLTSSPNLDLSGMSISIRSKTKVSRHHSETNFGVKLAQKTNPNQPIMPMVTQSDLRSVRLRSVSKSEPEDDIESPEYAEEPRAEEVFTLPERKTKPPVAEKPPVARRPPSLVHKPPSVPEEYALTSPTLAMPPRSSIQHARPLPQDSYTVVRKPKPSSFPDGRSPGESTAPSSLVFTPFASSSDAFFSGTQQPPQGSVEDEGPKVRVLPERISLQSQEEAEKKKGKIPPPVPKKPSVLYLPLTSPTAQMEAYVAEPRLPLSPIITLEEDTKCPATGDDLQSLGQRVTSTPQADSEREASPLG

SEQ ID NO: 12768 - protein, 861 aa, Homo sapiens
LAHCQAGIHPFHHLLSQQPTKRQLSEDETTTQGVRAPEASLSLSTTADKQTAWNSLFPLPILEEKRWPQLCSTQSDIVPINISGHSNSPAGSVAHSTTSDIRPSHSVPEGVHGRVAVGQDARFPSLTSPVLRTPSSEPDEPHQARSGPNPPGMESMGMVYSVPSSCNGPTESTFSTSWKGDAFTYMTPSATSQSNQVNENGKNPSCGNSWVSLNKVPPLVPKEAATLLVARDNPAGCSGSAGYPERLIQQRHMPERPSKIGLLTSGTSRLETGPGGASRFRERSLSVPTDSGTTDVDYDEEQKANEACALPFASTSSEGSNSADNIASLSAQQEAQHRRQRSKSISLRKAKKKPSPPTRSVSLVKDEPGLLPEGGSALPKDQRPKSLCLSLEHQGHHSSHPDAQGHPAIPNHKDPESTQFSHHWYLTDWKSGDTYQSLSSSSTATGTTVIECTQVQGSSESLASPSTSRATTPSQLSIEVEAREISSPGRPPGLMSPSSGYSSQSETPTPTVSMSLTLGHLPPPSSSVRVRPVVPERKSSLPPTSPMEKFPKSRLSFDLPLTSSPNLDLSGMSISIRSKTKVSRHHSETNFGVKLAQKTNPNQPIMPMVTQSDLRSVRLRSVSKSEPEDDIESPEYAEEPRAEEVFTLPERKTKPPVAEKPPVARRPPSLVHKPPSVPEEYALTSPTLAMPPRSSIQHARPLPQDSYTVVRKPKPSSFPDGRSPGESTAPSSLVFTPFASSSDAFFSGTQQPPQGSVEDEGPKVRVLPERISLQSQEEAEKKKGKIPPPVPKKPSVLYLPLTSPTAQMEAYVAEPRLPLSPIITLEEDTKCPATGDDLQSLGQRVTSTPQADSEREASPLG

SEQ ID NO: 12769 - protein, 1250 aa, Homo sapiens
LQPRTPGLKQSSCPSLPSSWDLRYVKEAKEATKNGDLEEAFKLFNLAKDIFPNEKVLSRIQKIQEALEELAEQGDDEFTDVCNSGLLLYRELHNQLFEHQKEGIAFLYSLYRDGRKGGILADDMGLGKTVQIIAFLSGMFDASLVNHVLLIMPTNLINTWVKEFIKWTPGMRVKTFHGPSKDERTRNLNRIQQRNGVIITTYQMLINNWQQLSSFRGQEFVWDYVILDEAHKIKTSSTKSAICARAIPASNRLLLTGTPIQNNLQELWSLFDFACQGSLLGTLKTFKMEYENPITRAREKDATPGEKALGFKISENLMAIIKPYFLRRTKEDVQKKKSSNPEARLNEKNPDVDAICEMPSLSRKNDLIIWIRLVPLQEEIYRKFVSLDHIKELLMETRSPLAELGVLKKLCDHPRLLSARACCLLNLGTFSAQDGNEGEDSPDVDHIDQVTDDTLMEESGKMIFLMDLLKRLRDEGHQTLVFSQSRQILNIIERLLKNRHFKTLRIDGTVTHLLEREKRINLFQQNKDYSVFLLTTQVGGVGLTLTAATRVVIFDPSWNPATDAQAVDRVYRIGQKENVVVYRLITCGTVEEKIYRRQVFKDSLIRQTTGEKKNPFRYFSKQELRELFTIEDLQNSVTQLQLQSLHAAQRKSDIKLDEHIAYLQSLGIAGISDHDLMYTCDLSVKEELDVVEESHYIQQRVQKAQFLVEFESQNKEFLMEQQRTRNEGAWLREPVFPSSTKKKCPKLNKPQPQPSPLLSTHHTQEEDISSKMASVVIDDLPKEGEKQDLSSIKVNVTTLQDGKGTGSADSIATLPKGFGSVEELCTNSSLGMEKSFATKNEAVQKETLQEGPKQEALQEDPLESFNYVLSKSTKADIGPNLDQLKDDEILRHCNPWPIISITNESQNAESNVSIIEIADDLSASHSALQDAQASEAKLEEEPSASSPQYACDFNLFLEDSADNRQNFSSQSLEHVEKENSLCGSAPNSRAGFVHSKTCLSWEFSEKDDEPEEVVVKAKIRSKARRIVSDGEDEDDSFKDTSSINPFNTSLFQFSSVKQFDASTPKNDISPPGRFFSSQIPSSVNKSMNSRRSLASRRSLINMVLDHVEDMEERLDDSSEAKGPEDYPEEGVEESSGEASKYTEEDPSGETLSSENKSSWLMTSKPSALAQETSLGAPEPLSGEQLVGSPQDKAAEATNDYETLVKRGKELKECGKIQEALNCLVKALDIKSADPEVMLLTLSLYKQLNNN

SEQ ID NO: 12770 - protein, 1257 aa, Homo sapiens
LEPNPRVMEASRRFPEAEALSPEQAAHYLRYVKEAKEATKNGDLEEAFKLFNLAKDIFPNEKVLSRIQKIQEALEELAEQGDDEFTDVCNSGLLLYRELHNQLFEHQKEGIAFLYSLYRDGRKGGILADDMGLGKTVQIIAFLSGMFDASLVNHVLLIMPTNLINTWVKEFIKWTPGMRVKTFHGPSKDERTRNLNRIQQRNGVIITTYQMLINNWQQLSSFRGQEFVWDYVILDEAHKIKTSSTKSAICARAIPASNRLLLTGTPIQNNLQELWSLFDFACQGSLLGTLKTFKMEYENPITRAREKDATPGEKALGFKISENLMAIIKPYFLRRTKEDVQKKKSSNPEARLNEKNPDVDAICEMPSLSRKNDLIIWIRLVPLQEEIYRKFVSLDHIKELLMETRSPLAELGVLKKLCDHPRLLSARACCLLNLGTFSAQDGNEGEDSPDVDHIDQVTDDTLMEESGKMIFLMDLLKRLRDEGHQTLVFSQSRQILNIIERLLKNRHFKTLRIDGTVTHLLEREKRINLFQQNKDYSVFLLTTQVGGVGLTLTAATRVVIFDPSWNPATDAQAVDRVYRIGQKENVVVYRLITCGTVEEKIYRRQVFKDSLIRQTTGEKKNPFRYFSKQELRELFTIEDLQNSVTQLQLQSLHAAQRKSDIKLDEHIAYLQSLGIAGISDHDLMYTCDLSVKEELDVVEESHYIQQRVQKAQFLVEFESQNKEFLMEQQRTRNEGAWLREPVFPSSTKKKCPKLNKPQPQPSPLLSTHHTQEEDISSKMASVVIDDLPKEGEKQDLSSIKVNVTTLQDGKGTGSADSIATLPKGFGSVEELCTNSSLGMEKSFATKNEAVQKETLQEGPKQEALQEDPLESFNYVLSKSTKADIGPNLDQLKDDEILRHCNPWPIISITNESQNAESNVSIIEIADDLSASHSALQDAQASEAKLEEEPSASSPQYACDFNLFLEDSADNRQNFSSQSLEHVEKENSLCGSAPNSRAGFVHSKTCLSWEFSEKDDEPEEVVVKAKIRSKARRIVSDGEDEDDSFKDTSSINPFNTSLFQFSSVKQFDASTPKNDISPPGRFFSSQIPSSVNKSMNSRRSLASRRSLINMVLDHVEDMEERLDDSSEAKGPEDYPEEGVEESSGEASKYTEEDPSGETLSSENKSSWLMTSKPSALAQETSLGAPEPLSGEQLVGSPQDKAAEATNDYETLVKRGKELKECGKIQEALNCLVKALDIKSADPEVMLLTLSLYKQLNNN

SEQ ID NO: 12771 - protein, 9 aa, Homo sapiens
LGDMSDLCT

SEQ ID NO: 12772 - protein, 7 aa, Homo sapiens
LGDMSDL

SEQ ID NO: 12773 - protein, 268 aa, Homo sapiens
LPNAAMARGPKKHLKRVAAPKHWMLDKLTGVFAPRPSTGPHKLRECLPLIIFLRNRLKYALTGDEVKKICMQRFIKIDGKVRTDITYPAGFMDVISIDKTGENFRLIYDTKGRFAVHRITPEEAKYKLCKVRKIFVGTKGIPHLVTHDARTIRYPDPLIKVNDTIQIDLETGKITDFIKFDTGNLCMVTGGANLGRIGVITNRERHPGSFDVVHVKDANGNSFATRLSNIFVIGKGNKPWISLPRGKGIRLTIAEERDKRLAAKQSSG

SEQ ID NO: 12774 - protein, 127 aa, Homo sapiens
LPNAAMARGPKKHLKRVAAPKHWMLDKLTGVFAPRPSTGPHKLRECLPLIIFLRNRLKYALTGDEVKKICMQRFIKIDGKVRTDITYPAGFMDVISIDKTGENFRLIYDTKGRFAVHRITPEEAKPC

SEQ ID NO: 12775 - protein, 124 aa, Homo sapiens
LKRVAAPKHWMLDKLTGVFAPRPSTGPHKLRECLPLIIFLRNRLKYALTGDEVKKICMQRFIKIDGKVRTDITYPAGFMDVISIDKTGENFRLIYDTKGRFAVHRITPEEAKVSVASKLGLYSV

SEQ ID NO: 12776 - protein, 43 aa, Homo sapiens
LQVHQRARMNYGCHECPCEAVGKPWLDCEGYLKSILESTRSSM

SEQ ID NO: 12777 - protein, 977 aa, Homo sapiens
LPDRGPVGVCSYTPTPVGRTMSLVSQNSRRRRRRVAKATAHNSSWGEMQAPNAPGLPADVPGSDVPQGPSDSQILQGLCASEGPSTSVLPTSAEGPSTFVPPTISEASSASGQPTISEGPGTSVLPTPSEGLSTSGPPTISKGLCTSVTLAASEGRNTSRPPTSSEEPSTSVPPTASEVPSTSLPPTPGEGTSTSVPPTAYEGPSTSVVPTPDEGPSTSVLPTPGEGPGTSVPLAATEGLSTSVQATPDEGPSTSVPPTATEGLSTPVPPTRDEGPSTSVPATPGEGPSTSVLPAASDGQSISLVPTRGKGSSTSVPPTATEGLSTSVQPTAGEGSSTSVPPTPGGGLSTSVPPTATEELSTSVPPTPGEGPSTSVLPIPGEGLSTSVPPTASDGSDTSVPPTPGEGASTLVQPTAPDGPGSSVLPNPGEGPSTLFSSSASVDRNPSKCSLVLPSPRVTKASVDSDSEGPKGAEGPIEFEVLRDCESPNSISIMGLNTSRVAITLKPQDPMEQNVAELLQFLLVKDQSKYPIRESEMREYIVKEYRNQFPEILRRAAAHLECIFRFELRELDPEAHTYILLNKLGPVPFEGLEESPNGPKMGLLMMILGQIFLNGNQAKEAEIWEMLWRMGVQRERRLSIFGNPKRLLSVEFVWQRYLDYRPVTDCKPVEYEFFWGPRSHLETTKMKILKFMAKIYNKDPMDWPEKYNEALEEDAARAFAEGWQALPHFRRPFFEEAAAEVPSPDSEVSSYSSKYAPHSWPESRLESKARKLVQLFLLMDSTKLPIPKKGILYYIGRECSKVFPDLLNRAARTLNHVYGTELVVLDPRNHSYTLYNRREMEETEEIVDSPNRPGNNFLMQVLSFIFIMGNHARESAVWAFLRGLGVQAGRKHVITCRYLSQRYIDSLRVPDSDPVQYEFVWGPRARLETSKMKALRYVARIHRKEPQDWPQQYREAMEDEANRADVGHRQIFVHNFR

SEQ ID NO: 12778 - protein, 97 aa, Homo sapiens
LDNMESGKMAPPKNAPRDALVMAQILKDMGITEYEPRVINQMLEFAFRYVTTILDDAKIYSSHAKKPNVDADDVRLAIQCRADQSFTSPPPRDVSKL

SEQ ID NO: 12779 - protein, 764 aa, Homo sapiens
LLSMDSGGGSLGLHTPDSRMAHTMIMQDFVAGMAGTAHIDGDHIVVSVPEAVLVSDVVTDDGITLDHGLAAEVVHGPDIITETDVVTEGVIVPEAVLEADVAIEEDLEEDDGDHILTSELITETVRVPEQVFVADLVTGPNGHLEHVVQDCVSGVDSPTMVSEEVLVTNSDTETVIQAAGGVPGSTVTIKTEDDDDDDVKSTSEDYLMISLDDVGEKLEHMGNTPLKIGSDGSQEDAKEDGFGSEVIKVYIFKAEAEDDVEIGGTEIVTESEYTSGHSVAGVLDQSRMQREKMVYMAVKDSSQEEDDIRDERRVSRRYEDCQASGNTLDSALESRSSTAAQYLQICDGINTNKVLKQKAKKRRRGETRQWQTAVIIGPDGQPLTVYPCHICTKKFKSRGFLKRHMKNHPDHLMRKKYQCTDCDFTTNKKVSFHNHLESHKLINKVDKTHEFTEYTRRYREASPLSSNKLILRDKEPKMHKCKYCDYETAEQGLLNRHLLAVHSKNFPHVCVECGKGFRHPSELKKHMRTHTGEKPYQCQYCIFRCADQSNLKTHIKSKHGNNLPYKCEHCPQAFGDERELQRHLDLFQGHKTHQCPHCDHKSTNSSDLKRHIISVHTKDFPHKCEVCDKGFHRPSELKKHSDIHKGRKIHQCRHCDFKTSDPFILSGHILSVHTKDQPLKCKRCKRGFRQQNELKKHMKTHTGRKIYQCEYCEYSTTDASGFKRHVISIHTKDYPHRCEFCKKGFRRPSEKNQHIMRHHKEALM

SEQ ID NO: 12780 - protein, 810 aa, Homo sapiens
LLSMDSGGGSLGLHTPDSRMAHTMIMQDFVAGMAGTAHIDGDHIVVSVPEAVLVSDVVTDDGITLDHGLAAEVVHGPDIITETDVVTEGVIVPEAVLEADVAIEEDLEEDDGDHILTSELITETVRVPEQVFVADLVTGPNGHLEHVVQDCVSGVDSPTMVSEEVLVTNSDTETVIQAAGGVPGSTVTIKTEDDDDDDVKSTSEDYLMISLDDVGEKLEHMGNTPLKIGSDGSQEDAKEDGFGSEVIKVYIFKAEAEDDVEIGGTEIVTESEYTSGHSVAGVLDQSRMQREKMVYMAVKDSSQEEDDISCAEIADEVYMEVIVGEEEGTSLPEIQLEDSDVNKTVVPVVWAAAYGDERRVSRRYEDCQASGNTLDSALESRSSTAAQYLQICDGINTNKVLKQKAKKRRRGETRQWQTAVIIGPDGQPLTVYPCHICTKKFKSRGFLKRHMKNHPDHLMRKKYQCTDCDFTTNKKVSFHNHLESHKLINKVDKTHEFTEYTRRYREASPLSSNKLILRDKEPKMHKCKYCDYETAEQGLLNRHLLAVHSKNFPHVCVECGKGFRHPSELKKHMRTHTGEKPYQCQYCIFRCADQSNLKTHIKSKHGNNLPYKCEHCPQAFGDERELQRHLDLFQGHKTHQCPHCDHKSTNSSDLKRHIISVHTKDFPHKCEVCDKGFHRPSELKKHSDIHKGRKIHQCRHCDFKTSDPFILSGHILSVHTKDQPLKCKRCKRGFRQQNELKKHMKTHTGRKIYQCEYCEYSTTDASGFKRHVISIHTKDYPHRCEFCKKGFRRPSEKNQHIMRHHKEALM

SEQ ID NO: 12781 - protein, 19 aa, Homo sapiens
LVWTYSSPDLASSVPGRWD

SEQ ID NO: 12782 - protein, 606 aa, Homo sapiens
LECSSAISAHCSLHLLGSSDSPASASRVAGITGVCHHAQLVFVFFSRDGVSSYWPGWSQTPVRLTSSQAHLGLPECWDYRTYAVMSPQKRVKNVQAQNRTSQGSSSFQTTLSAWKVKQDPSNSKNISKHGQNNPVGDYEHADDQAEEDALQMAVGYFEKGPIKASQNKDKTLEKHLKTVENVAWKNGLASEEIDILLNIALSGKFGNAVNTRILKCMIPATVISEDSVVKAVSWLCVGKCSGSTKVLFYRWLVAMFDFIDRKEQINLLYGFFFASLQDDALCPYVCHLLYLLTKKENVKPFRVRKLLDLQAKMGMQPHLQALLSLYKFFAPALISVSLPVRKKIYFKNSENLWKTALLAVKQRNRGPSPEPLKLMLGPANVRPLKRKWNSLSVIPVLNSSSYTKECGKKEMSLSDCLNRSGSFPLEQLQSFPQLLQNIHCLELPSQMGSVLNNSLLLHYINCVRDEPVLLRFYYWLSQTLQEECIWYKVNNYEHGKEFTNFLDTIIRAECFLQEGFYSCEAFLYKSLPLWDGLCCRSQFLQLVSWIPFSSFSEVKPLLFDHLAQLFFTSTIYFKCSVLQSLKELLQNWLLWLSMDIHMKPVTNSPL

SEQ ID NO: 12783 - protein, 840 aa, Homo sapiens
LECSSAISAHCSLHLLGSSDSPASASRVAGITGVCHHAQLVFVFFSRDGVSSYWPGWSQTPVRLTSSQAHLGLPECWDYRTYAVMSPQKRVKNVQAQNRTSQGSSSFQTTLSAWKVKQDPSNSKNISKHGQNNPVGDYEHADDQAEEDALQMAVGYFEKGPIKASQNKDKTLEKHLKTVENVAWKNGLASEEIDILLNIALSGKFGNAVNTRILKCMIPATVISEDSVVKAVSWLCVGKCSGSTKVLFYRWLVAMFDFIDRKEQINLLYGFFFASLQDDALCPYVCHLLYLLTKKENVKPFRVRKLLDLQAKMGMQPHLQALLSLYKFFAPALISVSLPVRKKIYFKNSENLWKTALLAVKQRNRGPSPEPLKLMLGPANVRPLKRKWNSLSVIPVLNSSSYTKECGKKEMSLSDCLNRSGSFPLEQLQSFPQLLQNIHCLELPSQMGSVLNNSLLLHYINCVRDEPVLLRFYYWLSQTLQEECIWYKVNNYEHGKEFTNFLDTIIRAECFLQEGFYSCEAFLYKSLPLWDGLCCRSQFLQLVSWIPFSSFSEVKPLLFDHLAQLFFTSTIYFKCSVLQSLKELLQNWLLWLSMDIHMKPVTNSPLETTLGGSMNSVSKLIHYVGWLSTTAMRLESNNTFLLHFILDFYEKVCDIYINYNLPLVVLFPPGIFYSALLSLDTSILNQLCFIMHRYRKNLTAAKKNELVQKTKSEFNFSSKTYQEFNHYLTSMVGCLWTSKPFGKGIYIDPEILEKTGVAEYKNSLNVVHHPSFLSYAVSFLLQESPEERTVNVSSIRGKKWSWYLDYLFSQGLQGLKLFIRSSVHHSSIPRAEGINCNNQY

SEQ ID NO: 12784 - protein, 763 aa, Homo sapiens
LCRTYAVMSPQKRVKNVQAQNRTSQGSSSFQTTLSAWKVKQDPSNSKNISKHGQNNPVGDYEHADDQAEEDALQMAVGYFEKGPIKASQNKDKTLEKHLKTVENVAWKNGLASEEIDILLNIALSGKFGNAVNTRILKCMIPATVISEDSVVKAVSWLCVGKCSGSTKVLFYRWLVAMFDFIDRKEQINLLYGFFFASLQDDALCPYVCHLLYLLTKKENVKPFRVRKLLDLQAKMGMQPHLQALLSLYKFFAPALISVSLPVRKKIYFKNSENLWKTALLAVKQRNRGPSPEPLKLMLGPANVRPLKRKWNSLSVIPVLNSSSYTKECGKKEMSLSDCLNRSGSFPLEQLQSFPQLLQNIHCLELPSQMGSVLNNSLLLHYINCVRDEPVLLRFYYWLSQTLQEECIWYKVNNYEHGKEFTNFLDTIIRAECFLQEGFYSCEAFLYKSLPLWDGLCCRSQFLQLVSWIPFSSFSEVKPLLFDHLAQLFFTSTIYFKCSVLQSLKELLQNWLLWLSMDIHMKPVTNSPLETTLGGSMNSVSKLIHYVGWLSTTAMRLESNNTFLLHFILDFYEKVCDIYINYNLPLVVLFPPGIFYSALLSLDTSILNQLCFIMHRYRKNLTAAKKNELVQKTKSEFNFSSKTYQEFNHYLTSMVGCLWTSKPFGKGIYIDPEILEKTGVAEYKNSLNVVHHPSFLSYAVSFLLQESPEERTVNVSSIRGKKWSWYLDYLFSQGLQGLKLFIRSSVHHSSIPRAEGINCNNQY

SEQ ID NO: 12785 - protein, 700 aa, Homo sapiens
LFQFIYHMASWSIQQMVIGCPLCGRHCSGGEHTGELQKEEAMAAVILESIFLKRSQQKKKTSPLNFKKRLFLLTVHKLSYYEYDFERGRRGSKKGSIDVEKITCVETVVPEKNPPPERQIPRRGEESSEMEQISIIERFPYPFQVVYDEGPLYVFSPTEELRKRWIHQLKNVIRYNSDLVQKYHPCFWIDGQYLCCSQTAKNAMGCQILENRNGSLKPGSSHRKTKKPLPPTPEEDQILKKPLPPEPAAAPVSTSELKKVVALYDYMPMNANDLQLRKGDEYFILEESNLPWWRARDKNGQEGYIPSNYVTEAEDSIEMYEWYSKHMTRSQAEQLLKQEGKEGGFIVRDSSKAGKYTVSVFAKSTGDPQGVIRHYVVCSTPQSQYYLAEKHLFSTIPELINYHQHNSAGLISRLKYPVSQQNKNAPSTAGLGYGSWEIDPKDLTFLKELGTGQFGVVKYGKWRGQYDVAIKMIKEGSMSEDEFIEEAKVMMNLSHEKLVQLYGVCTKQRPIFIITEYMANGCLLNYLREMRHRFQTQQLLEMCKDVCEAMEYLESKQFLHRDLAARNCLVNDQGVVKVSDFGLSRYVLDDEYTSSVGSKFPVRWSPPEVLMYSKFSSKSDIWAFGVLMWEIYSLGKMPYERFTNSETAEHIAQGLRLYRPHLASEKVYTIMYSCWHEKADERPTFKILLSNILDVMDEES

SEQ ID NO: 12786 - protein, 77 aa, Homo sapiens
LSWSLFPSEYQLPTALRAGRPAAEGKRKRRRKLSRIPAVGPSLSRVASLSVGCGTTPGKRRGRNLILIGGGRFEGLL

SEQ ID NO: 12787 - protein, 51 aa, Homo sapiens
MSRLQPISMLRNVGPSLSRVASLSVGCGTTPGKRRGRNLILIGGGRFEGLL

SEQ ID NO: 12788 - protein, 10 aa, Homo sapiens
VHGTYTCLSF

SEQ ID NO: 12789 - protein, 47 aa, Homo sapiens
VSAYGYQLPEKPGFTMAVGGTAVITRRLLGRSGFSFQVTIRKAKFAV

SEQ ID NO: 12790 - protein, 161 aa, Homo sapiens
LGSVIEASLRPLRRENQLLQPQRQPEAEGRRAGPDRAGQGAGRAPCAAWEKAGSLPAEKEFLASFRAGASGASVVAIDNKIEQAMDLVKNHLMYAVREEVEILKEQIRELVEKNSQLERENTLLKTLASPEQLEKFQSCLSPEEPAPESPQVPEAPGGSAV

SEQ ID NO: 12791 - protein, 238 aa, Homo sapiens
LTPCDAAGSSYIKKQEPKYLRVWVGLAAVEFVTYEVTPLESLPFNSSWSACLALGSFCSLRPAPSLRAGLQRRAQPSAACQQPPSRPAAQPRTKPGQSFLAARAMNTEMYQTPMEVAVYQLHNFSISFFSSLLGGDVVSVKLDNSASGASVVAIDNKIEQAMDLVKNHLMYAVREEVEILKEQIRELVEKNSQLERENTLLKTLASPEQLEKFQSCLSPEEPAPESPQVPEAPGGSAV

SEQ ID NO: 12792 - protein, 284 aa, Homo sapiens
LPPLSRHSPGEPESLRACKPGREGAKEGGSKGAPWLSLCPAARPSCLHSLSFPGTLESPQASSVGAHLPAAPDLAGQATSEPEKMAQSKLDCRSPVGLDCCNCCLDLAHRSGLQRGSSGENNNPGSPTVSNFRQLQEKLVFENLNTDKLNSIMRQDSLEPVLRDPCYLINEGICNRNIDQTMLSILLFFHSASGASVVAIDNKIEQAMDLVKNHLMYAVREEVEILKEQIRELVEKNSQLERENTLLKTLASPEQLEKFQSCLSPEEPAPESPQVPEAPGGSAV

SEQ ID NO: 12793 - protein, 48 aa, Homo sapiens
VKTSCCSRRGSRRQRGGGQDQTGLGRGLAERRAPLGRRPEAYQPRRNS

SEQ ID NO: 12794 - protein, 42 aa, Homo sapiens
LGWTGGRGVCDIRGDTPRVTSLQLQLERLLGFGFVLQPSPRS

SEQ ID NO: 12795 - protein, 741 aa, Homo sapiens
LAPGNAMGESPASVVLNASGGLFSLKMETLESELTCPICLELFEDPLLLPCAHSLCFSCAHRILVSSCSSGESIEPITAFQCPTCRYVISLNHRGLDGLKRNVTLQNIIDRFQKASVSGPNSPSESRRERTYRPTTAMSSERIACQFCEQDPPRDAVKTCITCEVSYCDRCLRATHPNKKPFTSHRLVEPVPDTHLRGITCLDHENEKVNMYCVSDDQLICALCKLVGRHRDHQVASLNDRFEKLKQTLEMNLTNLVKRNSELENQMAKLIQICQQVEVNTAMHEAKLMEECDELVEIIQQRKQMIAVKIKETKVMKLRKLAQQVANCRQCLERSTVLINQAEHILKENDQARFLQSAKNIAERVAMATASSQVLIPDINFNDAFENFALDFSREKKLLEGLDYLTAPNPPSIREELCTASHDTITVHWISDDEFSISSYELQYTIFTGQANFISKSWCSWGLWPEIRKCKEAVSCSRLAGAPRGLYNSVDSWMIVPNIKQNHYTVHGLQSGTRYIFIVKAINQAGSRNSEPTRLKTNSQPFKLDPKMTHKKLKISNDGLQMEKDESSLKKSHTPERFSGTGCYGAAGNIFIDSGCHYWEVVMGSSTWYAIGIAYKSAPKNEWIGKNASSWVFSRCNSNFVVRHNNKEMLVDVPPHLKRLGVLLDYDNNMLSFYDPANSLHLHTFDVTFILPVCPTFTIWNKSLMILSGLPAPDFIDYPERQECNCRPQESPYVSGMKTCH

SEQ ID NO: 12796 - protein, 46 aa, Homo sapiens
LDLMSLSSASTPPLWPPENSFPSSGLSSIRRRWSQFLFTFLKVDKL

SEQ ID NO: 12797 - protein, 54 aa, Homo sapiens
VPVKENFNPTTGILVIGNLTNFEQGYYQCTAINRLGNSSCEIDLTSSRELTIQL

SEQ ID NO: 12798 - protein, 644 aa, Homo sapiens
VAWRRWLPRFPPAATPCFVSPVPRRLVSSRVPLPMESVRIEQMLSLPAEVSSDNLESAERGASAAQVDMGPHPKVAAEGPAPLPTREPEQEQSPGTSTPESKVLLTQADALASRGRIREALEVYRQLSERQQLVAEQLEQLVRCLAEKVPQGEALAPAPPDEGSTASGTVAAEETGAAAAAAATEVWDGFKCRKCHGFLSDPVSLSCGHTFCKLCLERGRAADRRCALCGVKLSALMVATGRARGARRAGQQPPPPLRVNVVLSGLLGKLFPGPARASQLRHEGNRLYRERQVEAALLKYNEAVKLAPNDHLLYSNRSQIYFTLESHENALHDAEIACKLRPMGFKAHFRKAQALATLGKVEEALREFLYCVSLDGKNKRARCEAQRDNLELPHCSSQEEAAARGDGSSLMDPAKVKGDGQQHHMKDQEEEEEKWDATSPKAASSKTGKCQEKKRKHCQIESQEETGMPNKASKQDPPTDQGDKPALSLPLASFDASDLECALCMRLFYEPVTTPCGHTFCLKCLERCLDHNAKCPLCKDGLSQCLASRKYSKNVIMEELIAKFLPEELKERRKLYEEEMEELSNLNKNVPIFVCTMAYPTVPCPLHIFEPCYRLMIRRCIETGTRQFGMCLGDPVKGHCLLCN

SEQ ID NO: 12799 - protein, 752 aa, Homo sapiens
VAWRRWLPRFPPAATPCFVSPVPRRLVSSRVPLPMESVRIEQMLSLPAEVSSDNLESAERGASAAQVDMGPHPKVAAEGPAPLPTREPEQEQSPGTSTPESKVLLTQADALASRGRIREALEVYRQLSERQQLVAEQLEQLVRCLAEKVPQGEALAPAPPDEGSTASGTVAAEETGAAAAAAATEVWDGFKCRKCHGFLSDPVSLSCGHTFCKLCLERGRAADRRCALCGVKLSALMVATGRARGARRAGQQPPPPLRVNVVLSGLLGKLFPGPARASQLRHEGNRLYRERQVEAALLKYNEAVKLAPNDHLLYSNRSQIYFTLESHENALHDAEIACKLRPMGFKDNLELPHCSSQEEAAARGDGSSLMDPAKVKGDGQQHHMKDQEEEEEKWDATSPKAASSKTGKCQEKKRKHCQIESQEETGMPNKASKQDPPTDQGDKPALSLPLASFDASDLECALCMRLFYEPVTTPCGHTFCLKCLERCLDHNAKCPLCKDGLSQCLASRKYSKNVIMEELIAKFLPEELKERRKLYEEEMEELSNLNKNVPIFVCTMAYPTVPCPLHIFEPCYRLMIRRCIETGTRQFGMCLGDPVKGFAEYGCILEIRNVQFFADGRSVVDSIGKRRFRVLHQSQRDGYNTADIEYIEDQKVQGEDCAELMGLHNCVYQQASLWFHSLKLSLKNRILNHFGPMPEKDADPQMNPNGPAWCWWMLAVLPLESRAQLPFLAMRSLKDRLNGIRRVLAFISRNQN

SEQ ID NO: 12800 - protein, 385 aa, Homo sapiens
LLYSNRSQIYFTLESHENALHDAEIACKLRPMGFKAHFRKAQALATLGKVEEALREFLYCVSLDGKNKRARCEAQRLLLSFFSPSVPGDSQEHSPDILKLLAPHPRLKENVESMTTEVTSHNLPRLLQDNLELPHCSSQEEAAARGDGSSLMDPAKVKGDGQQHHMKDQEEEEEKWDATSPKAASSKTGKCQEKKRKHCQIESQEETGMPNKASKQDPPTDQGDKPALSLPLASFDASDLECALCMRLFYEPVTTPCGHTFCLKCLERCLDHNAKCPLCKDGLSQCLASRKYSKNVIMEELIAKFLPEELKERRKLYEEEMEELSNLNKNVPIFVCTMAYPTVPCPLHIFEPCYRLMIRRCIETGTRQFGMCLGDPVKGHCLLCN

SEQ ID NO: 12801 - protein, 534 aa, Homo sapiens
LLYSNRSQIYFTLESHENALHDAEIACKLRPMGFKAHFRKAQALATLGKVEEALREFLYCVSLDGKNKRARCEAQRLLLSFFSPSVPGDSQEHSPDILKLLAPHPRLKENVESMTTEVTSHNLPRLLQDNLELPHCSSQEEAAARGDGSSLMDPAKVKGDGQQHHMKDQEEEEEKWDATSPKAASSKTGKCQEKKRKHCQIESQEETGMPNKASKQDPPTDQGDKPALSLPLASFDASDLECALCMRLFYEPVTTPCGHTFCLKCLERCLDHNAKCPLCKDGLSQCLASRKYSKNVIMEELIAKFLPEELKERRKLYEEEMEELSNLNKNVPIFVCTMAYPTVPCPLHIFEPCYRLMIRRCIETGTRQFGMCLGDPVKGFAEYGCILEIRNVQFFADGRSVVDSIGKRRFRVLHQSQRDGYNTADIEYIEDQKVQGEDCAELMGLHNCVYQQASLWFHSLKLSLKNRILNHFGPMPEKDADPQMNPNGPAWCWWMLAVLPLESRAQLPFLAMRSLKDRLNGIRRVLAFISRNQN

SEQ ID NO: 12802 - protein, 26 aa, Homo sapiens
LGKSNSVGYFQLLYLQMGNKRIMNTL

SEQ ID NO: 12803 - protein, 1082 aa, Homo sapiens
VQPLPPPRSPRPLPCPPTRSRSHGMEQDTAAVAATVAAADATATIVVIEDEQPGPSTSQEEGAAAAATEATAATEKGEKKKEKNVSSFQLKLAAKAPKSEKEMDPEYEEKMKADRAKRFEFLLKQTELFAHFIQPSAQKSPTSPLNMKLGRPRIKKDEKQSLISAGDYRHRRTEQEEDEELLSESRKTSNVCIRFEVSPSYVKGGPLRDYQIRGLNWLISLYENGVNGILADEMGLGKTLQTIALLGYLKHYRNIPGPHMVLVPKSTLHNWMNEFKRWVPSLRVICFVGDKDARAAFIRDEMMPGEWDVCVTSYEMVIKEKSVFKKFHWRYLVIDEAHRIKNEKSKLSEIVREFKSTNRLLLTGTPLQNNLHELWALLNFLLPDVFNSADDFDSWFDTKNCLGDQKLVERLHAVLKPFLLRRIKTDVEKSLPPKKEIKIYLGLSKMQREWYTKILMKDIDVLNSSGKMDKMRLLNILMQLRKCCNHPYLFDGAEPGPPYTTDEHIVSNSGKMVVLDKLLAKLKEQGSRVLIFSQMTRLLDILEDYCMWRGYEYCRLDGQTPHEEREEAIEAFNAPNSSKFIFMLSTRAGGLGINLASADVVILYDSDWNPQVDLQAMDRAHRIGQKKPVRVFRLITDNTVEERIVERAEIKLRLDSIVIQQGRLIDQQSNKLAKEEMLQMIRHGATHVFASKESELTDEDITTILERGEKKTAEMNERLQKMGESSLRNFRMDIEQSLYKFEGEDYREKQKLGMVEWIEPPKRERKANYAVDAYFREALRVSEPKIPKAPRPPKQPNVQDFQFFPPRLFELLEKEILYYRKTIGYKVPRNPDIPNPALAQREEQKKIDGAEPLTPEETEEKEKLLTQGFTNWTKRDFNQFIKANEKYGRDDIDNIAREVEGKSPEEVMEYSAVFWERCNELQDIEKIMAQIERGEARIQRRISIKKALDAKIARYKAPFHQLRIQYGTSKGKNYTEEEDRFLICMLHKMGFDRENVYEELRQCVRNAPQFRFDWFIKSRTAMEFQRRCNTLISLIEKENMEIEERERAEKKKRATKTPMSQKRKAESATESSGKKDVKKVKS

SEQ ID NO: 12804 - protein, 1078 aa, Homo sapiens
VQPLPPPRSPRPLPCPPTRSRSHGMEQDTAAVAATVAAADATATIVVIEDEQPGPSTSQEEGAAAAATEATAATEKGEKKKEKNVSSFQLKLAAKAPKSEKEMDPEYEEKMKADRAKRFEFLLKQTELFAHFIQPSAQKSPTSPLNMKLGRPRIKKDEKQSLISAGDYRHRRTEQEEDEELLSESRKTSNVCIRFEVSPSYVKGGPLRDYQIRGLNWLISLYENGVNGILADEMGLGKTLQTIALLGYLKHYRNIPGPHMVLVPKSTLHNWMNEFKRWVPSLRVICFVGDKDARAAFIRDEMMPGEWDVCVTSYEMVIKEKSVFKKFHWRYLVIDEAHRIKNEKSKLSEIVREFKSTNRLLLTGTPLQNNLHELWALLNFLLPDVFNSADDFDSWFDTKNCLGDQKLVERLHAVLKPFLLRRIKTDVEKSLPPKKEIKIYLGLSKMQREWYTKILMKDIDVLNSSGKMDKMRLLNILMQLRKCCNHPYLFDGAEPGPPYTTDEHIVSNSGKMVVLDKLLAKLKEQGSRVLIFSQMTRLLDILEDYCMWRGYEYCRLDGQTPHEEREDKFLEVEFLGQREAIEAFNAPNSSKFIFMLSTRAGGLGINLASADVVILYDSDWNPQVDLQAMDRAHRIGQKKPVRVFRLITDNTVEERIVERAEIKLRLDSIVIQQGRLIDQQSNKLAKEEMLQMIRHGATHVFASKESELTDEDITTILERGEKKTAEMNERLQKMGESSLRNFRMDIEQSLYKFEGEDYREKQKLGMVEWIEPPKRERKANYAVDAYFREALRVSEPKIPKAPRPPKQPNVQDFQFFPPRLFELLEKEILYYRKTIGYKVPRNPDIPNPALAQREEQKKIDGAEPLTPEETEEKEKLLTQGFTNWTKRDFNQFIKANEKYGRDDIDNIAREVEGKSPEEVMEYSAVFWERCNELQDIEKIMAQIERGEARIQRRISIKKALDAKIARYKAPFHQLRIQYGTSKGKNYTEEEDRFLICMLHKMGFDRENVYEELRQCVRNAPQFRFDWFIKSRTAMEFQRRCNTLISLIEKENMEIEERERAEKKKRATKTPMVKFSAFS

SEQ ID NO: 12805 - protein, 800 aa, Homo sapiens
VQPLPPPRSPRPLPCPPTRSRSHGMEQDTAAVAATVAAADATATIVVIEDEQPGPSTSQEEGAAAAATEATAATEKGEKKKEKNVSSFQLKLAAKAPKSEKEMDPEYEEKMKADRAKRFEFLLKQTELFAHFIQPSAQKSPTSPLNMKLGRPRIKKDEKQSLISAGDYRHRRTEQEEDEELLSESRKTSNVCIRFEVSPSYVKGGPLRDYQIRGLNWLISLYENGVNGILADEMGLGKTLQTIALLGYLKHYRNIPGPHMVLVPKSTLHNWMNEFKRWVPSLRVICFVGDKDARAAFIRDEMMPGEWDVCVTSYEMVIKEKSVFKKFHWRYLVIDEAHRIKNEKSKLSEIVREFKSTNRLLLTGTPLQNNLHELWALLNFLLPDVFNSADDFDSWFDTKNCLGDQKLVERLHAVLKPFLLRRIKTDVEKSLPPKKEIKIYLGLSKMQREWYTKILMKDIDVLNSSGKMDKMRLLNILMQLRKCCNHPYLFDGAEPGPPYTTDEHIVSNSGKMVVLDKLLAKLKEQGSRVLIFSQMTRLLDILEDYCMWRGYEYCRLDGQTPHEEREEAIEAFNAPNSSKFIFMLSTRAGGLGINLASADVVILYDSDWNPQVDLQAMDRAHRIGQKKPVRVFRLITDNTVEERIVERAEIKLRLDSIVIQQGRLIDQQSNKLAKEEMLQMIRHGATHVFASKESELTDEDITTILERGEKKTAEMNERLQKMGESSLRNFRMDIEQSLYKFEGEDYREKQKLGMVEWIEPPKRERKANYAVDAYFREALRVSEPKIPKVKLYKASFYVLK

SEQ ID NO: 12806 - protein, 723 aa, Homo sapiens
LAAEMTANRLAESLLALSQQEELADLPKDYLLSESEDEGDNDGERKHQKLLEAISSLDGKNRRKLAERSEASLKVSEFNVSSEGSGEKLVLADLLEPVKTSSSLATVKKQLSRVKSKKTVELPLNKEEIERARTPLEQEIFNLLHKNKQPVTDPLLTPVEKASLRAMSLEEAKMRRAELQRARALQSYYEAKARREKKIKSKKYHKVVKKGKAKKALKEFEQLRKVNPAAALEELEKIEKARMMERMSLKHQNSGKWAKSKAIMAKYDLEARQAMQEQLSKNKELTQKLQVASESEEEEGGTEDVEELLVPDVVNEVQMNADGPNPWMLRSCTSDTKEAATQEDPEQLPELEAHGVSESEGEERPVAEEEILLREFEERRSLRKRSELSQDAEPAGSQETKDSGSQEVLSELRVLSQKLKENHQSRKQKASSEGTIPQVQREEPAPEEEEPLLLQRPERVQTLEELEELGKEECFQNKELPRPVLEGQQSERTPNNRPDAPKEKKKKEQMIDLQNLLTTQSPSVKSLAVPTIEELEDEEERNHRQMIKEAFAGDDVIRDFLKEKREAVEASKPKDVDLTLPGWGEWGGVGLKPSAKKRRRFLIKAPEGPPRKDKNLPNVIINEKRNIHAAAHQVRVLPYPFTHHWQFERTIQTPIGSTWNTQRAFQKLTTPKVVTKPGHIINPIKAEDVGYRSSSRSDLSVIQRNPKRITTRHKKQLKKCSVD

SEQ ID NO: 12807 - protein, 775 aa, Homo sapiens
LAAEMTANRLAESLLALSQQEELADLPKDYLLSESEDEGDNDGERKHQKLLEAISSLDGKNRRKLAERSEASLKVSEFNVSSEGSGEKLVLADLLEPVKTSSSLATVKKQLSRVKSKKTVELPLNKEEIERIHREVAFNKTAQVLSKWDPVVLKNRQAEQLVFPLEKEEPAIAPIEHVLSGWKARTPLEQEIFNLLHKNKQPVTDPLLTPVEKASLRAMSLEEAKMRRAELQRARALQSYYEAKARREKKIKSKKYHKVVKKGKAKKALKEFEQLRKVNPAAALEELEKIEKARMMERMSLKHQNSGKWAKSKAIMAKYDLEARQAMQEQLSKNKELTQKLQVASESEEEEGGTEDVEELLVPDVVNEVQMNADGPNPWMLRSCTSDTKEAATQEDPEQLPELEAHGVSESEGEERPVAEEEILLREFEERRSLRKRSELSQDAEPAGSQETKDSGSQEVLSELRVLSQKLKENHQSRKQKASSEGTIPQVQREEPAPEEEEPLLLQRPERVQTLEELEELGKEECFQNKELPRPVLEGQQSERTPNNRPDAPKEKKKKEQMIDLQNLLTTQSPSVKSLAVPTIEELEDEEERNHRQMIKEAFAGDDVIRDFLKEKREAVEASKPKDVDLTLPGWGEWGGVGLKPSAKKRRRFLIKAPEGPPRKDKNLPNVIINEKRNIHAAAHQVRVLPYPFTHHWQFERTIQTPIGSTWNTQRAFQKLTTPKVVTKPGHIINPIKAEDVGYRSSSRSDLSVIQRNPKRITTRHKKQLKKCSVD

SEQ ID NO: 12808 - protein, 141 aa, Homo sapiens
MAKYDLEARQAMQEQLSKNKELTQKLQVASESEEEEGGTEDVEELLVPDVVNEVQMNADGPNPWMLRSCTSDTKEAATQEDPEQLPELEAHGVSESEGEERPVAEEEILLREFEERRSLRKRSELSQDAEPAGSQETKGEL

SEQ ID NO: 12809 - protein, 313 aa, Homo sapiens
LQGGCAGGGGGGPGVRGTPFTRARAHGAGARTHGRTHTHARTHTRTELARLERTNVDVLFVWSPQGGLGPRFGPGEMAQPILGHGSLQPASAAGLASLELDSSLDQYVQIRIFKIIVIGDSNVGKTCLTFRFCGGTFPDKTEATIGVDFREKTVEIEGEKIKVQVWDTAGQERFRKSMVEHYYRNVHAVVFVYDVTKMTSFTNLKMWIQECNGHAVPPLVPKVLVGNKCDLREQIQVPSNLALKFADAHNMLLFETSAKDPKESQNVESIFMCLACRLKAQKSLLYRDAERQQGKVQKLEFPQEANSKTSCPC

SEQ ID NO: 12810 - protein, 8 aa, Homo sapiens
MQPITVEL

SEQ ID NO: 12811 - protein, 48 aa, Homo sapiens
LTLLTTTSPCSLVVPVALWSQKASLRMEGNQARKEREQILLQPITVEL

SEQ ID NO: 12812 - protein, 76 aa, Homo sapiens
LSLCGREPESLENLFLDPDMAQEKMKLGFKSLPSSTTADGNILRRVNSAPLINGLGCFVTSDLHLQPLEWKWLSSK

SEQ ID NO: 12813 - protein, 171 aa, Homo sapiens
LSLCGREPESLENLFLDPDMAQEKMKLGFKSLPSSTTADGNILRRVNSAPLINGLGFNSQVLQADMLRIRTNRTTFRNRRSLLLPPPPFHGSISRLHQIKQEEAMDLINRETMSEWKLQSEIQISHSWEEGLKLNDNGLQKSSSLKCIDLTPVSSMASSIKKTGKSTSSYF

SEQ ID NO: 12814 - protein, 12 aa, Homo sapiens
LRLQIAKMLWSF

SEQ ID NO: 12815 - protein, 33 aa, Homo sapiens
VQPRDADKGAEEQSQLLSEEAGVAEIAKMLWSF

SEQ ID NO: 12816 - protein, 11 aa, Homo sapiens
MGVSPWEFRHG

SEQ ID NO: 12817 - protein, 51 aa, Homo sapiens
LIPGKDYWAGSQEAWGTLSSAANMLHDHGLTGEPEVLCRDQRKALIPSLQP

SEQ ID NO: 12818 - protein, 15 aa, Homo sapiens
LGWKSGGLGYSQLCR

SEQ ID NO: 12819 - protein, 65 aa, Homo sapiens
MLPLPPSLPEDTISTLTQHDRNIQPNFSPICGHWTAHQHENFYVFTYCFSYHPDDWVSTFCCVSS

SEQ ID NO: 12820 - protein, 428 aa, Homo sapiens
LTSLQQKKGKEHAALLRGISSNHTDDSPYSWSFPPYHPSSEKYENTKTCRGPDGELHANLLCPVDVLDVPEGTLPDKQSTEQAIQLLEKMKTSASPFFLAVGYHKPHIPFRYPKEFQKLYPLENITLAPDPEVPDGLPPVAYNPWMDIRQREDVQALNISVPYGPIPVDFQRKIRQSYFASVSYLDTQVGRLLSALDDLQLANSTIIAFTSDHGWALGEHGEWAKYSNFDVATHVPLIFYVPGRTASLPEAGEKLFPYLDPFDSASQLMEPGRQSMDLVELVSLFPTLAGLAGLQVPPRCPVPSFHVELCREGKNLLKHFRFRDLEEDPYLPGNPRELIAYSQYPRPSDIPQWNSDKPSLKDIKIMGYSIRTIDYRYTVWVGFNPDEFLANFSDIHAGELYFVDSDPLQDHNMYNDSQGGDLFQLLMP

SEQ ID NO: 12821 - protein, 167 aa, Homo sapiens
LDVPEGTLPDKQSTEQAIQLLEKMKTSASPFFLAVGYHKPHIPFRYPKEFQKLYPLENITLAPDPEVPDGLPPVAYNPWMDIRQREDVQALNISVPYGPIPVDFQNPALLLPHECCGRQAIADGRWQCFQSVHPGLPALEFLGGLVGNAKSWPTQIYTIGSWRWNLT

SEQ ID NO: 12822 - protein, 76 aa, Homo sapiens
MSVGKVFHPGISSNHTDDSPYSWSFPPYHPSSEKYENTKMEFHSCHPGWSAMAQSQLTVASTSQVQAMILLPQPSE

SEQ ID NO: 12823 - protein, 26 aa, Homo sapiens
VRDYAHTYVPHERDDGSCMKAEVMDR

SEQ ID NO: 12824 - protein, 51 aa, Homo sapiens
MASASTSKYNSHSLENESIKRTSRDGVNRDLTEAVPRLPGETLITGKDLLT

SEQ ID NO: 12825 - protein, 51 aa, Homo sapiens
MASASTSKYNSHSLENESIKRTSRDGVNRDLTEAVPRLPGETLITGFFSNT

SEQ ID NO: 12826 - protein, 96 aa, Homo sapiens
MASASTSKYNSHSLENESIKRTSRDGVNRDLTEAVPRLPGETLITDKEVIYICPFNGPIKGRVYITNYRLYLRKICLRSSRDTRFPWLTVCHYLHF

SEQ ID NO: 12827 - protein, 218 aa, Homo sapiens
LSRASCPALPRLANNTVRMAKGDPKKPKGKMSAYAFFVQTCREEHKKKNPEVPVNFAEFSKKCSERWKTMSGKEKSKFDEMAKADKVRYDREMKDYGPAKGGKKKKDPNAPKRPPSGFFLFCSEFRPKIKSTNPGISIGDVAKKLGEMWNNLNDSEKQPYITKAAKLKEKYEKDVADYKSKGKFDGAKGPAKVARKKVEEEDEEEEEEEEEEEEEEDE

SEQ ID NO: 12828 - protein, 817 aa, Homo sapiens
VPPSPARRPAPRARVWPLAPARDPRSRARVSERRLPVPALRLLSPASNMGCNMCVVQKPEEQYKVMLQVNGKELSKLSQEQTLQALRSSKEPLVIQVLRRSPRLRGDSSCHDLQLVDSGTQTDITFEHIMALGKLRPPTPPMVILEPPPISHEYYDPAEFMEGGPQEADRLDELEYEEVELYKSSHRDKLGLMVCYRTDDEEDLGIYVGEVNPNSIAAKDGRIREGDRIIQINGVDVQNREEAVAILSQEENTNISLLVARPESQLAKRWKDSDRDDFLDDFGSENEGELRARKLKSPPAQQPGNEEEKGAPDAGPGLSNSQELDSGVGRTDESTRNEESSEHDLLGDEPPSSTNTPGSLRKFGLQGDALQSRDFHFSMDSLLAEGAGLGGGDVPGLTDEEYERYRELLEIKCHLENGNQLGLLFPRASGGNSALDVNRNESLGHEMAMLEEELRHLEFKCRNILRAQKMQQLRERCMKAWLLEEESLYDLAASEPKKHELSDISELPEKSDKDSTSAYNTGESCRSTPLLVEPLPESPLRRAMAGNSNLNRTPPGPAVATPAKAAPPPGSPAKFRSLSRDPEAGRRQHAEERGRRNPKTGLTLERVGPESSPYLSRRHRGQGQEGEHYHSCVQLAPTRGLEELGHGPLSLAGGPRVGGVAAAATEAPRMEWKVKVRSDGTRYVAKRPVRDRLLKARALKIREERSGMTTDDDAVSEMKMGRYWSKEERKQHLIRAREQRKRREFMMQSRLECLREQQNGDSKPELNIIALSHRKTMKKRNKKILDNWITIQEMLAHGARSADGKRVYNPLLSVTTV

SEQ ID NO: 12829 - protein, 708 aa, Homo sapiens
VPPSPARRPAPRARVWPLAPARDPRSRARVSERRLPVPALRLLSPASNMGCNMCVVQKPEEQYKVMLQEVELYKSSHRDKLGLMVCYRTDDEEDLGIYVGEVNPNSIAAKDGRIREGDRIIQINGVDVQNREEAVAILSQEENTNISLLVARPESQLAKRWKDSDRDDFLDDFGSENEGELRARKLKSPPAQQPGNEEEKGAPDAGPGLSNSQELDSGVGRTDESTRNEESSEHDLLGDEPPSSTNTPGSLRKFGLQGDALQSRDFHFSMDSLLAEGAGLGGGDVPGLTDEEYERYRELLEIKCHLENGNQLGLLFPRASGGNSALDVNRNESLGHEMAMLEEELRHLEFKCRNILRAQKMQQLRERCMKAWLLEEESLYDLAASEPKKHELSDISELPEKSDKDSTSAYNTGESCRSTPLLVEPLPESPLRRAMAGNSNLNRTPPGPAVATPAKAAPPPGSPAKFRSLSRDPEAGRRQHAEERGRRNPKTGLTLERVGPESSPYLSRRHRGQGQEGEHYHSCVQLAPTRGLEELGHGPLSLAGGPRVGGVAAAATEAPRMEWKVKVRSDGTRYVAKRPVRDRLLKARALKIREERSGMTTDDDAVSEMKMGRYWSKEERKQHLIRAREQRKRREFMMQSRLECLREQQNGDSKPELNIIALSHRKTMKKRNKKILDNWITIQEMLAHGARSADGKRVYNPLLSVTTV

SEQ ID NO: 12830 - protein, 823 aa, Homo sapiens
VPPSPARRPAPRARVWPLAPARDPRSRARVSERRLPVPALRLLSPASNMGCNMCVVQKPEEQYKVMLQVNGKELSKLSQEQTLQALRSSKEPLVIQVLRRSPRLRGDSSCHDLQLVDSGTQTDITFEHIMALGKLRPPTPPMVILEPYVLSELPPISHEYYDPAEFMEGGPQEADRLDELEYEEVELYKSSHRDKLGLMVCYRTDDEEDLGIYVGEVNPNSIAAKDGRIREGDRIIQINGVDVQNREEAVAILSQEENTNISLLVARPESQLAKRWKDSDRDDFLDDFGSENEGELRARKLKSPPAQQPGNEEEKGAPDAGPGLSNSQELDSGVGRTDESTRNEESSEHDLLGDEPPSSTNTPGSLRKFGLQGDALQSRDFHFSMDSLLAEGAGLGGGDVPGLTDEEYERYRELLEIKCHLENGNQLGLLFPRASGGNSALDVNRNESLGHEMAMLEEELRHLEFKCRNILRAQKMQQLRERCMKAWLLEEESLYDLAASEPKKHELSDISELPEKSDKDSTSAYNTGESCRSTPLLVEPLPESPLRRAMAGNSNLNRTPPGPAVATPAKAAPPPGSPAKFRSLSRDPEAGRRQHAEERGRRNPKTGLTLERVGPESSPYLSRRHRGQGQEGEHYHSCVQLAPTRGLEELGHGPLSLAGGPRVGGVAAAATEAPRMEWKVKVRSDGTRYVAKRPVRDRLLKARALKIREERSGMTTDDDAVSEMKMGRYWSKEERKQHLIRAREQRKRREFMMQSRLECLREQQNGDSKPELNIIALSHRKTMKKRNKKILDNWITIQEMLAHGARSADGKRVYNPLLSVTTV

SEQ ID NO: 12831 - protein, 153 aa, Homo sapiens
MRWQLSEQLRCLELQGELRRELLQELAEFMRRRAEVELEYSRGLEKLAERFSSRGGRLGSSREHQSFRKEPSLLSPLHCWAVLLQHTRQQSRESAALSEVLAGPLAQRLSHIAEDVGRLVKKSFQCLAGPLWAVPCSPLPLPLEQGSGAAAAG

SEQ ID NO: 12832 - protein, 92 aa, Homo sapiens
LSLCPRFSLGSWWQLRRHLELKEKGRHVVLGAIENKVESKGNSPPSSGEACREEKGLAAEDSGGDSKDLSEVSETTESTDVKDSSEASDSAS

SEQ ID NO: 12833 - protein, 136 aa, Homo sapiens
LAKSVQLSSALFPCSNRAALHLYSNTLNFQISEVEPKYYADGEDAYAMKRDLTQMADELRRHLELKEKGRHVVLGAIENKVESKGNSPPSSGEACREEKGLAAEDSGGDSKDLSEVSETTESTDVKDSSEASDSAS

SEQ ID NO: 12834 - protein, 250 aa, Homo sapiens
LRLHDPLGPASPAAVMNIRNARPEDLMNMQHCNLLCLPENYQMKYYFYHGLSWPQLSYIAEDENGKIVGYVLAKMEEDPDDVPHGHITSLAVKRSHRRLGLAQKLMDQASRAMIENFNAKYVSLHVRKSNRAALHLYSNTLNFQISEVEPKYYADGEDAYAMKRDLTQMADELRRHLELKEKGRHVVLGAIENKVESKGNSPPSSGEACREEKGLAAEDSGGDSKDLSEVSETTESTDVKDSSEASDSAS

SEQ ID NO: 12835 - protein, 235 aa, Homo sapiens
LRLHDPLGPASPAAVMNIRNARPEDLMNMQHCNLLCLPENYQMKYYFYHGLSWPQLSYIAEDENGKIVGYVLAKMEEDPDDVPHGHITSLAVKRSHRRLGLAQKLMDQASRAMIENFNAKYVSLHVRKRISEVEPKYYADGEDAYAMKRDLTQMADELRRHLELKEKGRHVVLGAIENKVESKGNSPPSSGEACREEKGLAAEDSGGDSKDLSEVSETTESTDVKDSSEASDSAS

SEQ ID NO: 12836 - protein, 11 aa, Homo sapiens
MAASMESSTAV

SEQ ID NO: 12837 - protein, 35 aa, Homo sapiens
LNRSYREAVRVLRVQAHKILALSVLPMPRMFSLTC

SEQ ID NO: 12838 - protein, 53 aa, Homo sapiens
LTERPPVFDRTLWFLRAQTDRLYKPCAGGGAPLSLRCATEDPGVAMGRRPARW

SEQ ID NO: 12839 - protein, 155 aa, Homo sapiens
LTERPPVFDRTLWFLRAQTDRLYKPCAGGGAPLSLRCATEDPGVAMGRRPARCYRYCKNKPYPKSRFCRGVPDAKIRIFDLGRKKAKVDEFPLCGHMVSDEYEQLSSEALEAARICANKYMVKSCGKDGFHIRVRLHPFHVIRINKMLSCAGADR

SEQ ID NO: 12840 - protein, 259 aa, Homo sapiens
LTERPPVFDRTLWFLRAQTDRLYKPCAGGGAPLSLRCATEDPGVAMGRRPARCYRYCKNKPYPKSRFCRGVPDAKIRIFDLGRKKAKVDEFPLCGHMVSDEYEQLSSEALEAARICANKYMVKSCGKDGFHIRVRLHPFHVIRINKMLSCAGADRLQTGMRGAFGKPQGTVARVHIGQVIMSIRTKLQNKEHVIEALRRAKFKFPGRQKIHISKKWGFTKFNADEFEDMVAEKRLIPDGCGVKYIPSRGPLDKWRALHS

SEQ ID NO: 12841 - protein, 188 aa, Homo sapiens
MGRRPARCYRYCKNKPYPKSRFCRGVPDAKIRIFDLGRKKAKVDEFPLCGHMVSDEYEQLSSEALEAARICANKYMVKSCGKDGFHIRVRLHPFHVIRINKMLSCAGADRLQTGMRGAFGKPQGTVARVHIGQVIMSIRTKLQNKEHVIEALRRAKFKFPGRQKVCSAAAPFSHLCPRPPDSVLSIAP

SEQ ID NO: 12842 - protein, 226 aa, Homo sapiens
VRPPPVSYRGRQTHFHSAWSYRYCKNKPYPKSRFCRGVPDAKIRIFDLGRKKAKVDEFPLCGHMVSDEYEQLSSEALEAARICANKYMVKSCGKDGFHIRVRLHPFHVIRINKMLSCAGADRLQTGMRGAFGKPQGTVARVHIGQVIMSIRTKLQNKEHVIEALRRAKFKFPGRQKIHISKKWGFTKFNADEFEDMVAEKRLIPDGCGVKYIPSRGPLDKWRALHS

SEQ ID NO: 12843 - protein, 74 aa, Homo sapiens
LHTYPILLDAKIRIFDLGRKKAKVDEFPLCGHMVSDEYEQLSSEGKAGFFVRHPPVLPPCSLNPTHIHCTGIGS

SEQ ID NO: 12844 - protein, 91 aa, Homo sapiens
LHTYPILLDAKIRIFDLGRKKAKVDEFPLCGHMVSDEYEQLSSEALEAARICANKYMVKSCGKDGFHIRVRLHPFHVIRINKMLSCAGADR

SEQ ID NO: 12845 - protein, 187 aa, Homo sapiens
VDAVATAMQLTVKALQGRECSLQVPEDELVSTLKQLVSEKLNVPVRQQRLLFKGKALADGKRLSDYSIGPNSKLNLVVKPLEKVLLEEGEAQRLADSPPPQVWQLISKVLARHFSAADASRVLEQLQRDYERSLSRLTLDDIERWAHHHHSWHVPGSGQVLGTPHSLTWVCFHTLRRGEPAQQRHRR

SEQ ID NO: 12846 - protein, 144 aa, Homo sapiens [sequence omitted]

SEQ ID NO: 12847 - protein, 110 aa, Homo sapiens
VQPADGKRLSDYSIGPNSKLNLVVKPLEKVLLEEGEAQRLADSPPPQVWQLISKVLARHFSAADASRVLEQLQRDYERSLSRLTLDDIERLASRFLHPEVTETMEKGFSK

SEQ ID NO: 12848 - protein, 180 aa, Homo sapiens
VQPAGARGRAGVHAEAAGLREAERPSAPAAAAVQGQGPGSRMPQRSAPAARGGLAPRATPTAVEEEEPIDLSLADGKRLSDYSIGPNSKLNLVVKPLEKVLLEEGEAQRLADSPPPQVWQLISKVLARHFSAADASRVLEQLQRDYERSLSRLTLDDIERLASRFLHPEVTETMEKGFSK

SEQ ID NO: 12849 - protein, 171 aa, Homo sapiens
LGCAPARVDAVATAMQLTVKALQGRECSLQVPEDELVSTLKQLVSEKLNVPVRQQRLLFKGKALADGKRLSDYSIGPNSKLNLVVKPLEKVLLEEGEAQRLADSPPPQVWQLISKVLARHFSAADASRVLEQLQRDYERSLSRLTLDDIERLASRFLHPEVTETMEKGFSK

SEQ ID NO: 12850 - protein, 261 aa, Homo sapiens
LRKPEVSQSFSSFQIIWFCPTARLEDCTIPADVEGQSLRHRDKRLSLNLPCRFSPMYPTASASIEDSYVPMSPQAGASGLGPHCSPDDYIPMNSGSISSPLPELPANLEPPPVNRDLKPQRKSRPPPLDLRNLSIIREHASLTRTRTVPCSRTSFLSPERNGINSARFFANPVSREDEESYIEMEEHRTASSLSSGALTWTKKFSLDYLALDFNSASPAPMQQKLLLSEEQRVDYVQVDEQKTQALQSTKQEWTDERQSKV

SEQ ID NO: 12851 - protein, 595 aa, Homo sapiens
LEEAAAAATMSAGDAVCTGWLVKSPPERKLQRYAWRKRWFVLRRGRMSGNPDVLEYYRNKHSSKPIRVIDLSECAVWKHVGPSFVRKEFQNNFVFIVKTTSRTFYLVAKTEQEMQVWVHSISQVCNLGHLEDGADSMESLSYTPSSLQPSSASSLLTAHAASSSLPRDDPNTNAVATEETRSESELLFLPDYLVLSNCETGRLHHTSLPTRCDSWSNSDRSLEQASFDDVFVDCLQPLPSSHLVHPSCHGSGAQEVPSSRPQAALIWSREINGPPRDHLSSSPLLESSLSSTIQVDKNQGSLPCGAKELDIMSNTPPPRPPKPSHLSERRQEEWSTHSGSKKPECTLVPRRISLSGLDNMRTWKADVEGQSLRHRDKRLSLNLPCRFSPMYPTASASIEDSYVPMSPQAGASGLGPHCSPDDYIPMNSGSISSPLPELPANLEPPPVNRDLKPQRKSRPPPLDLRNLSIIREHASLTRTRTVPCSRTSFLSPERNGINSARFFANPVSREDEESYIEMEEHRTASSLSSGALTWTKKFSLDYLALDFNSASPAPMQQKLLLSEEQRVDYVQVDEQKTQALQSTKQEWTDERQSKV

SEQ ID NO: 12852 - protein, 599 aa, Homo sapiens
LAQLEEAAAAATMSAGDAVCTGWLVKSPPERKLQRYAWRKRWFVLRRGRMSGNPDVLEYYRNKHSSKPIRVIDLSECAVWKHVGPSFVRKEFQNNFVFIVKTTSRTFYLVAKTEQEMQVWVHSISQVCNLGHLEDGAADSMESLSYTPSSLQPSSASSLLTAHAASSSLPRDDPNTNAVATEETRSESELLFLPDYLVLSNCETGRLHHTSLPTRCDSWSNSDRSLEQASFDDVFVDCLQPLPSSHLVHPSCHGSGAQEVPSSRPQAALIWSREINGPPRDHLSSSPLLESSLSSTIQVDKNQGSLPCGAKELDIMSNTPPPRPPKPSHLSERRQEEWSTHSGSKKPECTLVPRRISLSGLDNMRTWKADVEGQSLRHRDKRLSLNLPCRFSPMYPTASASIEDSYVPMSPQAGASGLGPHCSPDDYIPMNSGSISSPLPELPANLEPPPVNRDLKPQRKSRPPPLDLRNLSIIREHASLTRTRTVPCSRTSFLSPERNGINSARFFANPVSREDEESYIEMEEHRTASSLSSGALTWTKKFSLDYLALDFNSASPAPMQQKLLLSEEQRVDYVQVDEQKTQALQSTKQEWTDERQSKV

SEQ ID NO: 12853 - protein, 163 aa, Homo sapiens
VQGNMADAEVIILPKKHKKKKERKSLPEEDVAEIQHAEEFLIKPESKVAKLDTSQWPLLLKNFDKLNVRTTHYTPLACGSNPLKREIGDYIRTGFINLDKPSNPSSHEVVAWIRRILRVEKTGHSGTLDPKVTGCLIVCIERATRLVKSQQSAGMWEREGRTG

SEQ ID NO: 12854 - protein, 110 aa, Homo sapiens
LESHSVNLTYCYLFFSESAKKEVVAEVVKAPQVVAEAAKTAKRKRESESESDETPPAAPQLIKKEKKKSKKDKKAKAGLESGAEPGDGDSDTTKKKKKKKKAKEVELVSE

SEQ ID NO: 12855 - protein, 154 aa, Homo sapiens
LYTDTTRPPRKSEEDGKEYHFISTEEMTRNISANEFLEFGSYQGNMFGTKFETVHQIHKQNKIAILDIEPQTLKIVRTAELSPFIVFIAPTDQGTQTEALQQLQKDSEAIRSQYAHYFDLSLVNNGVDETLKKLQEAFDQACSSPQWVPVSWVY

SEQ ID NO: 12856 - protein, 504 aa, Homo sapiens
VTGPAAPRLPPSPQPRRPRALSFPALPCLAFQCSSFCEMTLKASEGESGGSMHTALSDLYLEHLLQKRSRPEAVSHPLNTVTEDMYTNGSPAPGSPAQVKGQEVRKVRLIQFEKVTEEPMGITLKLNEKQSCTVARILHGGMIHRQGSLHVGDEILEINGTNVTNHSVDQLQKAMKETKGMISLKVIPNQQSRLPALQMFMRAQFDYDPKKDNLIPCKEAGLKFATGDIIQIINKDDSNWWQGRVEGSSKESAGLIPSPELQEWRVASMAQSAPSEAPSCSPFGKKKKYKDKYLAKHSSIFDQLDVVSYEEVVRLPAFKRKTLVLIGASGVGRSHIKNALLSQNPEKFVYPVPYTTRPPRKSEEDGKEYHFISTEEMTRNISANEFLEFGSYQGNMFGTKFETVHQIHKQNKIAILDIEPQTLKIVRTAELSPFIVFIAPTDQGTQTEALQQLQKDSEAIRSQYAHYFDLSLVNNGVDETLKKLQEAFDQACSSPQWVPVSWVY

SEQ ID NO: 12857 - protein, 161 aa, Homo sapiens
MESWMFMRAQFDYDPKKDNLIPCKEAGLKFATGDIIQIINKDDSNWWQGRVEGSSKESAGLIPSPELQEWRVASMAQSAPSEAPSCSPFGKKKKYKDKYLAKHSSIFDQLDVVSYEEVVRLPAFKRKTLVLIGASGVGRSHIKNALLSQNPEKFVYPVPCK

SEQ ID NO: 12858 - protein, 93 aa, Homo sapiens
LQEWRVASMAQSAPSEAPSCSPFGKKKKYKDKYLAKHSSIFDQLDVVSYEEVVRLPAFKRKTLVLIGIFSLPHLHISVFVFLPASRAHPQKRQ

SEQ ID NO: 12859 - protein, 237 aa, Homo sapiens
LSFPALPCLAFQCSSFCEMTLKASEGESGGSMHTALSDLYLEHLLQKRSRPEMFMRAQFDYDPKKDNLIPCKEAGLKFATGDIIQIINKDDSNWWQGRVEGSSKESAGLIPSPELQEWRVASMAQSAPSEAPSCSPFGKKKKYKDKYLAKHSSSKLSEPSCPRFLAAFTCFPVSVTSRKGEVVQCAAEGAFYRKHVISSGFFLLNPSSQACCSQASGCKGGLVVSPHLLITPPLTQK

SEQ ID NO: 12860 - protein, 151 aa, Homo sapiens
LSFPALPCLAFQCSSFCEMTLKASEGESGGSMHTALSDLYLEHLLQKRSRPEAVSHPLNTVTEDMYTNGSPAPGSPAQVKGQEVRKVRLIQFEKVTEEPMGITLKLNEKQSCTVARILHGGMIHRQGTLWELWVGFDSGINNLLPVQWCGA

SEQ ID NO: 12861 - protein, 86 aa, Homo sapiens
LSFPALPCLAFQCSSFCEMTLKASEGESGGSMHTALSDLYLEHLLQKRSRPEAGPLVLWCKEGGQCIFAGGTRNPDSRDGWLVNSY

SEQ ID NO: 12862 - protein, 20 aa, Homo sapiens
LGMPQTCDGTGQMHLGRSWW

SEQ ID NO: 12863 - protein, 22 aa, Homo sapiens
LGMPQTCDGTGQMHLGRLDLGE

SEQ ID NO: 12864 - protein, 165 aa, Homo sapiens
MDSRLFGFVRLHEDGARTKTLLGKAVRCYESLILKAEGKVESDFFCQLGHFNLLLEDYSKALSAYQRYYSLQADYWKNAAFLYGLGLVYFYYNAFHWAIKAFQDVLYVDPSFCRAKEIHLRLGLMFKVNTDYKSSLKHFQLALIDCNPCTLSNAEKEVSFCKGGI

SEQ ID NO: 12865 - protein, 176 aa, Homo sapiens
LCLSLYSRLFGFVRLHEDGARTKTLLGKAVRCYESLILKAEGKVESDFFCQLGHFNLLLEDYSKALSAYQRYYSLQADYWKNAAFLYGLGLVYFYYNAFHWAIKAFQDVLYVDPSFCRAKEIHLRLGLMFKVNTDYKSSLKHFQLALIDCNPCTLSNAEIQFHIAHLYETQVSVLT

SEQ ID NO: 12866 - protein, 46 aa, Homo sapiens
MDPTFMEHQPSASKTNPSSHLACFNVKIMRMKTFDDPLSLTSSPGV

SEQ ID NO: 12867 - protein, 9 aa, Homo sapiens
LNEMIHHEA

SEQ ID NO: 12868 - protein, 58 aa, Homo sapiens
MNPCMRPLCHVTVEGCGDPGTVPLRDALTPFFCCYKPQSNACASSRPGDSFCGRGAWI

SEQ ID NO: 12869 - protein, 82 aa, Homo sapiens
LDAHRESRGRPSGERGLSVSTRCLFVFFTLRFVPSPHFLSVSTILLGDVANREPLRLSFGKPCGNALAPVVLRVLPCVTSGL

SEQ ID NO: 12870 - protein, 93 aa, Homo sapiens
MEPETSALSRLSHDLQPSPVAFHEINTEFSEESIIYSDLKVHCSSNIQNGKITKTLKTKVHCLKEILNKATIETAHCNIISQNKGNWSSFEEN

SEQ ID NO: 12871 - protein, 35 aa, Homo sapiens
LLLQSAKYKMSKVLEMARICPELLASSDTQRWSTA

SEQ ID NO: 12872 - protein, 86 aa, Homo sapiens
LAFQEALFSPPPRKAASTHSQHQETAPLGAPMESRGGVGSNLLPPALLRFLIPGFVLSKSTVEAAAFPPPFQKPSEDVGEKPPWNV

SEQ ID NO: 12873 - protein, 39 aa, Homo sapiens
LLHVFCPGFLAVITGRDRRDCICSILPSSANLLESLIGI

SEQ ID NO: 12874 - protein, 34 aa, Homo sapiens
VEGLWCCWPLIAGRIPRKRTTTCVGSLPTTEIAP

SEQ ID NO: 12875 - protein, 176 aa, Homo sapiens [sequence omitted]

SEQ ID NO: 12876 - protein, 79 aa, Homo sapiens [sequence omitted]

SEQ ID NO: 12877 - protein, 92 aa, Homo sapiens
MNYLQHAEVQSSGMYESWCGFYTTFCWGCLGRSCGNRIGIRSCFIHPGGLRLSGSVWAEPPVPSTRHSTLLRHLCGCSHTSSLLYSQSGRWI

SEQ ID NO: 12878 - protein, 66 aa, Homo sapiens
LEIDFKSRTLSVRRFGLQEGDSTGLTATMTKYNTPSGAKEMLENPLLLLFFACPPKPREMRLCGFC

SEQ ID NO: 12879 - protein, 40 aa, Homo sapiens
LGFEAGLQKAAASIPIMAGLRVCSRSHVRCACFPITFRHD

SEQ ID NO: 12880 - protein, 11 aa, Homo sapiens
MLFNMIVVRYS

SEQ ID NO: 12881 - protein, 38 aa, Homo sapiens
LLVKENWIGYFQNRQPKLMHKSVASFLEWPSHEFFGDL

SEQ ID NO: 12882 - protein, 21 aa, Homo sapiens
LREAGRRACVLACVHFQPGVG

SEQ ID NO: 12883 - protein, 26 aa, Homo sapiens
VARSSRSHKPPWAGRGPEGGQLSSGK

SEQ ID NO: 12884 - protein, 26 aa, Homo sapiens
LTSTQQTLRLQEIQISSQSAHCDSGR

SEQ ID NO: 12885 - protein, 51 aa, Homo sapiens
MIQYETLKQEVTCEKPLKGNRQTVGKKTEDHTKREQEIQISSQSAHCDSGR

SEQ ID NO: 12886 - protein, 37 aa, Homo sapiens
LFCIRRQYHASVANGQAENIYNDEDPEGSVDPEGQGS

SEQ ID NO: 12887 - protein, 157 aa, Homo sapiens
LRKKREKDKKNLKTLQNPEKKKGKEKTNPRRTRGEVTFVRFRPAPRPPPQRLASVGLRPSVRGNLELRTRTAEKCKVAGRAVLCGEPFVCGAAAVGAGPRLPFPSRLQARRLQLVLAAPVPPVSRGAGPGSEGAPLSCGGPDKKSSWRGSGWWGAGR

SEQ ID NO: 12888 - protein, 23 aa, Homo sapiens
LHSTRGTRGGHLPLPAETIQWQY

SEQ ID NO: 12889 - protein, 7 aa, Homo sapiens
LSFKQIF

SEQ ID NO: 12890 - protein, 181 aa, Homo sapiens
LMRSEKREKKPAPSLRGNRSSNCFSEKSSKGGSEGKKQKRGRHASACRGERSRDRRSRGGSATKETVTGSGAAKEEAVLPGSAPGHSWLAAALSAAKGHRPGTARGGKVAPGAEAAERSPRRRPDWLPRNCGDSPYSELGLRFPGLSPSPEAPTKPGKEGKDSGGSSSMSAYSRKPERARS

SEQ ID NO: 12891 - protein, 76 aa, Homo sapiens
LQRLPLFLVSRQVSDIDRAWTLEEAPGRWRGKVKVHSYRERKKREKAVQPNSEEKRGGKGLDFHIGTTFFPVLKDL

SEQ ID NO: 12892 - protein, 8 aa, Homo sapiens
MSLRDIWI

SEQ ID NO: 12893 - protein, 19 aa, Homo sapiens
LVTKVVFPERVLSIALRIC

SEQ ID NO: 12894 - protein, 62 aa, Homo sapiens
LAEEGGRGRARAGGRAEEGGEARGARPRGLGATTRADGVHGAAAPAPPTLPPGTWLHHWLPS

SEQ ID NO: 12895 - protein, 66 aa, Homo sapiens
LGGPSRPSEQRGSTVPAWRSAAGTRGPPGSPSTAPRALRSSAASSSFTHCPGGSGAQVGCAMSGAG

SEQ ID NO: 12896 - protein, 63 aa, Homo sapiens
LSFDPSPAPFPGPLPRGQRCQPAGHGDPVPAARHPQRGAGQLHSAVAHPHHPAAGEGGPAGAQ

SEQ ID NO: 12897 - protein, 308 aa, Homo sapiens
MRPDWWRLTMGSSVSLRAGWRMRCRNCGPSMRTRWSSIRRSWRRLILPSWTMPGSLLRGTATWWGLPTRSCSSRASASTASLPSSASSRSRALGSSPNPPTPLQLAAKEAKLRDLEDSLARERDTSRRLLAEKEREMAEMRARMQQQLDEYQELLDIKLALDMEIHAYRKLLEGEEERLRLSPSPTSQRSRGRASSHSSQTQGGGSVTKKRKLESTESRSSFSQHARTSGRVAVEEVDEEGKFVRLRNKSNEDQSMGNWQIKRQNGDDPLLTYRFPPKFTLKAGQVVTVSGRALGTLGRPWVAMGALG

SEQ ID NO: 12898 - protein, 61 aa, Homo sapiens
LSPPPRPRRRRRRRLLEPGCGAVRQARESGADGSNMAAPSLSRDTVGIAAAEQGFWKALRT

SEQ ID NO: 12899 - protein, 7 aa, Homo sapiens
MILPNEI

SEQ ID NO: 12900 - protein, 73 aa, Homo sapiens
VVTCEGVRRERSAAAEAVSPGRAWRSVAQSCWAQFLRLLLRRGCIGERASSREFSVALPLPFSLHGLAPRPST

SEQ ID NO: 12901 - protein, 153 aa, Homo sapiens
LSEPPLGPAPHLSMVQAHGGRSRAQPLTLSLGAAMTQPPPEKTPAKKHVRLQERTHLLCEHTPGGHPTLSAHCWTPPYPLGPSAPATQPQATGRRILEDPFKLCQPRRPGHPWPRLQGPIQDHLAKSPEPCLSRPGTEPGGRRLHQCQLHPRL

SEQ ID NO: 12902 - protein, 42 aa, Homo sapiens
LQPHGCLWSFGRGLSPRSCPQPAAQAMPPHLRAEPRLPGLRG

SEQ ID NO: 12903 - protein, 30 aa, Homo sapiens
LRCCGPRKATCSGFHFKRDPFACGMSSSMG

SEQ ID NO: 12904 - protein, 30 aa, Homo sapiens
LSSGVQDQPGQHGFHFKRDPFACGMSSSMG

SEQ ID NO: 12905 - protein, 93 aa, Homo sapiens
LVPFYSAVPSFWIFVFPFFSLLNDPSKIIFKKPSPLLTFASQPSHPPTESKSFNDPRPSDGRSPPTSQADRPPSPRAGSGPGERARAQPRPWR

SEQ ID NO: 12906 - protein, 62 aa, Homo sapiens
LSGERRGCCSCRCGRRGIISRDLPYPLTNYGRLYQNRENWRRETHKSYRRGLLPRTVHSNHF

SEQ ID NO: 12907 - protein, 47 aa, Homo sapiens
LPPPRAGLGVESKAGSPVSCVTSLLFKVPSTDLLMGSMSITWELAAL

SEQ ID NO: 12908 - protein, 95 aa, Homo sapiens
LKPPPAPGPRAEEKREGTAEAAAALHRPPGGHLESPAPRRPWPQVPTAGPRRGGAELLGGCWIGEGSRLRKRRFFGTPVDGHGKETPGQPQLGIK

SEQ ID NO: 12909 - protein, 72 aa, Homo sapiens
LKPPPAPGPRAEEKREGTAEAAAALHRPPGGHLESPAPRRPWPQVPTAGPRLPASLQPRPRQNNLRMSWWHR

SEQ ID NO: 12910 - protein, 161 aa, Homo sapiens
LHLPGHAGTAGRRARPGLGCGSARVLGTGRECERSGRPGGSRGRAAGWVGPEPLKAEPPPALAIPELSRRRRWLLPDPEFPLSLDGAELWAARAAQLSGDRCTLSSLGKTQRRLGIFLGGRGPAPRRHHVPGDPVLRAAALGLAPVGRSERRRPPGLRESQ

SEQ ID NO: 12911 - protein, 118 aa, Homo sapiens
LSPGWVGPEPLKAEPPPALAIPELSRRRRWLLPDPEFPLSLDGAELWAARAAQLSGDRCTLSSLGKTQRRLGIFLGGRGPAPRRHHVPGDPVLRAAALGLAPVGRSERRRPPGLRESQ

SEQ ID NO: 12912 - protein, 64 aa, Homo sapiens
LRKTRKLRGHVSHGHGRIGKHRKHPGGRGNAGGLHHHRINFDKYVYEGGCYLFLATQATLGKLV

SEQ ID NO: 12913 - protein, 29 aa, Homo sapiens
MRRAARVTFLQILHAVHLCPRRTTAAHDS

SEQ ID NO: 12914 - protein, 28 aa, Homo sapiens
LGSRGVTFLQILHAVHLCPRRTTAAHDS

SEQ ID NO: 12915 - protein, 31 aa, Homo sapiens
MAWTGGAGVTFLQILHAVHLCPRRTTAAHDS

SEQ ID NO: 12916 - protein, 41 aa, Homo sapiens
LDSSNPPTLASQRAGITGVTFLQILHAVHLCPRRTTAAHDS

SEQ ID NO: 12917 - protein, 27 aa, Homo sapiens
LLSGVTFLQILHAVHLCPRRTTAAHDS

SEQ ID NO: 12918 - protein, 31 aa, Homo sapiens
LPPPTFTGVTFLQILHAVHLCPRRTTAAHDS

SEQ ID NO: 12919 - protein, 27 aa, Homo sapiens
LFTPYFQISSEVFDSAAGRGTGVALTP

SEQ ID NO: 12920 - protein, 36 aa, Homo sapiens
VLQPLPPIPDLIATRPRRPPDVHSRFLLVPSPIWQL

SEQ ID NO: 12921 - protein, 17 aa, Homo sapiens
LICEQDIKTFSTIDWTT

SEQ ID NO: 12922 - protein, 44 aa, Homo sapiens
LAALVLPPAFSSLSLRSEDALGHQPQRERQQVVRTATAVGFLRE

SEQ ID NO: 12923 - protein, 32 aa, Homo sapiens
LRHERVTLGLQRGAESRTRRVLPAAVWTTPFL

SEQ ID NO: 12924 - protein, 16 aa, Homo sapiens
MPKLFLTACETRASWM

SEQ ID NO: 12925 - protein, 70 aa, Homo sapiens
MLHVFVLGEWQPIEGRGKSCSSSAGRQDFRGSSLVANRLAHVEKTLFGESSSCTLGGASTWLGPICFTSG

SEQ ID NO: 12926 - protein, 66 aa, Homo sapiens
VLGRNPALVPHPGRPPIASPPSPLHRTLGLPQGPRRRSSAAQPPPPPPPLLSRRHDDRVHLAVLLL

SEQ ID NO: 12927 - protein, 17 aa, Homo sapiens
LRGREEGGAGSWQGIRS

SEQ ID NO: 12928 - protein, 16 aa, Homo sapiens
LGLSPQVVTEIPDERD

SEQ ID NO: 12929 - protein, 77 aa, Homo sapiens
VRSIRQRALRRAGLCACAVWVAPDSLPRPAPPRLRTLAPLSAAALPRSSQPRVRQYVQLGQQGCPPQEGAGALPDGG

SEQ ID NO: 12930 - protein, 7 aa, Homo sapiens
MSWDQVD

SEQ ID NO: 12931 - protein, 75 aa, Homo sapiens
LCLGPRDLNGPALGLPLPPPRPGPGVRIPTPELAASQSRGRGAPEDPPSGSWRPRSAWAGSARCLPVPTRSSFAG

SEQ ID NO: 12932 - protein, 11 aa, Homo sapiens
MAAAASAAPPV

SEQ ID NO: 12933 - protein, 79 aa, Homo sapiens
LPCQMGNLPMSYRDSPQDQETHLLPEEPGGWTSPVVQSGGRCVFPEGHVEMSRDLGPGVPVKRVFAPEVHFLIILALPQ

SEQ ID NO: 12934 - protein, 52 aa, Homo sapiens
LEHRCLETFKGPVQEGKVPFCCETIWQEAGGPNGCKIATQHSQSQESRWRHQ

SEQ ID NO: 12935 - protein, 57 aa, Homo sapiens
LRKEEAPTGCWEESIRLKMENHKSNNKENITIVDISRKINQLPEAESSFFSPFQEST

SEQ ID NO: 12936 - protein, 46 aa, Homo sapiens
LRRPLGSRAASVFAAPALRFTTLKNLPIPILSPCSNKSHYGDLETL

SEQ ID NO: 12937 - protein, 10 aa, Homo sapiens
LAWNPKVAWL

SEQ ID NO: 12938 - protein, 7 aa, Homo sapiens
LYSCAPP

SEQ ID NO: 12939 - protein, 120 aa, Homo sapiens
MLPELKSTLQQLLQLPQGEEEIPEQIANTETTEDVKGRIYQLLAKASYKLVFFQKGHHSHSRSHRPLPGVRTLQSYRPRGVRGDQALEYLRTYLQRPSSFHTRKESPGVYRKHGHRTDCL

SEQ ID NO: 12940 - protein, 95 aa, Homo sapiens
VPPASRSDMAQNLKDLAGRLPAGPRGMGTALKLLLGAGAVAYGVRESVFTVEGGHRAIFFNRIGGVQQDTILAEGLHFRSPHHRIVSISQLTTLC

SEQ ID NO: 12941 - protein, 70 aa, Homo sapiens
VQYLSRSGVEAGRHPLLTSSAAGLKIRHGPELEGLGGTAARRAPGHGHGPEAVAGGRRRGLRCARICVHR

SEQ ID NO: 12942 - protein, 49 aa, Homo sapiens
VCSAPAHPPVSAALQSVCKHPETVMEGEEEAAAAKGGVWGRLQGPLCHS

SEQ ID NO: 12943 - protein, 111 aa, Homo sapiens
VTGGEKPRLGTLTQRRTRPARDASVRPAPACSAAARGPAPTTGIFSESGPGSVQLLSRPGSATVPPPDVLLPLARPSQRPQPSREGAPGRKDPPVCRRPPFSWSPSPSSWW

SEQ ID NO: 12944 - protein, 43 aa, Homo sapiens
LRPVSMVGPSASSCSGPSSGVWGRRNRLRGPDNGPPPQHPGLA

SEQ ID NO: 12945 - protein, 148 aa, Homo sapiens
VRRLPSASWSWAFPRGAGARSRLFRWVSLGGGEDGPFKSAARGPGQCPSVSARKRTAEARQLGAPGPCGASGRGCPSAGTQSRRRRSASCVLASSARSGQAAVGAAGARTARGCCCCPRPARLETERPSQAAAPLMLGGCWRVAAAKR

SEQ ID NO: 12946 - protein, 8 aa, Homo sapiens
MPAPRGVW

SEQ ID NO: 12947 - protein, 17 aa, Homo sapiens
LAAISLETAARDLRYLL

SEQ ID NO: 12948 - protein, 53 aa, Homo sapiens
LASPLRRLQPRGEGATRGGAGTAPHLGGPRGRPGGRGCKRRRARAATAKRPPL

SEQ ID NO: 12949 - protein, 18 aa, Homo sapiens
LSCCNFFRKLGFPGDPRR

SEQ ID NO: 12950 - protein, 24 aa, Homo sapiens
LRFRHLSSLSRTGAETLLEACIGW

SEQ ID NO: 12951 - protein, 11 aa, Homo sapiens
MGQSPRSASTT

SEQ ID NO: 12952 - protein, 30 aa, Homo sapiens
LSASDSLSVRDPAGAPPPPAWILKPSLYPS

SEQ ID NO: 12953 - protein, 61 aa, Homo sapiens [sequence omitted]

SEQ ID NO: 12954 - protein, 87 aa, Homo sapiens
LREEEALYLQCCFSCLDSRNYPSSTPHNILKGTERTGTPLRGPGTDGILLCHPGWSTVARSRLIATSTSWVQAVLMPQPSKQLGLQI

SEQ ID NO: 12955 - protein, 79 aa, Homo sapiens
LREEEALYLQCCFSCLDSRNYPSSTPHNILKGTERTGTPLRGPGTGWSTVARSRLIATSTSWVQAVLMPQPSKQLGLQI

SEQ ID NO: 12956 - protein, 71 aa, Homo sapiens
LREEEALYLQCCFSCLDSRNYPSSTPHNILKGTERTGTPLRGPGTGSHIAAQAGVQWRDLGSLQPPPFGFK

SEQ ID NO: 12957 - protein, 75 aa, Homo sapiens
LREEEALYLQCCFSCLDSRNYPSSTPHNILKGTERTGTPLRGPGTGRARWLMSVIPALWEDQAGGSPEVRSSRPA

SEQ ID NO: 12958 - protein, 84 aa, Homo sapiens
LEIALHALCRPPLMPPHPPPGGPHAAHHPLPQCCPCSPAAQPSPLCSLLLPPPLPVLCPPLPQCLPPTSHPMPQVPQTIRTSRP

SEQ ID NO: 12959 - protein, 25 aa, Homo sapiens
MSIVLTRLLNKSSDLRPAVNVVPER

SEQ ID NO: 12960 - protein, 49 aa, Homo sapiens
MMGPKRCQEILALKKSFSCPLGTCQSKVLTRLLNKSSDLRPAVNVVPER

SEQ ID NO: 12961 - protein, 44 aa, Homo sapiens
LQCLPQPGQWSLTFWHLSLLSKVLTRLLNKSSDLRPAVNVVPER

SEQ ID NO: 12962 - protein, 47 aa, Homo sapiens
LGRALSAAQLPSVTSGHLCSVFHNLVLTRLLNKSSDLRPAVNVVPER

SEQ ID NO: 12963 - protein, 53 aa, Homo sapiens
LAGQGTLSSSTAQRDQWPPLQCLPQPGLLSKVLTRLLNKSSDLRPAVNVVPER

SEQ ID NO: 12964 - protein, 29 aa, Homo sapiens
LTGPAGQVLTRLLNKSSDLRPAVNVVPER

SEQ ID NO: 12965 - protein, 350 aa, Homo sapiens
LRTWCHPWRLGQPHIGRRKRRRRRRRRRRRSPKAWPMCSASSPKGRRRRVSPAQRSPRTQPGPGRGWMARPPQANVRELMDRALELEARRWAEDVPPQRLDGHCHSELAIDIIQITSQAQAKAESITLDLGSQIKRVLLVELPAFLRSYQRAFNEFLERGKQLTNYRANVIANINNCLSFRMSMEQNWQVPQDTLSLLLGPLGELKSHGFDTLLQNLHEDLKPLFKRFTHTRWAAPVETLENIIATVDTRLPEFSELQGCFREGSPATWLQPALPTLAEIIRLQDPSAIKIEVATYATCYPDFSKGHLSAILAIKGNLSNSEVKRIRSILDVSMGAQEPSRPLFSLIKVG

SEQ ID NO: 12966 - protein, 34 aa, Homo sapiens
VHLQSETKRRTLVGLLWSTLWTEKHRGYRTQLLP

SEQ ID NO: 12967 - protein, 38 aa, Homo sapiens
LRKKAQAVCGPEERPAAGRGPEPGMQDGGGEEGRGCSE

SEQ ID NO: 12968 - protein, 40 aa, Homo sapiens
LRKKAQAVCGPEERPAAGRGPEPGMQDGGGEEGRGCSEGI

SEQ ID NO: 12969 - protein, 67 aa, Homo sapiens
VTGKGEFAAGGGGGDSGDLGIDLEGLGERAETSSSSARDLPPGCLGSRWTLLEVSWIQISLSKILLA

SEQ ID NO: 12970 - protein, 36 aa, Homo sapiens
LKEALKKNCEAYYLSIFQALDDTERGSGGFGSTGKN

SEQ ID NO: 12971 - protein, 61 aa, Homo sapiens
LNPGTRLQRRRSPALRARRAVLTAPRTLVSSLFSPRPSLGRAGTLAFPVPHGAAPTPDGVQ

SEQ ID NO: 12972 - protein, 50 aa, Homo sapiens
LRARRAVLTAPRTLVSSLFSPRPSLGRAGTLAFPVPHGAAPTPDGSFSHT

SEQ ID NO: 12973 - protein, 139 aa, Homo sapiens
LGPRGPAPRPVAPGLPHTHGVKSAAALPGRNLPSTGKGGQQMCRAWASCTGHAHAHGGHPATSEWHPHPSPSLLPPRRTWILPQEAQGAQPEPPTSAPCQGQHSHQPPLPSSDPRLAPAAAPAGVIPGRGLRDSAEPWV

SEQ ID NO: 12974 - protein, 36 aa, Homo sapiens
MFTYTQYLCTNQGLGEGLWLYFSAVQNPILYFLKSV

SEQ ID NO: 12975 - protein, 32 aa, Homo sapiens
VLAGNAGKLPASATILLSFNPAVTVCQNNLES

SEQ ID NO: 12976 - protein, 20 aa, Homo sapiens
LQRGAKRVIISAPSADAPCS

SEQ ID NO: 12977 - protein, 40 aa, Homo sapiens
LRGPGASEYRTSISGAGSLVGTERPLPGTGGLAAESPAGA

SEQ ID NO: 12978 - protein, 29 aa, Homo sapiens
MASPSPASPPSRPCRRMHLFSPQSDWNIG

SEQ ID NO: 12979 - protein, 40 aa, Homo sapiens
LGVDPERWSSRLALRGTLHLAAGSRSVTQAGVQWCDLGSS

SEQ ID NO: 12980 - protein, 160 aa, Homo sapiens
LLRRVRVERPLLHPPGSLPSWSCSLSILRPAPQDSGVGSRPCRLSTSNGPDRIYKRECTVHYTRDSHKVAAGAAQLTESLVPARVAPATTSPANQRPGLHQSHGRQKSTDRTGSLREDVLQLCHEGGCCSGFEEERMGGGGVGPLCHELQSHHFQKGHHR

SEQ ID NO: 12981 - protein, 54 aa, Homo sapiens
LLVGLASPSPLCSLPRLSPGLRYFAFLKKGKKELNSPLPLLQSGCTSALHFAQR

SEQ ID NO: 12982 - protein, 33 aa, Homo sapiens
LALGLGLGARNYGSGRVPKRWMRLLLSSSRGPS

SEQ ID NO: 12983 - protein, 35 aa, Homo sapiens
VAVELGSLRGGTMASEKPLAAVTCTAPVNIAVIKY

SEQ ID NO: 12984 - protein, 91 aa, Homo sapiens
MSASQDSRSRDNGPDGMEPEGVIESNWNEIVDSFDDMNLSESLLRGIYAYGFEKPSAIQQRAILPCIKGETSQSQKTLWTVPDLGRVASGW

SEQ ID NO: 12985 - protein, 162 aa, Homo sapiens
MSASQDSRSRDNGPDGMEPEGVIESNWNEIVDSFDDMNLSESLLRGIYAYGFEKPSAIQQRAILPCIKGYDVIAQAQSGTGKTATFAISILQQIELDLKATQALVLAPTRELAQQVRVASIPSFRADLGMMSIIQGPEKSSLITTLGGRHGCPNTLETCWVN

SEQ ID NO: 12986 - protein, 51 aa, Homo sapiens
LFSRIGRGGRFGRKGVAINMVTEEDKRTLRDIETFYNTSIEEMPLNVADLI

SEQ ID NO: 12987 - protein, 43 aa, Homo sapiens
LWSVVPHCWGGGSNETGHTKLHLAVTEAETRVMIGFLGREEVL

SEQ ID NO: 12988 - protein, 34 aa, Homo sapiens
LKSGYELPWRNFFLAVTEAETRVMIGFLGREEVL

SEQ ID NO: 12989 - protein, 11 aa, Homo sapiens
VNMASSTWSET

SEQ ID NO: 12990 - protein, 20 aa, Homo sapiens
LPVENGTELEVPLPTKCLFA

SEQ ID NO: 12991 - protein, 25 aa, Homo sapiens
LGLQPARSLDSPALEVPLPTKCLFA

SEQ ID NO: 12992 - protein, 70 aa, Homo sapiens
LPPPPGTPAGSESRGAQSRPGCRTVRPHQVNGHGGLDPGPAAAGRRAAPDAGAVRPALPHRGPALLGPVD

SEQ ID NO: 12993 - protein, 89 aa, Homo sapiens
LESTAPPVSRGSDTARPGHGLVAEGGSGSEAQGSGTGPAFLPLALIPQQSDRLPTPHGVFVSLGIPALSFRSAQPSPQLPGSASRERKI

SEQ ID NO: 12994 - protein, 47 aa, Homo sapiens
VTWTRKWSSSRHRWELGARLGVRPAGGGGLASAATEGSGVVVWVGGR

SEQ ID NO: 12995 - protein, 39 aa, Homo sapiens
LLLMLPCGTCHGAGTAALSRPAVVAAAAAAAGPERRSCH

SEQ ID NO: 12996 - protein, 144 aa, Homo sapiens [sequence omitted]

SEQ ID NO: 12997 - protein, 55 aa, Homo sapiens
LTDQSRWSWRRGRQAADSANIICPRLKNSSSPIAGGATAAAGAGLLCGGSSPGHG

SEQ ID NO: 12998 - protein, 26 aa, Homo sapiens
MRWSWRRGRQAADSANIICPRLKNSR

SEQ ID NO: 12999 - protein, 26 aa, Homo sapiens
MRWSWRRGRQAADSANIICPRLKNSS

SEQ ID NO: 13000 - protein, 29 aa, Homo sapiens
LQVPGAPSRGRRMSSSLLLCHPIPVNKVV

SEQ ID NO: 13001 - protein, 133 aa, Homo sapiens
LCRSSCAELQARVMAALRQPQVAELLAEARRAFREEFGAEPELAVSAPGRVNLIGEHTDYNQGLVLPMALELMTVLVGSPRKDGLVSLLTTSEGADEPQRLQFPLPTAQRSLEPGTPRWANYVKGVIQYYPEP

SEQ ID NO: 13002 - protein, 23 aa, Homo sapiens
MSDPAVNAQLDGIISDFEDAQAC

SEQ ID NO: 13003 - protein, 48 aa, Homo sapiens
LDHMVDQVTRSVAFVQKRYPSNKPCVKESGKPHLKSSTMWTTLKLLRI

SEQ ID NO: 13004 - protein, 12 aa, Homo sapiens
LFLSSLSVADLI

SEQ ID NO: 13005 - protein, 32 aa, Homo sapiens
LPGPLLLLLSPAPAAPTRRPTSSWCAEVMFAP

SEQ ID NO: 13006 - protein, 52 aa, Homo sapiens
LCDVPLVRPSHRCPEKERKREASDAFSLIPVGGGGRGLHTQIVTVILLLANV

SEQ ID NO: 13007 - protein, 95 aa, Homo sapiens
MGGAPTLGRWVGVVPRACLITPGDPLTPAQVCREQFVRLHSEPILQDLSRFLVKRFCSEPQKILEASQLKETLQAVPKPGAFDLEQVKRSTYFFS

SEQ ID NO: 13008 - protein, 15 aa, Homo sapiens
LVASAGSRRFELQLG

SEQ ID NO: 13009 - protein, 231 aa, Homo sapiens
LSPSQLEKSVRRLREKFHGKVSSKKAGALMRKFGSDHTGVGRSIVYGVKQKDGQELSNDLDAQTKKLRPKSLASKQGQLRFEPWPPGVRAWALTCLSVGTQGAGSGLPKSPQLEVIQLGFEPTSLSHLAEHNVASKGRYVTTSTSMWHLQAGRSTRRYEAGPGHSGSGDLPPATDRSQPTHVSTCPGRPYPCCGPAVCLLLLRPRLVAPRAPAEGGIPVPEMPEALRASAS

SEQ ID NO: 13010 - protein, 81 aa, Homo sapiens
LGETTPGKLSRQRGRRGLGKPDRAFAHSCRLAATRPRQPPRTRDQAPSPVTAAESSPLAAARPGAAPQGPSPDRLGRPDVH

SEQ ID NO: 13011 - protein, 15 aa, Homo sapiens
LALRTRVHACDRPCV

SEQ ID NO: 13012 - protein, 12 aa, Homo sapiens
LVVEGDRSHGDV

SEQ ID NO: 13013 - protein, 48 aa, Homo sapiens
LEVVVNLSRVLSARGLEKRVLRTLCCRALPPSLPLLPPYLTSFSEEDP

SEQ ID NO: 13014 - protein, 107 aa, Homo sapiens
VERLPAEEQARPRRHIAALSGRDRVMAETYDFLFKFLVIGSAGTGKSCLLHQFIENKCEFPAVVLGTLSCVYAHGVGWWAAGGEGRAGHRYKSSAGFLVLALSYVLY

SEQ ID NO: 13015 - protein, 45 aa, Homo sapiens
LGGRAGLGGHPGGPGHGCAPSEGERTSRGAAAPRPGHSRPQGRAC

SEQ ID NO: 13016 - protein, 12 aa, Homo sapiens
MSTRAASTATSP

SEQ ID NO: 13017 - protein, 57 aa, Homo sapiens
LARLSPQLFPAGSVDSNWIVGATLEKKLPPLPLTLALGAFLNHRKNKFQCGFGLTIG

SEQ ID NO: 13018 - protein, 116 aa, Homo sapiens
VGGPVRGHSCPGLGMPQAGLNVNTRTTYDVHPPHPKIRKMKLPGRENKTAVVVGTITDDVRVQEVPKLKVSWRGLGRPIRPLLYCAVLCCAVLCCAGPSSVLPPLVRQASCLSEWL

SEQ ID NO: 13019 - protein, 86 aa, Homo sapiens
LTGPAICHPTGMLPHKTKRGQAALDRLKVFDGIPPPYDKKKRMVVPAALKVVRLKPTRKVSPSLRCTIYLGDFRPAEGPGDLEPGR

SEQ ID NO: 13020 - protein, 244 aa, Homo sapiens
MAAAEAANCIMEVSCGQAESSEKPNAEDMTSKDYYFDSYAHFGIHEEMLKDEVRTLTYRNSMFHNRHLFKDKVVLDVGSGTGILCMFAAKAGARKVIGIECSSISDYAVKIVKANKLDHVVTIIKGKVEEVELPVEKVDIIISEWMGYCLFYESMLNTVLYARDKWLAPDGLIFPDRATLYVTAIEDRQYKDYKIHCERGPGAGGRGLGWAAAGSPPPCLPPQGGRTCMASTCLASKMWPLRSP

SEQ ID NO: 13021 - protein, 46 aa, Homo sapiens
VDVRLFSVAETHLVPSTSGHPSWSSTFIPSVAVRRLNQGPEKVEES

SEQ ID NO: 13022 - protein, 48 aa, Homo sapiens
LRKGGKGSWRRETHLVPSTSGHPSWSSTFIPSVAVRRLNQGPEKVEES

SEQ ID NO: 13023 - protein, 85 aa, Homo sapiens
VHPRVGRRRRSPEPGASRRSPRTPLCPLLSFHFLPSVIRASRGCFQGNRSSSLRERPSTRPPRAAMSPAPRCCLERGGTWREAAP

SEQ ID NO: 13024 - protein, 21 aa, Homo sapiens
MAAGCGEGDALAVAVSCFPVL

SEQ ID NO: 13025 - protein, 76 aa, Homo sapiens
LAARSASLRLHYALPPCPARAHHGPAAAAALAAEGAQLGRQGEHGEPAGRALRAGEGGRESEAAPHSHASPRSRRP

SEQ ID NO: 13026 - protein, 71 aa, Homo sapiens
LAARSASLRLHYALPPCPARAHHGPAAAAALAAEGAQLGRQGEHAAGPERDPRPGQQDREEDLPGAHGAEN

SEQ ID NO: 13027 - protein, 41 aa, Homo sapiens
LGRDVGAGARRAARCRAEAAAAVGTARSPALGMALLVLACL

SEQ ID NO: 13028 - protein, 94 aa, Homo sapiens
LGLLGGFSCSWSSALVFMRPSPLSGILADPLFLFPFSEGLPRRRAASRSRLQTPSARCSPRPDAEVAASQKLGPLHPPSEKGAMLISGSTKGPS

SEQ ID NO: 13029 - protein, 61 aa, Homo sapiens
LARSGPRDGRTPPSPSQVSEPPRNSGGESATGSLFSGSFSKRKKQKFLPADSFSFRLFGPV

SEQ ID NO: 13030 - protein, 9 aa, Homo sapiens
LTSRWTTCT

SEQ ID NO: 13031 - protein, 13 aa, Homo sapiens
LPLTSGMTLEKLF

SEQ ID NO: 13032 - protein, 59 aa, Homo sapiens
LQLAAERLPGRVDSTPPTPAASAAACGWRVPLGLNLWDLTPFPPPSLTPQPGGSIYSPD

SEQ ID NO: 13033 - protein, 64 aa, Homo sapiens
LGAILSARGSNPHSAPLLAFLAPAPAPGPETPGAASQNLRSTTGRPTHSLGTPSFARAHVPCHL

SEQ ID NO: 13034 - protein, 65 aa, Homo sapiens
LNEMRVGRPELQNLLIAQALLVLLGLSPHKWRNWTRWSWRSLKAQRLSHSRIPHVHMPAWHGGAL

SEQ ID NO: 13035 - protein, 18 aa, Homo sapiens
VAAACCARPPWAIRWMTC

SEQ ID NO: 13036 - protein, 10 aa, Homo sapiens
VEAALKMVGE

SEQ ID NO: 13037 - protein, 38 aa, Homo sapiens
MGKVWKQQMYPQYATYYYPQYLQAKFGRHSGIPSEKEE

SEQ ID NO: 13038 - protein, 92 aa, Homo sapiens
LPLFMMYVMMAYLTLFQMGSWMSFSLSLCSLLFILTGHCLSENFYVRGDGTRAYFFTKGEVHSMFCKASLDEKQNLVDRRLQVNRKKQVKMH

SEQ ID NO: 13039 - protein, 54 aa, Homo sapiens
LRRGSAAPGGSRLADPRPSRGDPARSGEAAPPRPRLALPDPARRDVSVVRTSAA

SEQ ID NO: 13040 - protein, 46 aa, Homo sapiens
LAPNVLCVAAPLVESPGPCWGTRWQGYTSAQNPPPTSIPSSGENRQ

SEQ ID NO: 13041 - protein, 45 aa, Homo sapiens
VSPHCVFFSFYPKNGAVSTLAFLSPGWERGWCAEWFAFFSLELDA

SEQ ID NO: 13042 - protein, 121 aa, Homo sapiens
LRQNLWSPPTQGPHRRQSSPLEVTRMTVQASLGGLLSPSPCPRWAHTLTRAPSTPAAPPAPGPGPPDSLGRKAGPGAHRPVMTCGSDCAQAVPWATQVVQSSRCPQMRRRPRCWVLQTWTT

SEQ ID NO: 13043 - protein, 35 aa, Homo sapiens
LEASCKSRAYLFAFVSFISSSNFHPENDPSNSAAG

SEQ ID NO: 13044 - protein, 90 aa, Homo sapiens
VGAFDSEGHPLSSTAEGSSKGDPKGAHAGLGPPGRRWERPLPARVRAVSLSKACARGAGTRLARAPAVAGVQLPTFCPDLWLLISPVSAD

SEQ ID NO: 13045 - protein, 41 aa, Homo sapiens
LPVAALLPLRHHVRGAPGPGLHPQEGVGGTQGPHQRGLLGY

SEQ ID NO: 13046 - protein, 34 aa, Homo sapiens
LPLPKADLNLFLSLQNLILALDLRRESLTRDETQ

SEQ ID NO: 13047 - protein, 28 aa, Homo sapiens
LPLPKADLNNLILALDLRRESLTRDETQ

SEQ ID NO: 13048 - protein, 95 aa, Homo sapiens
LSLQVPLSLQGKLRPACSGETARAVSQVGRQPGRPARVRGAELGREELLRLEATGPMKGDVAPHGSRGSQLFLSLQNLILALDLRRESLTRDETQ

SEQ ID NO: 13049 - protein, 52 aa, Homo sapiens
LSLQVPLSLQGKLRPACSGETARAVSQLFLSLQNLILALDLRRESLTRDETQ

SEQ ID NO: 13050 - protein, 46 aa, Homo sapiens
LSLQVPLSLQGKLRPACSGETARAVSQNLILALDLRRESLTRDETQ

SEQ ID NO: 13051 - protein, 19 aa, Homo sapiens
LNESRGGLARASLSDLRRG

SEQ ID NO: 13052 - protein, 179 aa, Homo sapiens
LSEPEGISLKRVAVVEDFFDIIYSMHVESSAEPGKAPKHAGQKKTYRAIAETYAFLPREAVTRFLMSCTECQKRMHFNSNGLEPKENEPPSPLVSGIIDYNMPLTSTYLKQMKLRVMNSQEQDETSVSSEDFDMSDSTWMSADPHLASSLSPSQDERMRSPQNLHSQEDGGVCLQGPTA

SEQ ID NO: 13053 - protein, 213 aa, Homo sapiens
VMGLPEERVRSGSGSRGQEEAGAGGRARSWSPPPEVSRSAHVPSLQRYRELHRRSVEEPREFWGDIAKEFYWKTPCPGPFLRYNFDVTKGKIFIEWMKGATTNICYNVLDRNVHEKKLGDKVAFYWCSSSPGQGSCAQSMGTTNALRQPTLRSFLDTMLQEMAASGTRMAITGSLAGLMTCSMYLLEKRLAPLPHQTTSRMHLACLKPAQGKS

SEQ ID NO: 13054 - protein, 24 aa, Homo sapiens
VFSEFLSLCQRRPDGFPKPRPSRH

SEQ ID NO: 13055 - protein, 98 aa, Homo sapiens
LRSLLPSAGPLRRSPQFPARTRSGPPNLRPKSGGGSGGKKMKNEIAAVVFFFTRLVRKHDKLKKEAVERFAEKLTLILQEKYKNHWYPEKPSKGQAYR

SEQ ID NO: 13056 - protein, 55 aa, Homo sapiens
LAPRHHSLFTQDDLMSYKTLMNHDGYTDIKYRQLSRWATDASSNRVKDRTRSKLL

SEQ ID NO: 13057 - protein, 105 aa, Homo sapiens
LGFCLRPPVLCSLPAGSPHQASVWFPGYLPGGSHQEDFKQVSSGVTCHHCAPRDAGGPASAVGSCVAGPGAAGGAAAASEALGLGPVPYRLERVHPAAHPQPAHG

SEQ ID NO: 13058 - protein, 98 aa, Homo sapiens
LRHKAGISEPCPSANTRGRWWHSKQRGVWVLQEEHRALAPLPSRPADAGGPASAVGSCVAGPGAAGGAAAASEALGLGPVPYRLERVHPAAHPQPAHG

SEQ ID NO: 13059 - protein, 33 aa, Homo sapiens
VTGELHGKSLSDLAAGTMDSEKKRFTEEIRDCG

SEQ ID NO: 13060 - protein, 7 aa, Homo sapiens
LEQVEFL

SEQ ID NO: 13061 - protein, 13 aa, Homo sapiens
MFPLFLVSQECCC

SEQ ID NO: 13062 - protein, 82 aa, Homo sapiens
LWLIFTANTVSRTQRSPCAMWMPASSWGRCVSSPQVVEGFRATMAQRLVRVLQICAGHVPGVSALNLLSLLRSSEGPSLEDL

SEQ ID NO: 13063 - protein, 8 aa, Homo sapiens
MAPELVAG

SEQ ID NO: 13064 - protein, 183 aa, Homo sapiens
LAEAPIPFPACSVAGDWKTLCDSVQSLGRKASFQDSSSPGAASSPKGIMAALRPLVKPKIVKKRTKKFIRHQSDRYVKIKRNWRKPRGIDNRVRRRFKGQILMPNIGYGSNKKTKHMLPSGFRKFLVHNVKELEVLLMCNKSYCAEIAHNVSSKNRKAIVERAAQLAIRVTNPNARLRSEENE

SEQ ID NO: 13065 - protein, 192 aa, Homo sapiens
LRATVPSLFLGAAYGGGSHLLLAGDWKTLCDSVQSLGRKASFQDSSSPGAASSPKGIMAALRPLVKPKIVKKRTKKFIRHQSDRYVKIKRNWRKPRGIDNRVRRRFKGQILMPNIGYGSNKKTKHMLPSGFRKFLVHNVKELEVLLMCNKSYCAEIAHNVSSKNRKAIVERAAQLAIRVTNPNARLRSEENE

SEQ ID NO: 13066 - protein, 19 aa, Homo sapiens
LRIFALPSAFDRLPLQPSR

SEQ ID NO: 13067 - protein, 70 aa, Homo sapiens
LEKSGRDSLFPFPPGATRSARLGPPLSAPRGPWMVKQQRSRGALCPRQLHPADPAWAVLRGGGGSPRSTQ

SEQ ID NO: 13068 - protein, 95 aa, Homo sapiens
VEPGQTPAAKADLSLEGSSVLWPLGIAPYSLPPVPSWHAIIVDGHSVEELCKAFGQAKHQPTAIIAKTFKGRGITGQYAQAALPTFTPRPDTVAT

SEQ ID NO: 13069 - protein, 176 aa, Homo sapiens
MAVLFFHTMRYKSQDPRNPHNDRFVLSKGHAAPILYAVWAEAGFLAEAELLNLRKISSDLDGHPVPKQAFTDVATGSLGQGLGAACGMAYTGKYFDKARWSLALSPRLECSGTISAHCNLRLPGSSDSPPASASRVAGTTATESIACWETGSCQRALYGRPWPSPASISWTTLWPF

SEQ ID NO: 13070 - protein, 33 aa, Homo sapiens
VRQRRRGESRVLWSELEGEAGGAGGWASECQNG

SEQ ID NO: 13071 - protein, 56 aa, Homo sapiens
VILRSWSPTRDVLPTSRPELKWQTISETSGGRTSRLEQAAAQGPSQCLQEFVQANT

SEQ ID NO: 13072 - protein, 54 aa, Homo sapiens
VILRSWSPTRDVLPTSRPELKWQTISETSGGRTSRLEQAAAQKHQMVKEKETQK

SEQ ID NO: 13073 - protein, 79 aa, Homo sapiens
VILRSWSPTRDVLPTSRPELKWQTISETSGGRTSRLEQAAAQVFKTHLDTHLNICCAIRIIQKTERVKHQMVKEKETQK

SEQ ID NO: 13074 - protein, 18 aa, Homo sapiens
LRRRCLAFGGISLRSGSA

SEQ ID NO: 13075 - protein, 71 aa, Homo sapiens
LLSRPTRKMAPKDRKPKRSTWRFNLDLTHPVEDGIFDSGNFGTFPSEYLGFSSLVLHFFCFKIGAISTGEG

SEQ ID NO: 13076 - protein, 17 aa, Homo sapiens
LKETEGAGGTLMWHQMK

SEQ ID NO: 13077 - protein, 24 aa, Homo sapiens
VVMQEVSRKGRTPALLKDLSSQGA

SEQ ID NO: 13078 - protein, 54 aa, Homo sapiens
LNVRAVNTPWGCHRRLLGERCLWVGGLAGCSRARAGLVPAGFQSHGSGKEAAVD

SEQ ID NO: 13079 - protein, 38 aa, Homo sapiens
LHPGPWDSRSTGQLGSLSGGWVLLVPAVPASKNHWVCR

SEQ ID NO: 13080 - protein, 113 aa, Homo sapiens
LTDPAAAAVRPARAPAPAPAPPDPLPLSPSSVGRVVPRAPPPRAYENEVVTGPRMTPRHHCEAYSSAGEEEEEEEEEKVATASWVAGRSKGYHEVSRAFGKPEIVFPVGKGNH

SEQ ID NO: 13081 - protein, 18 aa, Homo sapiens
LAESSRAHRLRAPMRMRW

SEQ ID NO: 13082 - protein, 74 aa, Homo sapiens
LPRPAHEFRAPGRPPFPVPGVQKCPLPTRGGLHLVAGSEIARGRRKPKTVPGAAAAAGAALRPPQQQAESRSIR

SEQ ID NO: 13083 - protein, 22 aa, Homo sapiens
LQYKGSREGGRQRSLNRGATKE

SEQ ID NO: 13084 - protein, 37 aa, Homo sapiens
MQVRAVRPKVLMRLSKTKKHVSRAYGGSMCAKCVRDR

SEQ ID NO: 13085 - protein, 96 aa, Homo sapiens
LGRVHAAWRRRLIPPSTPGSSDVGQLCAGACDPRGGLGAASIAADGAPRGPGEYQPGKGSARPTTADPGRAGGTEVREPAGSSAAAEAEDETGCTP

SEQ ID NO: 13086 - protein, 38 aa, Homo sapiens
MQLSSQSTLRTRGGINTKTFLWKENAISKLAVFRCGVE

SEQ ID NO: 13087 - protein, 39 aa, Homo sapiens
VARRTLQNKRLRIALEINQFTPEPREGSVSVGSGRSAGL

SEQ ID NO: 13088 - protein, 62 aa, Homo sapiens
VVAPVVVGSGRARVILPPLRCIRGARTDLMAWATGVVPGTSRALAAPSLQGPSAPGRTWATG

SEQ ID NO: 13089 - protein, 8 aa, Homo sapiens
MSRNLPLT

SEQ ID NO: 13090 - protein, 51 aa, Homo sapiens
LSRSASHLQFLELAVNMSFPKAPLKRFNDPSDSCSSTGTWCPGQADPGSGN

SEQ ID NO: 13091 - protein, 25 aa, Homo sapiens
LAKKKKKKKLDTFWICWELGVQWLA

SEQ ID NO: 13092 - protein, 66 aa, Homo sapiens
LGVLRGCPCLPGPCPRSRHHGFLQSSAGGASTLGLPAARGQGLQCAPLHFPAHSWGQSGAGRSGRG

SEQ ID NO: 13093 - protein, 73 aa, Homo sapiens
LAADPNEAPWSPTQSSALAGPSRSRHHGFLQSSAGGASTLGLPAARGQGLQCAPLHFPAHSWGQSGAGRSGRG

SEQ ID NO: 13094 - protein, 58 aa, Homo sapiens
LPRPRGAARTQSRFRRDLAAVSRGLRSVVDSAGLRQMQAWGSLLSGLRREEWRSPSSH

SEQ ID NO: 13095 - protein, 56 aa, Homo sapiens
LMSSADLKCVPSFPSPSHPWVTTEHPSQFPPTHGWLFSIVCFTRCPQNKQTEEGSG

SEQ ID NO: 13096 - protein, 97 aa, Homo sapiens
LSVPSFSPRISLNTLTLNVKSEKVYTRHGVPISVTGIAQVKLSEPFPHSPLPHHPLSQTLRHLLATVFSTLACREVPLLVSSFPGTPRHLPPPPFFP

SEQ ID NO: 13097 - protein, 65 aa, Homo sapiens
LPARRGRAPPGPGFLAVKQMQQRRLLPRSPRGPGIRRTGWHCLKRRLLGDCAARWIHCPRRFNQL

SEQ ID NO: 13098 - protein, 80 aa, Homo sapiens
VISTPSTPPPGLAAPIAWATGPTCVMWPCGPSRSLASSLGSTPNCMPSPGVMTGGSAWKTTAAKVLWSIMSDSQEVTGWN

SEQ ID NO: 13099 - protein, 23 aa, Homo sapiens
LGETERTSALKQKSPELRSPRRG

SEQ ID NO: 13100 - protein, 17 aa, Homo sapiens
MLDRAVRGTEATRTFRG

SEQ ID NO: 13101 - protein, 18 aa, Homo sapiens
LFSFFFFFFSRSRSNERK

SEQ ID NO: 13102 - protein, 65 aa, Homo sapiens
LSARENREHHHHDNQSPASGQIQSCLAYLLHAGSGNAAPVEFFHDGHSVFHKPPGHVPECVLGHC

SEQ ID NO: 13103 - protein, 67 aa, Homo sapiens
MAARPKLHYPNGRGRMESVRWVLAAAGVEFDEEFLETKEQLYKLQDGLTCTWRGHWICWNCLSCILS

SEQ ID NO: 13104 - protein, 44 aa, Homo sapiens
VLPGVGLESLHTFSLEPLMIRRTPSVSEHEVNNGELFCCIDVPD

SEQ ID NO: 13105 - protein, 70 aa, Homo sapiens
VDKMWELHGQLCGGAFHPGWRVCEGQWEIGGKDIGHWCGRLGSHASDRRKLLIREAAFWRWNLDNGLCAM

SEQ ID NO: 13106 - protein, 21 aa, Homo sapiens
MCVNNNTWLYIWVETKLCQRS

SEQ ID NO: 13107 - protein, 29 aa, Homo sapiens
MRADEASFPAAAESRGGGGLGAFKIQLHP

SEQ ID NO: 13108 - protein, 64 aa, Homo sapiens
VVMTVKTEAAKGTLTYSRMRGMVAILIGECRNLAGLLLQETQSGNFLKVPDQISVCGAGRYEAV

SEQ ID NO: 13109 - protein, 9 aa, Homo sapiens
LEVWLGADP

SEQ ID NO: 13110 - protein, 49 aa, Homo sapiens
LPRRRRPPCQVTARKLRKRMREGRPWPWGRRELLCLHRSPCAALMCCAR

SEQ ID NO: 13111 - protein, 29 aa, Homo sapiens
LIASSEKSSIHFLPNSIPWACHSIWEKSN

SEQ ID NO: 13112 - protein, 80 aa, Homo sapiens
VALYVDLDDVAEDDPELVDSICENARPSPLPRPAFSPHSMPAAPSWLPPTLPTGATTLAAAWSRTYSYLLHCSPGLTSSG

SEQ ID NO: 13113 - protein, 27 aa, Homo sapiens
MFSWSLKDGDDRNDWCVAETWGTGCRR

SEQ ID NO: 13114 - protein, 34 aa, Homo sapiens
LAAGEAGSGAKLTRRAEPGLESGDHCGSRKEEMM

SEQ ID NO: 13115 - protein, 42 aa, Homo sapiens
MEFVKCLGHPEEFYNLVRFRIGGKRKVMPKMDQGPGGRGRPG

SEQ ID NO: 13116 - protein, 33 aa, Homo sapiens
MEFVKCLGHPEEFYNLVRFRIGGKRKPQSLKTP

SEQ ID NO: 13117 - protein, 46 aa, Homo sapiens
LQGSGNRSGNANRSAARRLGCRLSAAALGWCAVVRPRLTAASATQM

SEQ ID NO: 13118 - protein, 56 aa, Homo sapiens
LRVLCQESPSGQRSRGLEGAADATLACHGALGVSLSAWRAFRCGVRDGCQFKRQAP

SEQ ID NO: 13119 - protein, 64 aa, Homo sapiens
LSWSRQVLEQFVPLSSRFLVPRLRPHERPVLTAGCCGVPRCLPGPRVPGFREDDRRSGFPGTGL

SEQ ID NO: 13120 - protein, 33 aa, Homo sapiens
LRIFGPHAPAPDSPLFALAEEQVGQEARAQQPW

SEQ ID NO: 13121 - protein, 79 aa, Homo sapiens
LPSPSLPLLILSRSAALQCDESESSSHPARAFLLLPALFYFSFGRRRHCCTQLVSVPRFYPQVVPAAYGPGRLGYFCSR

SEQ ID NO: 13122 - protein, 51 aa, Homo sapiens
VRFLWHSRCLCCCTAPSGICIWDRPPGLADQRGSSSNVCCGGCNSIPASSW

SEQ ID NO: 13123 - protein, 57 aa, Homo sapiens
VALRALPGTRPAFGCISRGLPAPGICIWDRPPGLADQRGSSSNVCCGGCNSIPASSW

SEQ ID NO: 13124 - protein, 63 aa, Homo sapiens
LATIRAYLNQKGEGHRTVCLIPKSAHGTNPASAHMAGMKIQPVEVDKYGNIDAVHLKAMEEVA

SEQ ID NO: 13125 - protein, 30 aa, Homo sapiens
LLLSKRMPERCGPAGAGVQKPSVDSGKSVS

SEQ ID NO: 13126 - protein, 189 aa, Homo sapiens
LIFPGTPLYPQFRNPKASLRVRLCDLLSHLQRSGERDCQEFYRALYIHAQPLHSRLPSRHALRKFHITNHACLVLARGGHPSLPLMAWMSSMTTQVCCSPGLASPLASAPPQRPPSGPEGRVWQAQAVQMLVSVSHFLPLPPSLSHGSFHTAWGILYVHSCPSFSNLIPRGSLHVCVDSNLVPTAAWRS

SEQ ID NO: 13127 - protein, 96 aa, Homo sapiens
LRRPEEPPLPPECEAAGRFFRRPEILRALSSREGRVLIHFGSALAGAEEESVLVPVGEHRQAATAGSITPGQQETPPFRLSPAGDGAGQLNQCHPG

SEQ ID NO: 13128 - protein, 75 aa, Homo sapiens
LRRPEEPPLPPECEAAGRFFRRPEILRALSSREGRVLIHFGSALAGAEEESVLVPVGEHRQAATAGSITPGQQDV

SEQ ID NO: 13129 - protein, 77 aa, Homo sapiens
LRRPEEPPLPPECEAAGRFFRRPEILRALSSREGRVLIHFGSALAGAEEESVLVPVGEHRQAATAGSITPGQQDERG

SEQ ID NO: 13130 - protein, 67 aa, Homo sapiens
LTSEGRVLIHFGSALAGAEEESVLVPVGEHRQAATAGSITPGQQETPPFRLSPAGDGAGQLNQCHPG

SEQ ID NO: 13131 - protein, 46 aa, Homo sapiens
LTSEGRVLIHFGSALAGAEEESVLVPVGEHRQAATAGSITPGQQDV

SEQ ID NO: 13132 - protein, 165 aa, Homo sapiens
LGLCAALPVTHCWPWAGSVPSPASPRAPRKRLRCIAPGWQSTKCCWGLELPHGLLLTASPCPPATPRRQSGSFLSTGWFTMILALELCEEIVVYGMVSDSYCREKSHPSVPYHYFEKGRLDECQMYLAHEQAPRSAHRFITEKAVFSRWAKKRPIVFAHPSWRTE

SEQ ID NO: 13133 - protein, 82 aa, Homo sapiens
MGQTQTSPSGHPHLDFGVPHTPPQALASGIFGNLNWARGLSSHLSGASTFSSVKWANTERTLQNLSNVTEDIVSTASGLLLG

SEQ ID NO: 13134 - protein, 83 aa, Homo sapiens
LPLQTQTSPSGHPHLDFGVPHTPPQALASGIFGNLNWARGLSSHLSGASTFSSVKWANTERTLQNLSNVTEDIVSTASGLLLG

SEQ ID NO: 13135 - protein, 78 aa, Homo sapiens
LQRQRAILYKRLKVPPAINQFTQALDRQTATQLLKLAHKYRPETKQEKKQRLLARAEKKAAGKGDVPTKRPPVLRAGE

SEQ ID NO: 13136 - protein, 105 aa, Homo sapiens
LRRGRSRETNEEPPPPTVQVQGPGPQREEKQKTKMAKFVIRPATAADCSDILRLIKELAKYEYMEEQVILTEKDLLEDGFGEHPFYHCLVAEVPKEHWTPEGYSL

SEQ ID NO: 13137 - protein, 177 aa, Homo sapiens
LRRGRSRETNEEPPPPTVQVQGPGPQREEKQKTKMAKFVIRPATAADCSDILRLIKELAKYEYMEEQVILTEKGHSIVGFAMYYFTYDPWIGKLLYLEDFFVMSDYRGFGIGSEILKNLSQVAMRCRCSSMHFLVAEWNEPSINFYKRRGASDLSSEEGWRLFKIDKEYLLKMATEE

SEQ ID NO: 13138 - protein, 205 aa, Homo sapiens
LRRGRSRETNEEPPPPTVQVQGPGPQREEKQKTKMAKFVIRPATAADCSDILRLIKELAKYEYMEEQVILTEKDLLEDGFGEHPFYHCLVAEVPKEHWTPEGHSIVGFAMYYFTYDPWIGKLLYLEDFFVMSDYRGFGIGSEILKNLSQVAMRCRCSSMHFLVAEWNEPSINFYKRRGASDLSSEEGWRLFKIDKEYLLKMATEE

SEQ ID NO: 13139 - protein, 97 aa, Homo sapiens
LVRWARMNQTREANVGSSSTLPVWLPSRVRCVGRGLFGTPLLTSLPEKVCNFLASQVPFPSRLGDPAEYAHLVQAIIENPFLNGEVIRLDGAIRMQP

SEQ ID NO: 13140 - protein, 64 aa, Homo sapiens
LSPRPAESKPCVLRAQHCPTVLAKLRQLRCLCRHHAQNDQCACDHHGCRAGVCHPAQHHREAAI

SEQ ID NO: 13141 - protein, 72 aa, Homo sapiens
LWVVCVRGGRRKGAPRARLSSNERKQPPATEPRSQALLENRDRLLSLYPHWRFSPAVRLWALPHFLRLKVAF

SEQ ID NO: 13142 - protein, 223 aa, Homo sapiens
LTERPPVFDRTLWFLRAQTDRLYKPCAGGGAPLSLRCATEDPGVAMGRRPARCYRYCKNKPYPKSRFCRGVPALEAARICANKYMVKSCGKDGFHIRVRLHPFHVIRINKMLSCAGADRLQTGMRGAFGKPQGTVARVHIGQVIMSIRTKLQNKEHVIEALRRAKFKFPGRQKIHISKKWGFTKFNADEFEDMVAEKRLIPDGCGVKYIPSRGPLDKWRALHS

SEQ ID NO: 13143 - protein, 86 aa, Homo sapiens
LQTPGRRSAGTRWPGRAVLGCGAHTHEEPEAHRCSAVFSALESTKLFGSQVGLCPGSCWFHVCQDSMSDFLIPQSHRHANVQEVQM

SEQ ID NO: 13144 - protein, 174 aa, Homo sapiens
VKKIPELELVPWRGNSSSEPRNRALPGLEIWRNHRTKNQGCCLLLDHQQAKGLYAISGQQMICKPLLLWPNRKTKPPTDTAALKQWRCPGGDFLTSPNLCKSAESPTSLCWASHWKMGKGGPESTATQLRSWVSEQRSMLGRCGLLGSLFQVPCGPGAAGKLGTLVCTACPLKQ

SEQ ID NO: 13145 - protein, 23 aa, Homo sapiens
LHSVQISMSYLIKQHHSAITQGS

SEQ ID NO: 13146 - protein, 35 aa, Homo sapiens
LLLRLFSFSPCNAGKSQSRHRNMPLIQCLCLAVTC

SEQ ID NO: 13147 - protein, 17 aa, Homo sapiens
LLLCVLWHVPRMDWKFH

SEQ ID NO: 13148 - protein, 53 aa, Homo sapiens
LGVVCGAVASRVRRVQGECEWTRECVSVRAWSVLGECVRPPLRPSSRLHFDLI

SEQ ID NO: 13149 - protein, 42 aa, Homo sapiens
LRGYWNKQTRQRAKDGSRTLGPVELQPAPPRHAHARRCDPRI

SEQ ID NO: 13150 - protein, 42 aa, Homo sapiens
LSGSLSPEGSAGSPSSGYPALHRVAMMGHRPVLVLSQVHDRN

SEQ ID NO: 13151 - protein, 52 aa, Homo sapiens
MRRREAGPGERRGWIQHGGAEPEPRRPGKLSFLRSTVGIAAAEQGFWKALRT

SEQ ID NO: 13152 - protein, 32 aa, Homo sapiens
MAIMLLCLLQLAAPLCSYSITIRFYLFWLNTP

SEQ ID NO: 13153 - protein, 53 aa, Homo sapiens
LHICYNLIFKSGIKKTYFLVSSKGQSPTIGMDSCHVEDKIILSLKYGKDLNRS

SEQ ID NO: 13154 - protein, 34 aa, Homo sapiens
LRVCVYVCVCVKQEAEEAQTTVSVLIRKLPAVES

SEQ ID NO: 13155 - protein, 368 aa, Homo sapiens
LNESSTRWRRSGPRREEDMEYYLVKWKGWPDSTNTWEPLQNLKCPLLLQQFSNDKHNYLSQVKKGKAITPKDNNKTLKPAIAEYIVKKAKQRIALQRWQDELNRRKNHKGMIFVENTVDLEGPPSDFYYINEYKPAPGISLVNEATFGCSCTDCFFQKCCPAEAGVLLAYNKNQQIKIPPGTPIYECNSRCQCGPDCPNRIVQKGTQYSLCIFRTSNGRGWGVKTLVKIKRMSFVMEYVGEVITSEEAERRGQFYDNKGITYLFDLDYESDEFTVDAARYGNVSHFVNHSCDPNLQVFNVFIDNLDTRLPRIALFSTRTINAGEELTFDYQMKGSGDISSDSIDHSPAKKRVRTVCKCGAVTCRGYLN

SEQ ID NO: 13156 - protein, 53 aa, Homo sapiens
MASGLSPLPPHQGQCPRLWSCSEGRMAEPSSPLQRRLQLARPCLDSLQWSLLS

SEQ ID NO: 13157 - protein, 54 aa, Homo sapiens
VQKKSGRERRRPPLPCTALLEATWRVRPRGGHGHKCPQLAPGKSKAQDDLSSFH

SEQ ID NO: 13158 - protein, 19 aa, Homo sapiens
MELNFGRPEQHSCPGIAAR

SEQ ID NO: 13159 - protein, 32 aa, Homo sapiens
VRLCLVGGEGRGLCVHHSVKHTQDSKTIKEDL

SEQ ID NO: 13160 - protein, 13 aa, Homo sapiens
MEQSRKLFKTKSN

SEQ ID NO: 13161 - protein, 19 aa, Homo sapiens
LRRASVLVFEPSCFTGLPR

SEQ ID NO: 13162 - protein, 53 aa, Homo sapiens
MPQVKHQRRNLRDPLPNRSLIKQRPPRKWQSPTLASFQLGSRLLTTPPCPTRK

SEQ ID NO: 13163 - protein, 75 aa, Homo sapiens
LQESSGGGELRLKEWIMTHEEHHAAKTLGIGKAIAVLTSGGDAQEDICVRSNGPPLWIPGPCHLSVLWGRLGFYS

SEQ ID NO: 13164 - protein, 120 aa, Homo sapiens
LPGDPAGRDRCCVMQPLRGTESRNQGWGSRGVRRSWGLGLGACVSQACFFVVVLFFCRNIFLILGGVGAGVVCISRPPPWWSGCVEGRAQFLDLAHSPPTPPLSFFFEMESRSVAQAGVQ

SEQ ID NO: 13165 - protein, 516 aa, Homo sapiens
LSSATQTSRRIMTCGSGFGGRAFSCISACGPRPGRCCITAAPYRGISCYRGLTGGFGSHSVCGGFRAGSCGRSFGYRSGGVCGPSPPCITTVSVNESLLTPLNLEIDPNAQCVKQEEKEQIKSLNSRFAAFIDKVRFLEQQNKLLETKLQFYQNRECCQSNLEPLFEGYIETLRREAECVEADSGRLASELNHVQEVLEGYKKKYEEEVSLRATAENEFVALKKDVDCAYLRKSDLEANVEALIQEIDFLRRLYEEEILILQSHISDTSVVVKLDNSRDLNMDCIIAEIKAQYDDIVTRSRAEAESWYRSKCEEMKATVIRHGETLRRTKEEINELNRMIQRLTAEVENAKCQNSKLEAAVAQSEQQGEAALSDARCKLAELEGALQKAKQDMACLIREYQEVMNSKLGLDIEIATYRRLLEGEEQRLCEGIGAVNVCVSSSRGGVVCGDLCVSGSRPVTGSVCSAPCNGNVAVSTGLCAPCGQLNTTCGGGSCGVGSCGISSLGVGSCGSSCRKC

SEQ ID NO: 13166 - protein, 53 aa, Homo sapiens
LSIRSHPPFFRAKPPRGLRVKESWRLYWATGFLLAPGPPDKMGSAVGVLAKAG

SEQ ID NO: 13167 - protein, 40 aa, Homo sapiens
MHLLFHFKNVVEEKSTFNLYKRIFVLLSRLQDLSSRALHT

SEQ ID NO: 13168 - protein, 11 aa, Homo sapiens
LLLPLLLPLPP

SEQ ID NO: 13169 - protein, 44 aa, Homo sapiens
VTRPIRWGASFPPRGHQGDCGIPICAGAAMLEHSCHPHPTDVLQ

SEQ ID NO: 13170 - protein, 156 aa, Homo sapiens
LRAAALETGIQEPGGAEAPAQAKTAPQAKTAPQAAHSHEPGCLTGPDPARFPSSPRGDSTHSWPRHRSGFPGAMLSEVLLVSAPGKVILHGEHAVVHGKVALAVSLNLRTFLRLQPHSNGKVDLSLPNIGIKRAWDVARLQSLDTSFLGGPRRIWS

SEQ ID NO: 13171 - protein, 106 aa, Homo sapiens
LLRLRRGGAAAGEAAAAAGFPGAMLSEVLLVSAPGKVILHGEHAVVHGKVALAVSLNLRTFLRLQPHSNGKVDLSLPNIGIKRAWDVARLQSLDTSFLGGPRRIWS

SEQ ID NO: 13172 - protein, 13 aa, Homo sapiens
LVPLSQCRNRDPP

SEQ ID NO: 13173 - protein, 95 aa, Homo sapiens
LKGGTWCGDALGRSLLPSLSWFHDFFASVGNAVKILLRWVTRYSCPRAFVTGMPKRGKKGAVAEDGDELRTGKGMKSALLPRSCGGGVCHSLDVR

SEQ ID NO: 13174 - protein, 88 aa, Homo sapiens
LKGGTWCGDALGRSLLPSLSWFHDFFASVGNAVKILLRWVTRYSCPRAFVTGMPKRGKKGAVAEDGDELRTGVCEEVAGTVGFRWVYS

SEQ ID NO: 13175 - protein, 108 aa, Homo sapiens
VVGWWPRRSQEGSPAGDKRAQRCLGLSVRARKISAMPHSSDSSDSSFSRSPPPGKQDSSDDVRRVQRREKNRIAAQKSRQRQTQKSIKKDAQVPWHRARRAGNGYFSK

SEQ ID NO: 13176 - protein, 177 aa, Homo sapiens
LKIVDFSYSVDLRVQLDVFTLSGFRTVQILEGQKILANCSSPYQGVPLPGLETSTSLQWRTQDPAAQKEQPRPAEDWPSKVPGLPSPQRLRERPSAGEESRGRGGRRRKAPCSARKRRNALRSQRHRTSSTVSTPPSTPKKASLWASPHNGRTSWTHCGAPSPWWTLRESHGCSSSP

SEQ ID NO: 13177 - protein, 71 aa, Homo sapiens
MTSVVKTVYSLQPPSALSGGQPADDSTQLVHKPWQDGALKWPGTVAHACNPSTLGGRGGQITRSGDGDHPG

SEQ ID NO: 13178 - protein, 17 aa, Homo sapiens
MIIPSLEELDSLKQPSC

SEQ ID NO: 13179 - protein, 116 aa, Homo sapiens
VTLALLCGRRPQPGRVHRRVPSPLPPPPSASISLQLPSLACGRPVLLPSPVQPGTRVRLAQVSVRDWEATEGRESGTLLELKLPTLSSLNNYRAGLGGTDSIFRSLMGCWVDGAGK

SEQ ID NO: 13180 - protein, 76 aa, Homo sapiens
LRGAWLSPLSAMACARPLISVYSEKGESSGKNVTLPAVFKAPIRPDIVNFVHTNLRKNNRQPYAVSELAATVACCQ

SEQ ID NO: 13181 - protein, 79 aa, Homo sapiens
LRGAWLSPLSAMACARPLISVYSEKGESSGKNVTLPAVFKAPIRPDIVNFVHTNLRKNNRQPYAVSELAGMDLYLLQIF

SEQ ID NO: 13182 - protein, 15 aa, Homo sapiens
LELYKVQKTWSLIPS

SEQ ID NO: 13183 - protein, 26 aa, Homo sapiens
LHTRPSPVPGKVTPWQGASQKGPAST

SEQ ID NO: 13184 - protein, 13 aa, Homo sapiens
VAPPGCLVPRGGC

SEQ ID NO: 13185 - protein, 218 aa, Homo sapiens
LRSETAGDVGRAKEMDETVAEFIKRTILKIPMNELTTILKAWDFLSENQLQTVNFRQRKESVVQHLIHLCEEKRASISDAALLDIIYMQFHQHQKVWEVFQMSKGPGEDVDLFDMKQFKNSFKKILQRALKNVTVSFRETEENAVWIRIAWGTQYTKPNQYKPTYVVYYSQTPYAFTSSSMLRRNTPLLGQELEATGKIYLRQEEIILDITEMKKACN

SEQ ID NO: 13186 - protein, 319 aa, Homo sapiens
LRSETAGDVGRAKEMDETVAEFIKRTILKIPMNELTTILKAWDFLSENQLQTVNFRQRKESVVQHLIHLCEEKRASISDAALLDIIYMQFHQHQKVWEVFQMSKGPGEDVDLFDMKQFKNSFKKILQRALKNVTVSFRETEENAVWIRIAWGTQYTKPNQYKPTYVVYYSQTPYAFTSSSMLRRNTPLLGQTFETHNSTTPLQERSLGLDINMDSRIIHENIVEKERVQRITQETFGDYPQPQLEFAQYKLETKFKSGLNGSILAEREEPLRCLIKFSSPHLLEALKSLAPAGIADAPLSPLLTCIPNKRMNYFKIRDK

SEQ ID NO: 13187 - protein, 367 aa, Homo sapiens
LRSETAGDVGRAKEMDETVAEFIKRTILKIPMNELTTILKAWDFLSENQLQTVNFRQRKESVVQHLIHLCEEKRASISDAALLDIIYMQFHQHQKVWEVFQMSKGPGEDVDLFDMKQFKNSFKKILQRALKNVTVSFRETEENAVWIRIAWGTQYTKPNQYKPTYVVYYSQTPYAFTSSSMLRRNTPLLGQALTIASKHHQIVKMDLRSRYLDSLKAIVFKQYNQTFETHNSTTPLQERSLGLDINMDSRIIHENIVEKERVQRITQETFGDYPQPQLEFAQYKLETKFKSGLNGSILAEREEPLRCLIKFSSPHLLEALKSLAPAALVCRIQKLLCYSGSHSQGTQDPSSWQKDLYLLFVPLYPRC

SEQ ID NO: 13188 - protein, 455 aa, Homo sapiens
VASAGACPPRASVSHGAGRALAMGHCRLCHGKFSSRSLRSISERAPGASMERPSAEERVLVRDFQRLLGVAVRQDPTLSPFVCKSCHAQFYQCHSLLKSFLQRVNASPAGRRKPCAKVGAQPPTGAEEGACLAPSACTAWWGGCMDMRPAAGPCPTFRGHCPPSTAASSRSCGAATRATTTPWIPAPAARPSCWTVRWQSSGHGTKRRRHGCPSTEGGTLGMPLRPPRVEGQGPQLGLRPRPCPARMWPSLLRTATRWGPGRASHLSQACPFAGPQGSWVRSSFHLQPRMIGDVLSEDENDKKQNAQSSDESFEPYPERKVSGKKSESKEAKKSEEPRIRKKPGPKPGWKKKLRCEREELPTIYKCPYQGCTAVYRGADGMKKHIKEHHEEVRERPCPHPGCNKVFMIDRYLQRHVKLIHTEVRNYICDECGQTFKQRKHLLVHQMRHSGAKPLQ

SEQ ID NO: 13189 - protein, 122 aa, Homo sapiens
LVSPAWATSDPSLLLSSFPALLCLWPEASSVSSPSHPNILRLYNYFYDRRRIYLILEYAPRGELYKELQKSCTFDEQRTATVRADHGGVGRCSNVLPWEEGDSQRHKARKSALRAQGRAEDC

SEQ ID NO: 13190 - protein, 67 aa, Homo sapiens
VVAAEMGKFMKPGKVVLVLAGRYSGRKAVIVKVSASRDSASLHAGTRLAAAGRAGLEFKACFWGSSQ

SEQ ID NO: 13191 - protein, 90 aa, Homo sapiens
LGLLAGVSSGHLWLYGFLSGPFSLLSAEMGKFMKPGKVVLVLAGRYSGRKAVIVKVSASRDSASLHAGTRLAAAGRAGLEFKACFWGSSQ

SEQ ID NO: 13192 - protein, 19 aa, Homo sapiens
MSVFHNCSLYCVLSDKIVI

SEQ ID NO: 13193 - protein, 76 aa, Homo sapiens
VVGCWVWSFPAPLGSDPLSVLLRRQPTSLLGAMTTTTTFKGVDPNSRNSSRDTGSCHVAQAGLELLGSSDDPALAS

SEQ ID NO: 13194 - protein, 85 aa, Homo sapiens
LAQSPLGPFATPLARRAETSVPGGSCGAQVSPGCARGPSSPAPPRNGWCGQLPGVEDHPWLCAPVSSDGGSGGGAQALSYPRSAD

SEQ ID NO: 13195 - protein, 59 aa, Homo sapiens [sequence omitted]

SEQ ID NO: 13196 - protein, 70 aa, Homo sapiens
LRAGVRGPAELLRRCGQEDAGGRLLGGTLSFTPVCCHGCRALVLMAPGGTYRMPRAERKWEWRRCDIPRC

SEQ ID NO: 13197 - protein, 67 aa, Homo sapiens
LMPSRGSVAAAPPTELQSMADQEQVSPAAIKKTILDKVKLDSPAGTALSPSGHTKLLPRSLAPAGKD

SEQ ID NO: 13198 - protein, 102 aa, Homo sapiens
MEGAGAGSGFRKELVSRLLHLHFKDDKTKGAGGGAGGRWVPVSVLRDPFLQLCRAKASGGRGYVWSTQPERWVRVPHNLPLPCSERGRAAAHGGVAEGLRCG

SEQ ID NO: 13199 - protein, 127 aa, Homo sapiens
VLRDVRKETSLEQGTPGLLADHGAFARPGLCDRSVFLLSPVVRRAPQRGSRFGTRLPFMPPEEPPRIPCPLLAAAADPWALRWSRACCPLTPSEPELPASWDSAVSSLPPVQSNCLQENKSVFRCTE

SEQ ID NO: 13200 - protein, 151 aa, Homo sapiens
LEGKATFLRNNSELARSCLTWMISNRANCSYTHLTSGETEASSGRRSPTLLSAGQGGETKTLQGLQLFTICSSLKRRKNGALLSSDVARIKKISFFMTLPLPEFPALFHLIQLQLALRHGLAARRAGPAAGPAAAQRLTVAQHSHSAHRAG

SEQ ID NO: 13201 - protein, 134 aa, Homo sapiens
LRAMARGGWRRLRRLLSAGQLLFQGRALLVTNTLGCGALMAAGDGVRQSWEIRARPGQVFDPRRSASMFAVGCSMGPFLHYWYLSLDRLFPASGLRGFPNVLKKVLVDQLVASPLLGVWYFLGKEPPKPRLCLS

SEQ ID NO: 13202 - protein, 45 aa, Homo sapiens
VRGDVSPARAPSRKREQGRQMCRQRRRRKRWTSRTRPRGSSAAAS

SEQ ID NO: 13203 - protein, 34 aa, Homo sapiens
VPPLPTPGPSLGQRRRRKRWTSRTRPRGSSAAAS

SEQ ID NO: 13204 - protein, 39 aa, Homo sapiens
LSSSRYHLWFQLPQTALQRRRRKRWTSRTRPRGSSAAAS

SEQ ID NO: 13205 - protein, 50 aa, Homo sapiens
LPAITVICVPAKLGTSEPSGLLGPTGWLQRRRRKRWTSRTRPRGSSAAAS

SEQ ID NO: 13206 - protein, 41 aa, Homo sapiens
LVPPHLVTSADHSVLACFRQRRRRKRWTSRTRPRGSSAAAS

SEQ ID NO: 13207 - protein, 147 aa, Homo sapiens
LSRPRGRPRPGAEEGVAEEQPEAPESETSRRRPRHCGEEGEEEREEGRAGREKRKKTFETFPLPLGAGGAGTSWRDAAPRGGRTWGPQTASLCRRGRLLPPCPLHGVPQAPPFRTSPRESPTRPPAKTFPQTSGAPPARRLHPRPVS

SEQ ID NO: 13208 - protein, 160 aa, Homo sapiens
LRPSPRSHRTPESVSPERYSYGTSSSSKRTEGSCRRRRQSSSSANSQQGQWETGSPPTKRQRRSRGRPSGGARRRRRGAPAAPQQQSEPARPSSEGKVTCDGETGSERHPAPGSSRVLRAWASLGAGRGIPAAPGAGAAAGRVWAGHRSAALKGPGLCGL

SEQ ID NO: 13209 - protein, 83 aa, Homo sapiens
LPLGEQPLPRPWVLRSLHFQEVQRHPVGAWAPQEDCTETLPLLERDVAPSPSFPGQRTLRTRSAHRGLPRLTPDLHLTSPTRP

SEQ ID NO: 13210 - protein, 13 aa, Homo sapiens
LELLQLLPPPEEP

SEQ ID NO: 13211 - protein, 118 aa, Homo sapiens
LSVPTKSSRPSFKTRRGSCWEKLARRSSRGRILSGVVTKMKMQRTIVIRRDYLHYIRKYNRFEKRHKNMSVHLSPCFRDVQIGDIVTVGECRPLSKTVRFNVLKVTKAAGTKKQFQKF

SEQ ID NO: 13212 - protein, 39 aa, Homo sapiens
VRVKMAAAEAANCIMENFVATLANGMSLQPPLEEVNILL

SEQ ID NO: 13213 - protein, 31 aa, Homo sapiens
VMVGVWLFPPFVPFLCPSPDSIPPDTLLFPA

SEQ ID NO: 13214 - protein, 41 aa, Homo sapiens [sequence omitted]

SEQ ID NO: 13215 - protein, 213 aa, Homo sapiens
LESGPGGASLAHRFSQEKAMFSSSAKIVKPNGEKPDEFESGISQALLELEMNSDLKAQLRELNITAAKEIEVGGGRKAIIIFVPVPQLKSFQKIQVRLVRELEKKFSGKHVVFIAQRRILPKPTRKSRTKNKQKRPRSRTLTAVHDAILEDLVFPSEIVGKRIRVKLDGSRLIKVHLDKAQQNNVEHKVETFSGVYKKLTGKDVNFEFPEFQL

SEQ ID NO: 13216 - protein, 210 aa, Homo sapiens
LESGPGGASLAHREKAMFSSSAKIVKPNGEKPDEFESGISQALLELEMNSDLKAQLRELNITAAKEIEVGGGRKAIIIFVPVPQLKSFQKIQVRLVRELEKKFSGKHVVFIAQRRILPKPTRKSRTKNKQKRPRSRTLTAVHDAILEDLVFPSEIVGKRIRVKLDGSRLIKVHLDKAQQNNVEHKVETFSGVYKKLTGKDVNFEFPEFQL

SEQ ID NO: 13217 - protein, 197 aa, Homo sapiens
LCLQFSQEKAMFSSSAKIVKPNGEKPDEFESGISQALLELEMNSDLKAQLRELNITAAKEIEVGGGRKAIIIFVPVPQLKSFQKIQVRLVRELEKKFSGKHVVFIAQRRILPKPTRKSRTKNKQKRPRSRTLTAVHDAILEDLVFPSEIVGKRIRVKLDGSRLIKVHLDKAQQNNVEHKVIGQHFIMERFSHSESGF

SEQ ID NO: 13218 - protein, 204 aa, Homo sapiens
LCLQFSQEKAMFSSSAKIVKPNGEKPDEFESGISQALLELEMNSDLKAQLRELNITAAKEIEVGGGRKAIIIFVPVPQLKSFQKIQVRLVRELEKKFSGKHVVFIAQRRILPKPTRKSRTKNKQKRPRSRTLTAVHDAILEDLVFPSEIVGKRIRVKLDGSRLIKVHLDKAQQNNVEHKVETFSGVYKKLTGKDVNFEFPEFQL

SEQ ID NO: 13219 - protein, 84 aa, Homo sapiens
LAAVRRQPVDPCLFPFSFCLASNALGLSRRRELPEDCTNYRGLLRPVCDSEAGLGVASGALALQLRTLAARVLIQIHAGDTHTE

SEQ ID NO: 13220 - protein, 16 aa, Homo sapiens
LSLREKRGIDEETGIA

SEQ ID NO: 13221 - protein, 16 aa, Homo sapiens
LLLGSSCRSSEMNLSY

SEQ ID NO: 13222 - protein, 193 aa, Homo sapiens
LITARDRGGPRCPPRGRHAGLQRLRPKSFLAPLSGLRKAVRASSRTFSARRTCRARWPHPSLCRVTLREILRPGAPDPVLARCCTCDLSLAWHCPSPGGSGGVGGGCSRGRFAPAVMHLGENRLKSHGNQLVSPVMAQSCKDGCGSLISPWLTCVCNAAAVARGKDTASDSNSDSLLQCVTLSQSQISAFSQL

SEQ ID NO: 13223 - protein, 148 aa, Homo sapiens
LLYGEGPGPHTFRLTASQALQSPALHLPGRLRALYLPPRGRSDTYTHRNELFKEDGPDSTVQKKKRFALLLKESGYECRGLPVGSHIRSSTSTLNASDASPSVNVALGMANPHPALWPSEAQGEKPPRSNLPEPSPSSHRPPQPLSSL

SEQ ID NO: 13224 - protein, 145 aa, Homo sapiens
LLYGEGPGPHTFRLTASQALQSPALHLPGRLRALYLPPRDTYTHRNELFKEDGPDSTVQKKKRFALLLKESGYECRGLPVGSHIRSSTSTLNASDASPSVNVALGMANPHPALWPSEAQGEKPPRSNLPEPSPSSHRPPQPLSSL

SEQ ID NO: 13225 - protein, 130 aa, Homo sapiens
LLYGEGPGPHTFRLTASQALQSPALHLPGRLRALYLPPRGRSDTYTHRNELFKEDGPDSTVQKKKRFALLLKESGYECRGLPVGSHIRSSTSTLNAERTSVYQHSKYSKCQAGFPPITRTSRLLLLSRTF

SEQ ID NO: 13226 - protein, 44 aa, Homo sapiens
LGFLAGIELESGQSSTMLQNFSDSEPWFCNDLPSSFSLLDCSEP

SEQ ID NO: 13227 - protein, 53 aa, Homo sapiens
LLSLITLLSFLPPQANPNISLQCVDFYPVNTVISLNDVQADETRSLGSLLHFL

SEQ ID NO: 13228 - protein, 7 aa, Homo sapiens
LQMGSVA

SEQ ID NO: 13229 - protein, 72 aa, Homo sapiens
VSSNTLVLAVTRCLSAGSRIPYQGTEISRKIGSRCSLGWNPDPVLTLVGGGLCRPPPGTGGSQATALRRGCN

SEQ ID NO: 13230 - protein, 237 aa, Homo sapiens
LPCSAGKMGKVRGLRARVHQAAVRPKGEAAPGPAPPAPEATPPPASAAGKDWAFINTNIFARTKIDPSALVQKLELDVRSVTSVRRGEAGSSARSVPSIRRGAEAKTVLPKKEKMKLRREQWLQKIEAIKLAEQKHREERRRRATVVVGDLHPLRDALPELLGLEAGSRRQARSRESNKPRPSELSRMSAAQRQQLLEEERTRFQELLASPAYRASPLVAIGQTLARQMQLEDGGQL

SEQ ID NO: 13231 - protein, 222 aa, Homo sapiens
LPCSAGKMGKVRGLRARVHQAAVRPKGEAAPGPAPPAPEATPPPASAAGKDWAFINTNIFARTKIDPSALVQKLELDVRSVTSVRRGAEAKTVLPKKEKMKLRREQWLQKIEAIKLAEQKHREERRRRATVVVGDLHPLRDALPELLGLEAGSRRQARSRESNKPRPSELSRMSAAQRQQLLEEERTRFQELLASPAYRASPLVAIGQTLARQMQLEDGGQL

SEQ ID NO: 13232 - protein, 30 aa, Homo sapiens
LQHPQASRWSLLIVEEQPCHQNRAKNGSPK

SEQ ID NO: 13233 - protein, 18 aa, Homo sapiens
MKDSRRNLKGNFHNVRSP

SEQ ID NO: 13234 - protein, 27 aa, Homo sapiens
LCCYPFGVPHGDSRRNLKGNFHNVRSP

SEQ ID NO: 13235 - protein, 48 aa, Homo sapiens
VSSFLNLEHVWITKTSLGCSSLLFSFNLKRKLSRCWAGIGEIPDLIPC

SEQ ID NO: 13236 - protein, 129 aa, Homo sapiens
MSGEPELIELRELAPAGRAGKGRTRLERANALRIARGTACNPTRQLVPGRGHRFQPAGPATHTWCDLCGDFIWGVVRKGLQCAHCKFTCHYRCRALVCLDCCGPRDLGWEPAVERDTNVVGSVSGAPER

SEQ ID NO: 13237 - protein, 167 aa, Homo sapiens
LRGGNGADMAKSKNHTTHNQSRKWHRNGIKKPRSQRYESLKGVDPKFLRNMRFAKKHNKKGLKKMQANNAKAMSARAEAIKALVKPKEVKPKIPKGVSRKLDRLAYIAHPKLGKRARARIAKGLRLCRPKAKAKAKAKDQTKAQAAAPASVPAQAPKRTQAPTKASE

SEQ ID NO: 13238 - protein, 164 aa, Homo sapiens
LRGADMAKSKNHTTHNQSRKWHRNGIKKPRSQRYESLKGVDPKFLRNMRFAKKHNKKGLKKMQANNAKAMSARAEAIKALVKPKEVKPKIPKGVSRKLDRLAYIAHPKLGKRARARIAKGLRLCRPKAKAKAKAKDQTKAQAAAPASVPAQAPKRTQAPTKASE

SEQ ID NO: 13239 - protein, 176 aa, Homo sapiens
VAAGRGLRRGLVTDRADMAKSKNHTTHNQSRKWHRNGIKKPRSQRYESLKGVDPKFLRNMRFAKKHNKKGLKKMQANNAKAMSARAEAIKALVKPKEVKPKIPKGVSRKLDRLAYIAHPKLGKRARARIAKGLRLCRPKAKAKAKAKDQTKAQAAAPASVPAQAPKRTQAPTKASE

SEQ ID NO: 13240 - protein, 153 aa, Homo sapiens
LSALSPLYTRPSSASVGKRAICPSFLKVEGTTPATTGTPEVHLPNSSGAKRKKKGFRRLLLTPTLSLNPEVISAPPLPLRLILEEKDGQVWPGMPWASGDLWPFSVVRSLCLACSLAHCFPSLPRSSFARCLVIVALATDREAVAEDTCHGRL

SEQ ID NO: 13241 - protein, 41 aa, Homo sapiens
LRGTSTPAAASPSTMATTWSPWTSSPPTPRRPAPGSQASST

SEQ ID NO: 13242 - protein, 122 aa, Homo sapiens
LRGQLQGHTPVGCLLVPPRSTASSLMPPAPWQSGARGAGGLGLDRVPRVPLEAPHGTVPLGHCSRDLGCGLAPSCGEVLGGSVWPACLLTWVWPEQVKATQEENRELRSRCEELHGKNLELG

SEQ ID NO: 13243 - protein, 28 aa, Homo sapiens
MDPDTRHSTGHPCSTTGKPSGGNPVEKS

SEQ ID NO: 13244 - protein, 32 aa, Homo sapiens
LAWAATGGYDYSLAGSVRVVGWAECTLLGAAG

SEQ ID NO: 13245 - protein, 14 aa, Homo sapiens
VTVCMCSFQMPSPE

SEQ ID NO: 13246 - protein, 117 aa, Homo sapiens
LSCWCGGQRDAQGQGQNPEAEVWLQCQPKASEPECSTEGSAADRMVRGLGFRVAVGLGRDGPRDDGSAMSLFAGSSHIRHAWDHAKSVRQNLAEMGLAVDPNRAVPLRKRKGSVLCR

SEQ ID NO: 13247 - protein, 24 aa, Homo sapiens
VWGALGWWGGLVWVQVGLIELVLC

SEQ ID NO: 13248 - protein, 56 aa, Homo sapiens
VALRCLSHPHPQLNGLEGEGTHKKKGTLVLPQAAQAATAPSSSCGGEGPMWWHRPP

SEQ ID NO: 13249 - protein, 47 aa, Homo sapiens
LSTVRLQIWDFFITSFFFELHLGSFFCARLFHPFSLPPVLLLFDLFD

SEQ ID NO: 13250 - protein, 280 aa, Homo sapiens
LRLRPPGRRPLSRRGSCLGCCAPPRCLGDLWARARATMTDYGEEQRNELEALESIYPDSFTVLSENPPSFTITVTSEAGENDETVQTTLKFTYSEKYPDEAPLYEIFSQENLEDNDVSDILKLLALQAEENLGMVMIFTLVTAVQEKLNEIVDQIKTRREEEKKQKEKEAEEAEKQLFHGTPVTIENFLNWKAKFDAELLEIKKKRMKEEEQAGKNKLSGKQLFETDHNLDTSDIQFLEDAGNNVEVDESLFQEMDDLELEDDEDDPDYNPADPESDSAD

SEQ ID NO: 13251 - protein, 35 aa, Homo sapiens
MTPTTPGLCWNQESVEKSIILMQAQGRALNLYWKI

SEQ ID NO: 13252 - protein, 18 aa, Homo sapiens
LLLWGMDRGSRNAFVFSQ

SEQ ID NO: 13253 - protein, 67 aa, Homo sapiens
LATLETPCHPTMVSALCLLLTCGELGELGELGELGWGEPVRTERRNEKKEQKYYFYVIYILLMPNYL

SEQ ID NO: 13254 - protein, 261 aa, Homo sapiens
LRRGRSWRKERGGRPVNRPGEAVLSRLPGATLSPDPACRCRATAMNSGAMRIHSKGHFQGGIQVKNEKNRPSLKSLKTDNRPEKSKCKPLWGKVFYLDLPSVTISEKLQKDIKDLGGRVEEFLSKDISYLISNKKEAKFAQTLGRISPVPSPESAYTAETTSPHPSHDGSSFKSPDTVCLSRGKLLVEKAIKDHDFIPSNSILSNALSWGVKILHIDDIRYYIEQKKKELYLLKKSSTSVRDGGKRVGSGAQKTRKALQSI

SEQ ID NO: 13255 - protein, 10 aa, Homo sapiens
LGPSGAMILD

SEQ ID NO: 13256 - protein, 15 aa, Homo sapiens
MVASASEAVVTVAFP

SEQ ID NO: 13257 - protein, 60 aa, Homo sapiens
VREEGIASAKEVLESCVLAARDPAWVGRCFCVGVWPFHQSCGGPRDFLPVLLGFQEKPKD

SEQ ID NO: 13258 - protein, 119 aa, Homo sapiens
MPHCGPPTLRPPAPTSVIVLMSSPSHFQPLPSIPGALTQDPTWSRDAGSPPWGLVLAHPAGIAHRLPDTPPEGGTRFSAAAFTAAPAPSAGPPSSLCTLLAEGWETLQDIPTLPHAAKL

SEQ ID NO: 13259 - protein, 24 aa, Homo sapiens
LLRDWRPGGYLGAAGKMADSVASR

SEQ ID NO: 13260 - protein, 27 aa, Homo sapiens
MAKAEEFIDRCVVRKPSGWVAGSGSPG

SEQ ID NO: 13261 - protein, 71 aa, Homo sapiens
LGCRLSAAALGVFRPMESSLRGLGLQYLVCIDDWQVDLGSGFQHVAALGLPLLPAGVGQCPEQALFPSPVG

SEQ ID NO: 13262 - protein, 7 aa, Homo sapiens
LVPGQHH

SEQ ID NO: 13263 - protein, 69 aa, Homo sapiens
LRVAFTMEGISNFKTPSKLSEKKKSVLCSTPTINIPASPFMQKLGFGTGVNVYLMKSICTKKRNCFMET

SEQ ID NO: 13264 - protein, 54 aa, Homo sapiens
MLDQYSSEKTAGTFTHAAHSVFITTCDGGKGQFEKEDRAHCGVSMEMWSLVTNL

SEQ ID NO: 13265 - protein, 50 aa, Homo sapiens
LRFGGEKKVPLDPELFKISPSYSPPLGQFEKEDRAHCGVSMEMWSLVTNL

SEQ ID NO: 13266 - protein, 26 aa, Homo sapiens
LDSYPSDITCHLPASGRTGSLLAPHS

SEQ ID NO: 13267 - protein, 93 aa, Homo sapiens
LLISGECLLTATDTVDVAMPLNFTGGQLHSRMFQNFPTELLLSLAVEPLTANFHKWSLSVKDISIQYMVSSGIQRKHLMSGRIWMAFPMHLML

SEQ ID NO: 13268 - protein, 80 aa, Homo sapiens
LLLVGGRPAPKAGRWWPQRRRKSEIEYYAMLAKTGVHHYSGNNIELGTACGKYYRVCTLAIIDPGDSDIIRSMPEQTGEK

SEQ ID NO: 13269 - protein, 98 aa, Homo sapiens
LGDLLSCVGLKRAGHQLQHDLFFDTLKIQCGCSVKEVLGRAAQRQINFRLFEDGTLGISLDETVNEKDLDDLLWIFGCESSAVSKIKTCVPHHNYWRW

SEQ ID NO: 13270 - protein, 143 aa, Homo sapiens
LQRQWGESCSEARSNGVAGLARPPLPRFPAPGVPTHGRPRSRVLTRVRGSRGSGKMAAAVVLAAGLRAARRAVAATGVRGGQVRSGAGASRGSCGLRSHPGPGGPEGAQSRAELLPVASAPPRHKLRGCVVRSNWWLRRTSWC

SEQ ID NO: 13271 - protein, 69 aa, Homo sapiens
LNHPPHWPIGGGLVCDVMGFCEIVTEQENAGTVRTGRSRGSEAVSGLGKKCLLDLALGGTLATRVGVIG

SEQ ID NO: 13272 - protein, 102 aa, Homo sapiens
LAACAAMAKIKARDLRGKKKEELLKQLDDLKVELSQLRVAKVTGGAASKLSKIRVVRKSIARVLTVINQTQKENLRKFYKAAAGGPCIQMDRVLPQPPACSC

SEQ ID NO: 13273 - protein, 53 aa, Homo sapiens
LAACAAMAKIKARDLRGKKKEELLKQLDDLKVELSQLRVAKVTGGAASKLSKM

SEQ ID NO: 13274 - protein, 61 aa, Homo sapiens
LVESVSSRAASPQPLFSQLLGWTWEGGPEGLPLPSLPHQGELDYQLQDQDSVLFISTLHGG

SEQ ID NO: 13275 - protein, 127 aa, Homo sapiens
VTGPAAPRLPPSPQPRRPRALSFPALPCLAFQCSSFCEMTLKASEGESGGSMHTALSDLYLEHLLQKRSRPELPLSNCLCPLNPAADVSSEGAFRAAGIATPALCLIKGQRLQNKGQTWSPGLYRIH

SEQ ID NO: 13276 - protein, 82 aa, Homo sapiens
LGPESGTESAFRRAAMNLRERRWEARMPGATGRSSGVTGSALRGTGTIRINSVFVRFLHLAVCALSTFPLCVYHSPGGRGKP

SEQ ID NO: 13277 - protein, 57 aa, Homo sapiens
LPQLWLPENPSILFCRGAFWRGGMLPESPMKTGQCFSLRLRLRDGPGALCREEVAAL

SEQ ID NO: 13278 - protein, 75 aa, Homo sapiens
LVGCGWFSSVHCTDVHFFLSSCQKKKPAPPKPEPKPKKAPAKKGEKVPKGKKGKADAGKEGNNPAENGDAKTDQV

SEQ ID NO: 13279 - protein, 15 aa, Homo sapiens
LRKWLNFDQFCNWIL

SEQ ID NO: 13280 - protein, 22 aa, Homo sapiens
VTATFQSRVARASRQVRVREAS

SEQ ID NO: 13281 - protein, 11 aa, Homo sapiens
MSNFRVSNNCH

SEQ ID NO: 13282 - protein, 9 aa, Homo sapiens
MMGNRTGLQ

SEQ ID NO: 13283 - protein, 42 aa, Homo sapiens
LEQVVKLMLSGEENERTGPRLCQRPQYTTTSIHIYSDIKIRQ

SEQ ID NO: 13284 - protein, 19 aa, Homo sapiens
LGTMGSTVCTDERSYGRVS

SEQ ID NO: 13285 - protein, 10 aa, Homo sapiens
LLDGQWESEA

SEQ ID NO: 13286 - protein, 20 aa, Homo sapiens
LEGVCLGKGIWLGPELLRDR

SEQ ID NO: 13287 - protein, 14 aa, Homo sapiens
MKNKLRQVLEKYRR

SEQ ID NO: 13288 - protein, 12 aa, Homo sapiens
LRGGDPTQYHQT

SEQ ID NO: 13289 - protein, 37 aa, Homo sapiens
LQGGAKRVIISAPSADAPMFVMGVNHEKYDNSLKIIR

SEQ ID NO: 13290 - protein, 36 aa, Homo sapiens
MHLPPPPRPCSPDVCFPCRMPGKPVLTLLWQSWCLA

SEQ ID NO: 13291 - protein, 46 aa, Homo sapiens
LGQLPQNLELRRLEKGKWKAVNTLSSPLPDPISFRCSLLYSGCHSH

SEQ ID NO: 13292 - protein, 9 aa, Homo sapiens
MLRASHQIT

SEQ ID NO: 13293 - protein, 45 aa, Homo sapiens
LLASASAEMWAAGQDGHSGSAQQRSPDSDWGSKQGLDRPGEPVGQ

SEQ ID NO: 13294 - protein, 47 aa, Homo sapiens
LEGGGTASAEMWAAGQDGHSGSAQQRSPDSDWGSKQGLDRPGEPVGQ

SEQ ID NO: 13295 - protein, 51 aa, Homo sapiens
LEGGGTGRGLTSAEMWAAGQDGHSGSAQQRSPDSDWGSKQGLDRPGEPVGQ

SEQ ID NO: 13296 - protein, 44 aa, Homo sapiens
LEGASAEMWAAGQDGHSGSAQQRSPDSDWGSKQGLDRPGEPVGQ

SEQ ID NO: 13297 - protein, 44 aa, Homo sapiens
LPSASAEMWAAGQDGHSGSAQQRSPDSDWGSKQGLDRPGEPVGQ

SEQ ID NO: 13298 - protein, 18 aa, Homo sapiens
MMRRKKIQEWIPPSTPYK

SEQ ID NO: 13299 - protein, 55 aa, Homo sapiens
LLYALPHLFRFPDAGNGGEQLQSLGSLYHLPHEPQHVSGCDSLLHRFKTISGSSH

SEQ ID NO: 13300 - protein, 31 aa, Homo sapiens
LLRWVTRYSCPRAFVTGMPKRGKKGAPFASS

SEQ ID NO: 13301 - protein, 32 aa, Homo sapiens
VTSLSAYSPILILKQMCHKVRILMCISQTKLC

SEQ ID NO: 13302 - protein, 14 aa, Homo sapiens
LGVLYVLLPMPSLK

SEQ ID NO: 13303 - protein, 19 aa, Homo sapiens
LPMEVRPVVAMESTRCHFG

SEQ ID NO: 13304 - protein, 28 aa, Homo sapiens
MSSIGTGYSYWNQMQRWCCLWGRKISPF

SEQ ID NO: 13305 - protein, 16 aa, Homo sapiens
LKASMCGLKSLPLPEM

SEQ ID NO: 13306 - protein, 61 aa, Homo sapiens
LCPLPRSPGQPRRPHLQVLPGQSGACLPLQLSEQAFESSQKYKEGKYIIELNHMIKDNGWD

SEQ ID NO: 13307 - protein, 119 aa, Homo sapiens
LRTGRGKDTPVCGDEDSSARSAARPALAQCRALSVDWAGPGSPHGLYLTLQVGVSLAAGGARACRGHQVRPPWCLGWWRPCPSSRTRRPSYRRSWWSYRRGWPSATVTSRPRPPSCRTR

SEQ ID NO: 13308 - protein, 57 aa, Homo sapiens
LSRECEIKYTGFRDRPHEERQARFQNACRDGRSEIARRQQDPSPGSNLGGGDDLKLR

SEQ ID NO: 13309 - protein, 60 aa, Homo sapiens
LMALNIFYFYLHSFVGAKNLYIISVKGIKGRLNRLPAAGVGDMVMATVKKGKPELRKKGE

SEQ ID NO: 13310 - protein, 32 aa, Homo sapiens
LPPPPGTPAGSESRGAQSRPGCRTVRPHQGCH

SEQ ID NO: 13311 - protein, 29 aa, Homo sapiens
LEPAGGRWEGGRAGLAWGPGGKGMRLAQA

SEQ ID NO: 13312 - protein, 14 aa, Homo sapiens
LSGRKYTDVLPSQS

SEQ ID NO: 13313 - protein, 104 aa, Homo sapiens
VKPNGEKPDEFESGISQALLELEMNSDLKAQLRELNITAAKEIEVGGGRKAIIIFVPVPQLKSFQKIQVRLVRELEKKFSGKHVVFIAQVSVLLLQHVSVCEFC

SEQ ID NO: 13314 - protein, 123 aa, Homo sapiens
VTGPGAANWSEPQRPPTWPGPSTSCSWPGSCLLPAPSTRSRQSASSHQHSRRRQGWLKEIRKLQKSTHLLIRKLPFSRLAAEAFLVHLFEDAYLLTLHAGRVTLFPKDVQLARRIRGLEEGLG

SEQ ID NO: 13315 - protein, 143 aa, Homo sapiens
LAEADGLSTNHWLIGTDKCVERINEMVNRAKRKAGVDPLVPLRSLGLSLSGGDQEDAGRILIEELRDRFPYLSESYLITTDAAGSIATATPDVASCCSVPGLGHTEPPIPFPQVELCSYLEQAPTAGSSTLMAPRVAAAAGAI

SEQ ID NO: 13316 - protein, 39 aa, Homo sapiens
MPPKKQAQAGGSKKAEQKKKEKIIEIFLCSFSCRTKLSV

SEQ ID NO: 13317 - protein, 31 aa, Homo sapiens
LRDSRDCVTSFVSFDLESLSRTPLFGKQVYK

SEQ ID NO: 13318 - protein, 8 aa, Homo sapiens
LVTGRNRF

SEQ ID NO: 13319 - protein, 115 aa, Homo sapiens
LWTYSRQSGWDTATTPWKTRPFITGCGRKTCTSRLKNDQANYSLNTDDPLIFKSTLDTDYQMTKRDMGFTEEEFKRLNINAAKSSFLPEDEKRELLDLLYKAYGMPPSASAGQNL

SEQ ID NO: 13320 - protein, 22 aa, Homo sapiens
VNRNQALVNTSIEHDSWRRAWL

SEQ ID NO: 13321 - protein, 286 aa, Homo sapiens
LRRSKPARASTRPSSDCGASAPRSCRRPFWSRRCKFFSLTETPEDYTLMVDEEGFKELPPSEFLQVAEATWLVLNVSSHSGAAVQAAGVTKIARSVIAPLAEHHVSVLMLSTYQTDFILVREQDLSVVIHTLAQEFDIYREVGGEPVPVTRDDSSNGFPRTQHGPSPTVHPIQSPQNRFCVLTLDPETLPAIATTLIDVLFYSHRFPSDLLLTSSSGELWRMVRIGGQPLGFDECGIVAQIAGPLAAADISAYYISTFNFDHALVPEDGIGSVIEVLQRRQEGLAS

SEQ ID NO: 13322 - protein, 53 aa, Homo sapiens
VPLQMVLKRSTEAAPSPMWCPAPLALPLASCPLLVLFWHHLQQGRVWPLLQLG

SEQ ID NO: 13323 - protein, 15 aa, Homo sapiens
LGSLLAPRPRRLRGT

SEQ ID NO: 13324 - protein, 8 aa, Homo sapiens
LSGGVAKP

SEQ ID NO: 13325 - protein, 38 aa, Homo sapiens
MDGFYDQQVPFMVPGHKFLMMNSLSQIFSLITISETTV

SEQ ID NO: 13326 - protein, 19 aa, Homo sapiens
LSSLMSWENKGFLRPLSQS

SEQ ID NO: 13327 - protein, 60 aa, Homo sapiens
VIFFFSRKANGWRGSTTRFHSSNLCLALFLYLATRDQHAVMCAEGGIGQLHNLDLTTVWI

SEQ ID NO: 13328 - protein, 103 aa, Homo sapiens
LGWESGRRGARSSCAPGEGAPQSPDTIKSAWEASFRSASSREQICYNPCLFLPPLHNVIKATWGVIYQPLSSPLFQNNTTVSYMCIFARTPKSLAKVEQGVEN

SEQ ID NO: 13329 - protein, 21 aa, Homo sapiens
LLLAECVSCHQWPVWLDDASA

SEQ ID NO: 13330 - protein, 17 aa, Homo sapiens
MRLLRPAIIQNGYSDLC

SEQ ID NO: 13331 - protein, 112 aa, Homo sapiens
LRCWALGFYPAEITLTWQRDGEEQTQDTELVETRPAGDGTFQKWAAVVVPPGEEQRYTCHVQHEGLPQPLILRWVSPAHHPHRGHRCWPCCPWSCGHWSCGRCCDVEEEELR

SEQ ID NO: 13332 - protein, 41 aa, Homo sapiens
LLYFPSFSLTFRGILRGCIRGRAEPEDLSEGFPGCNFLGCL

SEQ ID NO: 13333 - protein, 18 aa, Homo sapiens
LFSLGSPCVLVPVSPPRL

SEQ ID NO: 13334 - protein, 10 aa, Homo sapiens
LCLSQLLPQC

SEQ ID NO: 13335 - protein, 47 aa, Homo sapiens
LTTTSSDCKPSSSRRNSRSGWLRQSPKWKPSCWPPGSWSAASVLDRC

SEQ ID NO: 13336 - protein, 14 aa, Homo sapiens
LGIGKQAYVAHYYV

SEQ ID NO: 13337 - protein, 26 aa, Homo sapiens
LKKVTGSRPTRRQFSGGKENRAERQQ

SEQ ID NO: 13338 - protein, 100 aa, Homo sapiens
MCLLCSTLIFPQPLRPTSIELAGSSVTAQASAWTARANNPGIVLTFVLPTEQFHLGKIEELLSGENRGPILLPYQFRMEEIEGFRYRCRCPPPGCHALSD

SEQ ID NO: 13339 - protein, 49 aa, Homo sapiens
LGALGLGLREPHLAGFQGGGGISRGPAPGAHLVPFRPSRPPALTPGPVP

SEQ ID NO: 13340 - protein, 46 aa, Homo sapiens
LTVVKNQKRKNEEAVSTSGRNEPGRGTGTISEAMPLRLELALSPRR

SEQ ID NO: 13341 - protein, 20 aa, Homo sapiens
LRVILRGSGGVSVKSLKIRL

SEQ ID NO: 13342 - protein, 104 aa, Homo sapiens
LCGVRFPCWLALGTPRLLPQRGKTCGLRFRQPELVPTTYCWEISGLQPPALPEKRELWAFFLPVWSSSAFRTDRPWHRLPRDSCDAVCSCLLWSMAPTGFQDGS

SEQ ID NO: 13343 - protein, 113 aa, Homo sapiens
LEVQWVLQLKKPWVPAAERQDRGDAWAGRDGNLQNRFHFYRTSTRLLKQSCFPRLDSHHRDSRNSGLAPATSFLRIQAFYHNVKTAIYKAIFIVLDNSTSPKTFRNKIGHWLD

SEQ ID NO: 13344 - protein, 34 aa, Homo sapiens
LLTKCLVPEDGEAKARLGAVLWPWGPAPNWGLCI

SEQ ID NO: 13345 - protein, 26 aa, Homo sapiens
MCNLKRNCEANSSDQRTRESSSCQHR

SEQ ID NO: 13346 - protein, 23 aa, Homo sapiens
LAPPCTLSSGTPRHPCVCGSVTS

SEQ ID NO: 13347 - protein, 44 aa, Homo sapiens
MLQPSVGSHLDVGVFRWNIRCTFMAILSVRADFCQAQHSIFADK

SEQ ID NO: 13348 - protein, 45 aa, Homo sapiens
VPEEAAECELQRLGVFRWNIRCTFMAILSVRADFCQAQHSIFADK

SEQ ID NO: 13349 - protein, 80 aa, Homo sapiens
LLPELAVFLSAAGTVGERERTEEGSLQTDAFSIPRRGQVPGRWAWRCFRRAQRWEEAEETRAWEELKLCSWKVSSSLVNE

SEQ ID NO: 13350 - protein, 22 aa, Homo sapiens
LAADKRGLRKYRTRSPVASSSL

SEQ ID NO: 13351 - protein, 467 aa, Homo sapiens
LQPDIDGLLSQALLLGELGPAVELCLKEERFADAIILAQAGGTDLLKQTQERYLAKKKTKISSLLACVVQKNWKDVVCTCSLKNWREALALLLTYSGTEKFPELCDMLGTRMEQEGSRALTSEARLCYVCSGSVERLVECWAKCHQALSPMALQDLMEKVMVLNRSLEQLRGPHGVSPGPATTYRVTQYANLLAAQGSLATAMSFLPRDCAQPPVQQLRDRLFHAQGSAVLGQQSPPFPFPRIVVGATLHSKETSSYRLGSQPSHQVPTPSPRPRVFTPQSSPAMPLAPSHPSPYQGPRTQNISDYRAPGPQAIQPLPLSPGVRPGPQDSWKEAPAPRGNLQRNKLQHLPPEKMERKELPPEHQSLKSSFEALLQRCSLSATDLKTKRKLEEAAQRLEYLYEKLCEGTLSPHVVAGLHEVARCVDAGSFEQGLAVHAQVAGCSSFSEVSSFMPILKAVLIIAHKLLV

SEQ ID NO: 13352 - protein, 39 aa, Homo sapiens [sequence omitted]

SEQ ID NO: 13353 - protein, 36 aa, Homo sapiens
MTEVEMKLLHGVKNAKKRIEKIGKLEDKNILLEEKR

SEQ ID NO: 13354 - protein, 58 aa, Homo sapiens [sequence omitted]

SEQ ID NO: 13355 - protein, 34 aa, Homo sapiens
VVTHLFRAMTSLQGAGGHVGCVFGGLPGYKNGCG

SEQ ID NO: 13356 - protein, 96 aa, Homo sapiens
VGGQRHRQRRGGSEREDVEGGTEPGQRWTRHRARGRGQHAAGAERRAPRRAARVISGRPCTERLPPQPSSRRAEGTAPAGPCSPDSTGRGRRAAAV

SEQ ID NO: 13357 - protein, 173 aa, Homo sapiens
LQGAGGGTTPPLRKTTTNLTSVTSVASATRTDRGSATTMLTLTWPARRGMKLKTRRLGPHPTTEMRTTGKGPDGTVIPNNYCDFCLGGSNMNKKSGRPEELVSCADCGRSGECGPFPHRVPVDQECSSCIPLPSCGAGDWRGKRWWQCFRVERSFQLILIFFFFGSQEPKVMP

SEQ ID NO: 13358 - protein, 35 aa, Homo sapiens
MEWRFSFHFSLLNLQGCKMIRACPLQPDHTNDEKE

SEQ ID NO: 13359 - protein, 37 aa, Homo sapiens
VPYSLQPVSLWSCLPFYISTIKRACPLQPDHTNDEKE

SEQ ID NO: 13360 - protein, 11 aa, Homo sapiens
LETYRQGGVPP

SEQ ID NO: 13361 - protein, 29 aa, Homo sapiens
LLSLRRTYSGSQLRRVEGKCCCWVCRRDG

SEQ ID NO: 13362 - protein, 102 aa, Homo sapiens
LSVRPALCVLGPYLSMLLAGGPARCLLHTHHLREAPAGRRPVLPAAALHCPLHAHLPGPPGGLAALCVSRLSLLVPTAVGPPALHLFTAGRQGPGRWGSPAQ

SEQ ID NO: 13363 - protein, 29 aa, Homo sapiens
MWRSEWKQVRMEGAAKARFWASLQSSSAP

SEQ ID NO: 13364 - protein, 45 aa, Homo sapiens
LLGVEFPSAPRVRPFERSAPAPAYLAPRRHDHNHHLQGSRPQQQE

SEQ ID NO: 13365 - protein, 32 aa, Homo sapiens
LWPSWYLHQPGREFQLHLPWRVHWPFLRSGHQ

SEQ ID NO: 13366 - protein, 117 aa, Homo sapiens
LRLRHSSPGRGGLGCRSWRCAGSSRPYSEVFSVALFERGSSCILRIFCISAPFSSRCHRMPQIGPVPSVNQTSETASLQGQSPSTDELEDSECTPGSRPYRHTLGQTSPYTTQERTP

SEQ ID NO: 13367 - protein, 8 aa, Homo sapiens
MKTDAENS

SEQ ID NO: 13368 - protein, 40 aa, Homo sapiens
LGWHMCMAVRRAGTWRALWDWRCAGRRWWCGAAADSWPPP

SEQ ID NO: 13369 - protein, 2610 aa, Homo sapiens
LCPLCRSSVSISCAACVCKASFRAVWQEAPSHLIISRPWHCLSMAISSRLALWEQKIREEDKSPPPSSPPPLFSVIPGGFIKQLVRGTEKEAKEARQRKQLAVASPEREIPEISISQPNSKSSSGTRSGSQQISQDDQSSSPGSSDILGKESEGSRSPDPEQMTSINGEKAQELGSSATPTKKTVPFKRGVRRGDVLLMVAKLDPDSAKPEKTHPHDAPPCKTSPPATDTGKEKKGETSRTPCGSQASTEILAPKAEKTRTGGLGDPGQGTVALKKGEEGQSIVGKGLGTPKTTELKEAEPQGKDRQGTRPQAQGPGEGVRPGKAEKEGAEPTNTVEKGNVSKDVGSEGKHVRPQIPGRKWGGFLGRRSKWDGPQNKKDKEGVLLSKAEKTGEPQTQMEKTSQVQGELGDDLRMGEKAGELRSTTGKAGESWDKKEKMGQPQGKSGNAGEARSQTEKGCEAPKEVSTMVESPAAPGKGGWPGSRGQEAEEPCSRAGDGAGALETELEGPSQPALEKDAERPRIRKENQDGPAPQEEGKGGQSRDSDQAPEDRWYEAEKVWLAQKDGFTLATVLKPDEGTADLPAGRVRLWIDADKTITEVDEEHVHRANPPELDQVEDLASLISVNESSVLNTLLQRYKAQLLHTCTGPDLIVLQPRGPSVPSAGKVPKGRRDGLPAHIGSMAQRAYWALLNQRRDQSIVALGWSGAGKTTCCEQVLEHLVGMAGSVDGRVSVEKIRATFTVLRAFGSVSMAHSRSATRFSMVMSLDFNATGRITAAQLQTMLLEKSRVARQPEGESNFLVFSQMLAGLDLDLRTELNLHQMADSSSFGMGVWSKPEDKQKAAAAFAQLQGAMEMLGISESEQRAVWRVLAAIYHLGAAGACKVGRKQFMRFEWANYAAEALGCEYEELNTATFKHHLRQIIQQMTFGPSRWGLEDEETSSGLKMTGVDCVEGMASGLYQELFAAVVSLINRSFSSHHLSMASIMVVDSPGFQNPRHQGKDRAATFEELCHNYAHERLQLLFYQRTFVSTLQRYQEEGVPVQFDLPDPSPGTTVAVVDQNPSQVRLPAGGGAQDARGLFWVLDEEVHVEGSSDSVVLERLCAAFEKKGAGTEGSSALRTCEQPLQCEIFHQLGWDPVRYDLTGWLHRAKPNLSALDAPQVLHQSKREELRSLFQARAKLPPVCRAVAGLEGTSQQALQRSRMVRRTFASSLAAVRRKAPCSQIKLQMDALTSMIKRSRLHFIHCLVPNPVVESRSGQESPPPPQPGRDKPGAGGPLALDIPALRVQLAGFHILEALRLHRTGYADHMGLTRFRRQFQVLDAPLLKKLMSTSEGIDERKAVEELLETLDLEKKAVAVGHSQVFLKAGVISRLEKQREKLVSQSIVLFQAACKGFLSRQEFKKLKIRRLAAQCIQKNVAVFLAVKDWPWWQLLGSLQPLLSATIGTEQLRAKEEELTTLRRKLEKSEKLRNELRQNTDLLESKIADLTSDLADERFKGDVACQVLESERAERLQAFREVQELKSKHEQVQKKLGDVNKQLEEAQQKIQLNDLERNPTGGADEWQMRFDCAQMENEFLRKRLQQCEERLDSELTARKELEQKLGELQSAYDGAKKMAHQLKRKCHHLTCDLEDTCVLLENQQSRNHELEKKQKKFDLQLAQALGESVFEKGLREKVTQENTSVRWELGQLQQQLKQKEQEASQLKQQVEMLQDHKRELLGSPSLGENCVAGLKERLWKLESSALEQQKIQSQQENTIKQLEQLRQRFELEIERMKQMHQKDREDQEEELEDVRQSCQKRLHQLEMQLEQEYEEKQMVLHEKQDLEGLIGTLCDQIGHRDFDVEKRLRRDLRRTHALLSDVQLLLGTMEDGKTSVSKEELEKVHSQLEQSEAKCEEALKTQKVLTADLESMHSELENMTRNKSLVDEQLYRLQFEKADLLKRIDEDQDDLNELMQKHKDLIAQSAADIGQIQELQLQLEEAKKEKHKLQEQLQVAQMRIEYLEQSTVDRAIVSRQEAVICDLENKTEFQKVQIKRFEVLVIRLRDSLIKMGEELSQAATSESQQRESSQYYQRRLEELKADMEELVQREAEASRRCMELEKYVEELAAVRQTLQTDLETSIRRIADLQAALEEVASSDSDTESVQTAVDCGSSGRKEMDNVSILSSQPEGSLQSWLSCTLSLATDTMRTPSRQSATSSRILSPRINEEAGDTERTQSALALSRARSTNVHSKTSGDKPVSPHFVRRQKYCHFGDGEVLAVQRKSTERLEPASSPLASRSTNTSPLSREKLPSPSAALSEFVEGLRRKRAQRGQGSTLGLEDWPTLPIYQTTGASTLRRGRAGSDEGNLSLRVGAKSPLEIEGAAGGLLRSTSLKCISSDGVGGTTLLPEKSKTQFSSCESLLESRPSMGRKLSSPTTPRDMLLSPTLRPRRRCLESSVDDAGCPDLGKEPLVFQNRQFAHLMEEPLGSDPFSWKLPSLDYERKTKVDFDDFLPAIRKPQTPTSLAGSAKGGQDGSQRSSIHFETEEANRSFLSGIKTILKKSPEPKEDPAHLSDSSSSSGSIVSFKSADSIKSRPGIPRLAGDGGERTSPERREPGTGRKDDDVASIMKKYLQK

SEQ ID NO: 13370 - protein, 2611 aa, Homo sapiens
LCPLCRSSVSISCAACVCKASFRAVWQEAPSHLIISRPWHCLSMAISSRLALWEQKIREEDKSPPPSSPPPLFSVIPGGFIKQLVRGTEKEAKEARQRKQLAVASPEREIPEISISQPNSKSSSGTRSGSQQISQDDQSSSPGSSDILGKESEGSRSPDPEQMTSINGEKAQELGSSATPTKKTVPFKRGVRRGDVLLMVAKLDPDSAKPEKTHPHDAPPCKTSPPATDTGKEKKGETSRTPCGSQASTEILAPKAEKTRTGGLGDPGQGTVALKKGEEGQSIVGKGLGTPKTTELKEAEPQGKDRQGTRPQAQGPGEGVRPGKAEKEGAEPTNTVEKGNVSKDVGSEGKHVRPQIPGRKWGGFLGRRSKWDGPQNKKDKEGVLLSKAEKTGEPQTQMEKTSQVQGELGDDLRMGEKAGELRSTTGKAGESWDKKEKMGQPQGKSGNAGEARSQTEKGCEAPKEVSTMVESPAAPGKGGWPGSRGQEAEEPCSRAGDGAGALETELEGPSQPALEKDAERPRIRKENQDGPAPQEEGKGGQSRDSDQAPEDRWYEAEKVWLAQKDGFTLATVLKPDEGTADLPAGRVRLWIDADKTITEVDEEHVHRANPPELDQVEDLASLISVNESSVLNTLLQRYKAQLLHTCTGPDLIVLQPRGPSVPSAGKVPKGRRDGLPAHIGSMAQRAYWALLNQRRDQSIVALGWSGAGKTTCCEQVLEHLVGMAGSVDGRVSVEKIRATFTVLRAFGSVSMAHSRSATRFSMVMSLDFNATGRITAAQLQTMLLEKSRVARQPEGESNFLVFSQMLAGLDLDLRTELNLHQMADSSSFGMGVWSKPEDKQKAAAAFAQLQGAMEMLGISESEQRAVWRVLAAIYHLGAAGACKVGRKQFMRFEWANYAAEALGCEYEELNTATFKHHLRQIIQQMTFGPSRWGLEDEETSSGLKMTGVDCVEGMASGLYQELFAAVVSLINRSFSSHHLSMASIMVVDSPGFQNPRHQGKDRAATFEELCHNYAHERLQLLFYQRTFVSTLQRYQEEGVPVQFDLPDPSPGTTVAVVDQNPSQQVRLPAGGGAQDARGLFWVLDEEVHVEGSSDSVVLERLCAAFEKKGAGTEGSSALRTCEQPLQCEIFHQLGWDPVRYDLTGWLHRAKPNLSALDAPQVLHQSKREELRSLFQARAKLPPVCRAVAGLEGTSQQALQRSRMVRRTFASSLAAVRRKAPCSQIKLQMDALTSMIKRSRLHFIHCLVPNPVVESRSGQESPPPPQPGRDKPGAGGPLALDIPALRVQLAGFHILEALRLHRTGYADHMGLTRFRRQFQVLDAPLLKKLMSTSEGIDERKAVEELLETLDLEKKAVAVGHSQVFLKAGVISRLEKQREKLVSQSIVLFQAACKGFLSRQEFKKLKIRRLAAQCIQKNVAVFLAVKDWPWWQLLGSLQPLLSATIGTEQLRAKEEELTTLRRKLEKSEKLRNELRQNTDLLESKIADLTSDLADERFKGDVACQVLESERAERLQAFREVQELKSKHEQVQKKLGDVNKQLEEAQQKIQLNDLERNPTGGADEWQMRFDCAQMENEFLRKRLQQCEERLDSELTARKELEQKLGELQSAYDGAKKMAHQLKRKCHHLTCDLEDTCVLLENQQSRNHELEKKQKKFDLQLAQALGESVFEKGLREKVTQENTSVRWELGQLQQQLKQKEQEASQLKQQVEMLQDHKRELLGSPSLGENCVAGLKERLWKLESSALEQQKIQSQQENTIKQLEQLRQRFELEIERMKQMHQKDREDQEEELEDVRQSCQKRLHQLEMQLEQEYEEKQMVLHEKQDLEGLIGTLCDQIGHRDFDVEKRLRRDLRRTHALLSDVQLLLGTMEDGKTSVSKEELEKVHSQLEQSEAKCEEALKTQKVLTADLESMHSELENMTRNKSLVDEQLYRLQFEKADLLKRIDEDQDDLNELMQKHKDLIAQSAADIGQIQELQLQLEEAKKEKHKLQEQLQVAQMRIEYLEQSTVDRAIVSRQEAVICDLENKTEFQKVQIKRFEVLVIRLRDSLIKMGEELSQAATSESQQRESSQYYQRRLEELKADMEELVQREAEASRRCMELEKYVEELAAVRQTLQTDLETSIRRIADLQAALEEVASSDSDTESVQTAVDCGSSGRKEMDNVSILSSQPEGSLQSWLSCTLSLATDTMRTPSRQSATSSRILSPRINEEAGDTERTQSALALSRARSTNVHSKTSGDKPVSPHFVRRQKYCHFGDGEVLAVQRKSTERLEPASSPLASRSTNTSPLSREKLPSPSAALSEFVEGLRRKRAQRGQGSTLGLEDWPTLPIYQTTGASTLRRGRAGSDEGNLSLRVGAKSPLEIEGAAGGLLRSTSLKCISSDGVGGTTLLPEKSKTQFSSCESLLESRPSMGRKLSSPTTPRDMLLSPTLRPRRRCLESSVDDAGCPDLGKEPLVFQNRQFAHLMEEPLGSDPFSWKLPSLDYERKTKVDFDDFLPAIRKPQTPTSLAGSAKGGQDGSQRSSIHFETEEANRSFLSGIKTILKKSPEPKEDPAHLSDSSSSSGSIVSFKSADSIKSRPGIPRLAGDGGERTSPERREPGTGRKDDDVASIMKKYLQK

SEQ ID NO: 13371 - protein, 31 aa, Homo sapiens
LVLQTKILVGTSRPRMKPHFRCIPNLSTTQR

SEQ ID NO: 13372 - protein, 375 aa, Homo sapiens
LSRVSPGLGAEDFWLTAARNVLKLVVKSEWKSYPIQAVEEEASGDKQPKKQEKNPVLVSPEFVDEALCACEEYLSNLAHMDIDKDLEAPLYLTPEGWSLFLQRYYQVVHEGAELRHLDTQVQRCEDILQQLQAVVPQIDMEGDRNIWIVKPGAKSRGRGIMCMDHLEEMLKLVNGNPVVMKDGNSVHLCNNSIQKHLENSCHRHPLLPPDNMWSSQRFQAHLQEMGAPNAWSTIIVPGMKDAVIHALQTSQDTVQCRKASFELYGADFVFGEDFQPWLIEINASPTMAPSTAVTARLCAGVQADTLRVVIDRMLDRNCDTGAFELIYKQPVTTSPASTPRPSCLLPMYSDTRARSSDDSTASWWALRPCRPQARP

SEQ ID NO: 13373 - protein, 478 aa, Homo sapiens
VTGPSLCAGDKQPKKQEKNPVLVSPEFVDEALCACEEYLSNLAHMDIDKDLEAPLYLTPEGWSLFLQRYYQVVHEGAELRHLDTQVQRCEDILQQLQAVVPQIDMEGDRNIWIVKPGAKSRGRGIMCMDHLEEMLKLVNGNPVVMKDGKWVVQKYIERPLLIFGTKFDLRQWFLVTDWNPLTVWFYRDSYIRFSTQPFSLKNLDNSVHLCNNSIQKHLENSCHRHPLLPPDNMWSSQRFQAHLQEMGAPNAWSTIIVPGMKDAVIHALQTSQDTVQCRKASFELYGADFVFGEDFQPWLIEINASPTMAPSTAVTARLCAGVQADTLRVVIDRMLDRNCDTGAFELIYKQPAVEVPQYVGIRLLVEGFTIKKPMAMCHRRMGVRPAVPLLTQRGSGEARHHFPSLHTKAQLPSPHVLRHQGQVLRRQHSKLVGTKALSTTGKALRTLPTAKVFISLPPNLDFKVAPSILKPRKVGLDL

SEQ ID NO: 13374 - protein, 370 aa, Homo sapiens
VTGPSLCAGDKQPKKQEKNPVLVSPEFVDEALCACEEYLSNLAHMDIDKDLEAPLYLTPEGWSLFLQRYYQVVHEGAELRHLDTQVQRCEDILQQLQAVVPQIDMEGDRNIWIVKPGAKSRGRGIMCMDHLEEMLKLVNGNPVVMKDGKWVVQKYIERPLLIFGTKFDLRQWFLVTDWNPLTVWFYRDSYIRFSTQPFSLKNLDNSVHLCNNSIQKHLENSCHRHPLLPPDNMWSSQRFQAHLQEMGAPNAWSTIIVPGMKDAVIHALQTSQDTVQCRKASFELYGADFVFGEDFQPWLIEINASPTMAPSTAVTARLCAGVQADTLRVVIDRMLDRNCDTGAFELIYKQGPAPNMQVSPERNAPLCPAP

SEQ ID NO: 13375 - protein, 10 aa, Homo sapiens
LSFRGAVAMK

SEQ ID NO: 13376 - protein, 41 aa, Homo sapiens
MMKPKGQTEHDEVKQGKDGGKGKGCLRRREKHSYRISYLGK

SEQ ID NO: 13377 - protein, 33 aa, Homo sapiens
MLKPLKVVLETLKAPWTGFMISKSLLWSQGTSS

SEQ ID NO: 13378 - protein, 54 aa, Homo sapiens
MTQEDPFSPRNYSMLKPLKVVLETLKAPWTGFMISKSLLWSQGNLDLRNAEGGL

SEQ ID NO: 13379 - protein, 32 aa, Homo sapiens
VTELRLRDHLVLFVSRKPEERAGGGDLHEKPG

SEQ ID NO: 13380 - protein, 115 aa, Homo sapiens
LHLAAVQQWRSEGRTAVWLHIPILQSRFIAPAASLGFCFHHAESDSSTLTLWLREGPSRLPGYASHQVGVAGAVFDESTRKILVVQDRNKLKNMWKFPGGLSEPEEDIGVYLLYF

SEQ ID NO: 13381 - protein, 23 aa, Homo sapiens
LRSSEHVRRGWLWQMQLQMPSPE

SEQ ID NO: 13382 - protein, 8 aa, Homo sapiens
LPSKHLYT

SEQ ID NO: 13383 - protein, 32 aa, Homo sapiens
MQDFFTPPLCDFKSLWHLFLQRHLNVSASLLA

SEQ ID NO: 13384 - protein, 39 aa, Homo sapiens
VSQRLSDPARERTELEELGVGPSQFPQGRPLPGPRRNHG

SEQ ID NO: 13385 - protein, 67 aa, Homo sapiens
VPACVPACPRGCVFAGVCCVHRCFCGRVTRSRSGSSFGGRAAPCRKLTHHYSLQRSEALPTHLPLRA

SEQ ID NO: 13386 - protein, 56 aa, Homo sapiens
LLWSPVGRGAAILVARGVSRIRRVSLPSRWRGLCPCSVTAALGKRSAPKTACPRES

SEQ ID NO: 13387 - protein, 89 aa, Homo sapiens
LLWSPVGRGAAILVARGVSRIRRVSLPSRWRGLCPCSVTAALGKRSAPKTIKRVLMSKKLAESEGKGWYSCTKWQSMKLLWLQLRLPIL

SEQ ID NO: 13388 - protein, 132 aa, Homo sapiens
LLWSPVGRGAAILVARGVSRIRRVSLPSRWRGLCPCSVTAALGKRSAPKTKGPRGPAAGPSPPAVLWGRALWPHFSHSEEEPRRARQGFETGNAWMWCPGRRWKRALRGKAGLPGSHVRATPRTPFCFRATP

SEQ ID NO: 13389 - protein, 37 aa, Homo sapiens
VLQRHYHPHWHFWWDRSGARHCGHNRAGSGYLLQGRV

SEQ ID NO: 13390 - protein, 56 aa, Homo sapiens
LAHPSGLRRSLASQPERWPPRRPAHAAPALPGSGLKDGDDRNDWCVAETWGTGCRR

SEQ ID NO: 13391 - protein, 15 aa, Homo sapiens
LPSQHLAKGYKINAI

SEQ ID NO: 13392 - protein, 64 aa, Homo sapiens
LRGSKRKCSGRALCTGTYNTRARTRLSRRGEAILPIWGHFPAAARTRFSERLSLQLLRRWIFFG

SEQ ID NO: 13393 - protein, 13 aa, Homo sapiens
LERQRRPGTARGD

SEQ ID NO: 13394 - protein, 14 aa, Homo sapiens
LELLQSRARTRAAP

SEQ ID NO: 13395 - protein, 15 aa, Homo sapiens
LELLQSTGARTRAAP

SEQ ID NO: 13396 - protein, 135 aa, Homo sapiens
LDGPCTLEGTMDFWLWPLYFLPVSGALRILPEVKVEGELGGSVTIKCPLPEMHVRIYLCREMAGSGTCGTVVSTTNFIKAEYKGRVTLKQYPRKNLFLVENTSHHGKSSQCLRLQNGFICPICSRCLHMPVLPNS

SEQ ID NO: 13397 - protein, 32 aa, Homo sapiens
LCFALKYQAPSPQMSFHFKRDPFACGMSSSMG

SEQ ID NO: 13398 - protein, 45 aa, Homo sapiens
LRKDYCIELLVSSYSTPKISFCYSKDQMLRLPFQVVLRIRVVVIH

SEQ ID NO: 13399 - protein, 92 aa, Homo sapiens
LAALPAPAGPAPAAEAQSQPSPPRSLPSSPRPVLLFPSEVAVGLALSPAPFSSLSLPLSFAPKSASQPRRVVTEPLRLFLARVLRPRLPRHE

SEQ ID NO: 13400 - protein, 23 aa, Homo sapiens
MLNCGRGNKTVLSAEAHYGCNWR

SEQ ID NO: 13401 - protein, 56 aa, Homo sapiens
VANRHFSYFLKNSNLFATFISVDFFFLVCVVVVFKCGGQKEIPSQAQSNPSPKRLF

SEQ ID NO: 13402 - protein, 83 aa, Homo sapiens
LEGLQPAVPTRAAEEPPRPMPVCVPWLSGHHPGLLPSAEGPGPAGGDLHPSMGPVGGLVHCHGCLCEALLWWPGAEDEHRVGQ

SEQ ID NO: 13403 - protein, 87 aa, Homo sapiens
VVGVPGGRLWAGSQDPPFLGGDRACGAAPRNVRRKRERALAPSASCLRCWRLPIRWFYPQTPGHRESRRRTTEIQLAPPSGCSHFLI

SEQ ID NO: 13404 - protein, 46 aa, Homo sapiens
LKRLGLSLLVHASSASGQQVYKGGKRLLLDFFFSFFYKSKHLKMET

SEQ ID NO: 13405 - protein, 147 aa, Homo sapiens
VPPASRSDMAQNLKDLAGRLPAGPRGMGTALKLLLGAGAVAYGVRESVFTVEGGHRAIFFNRIGGVQQDTILAEGLHFRIVGAARTSSSIQTVVFQRDKRISPCLWSWRGAGQKTRGSLGSSTPLSMTFGPDLEKSPPLQAPKTYRW

SEQ ID NO: 13406 - protein, 14 aa, Homo sapiens
LIWKMWKLKPREKV

SEQ ID NO: 13407 - protein, 34 aa, Homo sapiens
LAKLTRARGGKDRRGHVRSCVQSQKQVDGRGGGA

SEQ ID NO: 13408 - protein, 45 aa, Homo sapiens
LLFAFHHLQDVHKNHISWNSTKGVAVYEIGLQVKRKEAVFPMASV

SEQ ID NO: 13409 - protein, 7 aa, Homo sapiens
LTLPCTS

SEQ ID NO: 13410 - protein, 179 aa, Homo sapiens
MELQGAQEDLGISLSSPRRNHETRPGSKAKGRSSICLQASVWMAGGKLRLRASEHLTQGHQQELRDWNLGEDASLLFSKSPFGAGKLIQAPAHVFRQCWVQGNAWISCITKFDSKRSPEVASSPSYLTVPRRSPLPVFLRPSDRCVCGGCYLGKSTRRRACQSLLSDPLGVTFPTQTRP

SEQ ID NO: 13411 - protein, 36 aa, Homo sapiens
VLSPCLMYLSREFSYPTSTSWSDLNSSISCTQSLLR

SEQ ID NO: 13412 - protein, 14 aa, Homo sapiens
MVSGDGRPKSRIRL

SEQ ID NO: 13413 - protein, 88 aa, Homo sapiens
MEQGRAGALASPNGVALLWAPVPCELPGPAAGGKLWEHEGLAGAHLRLRLHEHLYLRVEDEWSHQLQHRAPPVVPAGFSALRSPHVYP

SEQ ID NO: 13414 - protein, 92 aa, Homo sapiens
VRVESLQQCGQPHLTLLIHQQAEELKLATQLTGPVMPVRNVYKKEKARVITEEEKNFKAFASLRMARANARLFGIRAKRAKEAAEQDVEKKK

SEQ ID NO: 13415 - protein, 62 aa, Homo sapiens
LGQSSSQRRPERFGDAGGSDGRELGAAAAEARGRKLAAHGAPGAAPARPCPAALCRGCRSGI

SEQ ID NO: 13416 - protein, 48 aa, Homo sapiens
MSASQDSRSRDNGPDGMEPEGVIEVRLEKWNSVLPHYNFQPYRVRVAS

SEQ ID NO: 13417 - protein, 22 aa, Homo sapiens
LSLISGFPRMRRQPGSGSGREV

SEQ ID NO: 13418 - protein, 13 aa, Homo sapiens
LQWKGNVSSVVWF

SEQ ID NO: 13419 - protein, 48 aa, Homo sapiens
LFWFGLGFANECPIAPGLLVEKPLKSQSIQDGKPRRQTRIKCREGQYE

SEQ ID NO: 13420 - protein, 46 aa, Homo sapiens
LHSHRRCVSDSGPSQPGQHLPLKSQSIQDGKPRRQTRIKCREGQYE

SEQ ID NO: 13421 - protein, 51 aa, Homo sapiens
LGTPVRLWLETGELWFLVPFSNCNNPLKSQSIQDGKPRRQTRIKCREGQYE

SEQ ID NO: 13422 - protein, 34 aa, Homo sapiens
LSGVHLLPVLSLPGAPAAVAVESPWKCRKRHSAS

SEQ ID NO: 13423 - protein, 80 aa, Homo sapiens
LICEAGGGGQTWEYVQPFLGWNQGAWVGVAAGNMRPLSCFVQKPLEDQTQLLTLVCQLYQGKKPDVCPSSTSSLRSVCFK

SEQ ID NO: 13424 - protein, 81 aa, Homo sapiens
LLWPRLKAAASSCPLLRPSAHTSRCRLQSAFRCESCRFCKSQARPPCRRSALSPLSPSVAKSRPLDLDTPSPRLHDLPGPS

SEQ ID NO: 13425 - protein, 34 aa, Homo sapiens
LTPLTDPQSQSQRCEETSTLPAWAPASARTTLGR

SEQ ID NO: 13426 - protein, 10 aa, Homo sapiens
VVVWSRLGNR

SEQ ID NO: 13427 - protein, 48 aa, Homo sapiens
LLAAPRLPARRHLVLGFHCSRWAGRFSVIAAGGGGGVTSGQPRNPTIL

SEQ ID NO: 13428 - protein, 70 aa, Homo sapiens
VSRGESGRRRCRFHHSSIKACQAVCSSHGKSCSVEPHKISKKHHSPILTSFTSLCLKKTGLKQGLTPSCF

SEQ ID NO: 13429 - protein, 35 aa, Homo sapiens
LPSEVWPPAVSRGCRETEEPLHHHAERGPSAREGQ

SEQ ID NO: 13430 - protein, 124 aa, Homo sapiens
MPCSLWPQPADGLVWSVQITLFTIPRRKKKCIRYLPGEGRCPSPVPSDDSALGCPGSPAPQDSPSYHLLPRFPTELLTSPAEPAPTSPGLSTALSLPTPGPPQAPRSTLQSTQVQQQESQRQVA

SEQ ID NO: 13431 - protein, 120 aa, Homo sapiens
LVVVYDYEFTLCLQITLFTIPRRKKKCIRYLPGEGRCPSPVPSDDSALGCPGSPAPQDSPSYHLLPRFPTELLTSPAEPAPTSPGLSTALSLPTPGPPQAPRSTLQSTQVQQQESQRQVA

SEQ ID NO: 13432 - protein, 10 aa, Homo sapiens
LFTDNSLHYS

SEQ ID NO: 13433 - protein, 8 aa, Homo sapiens
MELLCAHS

SEQ ID NO: 13434 - protein, 16 aa, Homo sapiens
LEKRTFGVKNDNQHQP

SEQ ID NO: 13435 - protein, 11 aa, Homo sapiens
LRGCQVPGLHP

SEQ ID NO: 13436 - protein, 26 aa, Homo sapiens
LNSMGCVSVRPLKFSSSAGISLSSWA

SEQ ID NO: 13437 - protein, 59 aa, Homo sapiens
MAQFPQTWTGRASHLHLLKRDCCRDSSVAKIAVETAATARKSSPPASSPQPEAPTSSWR

SEQ ID NO: 13438 - protein, 56 aa, Homo sapiens
MPFLQPSFSITTLLRALQPVVLRLTAMPSSPATSERPFDATATGLAHFPHSQFLFL

SEQ ID NO: 13439 - protein, 34 aa, Homo sapiens
LSLMFKQSSHGTRVPAIRQCFYSSNPKMLELEGT

SEQ ID NO: 13440 - protein, 33 aa, Homo sapiens
LNPKANHEKIAQIMFETFNIPAMYMAIWVMLSV

SEQ ID NO: 13441 - protein, 31 aa, Homo sapiens
LRMDFGGVLILIHRYNFPNLNMDVHKDYKRV

SEQ ID NO: 13442 - protein, 51 aa, Homo sapiens
LMSRALSGHSQAGQGLHTICQDDRGDQEDQQKSSSSSRALGVSPTSLGPSL

SEQ ID NO: 13443 - protein, 21 aa, Homo sapiens
LAALKARFGLSAAEDITPRFR

SEQ ID NO: 13444 - protein, 184 aa, Homo sapiens
LRRGRSRETNEEPPPPTVQVQGPGPQREEKQKTKMAKFVIRPATAADCSDILRLIKELAKYEYMEEQVILTEKGNSTVAGRGTSVRCLSPSPRPLPPLLPLLADLLEDGFGEHPFYHCLVAEVPKEHWTPEGNPSPFPEARETKCYVRSSVGCVEPLTTQAEVTENLDRKNSQQVFKLLRKKKN

SEQ ID NO: 13445 - protein, 154 aa, Homo sapiens
LRRGRSRETNEEPPPPTVQVQGPGPQREEKQKTKMAKFVIRPATAADCSDILRLIKELAKYEYMEEQVILTEKDLLEDGFGEHPFYHCLVAEVPKEHWTPEGNPSPFPEARETKCYVRSSVGCVEPLTTQAEVTENLDRKNSQQVFKLLRKKKN

SEQ ID NO: 13446 - protein, 48 aa, Homo sapiens
VRVEGRRGGGAGDRGMKDTDGKRDSDGTAGSKDEWSPPFGCCGLQART

SEQ ID NO: 13447 - protein, 51 aa, Homo sapiens
VPPPQPPGDLQAAISKRCSLLGRGPGGEGPALPRRRPLAASPGLRAMPRAV

SEQ ID NO: 13448 - protein, 108 aa, Homo sapiens
VASATCLIVPRSSPNPRCGVLPREAAKAVHPARDPLCPAPAPPSGWNFPLTARLKLRIVGSLAGCRTEPRPQYPIHALCLCQGGNGGFLCSTAHWAEDASDWSGYLEE

SEQ ID NO: 13449 - protein, 38 aa, Homo sapiens
LAAVTGGANPQRLPRGAAPWSPPCRWPCARCSSCCGCA

SEQ ID NO: 13450 - protein, 96 aa, Homo sapiens
LQILFSFHLLSNCPELAPVAPGLVFRECPESLVSSRPREESPAAQALLTAAESSGTHAPAGGSRRAAAAAKNFPGWEDRRQVAESRSQLLQAFPAS

SEQ ID NO: 13451 - protein, 133 aa, Homo sapiens
MEKKKEDFVLQNEEASAKYCQAELKRLSELLTESISRGTFFVPGGHNIYLEAKKKIEQDYTLVPRKGVKVSDIDRAWTLEEAPGRWRGKVKVHSYRERKKREKAVQPNSEEKRGGKGLDFHIGTTFFPVLKDL

SEQ ID NO: 13452 - protein, 46 aa, Homo sapiens
MVVTRSARAKASIQAASAESSGQKVFLELCFLQKKLQEPEEVRLNL

SEQ ID NO: 13453 - protein, 62 aa, Homo sapiens
VPRKVEVRAARPRGARPRGRADKEGFERFAGKGISYNLQACVFLPCWPWHPRSLCPPITAMG

SEQ ID NO: 13454 - protein, 27 aa, Homo sapiens
LESIAYLSPQHGGPKAAGKPGVARRAW

SEQ ID NO: 13455 - protein, 29 aa, Homo sapiens
LRSFVLLQLFEGDPDARWLSSLRNMVLCF

SEQ ID NO: 13456 - protein, 59 aa, Homo sapiens
LRARSRQASLRVSLANSVKGIGAVRHQADPLCSTNPSPAAAAAAARAEEQPQQPPPVAE

SEQ ID NO: 13457 - protein, 48 aa, Homo sapiens
LQGLGFPHDIAERHSFPLPLQTTSKQGHNWNIIWRKCHGSSASTAYKN

SEQ ID NO: 13458 - protein, 39 aa, Homo sapiens
VDGNPRLALQRPGGPWLNDATCSCPTLRPWCPCSTCHRS

SEQ ID NO: 13459 - protein, 51 aa, Homo sapiens
LVHSLVRVLLQGRSADDSKVGPEVGGPWLNDATCSCPTLRPWCPCSTCHRS

SEQ ID NO: 13460 - protein, 18 aa, Homo sapiens
LGDIRSATVLHRGRTKRI

SEQ ID NO: 13461 - protein, 23 aa, Homo sapiens
MLTIPITDIRSATVLHRGRTKRI

SEQ ID NO: 13462 - protein, 38 aa, Homo sapiens
LRHERVTLGLQRGAESRTRRVLPAAVWTTRGHRQKWAL

SEQ ID NO: 13463 - protein, 27 aa, Homo sapiens
LETQWGFSRVLPAAVWTTRGHRQKWAL

SEQ ID NO: 13464 - protein, 22 aa, Homo sapiens
VFFRVLPAAVWTTRGHRQKWAL

SEQ ID NO: 13465 - protein, 88 aa, Homo sapiens
LGLKQPESYGKGRAWLARGIFQVLKRQAYGACDPSRRTKWDLKIHSTSAHGGPGPAPARGHTADWAAGMPGLCWRPLWLAFTSVCLQE

SEQ ID NO: 13466 - protein, 139 aa, Homo sapiens
MRTWPVRKGRGEPRRGAGGGRYSEFERRSSASPPAPGELLGSRESPADGFCPGLKQPESYGKGRAWLARGIFQVLKRQAYGACDPSRRTKWDLKIHSTSAHGGPGPAPARGHTADWAAGMPGLCWRPLWLAFTSVCLQE

SEQ ID NO: 13467 - protein, 124 aa, Homo sapiens
MRTWPVRKGRGEPRRGAGGLYLYSTGSRESPADGFCPGLKQPESYGKGRAWLARGIFQVLKRQAYGACDPSRRTKWDLKIHSTSAHGGPGPAPARGHTADWAAGMPGLCWRPLWLAFTSVCLQE

SEQ ID NO: 13468 - protein, 48 aa, Homo sapiens
LSEVGVSVGIVIRPRQWIRRPEGDPFHGARLRWILSGPNSWLRSWRWR

SEQ ID NO: 13469 - protein, 16 aa, Homo sapiens
LGKLPTNCLPHCFAVV

SEQ ID NO: 13470 - protein, 24 aa, Homo sapiens
MYKLRRKLEDRNKIENENIVKSFR

SEQ ID NO: 13471 - protein, 65 aa, Homo sapiens
LASRRREDGERRRSGHREAPRPLALRHIARRRTRHTASAALRGCGGRARPGGALLHARHPPGPRG

SEQ ID NO: 13472 - protein, 132 aa, Homo sapiens
VQYLSRSGVEAGRHPLLTSSAAGLKIRHGPELEGLGGTAARRAPGHGHGPEAVAGGRRRGLRCARICVHRGRRAQSHLLQSDRWSAAGHYPGRGPSLQIATSQNRIYLTADNLVLNLQDESFTSDSLIKGKK

SEQ ID NO: 13473 - protein, 14 aa, Homo sapiens
LCPTLETAARTLEP

SEQ ID NO: 13474 - protein, 30 aa, Homo sapiens
LFQVGQIDKSERWKRSERARTELCTKPETS

SEQ ID NO: 13475 - protein, 11 aa, Homo sapiens
LSPRDSKSSLK

SEQ ID NO: 13476 - protein, 14 aa, Homo sapiens
LAGETSCMCWFSWR

SEQ ID NO: 13477 - protein, 49 aa, Homo sapiens
VGAQRAPFFVLGQRGKNIASVGDAVQLPKGVRNGNAEAWEKGSGGGRRG

SEQ ID NO: 13478 - protein, 47 aa, Homo sapiens
LAGGQISRVGQRGKNIASVGDAVQLPKGVRNGNAEAWEKGSGGGRRG

SEQ ID NO: 13479 - protein, 55 aa, Homo sapiens
LSAESCNFYDLQNRCLFSYSRVCSNRHGLIRKYGLNMCRQCFRQYAKDIGFIKLD

SEQ ID NO: 13480 - protein, 29 aa, Homo sapiens
MAIFVTSELFSVSRFMCSSSSCLSPTIPV

SEQ ID NO: 13481 - protein, 75 aa, Homo sapiens
LNFINWALRAPARSQKGEGRRELACGTPDRRGCAFPAPGPSRHTRSSPLARANAQDDHHPRVCHHLRLERSFMQG

SEQ ID NO: 13482 - protein, 36 aa, Homo sapiens
LLTESIFSFQDFGSLSNLQVTQPTVGMNFKTPRGPV

SEQ ID NO: 13483 - protein, 38 aa, Homo sapiens
LRVVVALGAVWSRSGPGLTAAWSVRHEEKPFFELLVVI

SEQ ID NO: 13484 - protein, 29 aa, Homo sapiens
LRVVVALGAVWSRSGPGLTAAWSVRHEEK

SEQ ID NO: 13485 - protein, 65 aa, Homo sapiens
LSSTDLRRSSEDVQRASPSLSWGPHSPTSGREKWSPAHPRPFLPSCDAAPSRHATAPCGHWPPTL

SEQ ID NO: 13486 - protein, 63 aa, Homo sapiens
LRLQCGVISPRFDVQLKDLEKWQNNLLPSRQFGFIVLTTSAGIMDHEEARRKHTGGKILGFFF

SEQ ID NO: 13487 - protein, 60 aa, Homo sapiens
MCGVISPRFDVQLKDLEKWQNNLLPSRQFGFIVLTTSAGIMDHEEARRKHTGGKILGFFF

SEQ ID NO: 13488 - protein, 72 aa, Homo sapiens
LPSTQAWELEVAAQGLAPCRAGLLAGWTAAPLEGQKREGLVLGSLAKDLFLLTTKGLRLDFQGRISSEAPAR

SEQ ID NO: 13489 - protein, 62 aa, Homo sapiens
LALEYRVRRGASTTLRPRTLRYFRRSLAKDLFLLTTKGLRLDFQGRISSEAPVSGQGLPPHQ

SEQ ID NO: 13490 - protein, 35 aa, Homo sapiens
LRINRTSVALRLAGTGRFVAKTPGHPGSWEMNCLG

SEQ ID NO: 13491 - protein, 100 aa, Homo sapiens
VQGPLAASSGPSSLPASPTPLGPEPPGSGGGCAEVRRPEPGSCRGSGWQQPCYRLDGAQDRAPRRGLGMGGGALSVLPVGACVWGAPLLWGLLRGVCGGV

SEQ ID NO: 13492 - protein, 19 aa, Homo sapiens
MVVLEASLRGRPEATVPPR

SEQ ID NO: 13493 - protein, 25 aa, Homo sapiens
LATVSPVFSLAGAWAGGNSRPKEAP

SEQ ID NO: 13494 - protein, 42 aa, Homo sapiens
MPAVSAEERRWRLTDQSRWSWRRGRQAADSANIICPRLKNSR

SEQ ID NO: 13495 - protein, 28 aa, Homo sapiens
LPGNGSLVLFRPFPRLLLAVSVSRVIRG

SEQ ID NO: 13496 - protein, 34 aa, Homo sapiens
LPAQLLLRCASLRSPSVLFCGKAFPSVPTRKATA

SEQ ID NO: 13497 - protein, 59 aa, Homo sapiens
VQPLKSQSIQDGKPRRQTRIKCREGQYGHRPEQQHPAEKSVSGIFCYAEEMESSQVTDS

SEQ ID NO: 13498 - protein, 11 aa, Homo sapiens
VCGVSRSHVPG

SEQ ID NO: 13499 - protein, 50 aa, Homo sapiens
LGTGAPGWPCSRHSPVFQMTICRARAVWKWTTACRRWSSGCSYRKTSWRS

SEQ ID NO: 13500 - protein, 68 aa, Homo sapiens
VLTRKFSSQLKVLARGARPLPVCTRAARGLRRVTETLRLCSQDDRVGDSSTSGGRDPRHQALWEVEHR

SEQ ID NO: 13501 - protein, 29 aa, Homo sapiens
LSQDDRVGDSSTSGGRDPRHQALWEVEHR

SEQ ID NO: 13502 - protein, 57 aa, Homo sapiens
VSRATTAREQRGETHGAPYAPAPPPPPPRQPKRSERTRHRGARVQLATLSPPARSPR

SEQ ID NO: 13503 - protein, 73 aa, Homo sapiens
LRRGSAAPGGSRLADPRPSRGDPARSGEAAPPRPRLALPDPARRKVSFAVCHPRELSRLTFALCVYNLDSLGT

SEQ ID NO: 13504 - protein, 77 aa, Homo sapiens
LSRRAHALPPPRRNASVTHSLSPDETGVQGTGSSSHSGLCQRCKIWCRCPSLNASRCRPFSRCCGRYNGAKGKNSDY

SEQ ID NO: 13505 - protein, 59 aa, Homo sapiens
LSRRAHALPPPRRNASVTHSLSPDETGVQGTGSSSHSGLCQRCKIWCRCPSLNASREEQ

SEQ ID NO: 13506 - protein, 115 aa, Homo sapiens
MITIFIGTWNMGNAPPPKKITSWFLSKGQGKTRDDSADYIPHDIYVIGTQEDPLSEKEWLEILKHSLQEITSVTFKTVSSWLHAGSPSTRSGTSASWCWPSLSTRTGSATSVLTT

SEQ ID NO: 13507 - protein, 25 aa, Homo sapiens
LNETKTEPEPVAGSGRGSAESRRWQ

SEQ ID NO: 13508 - protein, 93 aa, Homo sapiens
VFGLKRRLGVRSSRTASVLLGSREAVCRGHGHRSSSALNAPNLPPARKPQDPLMCVPTSVVSRPHRGAPGSPHWASVSSATFPGRNNVPRLFR

SEQ ID NO: 13509 - protein, 97 aa, Homo sapiens
LGKDLATGVLSQECTKFKVSSCRECIESGPGCTWCQKLGAALGPPAHATAASSPRRRSRVAPVCPRTEQGGQAPGGNYLGQAGFFPSPFWRFSAPLK

SEQ ID NO: 13510 - protein, 27 aa, Homo sapiens
VGGCGPFSRIRETEGWASVSKEGRDLG

SEQ ID NO: 13511 - protein, 513 aa, Homo sapiens
LSRVSPGLGAEDFWLTAARNVLKLVVKSEWKSYPIQAVEEEASGDKQPKKQEKNPVLVSPEFVDEALCACEEYLSNLAHMDIDKDLEAPLYLTPEGWSLFLQRYYQVVHEGAELRHLDTQVQRCEDILQQLQAVVPQIDMEGDRNIWIVKPGAKSRGRGIMCMDHLEEMLKLVNGNPVVMKDGKWVVQKYIERPLLIFGTKFDLRQWFLVTDWNPLTVWFYRDSYIRFSTQPFSLKNLDNSVHLCNNSIQKHLENSCHRHPLLPPDNMWSSQRFQAHLQEMGAPNAWSTIIVPGMKDAVIHALQTSQDTVQCRKASFELYGADFVFGEDFQPWLIEINASPTMAPSTAVTARLCAGVQADTLRVVIDRMLDRNCDTGAFELIYKQPAVEVPQYVGIRLLVEGFTIKKPMAMCHRRMGVRPAVPLLTQRGSGEARHHFPSLHTKAQLPSPHVLRHQGQVLRRQHSKLVGTKALSTTGKALRTLPTAKVFISLPPNLDFKVAPSILKPRKVGLDL

SEQ ID NO: 13512 - protein, 87 aa, Homo sapiens
VTIESVLQRQRGRKFSSRSRAAAGAQIGSVGRLAVSLRYQVRVRGSGVLGRHNGVSSRPASGRHRRQRLSAPGARRHALPDECDSQV

SEQ ID NO: 13513 - protein, 97 aa, Homo sapiens
MGAGDLPTPRHPALRSSVKLLCPQACPCQSTMGVPLKVSPTGATRSARLGPPLSAPRGPWMVKQQRSRGALCPRQLHPADPAWAVLRGGGGSPRSTQ

SEQ ID NO: 13514 - protein, 100 aa, Homo sapiens
VILRSWSPTRDVLPTSRPELKWQTISETSGGRTSRLEQAAAQKTVPSLPIGSTSQVQEPIRAWLSRDSVSESQTWMAAIGTQRSQKPQIVFSLDEQLKAT

SEQ ID NO: 13515 - protein, 125 aa, Homo sapiens
LALFCRPLSLPSVLARSLLSFPPSVFLRTLFGDCGARDRQGGGGRGHLSWPPLNLWRQRWSQPLYRAPGVGWAAAGLRARARGGCRDGSWLWRSGHPCCWARVPYTCGVGSNGAGRPEAGATPAA

SEQ ID NO: 13516 - protein, 65 aa, Homo sapiens [sequence omitted]

SEQ ID NO: 13517 - protein, 43 aa, Homo sapiens
VAAARPGASGRRSGFGSVTRRPEGAGPAFSARAPGPCRSRFAS

SEQ ID NO: 13518 - protein, 42 aa, Homo sapiens
LLRARGRGRSRSRSRRAVAALGPRNPARCPRFASEEPRKIVQ

SEQ ID NO: 13519 - protein, 38 aa, Homo sapiens
LLAAWSVILRKQKHHHLHTPYRSHTLTLTFFAPVFQKK

SEQ ID NO: 13520 - protein, 48 aa, Homo sapiens
LLQQRPGPFREADGLLGRLRLGWESGRRGARSSCAPGEGAPQSPGVEN

SEQ ID NO: 13521 - protein, 20 aa, Homo sapiens
MVRRLECAAARRRELQNGRR

SEQ ID NO: 13522 - protein, 16 aa, Homo sapiens
LVSHSHLSIPSMRRPK

SEQ ID NO: 13523 - protein, 38 aa, Homo sapiens
LENDNSRYNFWHGFFFTSSRFWRKWLCSKWRLGRCRTG

SEQ ID NO: 13524 - protein, 89 aa, Homo sapiens
VGAELQSRGRPPPRSWGCSSGLEAQRRGAQARVCQRDVLSRPSGHSPRLSASRPSDLPSRKLGSQKIGNSYQHGKPIENSGDWLLVSST

SEQ ID NO: 13525 - protein, 101 aa, Homo sapiens
LTPGVTSPRPAAAITESRALEPQRAEEEAQRPTAEYCGESQRASASLNSRQKYTRNRRRRVRVGPCAGGGAGAARSGSRLGRVASWTRRCSPRSWTSGSSS

SEQ ID NO: 13526 - protein, 21 aa, Homo sapiens
LELFSVTSIYWRSESQGNKDE

SEQ ID NO: 13527 - protein, 38 aa, Homo sapiens
LALWSAGSLAGSSDRRLRVQRRLTCPGFRIYTDVGRCL

SEQ ID NO: 13528 - protein, 77 aa, Homo sapiens
VESGDDVQVGGPGATIGGHPAARGPCGAWDERRGSFRGNRARCRARDARLAHLDPGQLGIEFVPGLRRPVLLSGRSL

SEQ ID NO: 13529 - protein, 25 aa, Homo sapiens
LAVGRWVPVRRRPRRRRHSWSSSVG

SEQ ID NO: 13530 - protein, 73 aa, Homo sapiens
LNILLNSPRPMDGCSPLSVSPDVLKTNRQKKEVANGAVESKCDCQEESSKAKKPKHVALPEARHTHGKPRGNE

SEQ ID NO: 13531 - protein, 100 aa, Homo sapiens
VRLSCPISLGCPCFVLWTTAQQCPALCLGLGPSCTCCLDPRPAWAWALVLPMTPPERLFLPRVCGTTLHLLLLGLLLVLLPGAQVRQQENGGCWGGSAKP

SEQ ID NO: 13532 - protein, 121 aa, Homo sapiens
MSSPTQGPALKARAPSPRGLKTGTPFSTNSVLGGWGPSRDHSATGVGVAAGGEETRKLRNPSGWRGSLCGWDGDAGGGAGPLLPCPDPGSPREPGVGGRCGGWPSRSGSGQSSKGARGAGR

SEQ ID NO: 13533 - protein, 10 aa, Homo sapiens
LKKNKYGFGF

SEQ ID NO: 13534 - protein, 101 aa, Homo sapiens
LGRAGRRAAGRERLPRKTPGRTVWLAALPGRGGRRWRAPRPSLSFLSPHDGLHSPEPGGARTWRGELPPRPGTQTPPSQSPPPQSILGTGNGLRILQCTCN

SEQ ID NO: 13535 - protein, 33 aa, Homo sapiens
MGPGEEPVWDRPIPISCHSVPPGHRGLPSPPFW

SEQ ID NO: 13536 - protein, 64 aa, Homo sapiens
LGSVEVVGVTSPSPAPVPASRCPSRSSHALRPRPACQRCSPPQLQHLGPAFHCFDVANLLAASV

SEQ ID NO: 13537 - protein, 29 aa, Homo sapiens
LPPSRPAASACCCHRLLIFCPANRPAPLQ

SEQ ID NO: 13538 - protein, 95 aa, Homo sapiens
LGLCWRRGRKRDRGLHSSVTFLKFPNSKTSEAVAPFSILQRKKTKQNKKNPSPLPGSFCLKAALLKLIFSQERDVLSGEEKYSTHHERSSSDQRR

SEQ ID NO: 13539 - protein, 35 aa, Homo sapiens
LRIFGPHAPAPDSPLFALAEEQVGQEARAQQPCVC

SEQ ID NO: 13540 - protein, 41 aa, Homo sapiens
LERSLASASARERKAETARLARGEERGRVWARGTTGCPRAR

SEQ ID NO: 13541 - protein, 43 aa, Homo sapiens
LQAAGKDGGHSAALPARWPGYPSADPRDTLTPRRRSGRAKTQR

SEQ ID NO: 13542 - protein, 114 aa, Homo sapiens
LRCGRPGKGDPERIGGFASGPALPLIPQPAVRNPCRIHETLPIAAGGHFALELTTPEQGRDSPDAGRLFCPFGDTSPPLPGPASLKGSPCSCLDAGFFSGSGKPAASRDDAPQR

SEQ ID NO: 13543 - protein, 113 aa, Homo sapiens
LRCGRPGKGDPERIGGFASGPALPLIPQPAVRNPCRIHETLPIAAGGHFALELTTPEQGRDSPDAGRLFCPFGDTSPPLPGPASLKGSPCSCLDAGFFSGSGKPASRDDAPQR

SEQ ID NO: 13544 - protein, 24 aa, Homo sapiens
MDPERRKVLPGNRRVKTEPQKRHT

SEQ ID NO: 13545 - protein, 38 aa, Homo sapiens
VFLRGLPFVRFQPQEFMVAFLNEQQNASTSSRKHKFSC

SEQ ID NO: 13546 - protein, 90 aa, Homo sapiens
VPRERANAQPGERSLLPPAPHPSSSCSSSAPHTQTRSHPLPHSHTQTQARTQAPHTHFALPRAHTPLALSPCRCSAAPQLDAPPGLTLQR

SEQ ID NO: 13547 - protein, 24 aa, Homo sapiens
LRPFLLCGAGYVVQTSRFHPQFCP

SEQ ID NO: 13548 - protein, 9 aa, Homo sapiens
LTYWGVSRV

SEQ ID NO: 13549 - protein, 11 aa, Homo sapiens
MSGRSDYRLSL

SEQ ID NO: 13550 - protein, 41 aa, Homo sapiens
LGRGGRQRGNRQTVGKKTEDHTKREQEIQISSQSAHCDSGR

SEQ ID NO: 13551 - protein, 40 aa, Homo sapiens
LGRGGRQRGNRQTVGKKTEDHTKREEIQISSQSAHCDSGR

SEQ ID NO: 13552 - protein, 12 aa, Homo sapiens
LTPSHSAFTVGS

SEQ ID NO: 13553 - protein, 25 aa, Homo sapiens
LRQAGLGIRLVPTSRPLPSFLVYPL

SEQ ID NO: 13554 - protein, 13 aa, Homo sapiens
LPVQLPLPKKQHE

SEQ ID NO: 13555 - protein, 34 aa, Homo sapiens
VDSVLACLVSSDIFHTVEQNHQPCTDVTLCRKRP

SEQ ID NO: 13556 - protein, 13 aa, Homo sapiens
MCTVVPAEGGQGS

SEQ ID NO: 13557 - protein, 61 aa, Homo sapiens
LLQQTSWLSEPPLGPAPHLSMVQAHGGRSRAQPLTLSLGAAMTQPPPEKTPAKKHVRLQER

SEQ ID NO: 13558 - protein, 26 aa, Homo sapiens
LFQQGCCAKRKTVPRRDVLMGPRPMD

SEQ ID NO: 13559 - protein, 67 aa, Homo sapiens
LRAGPPPPEPPSRRLGPPPSSRAAGRRRGRRERAGREPRAFVRAPRRMQLKLILWIEKLLELLYKVF

SEQ ID NO: 13560 - protein, 36 aa, Homo sapiens
VVCLPRLPKVLGLQVRLLSERNFYTVCLQRQSIGML

SEQ ID NO: 13561 - protein, 36 aa, Homo sapiens
MKKGFKAGCLRRGVTFLQILHAVHLCPRRTTAAHDS

SEQ ID NO: 13562 - protein, 25 aa, Homo sapiens
MSLELSPRFMLVWSSHFMTTLSTHS

SEQ ID NO: 13563 - protein, 94 aa, Homo sapiens
LLRPSKDSRVGWTLNFELLFYFLFSRTHFLPSGVGAKSVAAVINCAQLGKESQDLWGGWDQKFLSKFSGEGEGPSQKLEGSGLTEKETNVSNHF

SEQ ID NO: 13564 - protein, 103 aa, Homo sapiens [sequence omitted]

SEQ ID NO: 13565 - protein, 42 aa, Homo sapiens
VPSLPVGVMLPLLMGPPPNGVREVVLPQWAMIILKALFSSLK

SEQ ID NO: 13566 - protein, 19 aa, Homo sapiens
MIGESIVPCLWHQTLPTVR

SEQ ID NO: 13567 - protein, 171 aa, Homo sapiens [sequence omitted]

SEQ ID NO: 13568 - protein, 137 aa, Homo sapiens
LRGLPDASFLLFGFAAGHKEGEVECRSGSLRFFATLLGWGNEALSGTRSRLVGVRGSGETARALCSWSWVPEDDTEPVAATLGFRTEAKRFRVSQRPRPEVASWSLRSFSLAQFGLIPFVSAIPKSSFLKRDTGLKG

SEQ ID NO: 13569 - protein, 25 aa, Homo sapiens
LTHQMKSLLKMNRLQFIYHGYLCHE

SEQ ID NO: 13570 - protein, 125 aa, Homo sapiens
LELFLQSPLVTWVKTFGPFGSGSQDNLTMYMDLVDGIFLNQIMLQIDPRPTNQRINKHVNNDVNLRIQNLTILVRNIKTYYQRWGDDYDEEGEEADEEGEEGGDEENDPDYDPKKDQNPTECKQQ

SEQ ID NO: 13571 - protein, 25 aa, Homo sapiens
LTGPAGQGESTSLNKVSMSYLQFMW

SEQ ID NO: 13572 - protein, 94 aa, Homo sapiens
LSRRFAAAEKFSSKMDGVSSEANEENDNIERPVRRRHSSILKPPRSPLQDLRGPHLDTETPTEQSPRQFYCKHTTYSRRPDVKSICLPTQDTDL

SEQ ID NO: 13573 - protein, 35 aa, Homo sapiens
LMPPAARWPGPQCPKRVFMLFPTALMVPSDRLALL

SEQ ID NO: 13574 - protein, 47 aa, Homo sapiens
LSVCGPCIPAAAAWYLPCRLFPLSAALWDTCLEAQLPVIRVTGLMTA

SEQ ID NO: 13575 - protein, 26 aa, Homo sapiens
LSLSERGVAAPAPQNPGQKGPKSRAW

SEQ ID NO: 13576 - protein, 237 aa, Homo sapiens
LPTSPSMRLTACGSWSCVRSVRSLSPRKPWRSTASLSTSRPMSARSALLSVSSANWTCSSASWSSTSPTVAAGQSSAKAVASSSCTACSPSTEMSVAVNRPSSGKGKCCPDSEFKKHFPVGNPEILPSSLPSQAAENQTSTMEKDVRPKTRSINRFPLHSESSSKKAPRSKNKTLDPLLMSEPKPRTSSPRGDKAAYDILRRCSQCGILLPLPILNQHQEKCRWLASSKGKQVRNFS

SEQ ID NO: 13577 - protein, 79 aa, Homo sapiens
LGKELCPQALPRGGPSPPSPSSPLPGTESASTCIPRGPASRARWPHSRQAEMTVKLDFEECLKDSPRFRQTRWTQALFP

SEQ ID NO: 13578 - protein, 66 aa, Homo sapiens
LCPQALPRGGPSPPSPSSPLPGTESASTCIPRGPASRARWPHSRQAEMTVKLDFEECLKDSPRFRS

SEQ ID NO: 13579 - protein, 147 aa, Homo sapiens
LALDSWDLDFYTKRFQELQRNPSTVEAFDLAQSNSEHSRHWFFKGQLHVDGQKLVHSLFESIMSTQESSNPNNVLKFCDNSRCCALDWVGVRTRGGEAPGPGWVSVGPRKEARSMTGMSTVQSRERKSDSYGLRTPHGQAASSNSKG

SEQ ID NO: 13580 - protein, 74 aa, Homo sapiens
MKFNPFVTSDRSKNRKRHFNAPSHIRRKIMSSPLSKELRQKYNVRSMPIRKDDEVQVCIPTCSRCLDGYFTHLA

SEQ ID NO: 13581 - protein, 36 aa, Homo sapiens
VPFLQQGVSMPPSGSQAPSLPPETVWPPRLPIYLYP

SEQ ID NO: 13582 - protein, 102 aa, Homo sapiens
LLMCVVTDFFLCFVQLYRPYVGITVFVFCFYKKGKKYISWKGCFLAELWWMRGASLEKLDTDGHCVGQRQGWLAMTPNQMAGITPSSRWQWLGLCLDLLLGR

SEQ ID NO: 13583 - protein, 73 aa, Homo sapiens
LRLQRRHHVDPGSDHGREADPHGGLAVQADQGGGAEAEDPGAVPRGARPAEAVLQGQTDGGRPYPLRLRGPPE

SEQ ID NO: 13584 - protein, 111 aa, Homo sapiens
LPSGRSGSHASPRGVRATHAVSSPSPAGPRAQADKLFAATGERRHHVDPGSDHGREADPHGGLAVQADQGGGAEAEDPGAVPRGARPAEAVLQGQTDGGRPYPLRLRGPPE

SEQ ID NO: 13585 - protein, 93 aa, Homo sapiens
VGVREGRRGSRVWRGASCRGLEVERRHHVDPGSDHGREADPHGGLAVQADQGGGAEAEDPGAVPRGARPAEAVLQGQTDGGRPYPLRLRGPPE

SEQ ID NO: 13586 - protein, 61 aa, Homo sapiens
MLCKLRKIFVGTKGIPHLVTLDTHAICYPDPLIKVNDTIQIDLETGKITDFIKIDTGTCVW

SEQ ID NO: 13587 - protein, 143 aa, Homo sapiens
LRGLEPGVVMAAFRDIEEVSQGLLSLLGANRAEAQQRRLLGRHEQVVERLLETQDGAEKQLRGLQTRGMFLASGGKWNHLLSALLGEGQTLGSLLLSTLQRSSPWRRKWPRAFSMRRSRCTREAWSCSSWKLGFRRLGRRTPV

SEQ ID NO: 13588 - protein, 74 aa, Homo sapiens
VVVTWPRFMLSVSPSPKPWWPITRNVNVDEASKKEIKDILIQYDRTLLVADPRRCESKKFGGPGARARYQKSYR

SEQ ID NO: 13589 - protein, 36 aa, Homo sapiens
LRFPNPFDTFSSSRLPSQVMRVHTRPTAWSATAVWA

SEQ ID NO: 13590 - protein, 58 aa, Homo sapiens
VRVKMAAAEAANCIMENFVATLANGMSLQPPLEEVTPFALPCVCPHFPSPPLPSCGLS

SEQ ID NO: 13591 - protein, 50 aa, Homo sapiens
LRLWHGAALCPTDVTEALMNLKTAPGGRTAGQRLLTCSSTKKRPNGKATF

SEQ ID NO: 13592 - protein, 24 aa, Homo sapiens
LLGHKVAGIHQCTESSTNIHPFKW

SEQ ID NO: 13593 - protein, 72 aa, Homo sapiens
LGGRSSCEDPGCPRDEERAPRMGCMKSKFLQVGGNTFSKTETSASPHCPVYVPDPTSTIKPVSRGGPSFPGG

SEQ ID NO: 13594 - protein, 182 aa, Homo sapiens
LGPSCPLGSRVLRPAPLAVGAVHSLPQARGRCSPQEEGAEAAGEAAGQCDGGGSVPTEADPPLLPQQVGHQTARAAPGPAQQQGPAACQHGSPAPTLAGGVQGHHRTAGSPLCLPTPGAAPGSAGSCSHRRVRWPRGHLFQRGAGGPSRGQPGGQPCGGRVCPRPEAQRDPSQSPRATAGED

SEQ ID NO: 13595 - protein, 100 aa, Homo sapiens
LTCAHCLALPREMNPVPQMEMQKSPSSASLTLGAVDQSCSYSAILAPYSHYLLELWLRHYNRALSPLSKSWEMVIVNASPILEAPGCRGPQLAGCGGSGL

SEQ ID NO: 13596 - protein, 73 aa, Homo sapiens
LAPYSHYLLELWLRHYNRALSPLSKSWEMVIVNASPILEAPGCRGPQLDPSHPWSLTLDLSQKAEKRSSLESL

SEQ ID NO: 13597 - protein, 111 aa, Homo sapiens
LPYTRLFRPPGGHGARSGGILGCHSWGLFLGFSGWKPQMLFNIFWTREAPTERSVHPQVHSLRSPLRDPALHTHLQPKVLPAPGLRGTLPVCGTGEGTLASCTTLHVVGVR

SEQ ID NO: 13598 - protein, 23 aa, Homo sapiens
LSPEGLERMLPGDPRCTRPREME

SEQ ID NO: 13599 - protein, 11 aa, Homo sapiens
LTPDQCSQQGR

SEQ ID NO: 13600 - protein, 47 aa, Homo sapiens
LKDGPQSLRKAETWVEQQNKRSSSKKCKQTVHHHLQLLTDTSKAMCS

SEQ ID NO: 13601 - protein, 39 aa, Homo sapiens
VHYFESKIYLYFKNKVLRLCSIHRKVSNLLIQRQFESVL

SEQ ID NO: 13602 - protein, 72 aa, Homo sapiens
LPDSHSRLHKQDFKINPILETSTQCTMFLTGKEELYFSDFFFQIFTISCPVSPPSLSAGNFISYFCMPSFYL

SEQ ID NO: 13603 - protein, 35 aa, Homo sapiens
LQAAERLGRPYLILSSKMEDWKICFEELANTWCHM

SEQ ID NO: 13604 - protein, 38 aa, Homo sapiens
VEKPTPGCLDVGLQTMSFLYSSKAGSHYATYTYSSDFL

SEQ ID NO: 13605 - protein, 199 aa, Homo sapiens
LPGEEGDPTRGRSLGRASWESGSPRRPRSPFSSFLPRPICLSLEARPCSIEDRRNWSLIGRPGAPASGLNRSSGLWLGPDRCRPRSRCSCRVMENPSPAAALGKALCALLLATLGAAGQPLGGESICSARALAKYSITFTGKWSQTAFPKQYPLFRPPAQWSSLLGKYSPLLASCSTRRAAAPEPPAQLHGGASQSGAC

SEQ ID NO: 13606 - protein, 11 aa, Homo sapiens
LWKMAPVVTGH

SEQ ID NO: 13607 - protein, 44 aa, Homo sapiens
LKIRRCNKMFLAFPPAFFFFFDFALESQSFRIFFTILFKKSFTV

SEQ ID NO: 13608 - protein, 12 aa, Homo sapiens
MNLKPGLFFFFG

SEQ ID NO: 13609 - protein, 11 aa, Homo sapiens
MKKVSVPDDGQ

SEQ ID NO: 13610 - protein, 44 aa, Homo sapiens
VSVADCQPTSLLSPSTATTDEDEEGKLPEDIMKVKPLPTWALLK

SEQ ID NO: 13611 - protein, 41 aa, Homo sapiens
LCVQGAPEGQAATLQKARLSDPQGAWCGLQGQNASQRRFST

SEQ ID NO: 13612 - protein, 28 aa, Homo sapiens
VSERVGWCWAGGKREDSSERVDLSRRIF

SEQ ID NO: 13613 - protein, 48 aa, Homo sapiens
LCPSIPESSTSQASQGGACVGRTLNPAARPLDGRRRDGWPPCTAPAVS

SEQ ID NO: 13614 - protein, 68 aa, Homo sapiens
VHLMLVGTQSAQPSLRHCVSRAGPQTRPPLPHPSQGGACVGRTLNPAARPLDGRRRDGWPPCTAPAVS

SEQ ID NO: 13615 - protein, 92 aa, Homo sapiens
LQRPSPSLEAERRGQLVVGEFPRLRLLVFSRRHTELRLTFLFLNLNHRFHRLVVRRLGRWIRLRRNCWSEPVPGERIFREKWLRGPQQLQGL

SEQ ID NO: 13616 - protein, 184 aa, Homo sapiens
LRRGRSWRKERGGRPVNRPGEAVLSRLPGATLSPDPACRCRATAMNSGAMRIHSKGHFQGGIQVKNEKNRPSLKSLKTDNRPEKSKCKPLWGKVFYLDLPSVTISEKLQKDIKDLGGRVEEFLSKDISYLISNKKEAKFAQTLGRISPVPSPESAYTAETTSPHPSHDGSSFKSPDTVSLLNML

SEQ ID NO: 13617 - protein, 11 aa, Homo sapiens
LLVSGLLPTEV

SEQ ID NO: 13618 - protein, 93 aa, Homo sapiens
LRRDGSKKCCGNRQAMNQADPRLRAVCLWTLTSAAMSRGDNCTDLLALALESLWKRSRCMGTCIIYRQDGCLKTQSQTSRIQLLEALPGLQRR

SEQ ID NO: 13619 - protein, 76 aa, Homo sapiens
LVLAVPAPAPAAPRPARGPRGAHARGLFGRKPQAPREMSSLSPASNRLGTHPDSHCQWRRSPLVKTSGEHGRWKYI

SEQ ID NO: 13620 - protein, 230 aa, Homo sapiens
LLVRHRPRALCHTNQSLGRGLATTRGRGSDGNGPTGNGDHPNFSLSEGRAFGSLAAQPITSCLSVPAPPFSLGKLQDGLLHITTCSFVAPWNSLSLAQRRGFTKTYTVGCEECTVSAWTLTSNGRSFPGPFPKSWACFLLPLAILCPCGCSPTLRAVPDLSCYFPKPETAPLQILAAPFPCVQYRVITCPSLVPLILPCDYSVIPLPVPEPPGLFLGSPECSPRTQSAVP

SEQ ID NO: 13621 - protein, 27 aa, Homo sapiens
LEKTTGLEVRRPGVLSALPLTCCMTMG

SEQ ID NO: 13622 - protein, 86 aa, Homo sapiens
LQNGCATEQILQGGCEGSQSSGTQDLSTQRVANAQNVLINMLVTGVQSLHAIVSSQTRLLMGMWRIHAPGQLEQCNFLSKSMCPGL

SEQ ID NO: 13623 - protein, 62 aa, Homo sapiens
LSANWPVSIVMKFKYVEQRSSLVLLQNSLKIYPAYRRENRGLWPAPGKEDETPTYTLSILYS

SEQ ID NO: 13624 - protein, 48 aa, Homo sapiens
LIGCFESLRATRLVNPGPFSADLPYPLTNYGRLYQNRENWRRYLWSCV

SEQ ID NO: 13625 - protein, 48 aa, Homo sapiens
LSGERRGCCSCRCGRRGIISRDLPYPLTNYGRLYQNRENWRRYLWSCV

SEQ ID NO: 13626 - protein, 66 aa, Homo sapiens
LRALRKPGNTKANQVWSQSLLQQMSGGFLPVLMPMEMPSPLHSLPRATEVCIPTFLLTSPRIPVLY

SEQ ID NO: 13627 - protein, 57 aa, Homo sapiens
VQKKSGRERRRPPLPCTALLEATWRVRPRGGHGHKCPQLAPGCQRRYSPDQGRIISG

SEQ ID NO: 13628 - protein, 10 aa, Homo sapiens
LPECARVLEE

SEQ ID NO: 13629 - protein, 46 aa, Homo sapiens
LYCETLNLADPCWPCFLDCSRVASNLIYCGLMNRNVCPYVRIGNNG

SEQ ID NO: 13630 - protein, 77 aa, Homo sapiens
VQRSLRLRNSGHSPGRRSGKLECLGLVVSPQNVQRLLETEMWAELCPSAKGAIILYNRVQGSPTGAALGSPALLPPL

SEQ ID NO: 13631 - protein, 50 aa, Homo sapiens
LALHPPSVVGERKLLQGRGSREPQGRVPAAEDSQSIHIALLGQSAESVRG

SEQ ID NO: 13632 - protein, 186 aa, Homo sapiens
LSPGRPPPVASALWKCDKLLSRPQEAQWCLDTRGVSLILPDCSEARSFVTLPPEASGRSRVAEKERAFLLHRSIHGGVGRQAGEWEQLQAWLASGVFSLQAMGNQGSSGGPHPTEEMRAWGMPQESRLLQETHQAWRPSTGPSPDTAVLASASWRCRGAQFPQLLGEGQEGWSQSALPLLLTAEIK

SEQ ID NO: 13633 - protein, 101 aa, Homo sapiens
LTKSPSHRRARETSAVLGLSLHVCKAGLAPTSERMGDVCKKAPCKTRQEDAGGRLLGGTLSFTPVCCHGCRALVLMAPGGTYRMPRAERKWEWRRCDIPRC

SEQ ID NO: 13634 - protein, 70 aa, Homo sapiens
LLSAHPPLLWFRAWPSYSRLLCFGGPAAGTAGPRAAEISAQPRITGSPIDREGSHTAEAGGPAGGGGRSH

SEQ ID NO: 13635 - protein, 53 aa, Homo sapiens
LLSAHPPLLWFRAWPSYSRLLCFGGPAAGTAGPRAAEISAQPRRASWLFHPWT

SEQ ID NO: 13636 - protein, 11 aa, Homo sapiens
LGPCRLKNGRI

SEQ ID NO: 13637 - protein, 20 aa, Homo sapiens
MSPECEEPPPPLAGRHVLEV

SEQ ID NO: 13638 - protein, 110 aa, Homo sapiens
VTPFPGKKELGFPSLRPLFGSDSLHPLLPRTPPPRAGSSQSPFSTPAPAPSPPRATFHLTARGARDLRAPRTFTTRPGRGERTRATAPHPPGSPGARRLNVSKGHSDNDS

SEQ ID NO: 13639 - protein, 69 aa, Homo sapiens
VPGCWDGQRSGSHRQFKRPERSFALETEEPTGALSPFAPGESDQCPRQGPCRLQPGYDQPGLFQVPGEP

SEQ ID NO: 13640 - protein, 85 aa, Homo sapiens
LAGFESLACSFPVVSRGFLASRSARSLSSEGGTMPDNRQPRNRQPRIRSGNEPRSAPAMEPDGRGAWAHSRAALDRLEKLLRCSR

SEQ ID NO: 13641 - protein, 129 aa, Homo sapiens
LPSPRPRDPLSRSARQRGGLQPSRRGGFQVRVRGGRWRLGPRPERNSFRELSPWARIVCRNSPESGGGGLDRASTGIRQEFRRQLRRWRRLPLSSQDLPLSLPVSWWVPLPQAPASQLLAAPHPRVRAG

SEQ ID NO: 13642 - protein, 43 aa, Homo sapiens
LAEEARALLNGAGRWLLRAGPLWVRCTPGARGLRRPRAMDSCG

SEQ ID NO: 13643 - protein, 30 aa, Homo sapiens
VDGGHMMFSFRKVSALRSDDPHLSPLTDGC

SEQ ID NO: 13644 - protein, 23 aa, Homo sapiens
LFRLPGDVHRTRTYMDLQQIQVW

SEQ ID NO: 13645 - protein, 25 aa, Homo sapiens
MWAGQSSTHRPWIRCVPYARRRSPG

SEQ ID NO: 13646 - protein, 27 aa, Homo sapiens
MCCAGGQMACTTSGRSRGSAALSKAAS

SEQ ID NO: 13647 - protein, 109 aa, Homo sapiens
LSQGGPRCIPPPKLCLMESMFSSPAEAALQRETGVPGLLTPLPDLDGVLPCSSLTSYWEMLWLWLHDWRRRQGQRCSFWVTQPTAAAAWMCWVLSKLELRLSYILALPA

SEQ ID NO: 13648 - protein, 113 aa, Homo sapiens
MESMFSSPAEAALQRETGVPGLLTPLPDLDGVLPCSSLTSYWEMLWLWLHDWRRRQGQRCSFWVTQPTAVMTATRLQKRTHFSDAIFPAAAAWMCWVLSKLELRLSYILALPA

SEQ ID NO: 13649 - protein, 79 aa, Homo sapiens
LGCVLTAPPVCTSGKDLARPPLAWSQGAAACGLPRFADGLSPRERNVGLFVNIDQELHGPNIRSHSVLKGGGGGGYKLQ

SEQ ID NO: 13650 - protein, 122 aa, Homo sapiens
MGLLSLWTNPRKSLKSSQCFGLCPVYLKLPNKYVLKIQNGLMFTCTFYNCLLQWMMEFKQLETVAQGVKEGQLSKQKCSSAFQNLLPFYSPVVEDFIKILREVDKALADDLEKNFPSLKVQT

SEQ ID NO: 13651 - protein, 20 aa, Homo sapiens
LSGTVTGTRCLLLSPSPPNP

SEQ ID NO: 13652 - protein, 9 aa, Homo sapiens
MRAKVSGSW

SEQ ID NO: 13653 - protein, 51 aa, Homo sapiens
LHRTRSRHAQVSQVQQGGVLRREGDLSGQGLASALPEVREMWEDADLWGPR

SEQ ID NO: 13654 - protein, 57 aa, Homo sapiens
LQEAGTPVVGRRRVLQRLTGACLCLCSREGDLSGQGLASALPEVREMWEDADLWGPR

SEQ ID NO: 13655 - protein, 16 aa, Homo sapiens
LDPPEMQYHLIYSLGS

SEQ ID NO: 13656 - protein, 23 aa, Homo sapiens
LQNGQTGSGKTFTMMGVVWRMEE

SEQ ID NO: 13657 - protein, 66 aa, Homo sapiens
LGSAIPLCCCPSPLSFPFSTLSAPGGSEVPVPPPPPAQWTGRGRDTQEEGHPSSTSGSSSSDRPLL

SEQ ID NO: 13658 - protein, 22 aa, Homo sapiens
LQDRVWPSQGTRPSTTGTGPMQ

SEQ ID NO: 13659 - protein, 105 aa, Homo sapiens
VTSGRRRGAGSRGPWPWPGTPPPTARRTTFSRQPRPARHLSPESPPLLPIHPREILKNTLYKSTCASFSPRVAPGRKERGKELKQRAFSPGEENGRNGDTFSEAE

SEQ ID NO: 13660 - protein, 27 aa, Homo sapiens
MAILTSFMTFSRQTFRQKVLVRFLSAK

SEQ ID NO: 13661 - protein, 22 aa, Homo sapiens
VSLHMSQAHHKKASTVWISNGV

SEQ ID NO: 13662 - protein, 11 aa, Homo sapiens
LQCTRGMHVRH

SEQ ID NO: 13663 - protein, 136 aa, Homo sapiens [sequence omitted]

SEQ ID NO: 13664 - protein, 50 aa, Homo sapiens
LLGNRPGPTRPFELSKITASIFFSFFSFPSADKVSPEREGGGGDTIALKE

SEQ ID NO: 13665 - protein, 29 aa, Homo sapiens
LAPSSRPASHFTAKTLLPILTESRGLSGA

SEQ ID NO: 13666 - protein, 30 aa, Homo sapiens
LGSGVGEAVPCRGRGEGALCAPFCKTHSRF

SEQ ID NO: 13667 - protein, 77 aa, Homo sapiens
LRRLSEPRGGLEGRFVCRDGARAQVLDVVCIERPKAGGKCTGHSGVCPVTRKSEGLGGGRLGLCISGCTAALPSTNM

SEQ ID NO: 13668 - protein, 10 aa, Homo sapiens
VEVAVQEKPR

SEQ ID NO: 13669 - protein, 81 aa, Homo sapiens [sequence omitted]

SEQ ID NO: 13670 - protein, 30 aa, Homo sapiens
LDPRLLRECGDLGAPPAPEVALRAGTCWTR

SEQ ID NO: 13671 - protein, 84 aa, Homo sapiens
VTDVTPLGLKLGPHWPVPAAAPGPPEVEARVEALLLPRLPSKMRNMFRRKRCLSAVALSANCMGGKAGVAALPGRPGPSANWAP

SEQ ID NO: 13672 - protein, 43 aa, Homo sapiens
LPNANREEASGRAEAPPAAAARRWRGAGTISPSPRAAPDPICE

SEQ ID NO: 13673 - protein, 30 aa, Homo sapiens
MRILLWAFWPIPAPQSCRDGTARIGLPGLG

SEQ ID NO: 13674 - protein, 35 aa, Homo sapiens
LPFPLRPLPVLLRPAELRTRAREEAGCGRCNCRMT

SEQ ID NO: 13675 - protein, 112 aa, Homo sapiens
LEFDRLSATSSTNASLLALFREAAQEEDWPLCIPFSFQCPVCCFEVSNTNKSGLREGETLFQSTIAEGEREYCKRERKGPYGNSEKAQTDRWQDLQASQSPGRKGLFFYWKK

SEQ ID NO: 13676 - protein, 45 aa, Homo sapiens
LRSSSSLAPGLVSPLGVQVGRRGCAWSRPQPQTDTKEKLDLGTLQ

SEQ ID NO: 13677 - protein, 33 aa, Homo sapiens
LGAQSWKQLRGRWRRKKRGMIKILPGWCLLVLE

SEQ ID NO: 13678 - protein, 134 aa, Homo sapiens
VRGPTPAAPVASPSRPRVISTSTGSPMPTASKQAWPQAWVARCTHMGWRWSGSLGKSLRSPLREKAQILKRRLVPPLVTLQSSPQDPSSPFSPAGYTALGATVPATNAVPCPSPAQPSHSKTPLHLWNPHLSTP

SEQ ID NO: 13679 - protein, 85 aa, Homo sapiens
VASATCLIVPRSSPNPRCGVLPREAAKAVHPARDPLCPAPAPPSGWNFPLTARLKLRIVGSLAGCRTEPRPQYPIHALCLCQGFK

SEQ ID NO: 13680 - protein, 42 aa, Homo sapiens
MTAWEAMAPHVNPTLKDKALSPQQPQQLALHPVSLTTTTKNI

SEQ ID NO: 13681 - protein, 182 aa, Homo sapiens
VPRPPRPLLLSHFSWELRAALSYWRAGRAPPPPARLHAGPASGFWVLTPSGGEEGEPRTHCGEEEEEEEEGGRKKTRRTGAGGGRLATFSPPANAQGAHILTNSAARWIFFVFKEKKCPCVCRDDLQFSPAEADRMRLWAVPPPSMLPLFKMKRKPRKGKTTRTEMCLAMSIGSNQWKRSNT

SEQ ID NO: 13682 - protein, 10 aa, Homo sapiens
LVSKSLARVS

SEQ ID NO: 13683 - protein, 80 aa, Homo sapiens
LAGPAAARNAPNARARRVAAPRPAPPLPRAGAGRAGRQEPRRREMRAAAGTRRARLGRRRLLRLRRGGRSGCRAVLEFPA

SEQ ID NO: 13684 - protein, 44 aa, Homo sapiens
LRVKKGGTFTLIGGDAGGCSGRPDAGGWREREAPRCLMGPLGGR

SEQ ID NO: 13685 - protein, 59 aa, Homo sapiens
LILSPSPRPVLGFFRQVHLLTRSHFSRDPLSASHRRQTAGGELRTAACASPAAGWEEGH

SEQ ID NO: 13686 - protein, 76 aa, Homo sapiens
MGRMHAPGKGLSQSALPYRRSVPTVSSALGPGRIRGGGWHLSRVKRRQGEELACMRSAVLRKERPLFCGAIPGFSS

SEQ ID NO: 13687 - protein, 97 aa, Homo sapiens
MWWPAGRPAPTAPPEKVSQGPTLMPESLSCQFPQLLLCLLFSASARFTVQAAKSQGLGLRVVRGGKWVAGRKEHQGGWGQASDEERDRGGMGTGCAS

SEQ ID NO: 13688 - protein, 97 aa, Homo sapiens
LGTGATVTSFPVNRKLGTKVGISVLLRNPACFSFKTQMNWHEHTAWLWENGSALSQYLFPSFETFNTKNCIAYNPNGNALDESCEDKNRYICKQQLI

SEQ ID NO: 13689 - protein, 21 aa, Homo sapiens
LSRNPLCIEDFRFLSAVDVHL

SEQ ID NO: 13690 - protein, 188 aa, Homo sapiens
LRCCTSLCFGRLGLCRDVGSWSGWPFGLSTATQPRLRLGKQTGAGQARRACRTVILRCGSCCRGRRTGSVVAWSSLPQRYYGGAEVVDEIELLCQRRALEAFDLDPAQWGVNVQPYSGSPANLAVYTALLQPHDRIMGLDLPDGGHLTHGYMSDVKRISATSIFFESMPYKLNGFSCLCVCPAQNWPH

SEQ ID NO: 13691 - protein, 61 aa, Homo sapiens
LLFLLCHVSYTSLGASSPDYPNIYNIMYMLSLEISSVKAKHLILQETLKWIWKLGSQLGSS

SEQ ID NO: 13692 - protein, 39 aa, Homo sapiens
LKETKQQLKSAQHQLRRQALHWKLLFKATKESKTKYNIS

SEQ ID NO: 13693 - protein, 47 aa, Homo sapiens
MKCLPSADSNGSGTGNAVPGSWYPAADVGSFPSLCFHEDGRHYRTKH

SEQ ID NO: 13694 - protein, 44 aa, Homo sapiens
MKVNLVTHRTLLVFSVENMMTVLINTEKRKLRRNGISLYITTVC

SEQ ID NO: 13695 - protein, 20 aa, Homo sapiens
LVNRSALLGSQNMGPRLKVR

SEQ ID NO: 13696 - protein, 49 aa, Homo sapiens
LSVSALRKLRACGPQTSLRKICRGGLPRQKSFLQKWMGCLQRLMKKMTI

SEQ ID NO: 13697 - protein, 257 aa, Homo sapiens
LAPEHAREPPRSAPEPPAVPPAASRAPPPAHPRTLWPTPPAGPFCRMVAHNQVAADNAVSTAAEPRRRPEPSSSSSSSPAAPARPRPCPAVPAPAPGDTHFRTFRSHADYRRITRASALLDACGFYWGPLSVHGAHERLRAEPVGTFLVRDSRQRNCFFALSVKMASGPTSIRVHFQAGRFHLDGSRESFDCLFELLEHYVAAPRRMLGAPLRQRRVRPLQELCRQRIVATVGRENLARIPLNPVLRDYLSSFPFQI

SEQ ID NO: 13698 - protein, 7 aa, Homo sapiens
LDLVIFL

SEQ ID NO: 13699 - protein, 14 aa, Homo sapiens
LEVVTSKSDSVGGK

SEQ ID NO: 13700 - protein, 24 aa, Homo sapiens
VLSKAKGHQGAKVVTSKSDSVGGK

SEQ ID NO: 13701 - protein, 15 aa, Homo sapiens
LSQVVTSKSDSVGGK

SEQ ID NO: 13702 - protein, 14 aa, Homo sapiens
LKVVTSKSDSVGGK

SEQ ID NO: 13703 - protein, 45 aa, Homo sapiens
LPILPHHTWSGSREIAILGGVSDFALALLGLQWGVELLVPTTLAV

SEQ ID NO: 13704 - protein, 9 aa, Homo sapiens
MPKNWKQLL

SEQ ID NO: 13705 - protein, 71 aa, Homo sapiens [sequence omitted]

SEQ ID NO: 13706 - protein, 46 aa, Homo sapiens
LRTQCTPGPLTPGGLRGPSFNGLWTCRLFPPPLSLCLSVLQVQLQA

SEQ ID NO: 13707 - protein, 68 aa, Homo sapiens
LGCKFICGECAPGRATIPAPVFPPGSLYRDFSTFLFFASEGWDWGGGDGQRRVGGMVCRLICVRLSLH

SEQ ID NO: 13708 - protein, 79 aa, Homo sapiens
VLSGERGVVSTLPTSLAVGLSWEGGRRAPGVRTRPPAVPVCARVILTRDAGTVFKSQGRVSACPRTSCLYISPFTAPTI

SEQ ID NO: 13709 - protein, 51 aa, Homo sapiens
LEVQLVVGGRDLLQTRTSPSSPPSLFSVRNPARKYMHWLRIARARAQRHKV

SEQ ID NO: 13710 - protein, 24 aa, Homo sapiens
LRNDDKKRPNCSVSISSLLSMGTR

SEQ ID NO: 13711 - protein, 32 aa, Homo sapiens
LAARASPPGGSRTAPRSLLPVQPAACPCSLPP

SEQ ID NO: 13712 - protein, 174 aa, Homo sapiens
LGPSCPLGSRVLRPAPLAVGAVHSLPQEEGAEAAGEAAGQCDGGGSVPTEADPPLLPQQVGHQTARAAPGPAQQQGPAACQHGSPAPTLAGGVQGHHRTAGSPLCLPTPGAAPGSAGSCSHRRVRWPRGHLFQRGAGGPSRGQPGGQPCGGRVCPRPEAQRDPSQSPRATAGED

SEQ ID NO: 13713 - protein, 107 aa, Homo sapiens
MVAAALPVSRPRRRGALAAGSRRAAAFVVRDPARSAARRPPPPSLAAACCALHGLGPGSPARSAHEGAPRPPLLPARGGAALRRRRRRCPLCGKRAAPAASARAPWR

SEQ ID NO: 13714 - protein, 28 aa, Homo sapiens
LLKSFEGMYLFVKIRLKMWSPEMNIDVL

SEQ ID NO: 13715 - protein, 59 aa, Homo sapiens
VSTTFGMMTLGGHRATVQQESPLLTARVSQKLLLTIPVSEQNISAMVRASIPSLICCQP

SEQ ID NO: 13716 - protein, 48 aa, Homo sapiens
LPSRAPGAHPQSATSRAPPGARMERLTMTALVLNTHNHLQGTSWPQES

SEQ ID NO: 13717 - protein, 189 aa, Homo sapiens
MLRLQKRLASSVLCCGKKKVWLDPNETSEIANANSRQQMRKLIKDELIISKPVDSPFLGLMPEKDLGPPEGRHSGIGKRKGTANARMPEKVMWILRRLLRRYCESKKIDRHMYHSLYLKVKGNVFKNKRILMEHIHKLKADKARKKLLADQAEAPRSKTKEARKHGEERLQAKKEEIIKTLSKEEETKK

SEQ ID NO: 13718 - protein, 36 aa, Homo sapiens
MMGDRSFLHGNMALVFLCGKIFIHRQSMKFPTRLSK

SEQ ID NO: 13719 - protein, 46 aa, Homo sapiens
VLPVAGAEGSQSWGPRLRATCAHSLTPERCPPADETGGHCKAGTRL

SEQ ID NO: 13720 - protein, 41 aa, Homo sapiens
MGRIWLLQEESKTNAGREHFTLQEAALPVAAAGSFHTTSLS

SEQ ID NO: 13721 - protein, 21 aa, Homo sapiens
LLVQDGRGQGRDAADVPAADL

SEQ ID NO: 13722 - protein, 66 aa, Homo sapiens
LQSCGLPDVAKSGKGRDQTSYLKLWGAAGAERVGLHGCPGPELLPELAGLRSSRSGPSETSHRPRT

SEQ ID NO: 13723 - protein, 32 aa, Homo sapiens
LPALLTSAASYGSTLRRVPGCILCLPNSASWV

SEQ ID NO: 13724 - protein, 23 aa, Homo sapiens
LDAVAHLDHGPSRILCSLGVPAP

SEQ ID NO: 13725 - protein, 17 aa, Homo sapiens
MLLPFQPRYRTLQPQRC

SEQ ID NO: 13726 - protein, 23 aa, Homo sapiens
LMAVLFRFPCVRSPGGKLKVFSR

SEQ ID NO: 13727 - protein, 8 aa, Homo sapiens
LWWPQSPK

SEQ ID NO: 13728 - protein, 29 aa, Homo sapiens
LMMQTTPLACWMKEQTLEMLLITMFMNIP

SEQ ID NO: 13729 - protein, 54 aa, Homo sapiens
LFPLRNPHQLSLLDLGVPHLLWRAEYGHLTPGGQVCNKLEHSNGRKSKSHNDIF

SEQ ID NO: 13730 - protein, 10 aa, Homo sapiens
LQRGRRMSCF

SEQ ID NO: 13731 - protein, 51 aa, Homo sapiens
MRPAPHSVPLCATPCQALRAPGCCFLPSFPKDYQRQVAGPGGGSGGGLAMW

SEQ ID NO: 13732 - protein, 18 aa, Homo sapiens
VVATAQTRLRSYSCASLR

SEQ ID NO: 13733 - protein, 177 aa, Homo sapiens
VPVPALDALLPGSPPPPAPPYGVCVTGSCCQKKAPLCLQGMKAIWFPAPPFLSARQLFSASRPQGVPGCARSAPRPPPALSAGILPITQPRAVLPLPQTLRVLISLILKSCVPAKGIRLGNRGFLLARRSLFQRKPDLPSHPTAPPSETSGSLPPSPRGRRKNSSPGPIPGWVGSLE

SEQ ID NO: 13734 - protein, 122 aa, Homo sapiens
LESAAAAPSPVLGNIPPNDGMPGGPIPPGFFQPFMSPRYAGGPRPPIRMGNQPPGGVPGTQPLLPNSMDPTRQQGHPNMGGSMQRMNPPRGMGPMGPGPQNYGSGMRPPPNSLGPAMPGINM

SEQ ID NO: 13735 - protein, 12 aa, Homo sapiens
LFYDCKDGNDLL

SEQ ID NO: 13736 - protein, 20 aa, Homo sapiens
VLPPAKGRPASPSESGGCQR

SEQ ID NO: 13737 - protein, 56 aa, Homo sapiens
LALSHPRLCQLPRLGGDWLGDAWPPGPLLGRGVGSELELRMKGRPASPSESGGCQR

SEQ ID NO: 13738 - protein, 47 aa, Homo sapiens [sequence omitted]

SEQ ID NO: 13739 - protein, 22 aa, Homo sapiens
MLHGTWGRGCDLYLEGPGASSQ

SEQ ID NO: 13740 - protein, 27 aa, Homo sapiens
LTTDSCCHRQPLSLAQACHTAASQQGQ

SEQ ID NO: 13741 - protein, 24 aa, Homo sapiens
LDSRPSAGEARMFQLNHPFIFKPS

SEQ ID NO: 13742 - protein, 21 aa, Homo sapiens
LLFKKYPCVFQLNHPFIFKPS

SEQ ID NO: 13743 - protein, 16 aa, Homo sapiens
LKLVFQLNHPFIFKPS

SEQ ID NO: 13744 - protein, 8 aa, Homo sapiens
LDSHQKGP

SEQ ID NO: 13745 - protein, 12 aa, Homo sapiens
MVAPRASLLLLP

SEQ ID NO: 13746 - protein, 69 aa, Homo sapiens
LVELPRCPRYLLPVRTNRSVHRRGASPVPVRERRRGYLGAGGGRAGPRRCGLATLLLRLLLSLGTGCQR

SEQ ID NO: 13747 - protein, 9 aa, Homo sapiens
LCVCPMLVP

SEQ ID NO: 13748 - protein, 495 aa, Homo sapiens
LSSATQTSRRIMTCGSGFGGRAFSCISACGPRPGRCCITAAPYRGISCYRGLTGGFGSHSVCGGFRAGSCGRSFGYRSGGVCGPSPPCITTVSVNESLLTPLNLEIDPNAQCVKQEEKEQIKSLNSRFAAFIDKVRFLEQQNKLLETKLQFYQNRECCQSNLEPLFEGYIETLRREAECVEADSGRLASELNHVQEVLEGYKKKYEEEVSLRATAENEFVALKKDVDCAYLRKSDLEANVEALIQEIDFLRRLYEEEILILQSHISDTSVVVKLDNSRDLNMDCIIAEIKAQYDDIVTRSRAEAESWYRSKCEEMKATVIRHGETLRRTKEEINELNRMIQRLTAEVENAKCQNSKLEAAVAQSEQQGEAALSDARCKLAELEGALQKAKQDMACLIREYQEVMNSKLGLDIEIATYRRLLEGEEQRLCEGIGAVNVCVSSSRGGVVCGDLCVSGSRPVTGSVCSAPCNGNVAVSTGLCAPCGQVGSCGSSCRKC

SEQ ID NO: 13749 - protein, 100 aa, Homo sapiens
LSSAPLVSHSSPLEFIRVIPVEPPSCLSIPPASLPRLLLLQDSDVSLRSAVRSAGELPTVPQGAGAGDTAEPGNESGHRRGHHDSSAAWSPCWFTVLGSY

SEQ ID NO: 13750 - protein, 82 aa, Homo sapiens
LPGPPRACFLVLDPPVCGRADPQTTEHPLATAGGGATGEVGWAWGGAGPGGDFSWAGWVPNTCHLCSSLKSLILTALQRETE

SEQ ID NO: 13751 - protein, 59 aa, Homo sapiens
VGSDSQPSPQPPRGYNNPGCSGVTVGEAVPRPGTSQVPTLEELSYQALALFSGAQHEKG

SEQ ID NO: 13752 - protein, 11 aa, Homo sapiens
MAAFKVWILAP

SEQ ID NO: 13753 - protein, 80 aa, Homo sapiens
MDETVAEFIKRTILKIPMNELTTILKAWDFLSENQLQTVNFRQRKESVVQHLIHLCEEKRASISDAALLDIICDSQLQRN

SEQ ID NO: 13754 - protein, 71 aa, Homo sapiens
LGIGEMAETDPKTVQDLTSVVRDGCEGRRPRPSRAAPGQALLDRGAPTAAARGVCRGPVSGSVSGRGSRPP

SEQ ID NO: 13755 - protein, 138 aa, Homo sapiens
LGMPLRPPRVEGQGPQLGLRPRPCPARMWPSLLRTATRWGPGRASHLSQACPFAGPQGSWVRSSFHLQPRMIGDVLSEDENDKKQNAQSSDESFEPYPERKVSGKKSESKEAKKSEEPRIRKKPGPKPGWKKKLRCER

SEQ ID NO: 13756 - protein, 116 aa, Homo sapiens
VRASWSPSGADACRQGTVGLGTAAGVGGDEMEAALKRPVPGFGVGRSTFVPGLRSEGGRGASQQLRPGKVCPGWCRTAHVSGRPTRAEQTERTRPSRGPFLAWHTRSGADLCFHVM

SEQ ID NO: 13757 - protein, 30 aa, Homo sapiens
VPWTAAKNPGIVFSFSFKASGVAATLPGSL

SEQ ID NO: 13758 - protein, 303 aa, Homo sapiens [sequence omitted]

SEQ ID NO: 13759 - protein, 78 aa, Homo sapiens
LATLPSQHTRRLWVLDLAAWAFQTGTPTRMLPTLTAPTLALLLLPKISCLLTSTHPRTQGSRAHFPRAWRTPQTPSSM

SEQ ID NO: 13760 - protein, 22 aa, Homo sapiens
VESLAGCGCRRTGVDKARWQGS

SEQ ID NO: 13761 - protein, 44 aa, Homo sapiens
LPHQDPLWCPGGGLAGHGCPSALCRPLVPADHPLPPLVFQHHPH

SEQ ID NO: 13762 - protein, 97 aa, Homo sapiens
LRGARSLGRCRLGVPSRGVPGISGPNPGVPGRACTEGPGSCALPAAVRARPPTPLSAQAGSSRPMLAAGDPRSPDRSRAGQPATMVALRPVQQLQGG

SEQ ID NO: 13763 - protein, 8 aa, Homo sapiens
LLCFAGWI

SEQ ID NO: 13764 - protein, 29 aa, Homo sapiens
MGPLRLSCAGTAEGNIPGSREAVGVMATR

SEQ ID NO: 13765 - protein, 85 aa, Homo sapiens
LYSRRPGPRPGVRVCARVCASECVRGVRARAGVGARGERPENTLVCTERPFAAVSQKLLLTIPVSEQNISAMVRASIPSLICCQP

SEQ ID NO: 13766 - protein, 20 aa, Homo sapiens
MPGWRLLTQVGAQNTHLAFC

SEQ ID NO: 13767 - protein, 24 aa, Homo sapiens
VHVLRLSVPTACRDVPPHRWPHVP

SEQ ID NO: 13768 - protein, 109 aa, Homo sapiens
LLAFALQPLRPRAAREPGWTRGSEEGSPKLQHELIIPQWKTSESPVREKVRLKRPHLHWQELTTEVWATYSTFLESQSSPLVLFLAHSVLWVPILEITDGTFLPCMTNF

SEQ ID NO: 13769 - protein, 27 aa, Homo sapiens
LDGGGLSCSLLHPSAEMVLWMLHCMQR

SEQ ID NO: 13770 - protein, 60 aa, Homo sapiens
LSLMFKQSLSMKLGGDRVSCQFLTATSHQWLHSVSLTQHMAQECLPSVSVSTAAIPRCWS

SEQ ID NO: 13771 - protein, 71 aa, Homo sapiens
LRRPSGAVTEALVHLGCELQRSRERPGAAARGGGRAAGRFWGWCVRSEGPEKRGTPQLVDTSRLLSQFRAW

SEQ ID NO: 13772 - protein, 9 aa, Homo sapiens
MESCRQGLT

SEQ ID NO: 13773 - protein, 111 aa, Homo sapiens
LPRACGGAQRDVGERQCEAGRFNHRHNTNRVSPPAPAAGSRCQLALLAHQGAEDESCLPHPEHVQHRRHPAVCHRRDLVPGGRCHTYQEGTGARHGTKWLLHGPHHDHSAI

SEQ ID NO: 13774 - protein, 96 aa, Homo sapiens
LPGSCVRSERRRWRRWRRRRQLGSAMTGKLAEKLPVTMSSLLNQLPDNLYPEEIPSALNLFSGSSDSVVHYNQMATASHPGWSHVRRGVPAVGERM

SEQ ID NO: 13775 - protein, 26 aa, Homo sapiens
LHRGLPHLLHGGVGHRLQDEEWYQEE

SEQ ID NO: 13776 - protein, 61 aa, Homo sapiens
LRGKKSSHEGKTSSSLIRKFYYSPGSPRQDHVSGYQHHESSHETRLGGPGKKVYSEVPCAA

SEQ ID NO: 13777 - protein, 12 aa, Homo sapiens
VWALQNDQAFLS

SEQ ID NO: 13778 - protein, 49 aa, Homo sapiens
LTRPPGAATATAARLREEPGGNLGGRAGRSGSQESPGSLLEYAGCQRDP

SEQ ID NO: 13779 - protein, 61 aa, Homo sapiens
LAKKSRSKNRVVYKSDDCQCLLQCIHQPDPISSRRAPEAFLLGNRISSISELWCYRSNCRT

SEQ ID NO: 13780 - protein, 9 aa, Homo sapiens
VPHGDHCFQ

SEQ ID NO: 13781 - protein, 146 aa, Homo sapiens
LAAGVCVFCMKSPCLCTWLSCCHYFRGRYSEFERRSSASPPAPGELLGSRESPADGFCPGLKQPESYGKGRAWLARGIFQVLKRQAYGACDPSRRTKWDLKIHSTSAHGGPGPAPARGHTADWAAGMPGLCWRPLWLAFTSVCLQE

SEQ ID NO: 13782 - protein, 34 aa, Homo sapiens
LAQRASTFSLKPKRSLRKTRCLCSLQAEVTGLSK

SEQ ID NO: 13783 - protein, 94 aa, Homo sapiens
LHPHPHPCTATITAPSASLCPALAGEAPGLQQRSVRRRYRRWRMGCLTSTCNRCCGWIKDSFLPWRKYFNQSREPGGVGAGGWGWGWDMRVACS

SEQ ID NO: 13784 - protein, 93 aa, Homo sapiens
LHPHPHPCTATITAPSASLCPALAGEAPGLQRSVRRRYRRWRMGCLTSTCNRCCGWIKDSFLPWRKYFNQSREPGGVGAGGWGWGWDMRVACS

SEQ ID NO: 13785 - protein, 53 aa, Homo sapiens
LHPHPHPCTATITAPSASLCPALAGEAPGLQRSVRRRYRRWRMGCLTSTCNRW

SEQ ID NO: 13786 - protein, 55 aa, Homo sapiens
VQFSAEKSKTSLFPRMPGICTEGARGIRAGTGEDDHAALIPLYHELQKSQGLGTV

SEQ ID NO: 13787 - protein, 153 aa, Homo sapiens
MSSCSKSLRISVEVLLTTRTQPWSPVRATPSLCFILTQIKRTSRCLLFCLPRTSLLSYTTPNSNSSNSSSSSSSSSSSSSNSSSSSNSNSNSNSRVQFQLNNSNSSRAQFQPNSSSSSNNSSSSSNNNSNNSSSSSSNNHLLSLPNLYQASLC

SEQ ID NO: 13788 - protein, 82 aa, Homo sapiens
LQKEQSTLPTGLLVAELQVLTQIRLFEKQRARKTQAQRKSSAGSLVPRIQSQHLSTAFKHFHVLAWLHGLPANLPPSPCILF

SEQ ID NO: 13789 - protein, 49 aa, Homo sapiens
LQKEQSTLPTGLLVAELQVLTQIRLFEKQRARKTQAQSCLSFSQHVPFG

SEQ ID NO: 13790 - protein, 40 aa, Homo sapiens
LPQLPKHLRLQALPFLWAQVPTGSGPCLPRQGHNEPGSPF

SEQ ID NO: 13791 - protein, 52 aa, Homo sapiens
LPGPACPGVNFSSQRREEWKPYWMRTGEPVTESRYNADPVKSELYISTYAGQ

SEQ ID NO: 13792 - protein, 66 aa, Homo sapiens
LAISWSECWEVLVRRALFERCQGWETRMSDTWSSIQAHKKQLDSLRERLQRRRKQDSGHLGWNSVA

SEQ ID NO: 13793 - protein, 36 aa, Homo sapiens
LLHLDGEEAPRPRPCPGPAVYIPCPLLAQEETIAPT

SEQ ID NO: 13794 - protein, 84 aa, Homo sapiens
LRHPQPHLPEGARAAASSVCGSEPELCLWLRLLTGCAQKLREEGGNKYFCLILKPWKELSPCLTRTQPFLLSRRRSCLTLPCGL

SEQ ID NO: 13795 - protein, 102 aa, Homo sapiens
LQPRWPRHDSLLLRQRGHLAERHQPAHQRELSNCQRCCPFSTTGKWLIHTKNQPQTEQACRRSPTASPSNVHFTPPRRQHQAGCKTGKYLPESNTLYGSGFN

SEQ ID NO: 13796 - protein, 84 aa, Homo sapiens
LPLYGHPLAWTAGHTPPTGVQGAGGGHPPWDLGAPQTTLDSGPPTLRPVLPPRRLQAPPSTFFCMFFFCWKQTRFILNIIYLCI

SEQ ID NO: 13797 - protein, 147 aa, Homo sapiens
LCCGSTTHSSTRRTWKRQSRACPLGSWTSSGLKTSRGTALSSSASTTPMSSCSITSTSTSSSWSRRNIRARGSRGTTSATQTMSAASISSARNPRASSTCWTRRATSPTPRARPCWPSSNSNMRTISTSWAPRSWSQLSSSSTSQGR

SEQ ID NO: 13798 - protein, 24 aa, Homo sapiens
LRVQKVWRPWCPRSLPEILPISPS

SEQ ID NO: 13799 - protein, 63 aa, Homo sapiens
LWACTVPGDDSYRPGHGCRPRYPRGGAPSRSRTLGSPAGGSGPGQAGREGEGGPGAAGQTGHR

SEQ ID NO: 13800 - protein, 34 aa, Homo sapiens
LQRLLNLTALVWRGVKRPQEKGAMLISGSTKGPS

SEQ ID NO: 13801 - protein, 105 aa, Homo sapiens
LPSRSVRTSGCVYLLQVPSEPSHLVLWKKHRLLSSDPGNLSNLCRLLASSIQNPLSSLPPLTPSAVLPSHENKVSSKILAAAASSLVDLRGGCQWHAGVSCVVLQ

SEQ ID NO: 13802 - protein, 40 aa, Homo sapiens
LPFPLLSSHRPTTDRVPRGNRPPTPGASSPVERALTDPAA

SEQ ID NO: 13803 - protein, 52 aa, Homo sapiens
LRNGLARTCAVQARFSCGIHSGQSLMRAVSHLISRDHLPGPASLHDRNPGSV

SEQ ID NO: 13804 - protein, 47 aa, Homo sapiens
LWYPRISEDASETSSKSTSTLHVLCGSVVGLPDAIQDSWLNLNFSKQ

SEQ ID NO: 13805 - protein, 230 aa, Homo sapiens
LFCRRRVPGTPCPEAHGSGGDFSPPGGVGSRSGSEAGAGGSAPGRRGTPFASCRRGPALSAGTLRNREGEDWIALPLGFVKSSGGSCGGGGDSLCPLRTSLSPSLSAGGSRCRRRRRLSCSPPPTPECVPGDSRHLCDPPELRGLRAGGSLRPPAAGWWRSGPRPAAPGAGCSPGCGCWCSAVPGGCCAPRSSPPAEEPLISTSSWTSLGVWQITGLKFIISYSNLRRDL

SEQ ID NO: 13806 - protein, 28 aa, Homo sapiens
LGWNPAPLGSHNARAPPRGDLWAIPRMC

SEQ ID NO: 13807 - protein, 39 aa, Homo sapiens
MTQFLRTPTGNIFGGSIPEGSFTTSLTALMKRKATGCAM

SEQ ID NO: 13808 - protein, 64 aa, Homo sapiens
VQKSRLRVFWDSRKQGLLHTVFHRVQRKQTFCCCLRESQSHSVQVPEHHSVPGEGMRHPWKHHV

SEQ ID NO: 13809 - protein, 172 aa, Homo sapiens
LRASGGRVPAPGSRRGRGGQDGAARAVRLDGSRGNRRLAPSVLSRSRLHAGPGTAVPLGSAFADAGHLPGRERARCPTPKTAKAAAKTSAPTAAATSRKMEPGPWQRRARRERRPGGPWRRRPVAGRRRRARRAPEARRAPEARGLAPRTLRPPRGLRPRAMPKTKPHVPLP

SEQ ID NO: 13810 - protein, 63 aa, Homo sapiens
LKPGAPRWSEDGRRGSETRLLVSSAAADVWKEMAPLRRLTVWRVGLRLGPAGAAGGPGEASSV

SEQ ID NO: 13811 - protein, 56 aa, Homo sapiens
LLRRCVRRALDTAGLFRGGAPAGICIWDRPPGLADQRGSSSNVCCGGCNSIPASSW

SEQ ID NO: 13812 - protein, 84 aa, Homo sapiens
LEEAAGARPGMRRAPASPPPARAAAPAFPAVVPHSVPAPRGRRLLPLGAVAACAVSAAQPLSPSLRQPRRTAHQEARARMGSLC

SEQ ID NO: 13813 - protein, 132 aa, Homo sapiens
VDGASSPSCRPSTRSCRRPFSEVTRRSRRCLGPSTHRENSRRAASPAPAPSITRDSLGETWRSLSRAQASLCPWWWRAAFASSTSMACSMKASSGYRVPSSGSQRSVMPSREGRTHWWRAALPMTWTRWPGC

SEQ ID NO: 13814 - protein, 72 aa, Homo sapiens
MKVRLRKRRSRNCQNTTPEPSDAPGDSSDSTPLAAAVISMCTGTGSQTRNLKKQKLTEGAFLFRLPEVPFYT

SEQ ID NO: 13815 - protein, 52 aa, Homo sapiens
VMISFVCCLFLKENNPKGRSSKYGLLHCGNTEKDGKSPLTAHDARHTKAICL

SEQ ID NO: 13816 - protein, 17 aa, Homo sapiens
VGHGRVDLRCDQQERPL

SEQ ID NO: 13817 - protein, 24 aa, Homo sapiens
VVLRVECPLCPGLHHERPGLHRHQ

SEQ ID NO: 13818 - protein, 29 aa, Homo sapiens
LVSWKEAPGLAGWAQPVSKSPNTFSSSST

SEQ ID NO: 13819 - protein, 53 aa, Homo sapiens
MLFSISLYLISDLKLLMQFMNLRKKNVNGNQMKKMRFRLVPTLFWYVFKMIKS

SEQ ID NO: 13820 - protein, 45 aa, Homo sapiens
LEAAFVAAVDAGKRHKVRWPTPFFPPASVEPPARVRRRRRGELAA

SEQ ID NO: 13821 - protein, 31 aa, Homo sapiens
VSTSQTSLATTPRSVAAFSWLRASSRLPLST

SEQ ID NO: 13822 - protein, 9 aa, Homo sapiens
LQTPLPAAV

SEQ ID NO: 13823 - protein, 150 aa, Homo sapiens
LSPSHVSSLLTLELWLQPPRAAVDPGNLRTQTSSLPWGMIRRMIFPGGSARVWRTSAWIWGPFRAASICRTWALGPLPTASLGRPQTAAPPVKNQEEILFSPAWQGPKTCQGGAAGKGRGAAQRAGGGSASMPQLWMRNPVSPEHWPALL

SEQ ID NO: 13824 - protein, 49 aa, Homo sapiens
LSVRRGSGLKSAPPVLVPAPSHRPIPLPESKFPGIMFRKGTRRGNTCTG

SEQ ID NO: 13825 - protein, 67 aa, Homo sapiens
LRGNASVTHSLSPDETGVQGTGSSSHSGLCQRCKIWCRCPSLNASRCRPFSRCCGRYNGAKGKNSDY

SEQ ID NO: 13826 - protein, 89 aa, Homo sapiens
VEAWCCLLSPTPLTHLSFCSREAPATCSYNSRDPWPSVQPTTGGRHLQVSQRQWSPEGPGHRPSTGNEDSKRCEPRLVQDEEQAPSGHG

SEQ ID NO: 13827 - protein, 100 aa, Homo sapiens
LKADPYKQADHQGWSQATRLGAMQKWRSAPGKAGECRKEGGLREAGGSLHPPVAWVGLCPPNPPTQLPTLGAQFLPPLPSSAWCGSSLRERAEEVAFLLP

SEQ ID NO: 13828 - protein, 195 aa, Homo sapiens
VNLLGLGEAVWTKQVRSVAMFSEQAAQRAHTLLSPPSANNATFARVPVATYTNSSQPFRLGERSFSRQYAHIYATRLIQMRPFLENRAQQHWGSGVGVKKLCELQPEEKCCVVGTLFKAMPLQPSILREVSEEHNLLPQPPRSKYIHPDDELVLEDELQRIKLKGTIDVSKLVTGREPNERMWVMQGLSWLCLAP

SEQ ID NO: 13829 - protein, 87 aa, Homo sapiens
VRGCCAPGSRVSPPERVEEAQAVLGALPLPFPPASSPGPLALHCLSDARLSRPGVSLSPRLQCSGAITRHCNLCLPDSSNSPPQPPK

SEQ ID NO: 13830 - protein, 88 aa, Homo sapiens
VGAASLPMIRLFSAQSQRSVCDRRLSRRCRCRCHCHCHLADQEPALFARRLAAGGRKREGSRLRVCRRCSPTAWKSRAPAQSVACHRS

SEQ ID NO: 13831 - protein, 84 aa, Homo sapiens
LARRRGGRGRAPLLQFPLPAPRGRFQSNKLATATCGIFPREPAQRGRRARRGIAAGAGQGRRLEAAARRSPGPWMLRAEALPVT

SEQ ID NO: 13832 - protein, 86 aa, Homo sapiens
LAYTGWPLLCHRGLSRDHMAVVRSCCGCPIGDLAATVPVLVCSVWVHSPGDRGLVRSLLRRPAWRPSLLISTLERVCQGRQPIHPG

SEQ ID NO: 13833 - protein, 8 aa, Homo sapiens
VLELWLPL

SEQ ID NO: 13834 - protein, 8 aa, Homo sapiens
LMPDITRL

SEQ ID NO: 13835 - protein, 53 aa, Homo sapiens
LLPEDQPAEDRGRRPLPCLRVLRGLQRHQHDTCHPAHLPQAEEAQNHVEPQAQ

SEQ ID NO: 13836 - protein, 95 aa, Homo sapiens
MPDAGHLLLYLAAGPLCGHHGDSYLLRGPLCCHPPSVPGEEPVPGCAPMGLLCGVEPGGPPDSGSRAERCSHREGGPGPHGRGGGRHAGHLRPGI

SEQ ID NO: 13837 - protein, 117 aa, Homo sapiens
LRLDLRRPQPRCSGRPASAGKSAPPLPPPSAARAPRSRRPPPRRDAAAATRRAQPHVADPPPGPQCPGPRRPPLSCPRPRPQGRDELPEPTAAAATPPRRGGLHLAAEADLLALQRL

SEQ ID NO: 13838 - protein, 43 aa, Homo sapiens
LQKEQSTLPTGLLVAELQVLTQIRLFEKQRARKTQAQRSIQAE

SEQ ID NO: 13839 - protein, 68 aa, Homo sapiens
MDRAAAQSLWAPTASSLLFLQSSHRPQPQPGPEPPEVVPLTGHPPAGGGRELFHAYGLPRFGTHFSTP

SEQ ID NO: 13840 - protein, 52 aa, Homo sapiens
VGPSTTSMRKRKRKKRRRRSHPQNLLSWSTISPTNSKITSSRSQSSVMSVPG

SEQ ID NO: 13841 - protein, 23 aa, Homo sapiens
VEGAEREGVTYKKLDLLDSMAPG

SEQ ID NO: 13842 - protein, 59 aa, Homo sapiens
MSSATGAPRQSYHLDQKIEQSELQPKISKSLMQTIRCLTSKDFMAEHSMTPSFKRRRKT

SEQ ID NO: 13843 - protein, 61 aa, Homo sapiens
VARGGAGGGAGQSYHLDQKIEQSELQPKISKSLMQTIRCLTSKDFMAEHSMTPSFKRRRKT

SEQ ID NO: 13844 - protein, 31 aa, Homo sapiens
VNRPRSETEQVKTPVLISSGIAPVNSHCTPA

SEQ ID NO: 13845 - protein, 7 aa, Homo sapiens
VGSGFID

SEQ ID NO: 13846 - protein, 33 aa, Homo sapiens
VPLPAAQDLVSAHRPSPPQRASQGGEEPAQLGN

SEQ ID NO: 13847 - protein, 36 aa, Homo sapiens
LLPVCHPEEMAAVHEHQEHHTESLRWAFQGHLPGDL

SEQ ID NO: 13848 - protein, 108 aa, Homo sapiens
VLGSPPGEDGGSDCPAAAAGTATGARGALASPNGVALLWAPVPCELPGPAAGGKLWEHEGLAGAHLRLRLHEHLYLRVEDEWSHQLQHRAPPVVPAGFSALRSPHVYP

SEQ ID NO: 13849 - protein, 69 aa, Homo sapiens
LPEPGVCEGRDPVPRPTVGVCKPERTGLQIREESASCLAAEYWSQEPAMRLYSQRMSVPRTSSCHQFGF

SEQ ID NO: 13850 - protein, 282 aa, Homo sapiens
LGGAGCLGGGAAGPAGCSALPAALPMVVPTQPARRLQPRKSSFPGDGDEAPGPGGGEGAAAGGGGGGLGSGGRSAQRRAGAGARRPIGAAPSVGPGGELQGWGRKSGCRPPGPEGWAGGRKLRRWLPPRRFSNFCCRSPCAQTAVRRRRRRAPSPRGAGWREGAGAGRGTPATMAGGEWAAEPLHLPQRGRPAPLHLPEREATEARPRRRRARRRLRVLEPHPPARLGRGIGRVWVKGITAWGLEGHIFSAPRISATASTARRPTVVQRWGARAAFPSRVPD

SEQ ID NO: 13851 - protein, 79 aa, Homo sapiens
LDVAHVRSARSRAGVAQGGCPPLHADPAALRALREQQEQGGDCGWRESEAADLGHRWAGTVPKRHPCLLQRCSGLASAV

SEQ ID NO: 13852 - protein, 82 aa, Homo sapiens
VLGELRGGGAVQAEYLQLPPHRGLRLPGHPASEAAGGPVLRPVLGLAGTGGVPGPQECAGHRGGADGHLDGPLLLPPAAPAE

SEQ ID NO: 13853 - protein, 8 aa, Homo sapiens
LEAHSEVF

SEQ ID NO: 13854 - protein, 174 aa, Homo sapiens
LAGRRGLCAAPGTLNPSPGLCLLRCFRGDGQGAPGRRRARAGRRGAWSLARTLRSEGKARTKKDQMAKQPSDVSSECDREGRQLQPAERPPQLRPGAPTSLQTEPQDRSPAPMSCDKSTQTPSPPCQAFNHYLSAMASMRQAEPADMRPEIWIAQELRRIGDEFNAYYARRLEK

SEQ ID NO: 13855 - protein, 76 aa, Homo sapiens
VTGIVVLQKSGNRPEDLRAAQLPGRLAQGREKAQKESYSRVLWIFQRSYFVQLVTRPSRTTKNRGNIISLTGIGLT

SEQ ID NO: 13856 - protein, 33 aa, Homo sapiens
MPRSQPYWRCCCNFLCKRRSEIFCKWRTWKWKH

SEQ ID NO: 13857 - protein, 68 aa, Homo sapiens
VQCLVLFAGVSPPGFACPRERHWRPCGLCCTSDGFAPASALSLLQHSDLHPLRGFHCPRGENAPGSVT

SEQ ID NO: 13858 - protein, 40 aa, Homo sapiens
LGAAAAWGSVWIVSYFRTVLRTHYFNIWEKHSQKNTDICI

SEQ ID NO: 13859 - protein, 63 aa, Homo sapiens
LRIFALPSAFDRLPLQPSRSGDPASSEIGLPPVRPEFGKPRWVHTSTSRSYGERSSLMSCAFF

SEQ ID NO: 13860 - protein, 87 aa, Homo sapiens
LKSDEPERELESKMNSLTQQEGKLTWLMLTLRVSKQKQAPGKIPKYCYQKLEFMIMTLTFVSGCRKGLKFILIHAWKKTNQALFMLP

SEQ ID NO: 13861 - protein, 28 aa, Homo sapiens
MNVQATAYLFLPAVGYHREALPQRQFVQ

SEQ ID NO: 13862 - protein, 260 aa, Homo sapiens
LRATTAPCGWLGTWASKGTRQWGWPTSGPCACMRVPAGWPSTTSWRPCGCSRGCPLGSVAGTSPTCSCSWAISAPARARPSRARATTSGPFWSPWRWATWRASCGPSSGCATSTAPSCPARPSVSSTMSSSSPWPARWPTRCWRGSSWRPSASSTCPWAPSGPTNPHWTTPNEVWGFSLTSRRKRRRRMPGCKQGRSITSCGRASWWTSTSRWHRTWPCTQATPTWGWSCLRRLETSSSTGPGSGRKLCPSTGTGPCPWQ

SEQ ID NO: 13863 - protein, 240 aa, Homo sapiens
LGSVAGTSPTCSCSWAISAPARARPSRARATTSGPFWSPWRWATWRASCGPSSGCATSTAPSCPARPSVSSTMSSSSPWPARWPTRCWRGSSWRPSASSTCPWAPSGPTNPHWTTPNEVWGFSLTSRRKRRRRMPGCKQGRSITSCGRASWWTSTSRWHRTWPCTQATPTWGWSCLRRLETSSSTGPGSGRKLCPSTGGPAERARGLPPAGRPATPTGPWRAGRALLPQGPVALQLAAGV

SEQ ID NO: 13864 - protein, 17 aa, Homo sapiens
LEKTGGDVKVTHLAGRH

SEQ ID NO: 13865 - protein, 22 aa, Homo sapiens
LAYQALQDMFALLGGVWRRPDL

SEQ ID NO: 13866 - protein, 31 aa, Homo sapiens
VGVLCPLLAQQQQPYHRLLWLGQAGQGMEPG

SEQ ID NO: 13867 - protein, 240 aa, Homo sapiens
LLGDGLRLGRRPEDPAPARPPAASLLARGPQRKTGRQRNLSTPLPLCALRRSGGAAPSRPGGPRRRVTCLTAAPPPASALPALGRRSPAPAARGLGALAPRVCRTPGRAQQRVEVLTGRRRCRRRPSPVPRPGACTRFLQERAKLVCWIPAAGAQKERFHLFWEQETLLRHSCLSVLTGRQWVCYSTSRNHCVCIGQDPGGQHGHRLQRYGHQDAAGNHFSASNVSDCECEKGYDYFGEE

SEQ ID NO: 13868 - protein, 61 aa, Homo sapiens
MACLCAGRMLRASAHTRTARTLQERRRMKRRRRWIQRRPRWLAPGTRCFQSPSALRPPPSP

SEQ ID NO: 13869 - protein, 18 aa, Homo sapiens
VISFQFSSVFRKSLKIRL

SEQ ID NO: 13870 - protein, 109 aa, Homo sapiens
LGLVVRSGRDRPARPRPRSSSKKEPRDRGLPAARTRHRHPRSPPAAGSQRQWIDPVLRPLSSFQFRLIFVPLRLLPAPLPPAPAPSPGTRSPPLTERSRPVALRAAVPR

SEQ ID NO: 13871 - protein, 110 aa, Homo sapiens
LGLVVRSGSRDRPARPRPRSSSKKEPRDRGLPAARTRHRHPRSPPAAGSQRQWIDPVLRPLSSFQFRLIFVPLRLLPAPLPPAPAPSPGTRSPPLTERSRPVALRAAVPR

SEQ ID NO: 13872 - protein, 131 aa, Homo sapiens
MGCSKGPWRQAFQVDVHVSDLALPQCRLQTGMRGAFGKPQGTVARVHIGQVIMSIRTKLQNKEHVIEALRRAKFKFPGRQKIHISKKWGFTKFNADEFEDMVAEKRLIPDGCGVKYIPSRGPLDKWRALHS

SEQ ID NO: 13873 - protein, 74 aa, Homo sapiens
VRSLPPHDAPTRPTCTQGAFPSSKWTPSRKLQLGQQRRGLPPAPWRKRKRNPRGWLVSQQPHRLCAQPVHLRIT

SEQ ID NO: 13874 - protein, 588 aa, Homo sapiens
MQAAGPLFRSKDKVEQTPRSQQDPAGPGLPAQSDRLANHQEDDVDLEALVNDMNASLESLYSACSMQSDTVPLLQNGQHARSQPRASGPPRSIQPQVSPRQRVQRSQPVHILAVRRLQEEDQQFRTSSLPAIPNPFPELCGPGSPPVLTPGSLPPSQAAAKQDVKVFSEDGTSKVVEILADMTARDLCQLLVYKSHCVDDNSWTLVEHHPHLGLERCLEDHELVVQVESTMASESKFLFRKNYAKYEFFKNPMNFFPEQMVTWCQQSNGSQTQLLQNFLNSSSCPEIQGFLHVKELGKKSWKKLYVCLRRSGLYCSTKGTSKEPRHLQLLADLEDSNIFSLIAGRKQYNAPTDHGLCIKPNKVRNETKELRLLCAEDEQTRTCWMTAFRLLKYGMLLYQNYRIPQQRKALLSPFSTPVRSVSENSLVAMDFSGQTGRVIENPAEAQSAALEEGHAWRKRSTRMNILGSQSPLHPSTLSTVIHRTQHWFHGRISREESHRIIKQQGLVDGLFLLRDSQSNPKAFVLTLCHHQKIKNFQILPCEDDGQTFFSLDDGNTKFSDLIQLVDFYQLNKGVLPCKLKHHCIRVAL

SEQ ID NO: 13875 - protein, 63 aa, Homo sapiens
LIRSAGRAAALGSEFACGLRGTAAHEERSVSDRDFSKPGSARESTSKSAGGILINPALPGASW

SEQ ID NO: 13876 - protein, 65 aa, Homo sapiens
LVYLQPPSPLLLLFDDSGPRLPSRYCRKTQLSSSSPNHLEAGLRHNWNIIWRKCHGSSASTAYKN

SEQ ID NO: 13877 - protein, 46 aa, Homo sapiens
LGQGVARVLREMWSPTQNNGGGKGKKRRSAPVRTIPLWPSTSTRAL

SEQ ID NO: 13878 - protein, 189 aa, Homo sapiens
LTDYCERPLSPAERRPWPPLRAPGPRWNSEGPWAPRLCYCCCPPPCSTCSWRPVRAPRACWVHPRPCRGWRCCGAHGRCCCGSPGSACRRRSTYCRRARLPGPGADSPVGGAGDVSGAASGGAPGNAPALGVCRHPHRFHLQPLSLHEGAGSPSFGPGTWGELRQSDLRLFSGTRAQPSYLFLRLQIFL

SEQ ID NO: 13879 - protein, 75 aa, Homo sapiens
MLCSVFSKLKSARFAKLWAEHSGNHTLRNCGGSGLQPPKAPCQTKHACHTCYNSLDGFFCLQLFTHSKYFARYRK

SEQ ID NO: 13880 - protein, 137 aa, Homo sapiens
LGATLSTKANPTATTPATQPCLGLKALGGAEPRATLSSKPALPGARKWVRTRQNRLHSNSRGTVHWAWTRRRDPADAVIGCMSGQRDLRALAAPLPCALATPCGQRLGIARPGGPSPLGEVSTMLPGLPEAGTGTTT

SEQ ID NO: 13881 - protein, 56 aa, Homo sapiens
VTGLHHFLSSLAFVWWGYTRVQHAYRKVLFLFGAHLSWTRHDVRPQRLQGVQILQI

SEQ ID NO: 13882 - protein, 19 aa, Homo sapiens
LTTLGAGTFHSQLDAHSAQ

SEQ ID NO: 13883 - protein, 67 aa, Homo sapiens
LAKDLFLLTTKGLRLDFQGRISSEAPPAALCRRTLHTRPSPVPGTCYYQHHALPISSTDPGAEEGAV

SEQ ID NO: 13884 - protein, 16 aa, Homo sapiens
LLTGPACLADSSARDP

SEQ ID NO: 13885 - protein, 209 aa, Homo sapiens
LPPEEFGSCPKPAPFHSQLLCQHREHQHFAKKDCPITDRTSVDRFKATGLTPKRHPGAHSPASSRRWYLGHNSQPTIQLTSAIVRWQGQPRHVIHRKRFNRTLFPSQLYCHGGPHQLTSSIYGCQWRNRDKYAGREADQVSGLAENTSAFPLPGPTFTGQCRDTSAGFWRAPHRSAKKGGTGPSCVLPPLRVGRSCEHVLSNPLHRDRS

SEQ ID NO: 13886 - protein, 234 aa, Homo sapiens
LAPAPHATSGWGPSEPHRRHHCEDRECHWPQLLPPEEFGSCPKPAPFHSQLLCQHREHQHFAKKDCPITDRTSVDRFKATGLTPKRHPGAHSPASSRRWYLGHNSQPTIQLTSAIVRWQGQPRHVIHRKRFNRTLFPSQLYCHGGPHQLTSSIYGCQWRNRDKYAGREADQVSGLAENTSAFPLPGPTFTGQCRDTSAGFWRAPHRRCACTHLSPHHQISPLRVRMVTLPPWRI

SEQ ID NO: 13887 - protein, 44 aa, Homo sapiens
LPIPSPPASRTLGPVTVASGWASKAGRSPATPEASRPGPLDLSL

SEQ ID NO: 13888 - protein, 7 aa, Homo sapiens
MGEKETR

SEQ ID NO: 13889 - protein, 26 aa, Homo sapiens
LAEQEAPSCYTGFWPEEPTPHSTRLC

SEQ ID NO: 13890 - protein, 10 aa, Homo sapiens
LAVGEHHGNR

SEQ ID NO: 13891 - protein, 166 aa, Homo sapiens
LQPPCEPCHTAIASSRYSVRCVPAATASAPFLGPCSPKCLTLTLGLRNARKKDQMAKQPSDVSSECDREGRQLQPAERPPQLRPGAPTSLQTEPQDRSPAPMSCDKSTQTPSPPCQAFNHYLSAMVVILEDIGDLSLCFGFIFTGLDLYGHHHSQDTEQLNHKDFS

SEQ ID NO: 13892 - protein, 189 aa, Homo sapiens
LQPPCEPCHTAIASSRYSVRCVPAATASAPFLGPCSPKCLTLTLGLRNARKKDQMAKQPSDVSSECDREGRQLQPAERPPQLRPGAPTSLQTEPQGNPEGNHGGEGDSCPHGSPQGPLAPPASPGPFATRSPLFIFMRRSSLLSRSSSGYFSFDTDRSPAPMSCDKSTQTPSPPCQAFNHYLSAMANWD

SEQ ID NO: 13893 - protein, 223 aa, Homo sapiens
LQPPCEPCHTAIASSRYSVRCVPAATASAPFLGPCSPKCLTLTLGLRNARKKDQMAKQPSDVSSECDREGRQLQPAERPPQLRPGAPTSLQTEPQGNPEGNHGGEGDSCPHGSPQGPLAPPASPGPFATRSPLFIFMRRSSLLSRSSSGYFSFDTDRSPAPMSCDKSTQTPSPPCQAFNHYLSAMASMRQAEPADMRPEIWIAQELRRIGDEFNAYYARRLEK

SEQ ID NO: 13894 - protein, 194 aa, Homo sapiens
LQPPCEPCHTAIASSRYSVRCVPAATASAPFLGPCSPKCLTLTLGLRNARKKDQMAKQPSDVSSECDREGRQLQPAERPPQLRPGAPTSLQTEPQGNPEGNHGGEGDSCPHGSPQGPLAPPASPGPFATRSPLFIFMRRSSLLSRSSSGYFSFDTDRSPAPMSCDKSTQTPSPPCQAFNHYLSAMVREIEEVVV

SEQ ID NO: 13895 - protein, 226 aa, Homo sapiens
LQPPCEPCHTAIASSRYSVRCVPAATASAPFLGPCSPKCLTLTLGLRNARKKDQMAKQPSDVSSECDREGRQLQPAERPPQLRPGAPTSLQTEPQGNPEGNHGGEGDSCPHGSPQGPLAPPASPGPFATRSPLFIFMRRSSLLSRSSSGYFSFDTDRSPAPMSCDKSTQTPSPPCQAFNHYLSAMASMRQAEPADMRPEIWIAQELRRIGDEFNAYYARRMPLPPD

SEQ ID NO: 13896 - protein, 189 aa, Homo sapiens
LQPPCEPCHTAIASSRYSVRCVPAATASAPFLGPCSPKCLTLTLGLRNARKKDQMAKQPSDVSSECDREGRQLQPAERPPQLRPGAPTSLQTEPQGNPEGNHGGEGDSCPHGSPQGPLAPPASPGPFATRSPLFIFMRRSSLLSRSSSGYFSFDTDRSPAPMSCDKSTQTPSPPCQAFNHYLSAMGIFE

SEQ ID NO: 13897 - protein, 192 aa, Homo sapiens
LQPPCEPCHTAIASSRYSVRCVPAATASAPFLGPCSPKCLTLTLGLRNARKKDQMAKQPSDVSSECDREGRQLQPAERPPQLRPGAPTSLQTEPQDRSPAPMSCDKSTQTPSPPCQAFNHYLSAMASMRQAEPADMRPEIWIAQELRRIGDEFNAYYARRVFLNNYQAAEDHPRMVILRLLRYIVRLVWRMH

SEQ ID NO: 13898 - protein, 252 aa, Homo sapiens
LQPPCEPCHTAIASSRYSVRCVPAATASAPFLGPCSPKCLTLTLGLRNARKKDQMAKQPSDVSSECDREGRQLQPAERPPQLRPGAPTSLQTEPQGNPEGNHGGEGDSCPHGSPQGPLAPPASPGPFATRSPLFIFMRRSSLLSRSSSGYFSFDTDRSPAPMSCDKSTQTPSPPCQAFNHYLSAMASMRQAEPADMRPEIWIAQELRRIGDEFNAYYARRVFLNNYQAAEDHPRMVILRLLRYIVRLVWRMH

SEQ ID NO: 13899 - protein, 40 aa, Homo sapiens
LAFGCTCSGIFSTRGRHRRRLASSGLICATCPLHTPPPSW

SEQ ID NO: 13900 - protein, 63 aa, Homo sapiens
LGAVRRADHRGSWAGHGRLSKADLLQLPPRALAPPGRRPSARESPLGRSSACSRGRSRFRSWL

SEQ ID NO: 13901 - protein, 77 aa, Homo sapiens
VAASLPCAGPQEATRKRPPPCAPPLRLARWLPAPPDVSYLLTALPGALLAPFCPSSVSAAAGSCSGAEWLTSVLQMH

SEQ ID NO: 13902 - protein, 82 aa, Homo sapiens
VPESGGLAAIKLVAKGRRRGLSFRGSLPFLCCRSVTLVPEGGNSDRPGDCSSLSFTQLFHHAWITSFECRSLLAKRCGNCCP

SEQ ID NO: 13903 - protein, 16 aa, Homo sapiens
LCCNRAPAIPGASPFL

SEQ ID NO: 13904 - protein, 106 aa, Homo sapiens
LSTCASAPSCGAGPRAPWAWSTSCPTPSSAAACWPAPTTPWCCWTSAAPPWTAPSATAPWPWRPARSAARRAPRKSSSSKEDTKRFRLPARSCAANSRPPWGSAFP

SEQ ID NO: 13905 - protein, 81 aa, Homo sapiens
LFFSSNFPAVTPSHARALKVRSCPEERLQEGSDKGPEEGRQEAQAQPQGELLRVRVQGAEAGPPRHRYLVQGHGHHELLRQ

SEQ ID NO: 13906 - protein, 89 aa, Homo sapiens
VQKSRLRVFWDSRKQGLLHTVSSSTEKTNILLLPQGKSVPQRPGSRTPFRAWGGNAAPLEAPCLKDTARSVSLKLRIRDFMRPKGQKSN

SEQ ID NO: 13907 - protein, 22 aa, Homo sapiens
LAGRPVLRTPYFVVAAARSSAV

SEQ ID NO: 13908 - protein, 52 aa, Homo sapiens
LGSVEVVGVTSPSPAPVPASRCPSRSSHALRPRPACQRCSPPQLQHLGPEQC

SEQ ID NO: 13909 - protein, 20 aa, Homo sapiens
LLVSPTPSRLLQTPWLALGA

SEQ ID NO: 13910 - protein, 27 aa, Homo sapiens
MQSPRIQGQRRAQPSQLEAHGAGPRTQ

SEQ ID NO: 13911 - protein, 28 aa, Homo sapiens
MQSPRIQGQRRAQPSQLEAHGAAGPRTQ

SEQ ID NO: 13912 - protein, 28 aa, Homo sapiens
MQSPRIQGQRRAQPSQLEAHGAAQCRCI

SEQ ID NO: 13913 - protein, 66 aa, Homo sapiens
LEGPVGLVFTLRLEAVSRGVKTDYLVFNRTLPLEALQLWLPCHICVIRWQRLERLCLRSAFCPVNV

SEQ ID NO: 13914 - protein, 67 aa, Homo sapiens
LGASASPSPASPASSASSPAAGTRDPSVCPTPDPARDMSTPARRRLMRDFKRRILQPESAGLRPRTT

SEQ ID NO: 13915 - protein, 74 aa, Homo sapiens
VFCVLENVAEEVSVAWRLAAAGRIHRGPEARARRRAALSPRGAEPELRQSLPARLFIQGFCGSLLKFYLKIALK

SEQ ID NO: 13916 - protein, 102 aa, Homo sapiens
LGRPSPRRDALQANGEGPEVGPGTEEPAHRLPVGSGSAARSQKGEGRRELACGTPDRRGCAFPAPGPSRHTRSSPLARANAQDDHHPRVCHHLRLERSFMQG

SEQ ID NO: 13917 - protein, 61 aa, Homo sapiens
LCAPSGERLCQLPHSNILNKVKTQPTGGSPRIRVEAHRGEGANHGKGEWMGLRGSWTLCDI

SEQ ID NO: 13918 - protein, 63 aa, Homo sapiens
LKVTAPAGTQGAGPGSPGAGIGQRAGRRRDCGGPQRDNLEAEAVAPCTAAARAVAPDLFVFAA

SEQ ID NO: 13919 - protein, 90 aa, Homo sapiens
LNSSSRPSHHGSLSVVSPHTPPIDPEFFSAWSSGPNPPLPRLRAKTARMPAVSAEERRWRLTDQSRWSWRRGRQAADSANIICPRLKNSS

SEQ ID NO: 13920 - protein, 60 aa, Homo sapiens
LDYPRQGLCNIFFRLFWKDFAASRRSWTSALALWEGFGLSGSDFAISPWGLPWSRIHCGL

SEQ ID NO: 13921 - protein, 21 aa, Homo sapiens
VVSFSGLRVEVLITPRNSITI

SEQ ID NO: 13922 - protein, 127 aa, Homo sapiens
LPSPLLPRPPPSDSPLPSLYPPSCLPASHIRPPDLSPQTWTNVASEAQPCAGRSAVRTLPAPTAVSGTAILGTTRAPRAPVTMWMSAKNMVPRFVEPSVVRTPLAPTAAHQPVTLAISPRQGADARM

SEQ ID NO: 13923 - protein, 19 aa, Homo sapiens
VGSSAEGCTKTFLACPRQS

SEQ ID NO: 13924 - protein, 19 aa, Homo sapiens
MPSVKAVLAISHHGTASCR

SEQ ID NO: 13925 - protein, 46 aa, Homo sapiens
LAPAAEFGRCLSDFFFFPEGKWLAWKHNPLSLFEFVLSSFLVPCDS

SEQ ID NO: 13926 - protein, 49 aa, Homo sapiens
MGLGCSQQLKLPATSPEESASRLEMQWILLRTGDHGQTSTGCQVPGLHP

SEQ ID NO: 13927 - protein, 76 aa, Homo sapiens
VLRSSNWDSEPGLFLALARLQEGIRICYQRRPRRSQAGPQRPAPPLPATRSAHRRPAAELAHPSHHSSTCSLEKGR

SEQ ID NO: 13928 - protein, 81 aa, Homo sapiens
LRLPSRKATAEETPVTVLAPPPPSLPLGTTGRHAANVIALQVCNKKWPPTKLHCKKWEKNRMERVKKLKRQSLKNLSWKKY

SEQ ID NO: 13929 - protein, 64 aa, Homo sapiens
LSRNQVGIAEQRRFTVLYRLIALQVCNKKWPPTKLHCKKWEKNRMERVKKLKRQSLKNLSWKKY

SEQ ID NO: 13930 - protein, 51 aa, Homo sapiens
LSCIFLVIALQVCNKKWPPTKLHCKKWEKNRMERVKKLKRQSLKNLSWKKY

SEQ ID NO: 13931 - protein, 92 aa, Homo sapiens
LQGSGNRSGNANRSAARRLGCRLSAAALGRETRQRNQEANGRLDAGGEKAGGAPCSWTPVKGGRAESLGRHLPLGWCAVVRPRLTAASATQM

SEQ ID NO: 13932 - protein, 47 aa, Homo sapiens
VSRICSCVAHSCWILSSRGTNVLKNGKKGGSEGTDSNTMPEVEDTGA

SEQ ID NO: 13933 - protein, 14 aa, Homo sapiens
LTSCDGEKKEVSEN

SEQ ID NO: 13934 - protein, 22 aa, Homo sapiens
MLSSHLFIRQHRKQQGYHQGQE

SEQ ID NO: 13935 - protein, 9 aa, Homo sapiens
MKPSRAENK

SEQ ID NO: 13936 - protein, 61 aa, Homo sapiens
LSAETSQAPSLPGSSVKRTILKEDPANTVYSTVEIPKKMENPHSLLTMPDTPRLFAYENVI

SEQ ID NO: 13937 - protein, 14 aa, Homo sapiens
LPGVMRGSATPRST

SEQ ID NO: 13938 - protein, 18 aa, Homo sapiens
LRDPPTLQMDPCGRQPHG

SEQ ID NO: 13939 - protein, 13 aa, Homo sapiens
LIAAIMGRMHAPG

SEQ ID NO: 13940 - protein, 40 aa, Homo sapiens
LLRLVRRRSRNPAFFFSLRHGLTLSPLLECSGAITDHGSV

SEQ ID NO: 13941 - protein, 14 aa, Homo sapiens
VTVSSASGPLPASP

SEQ ID NO: 13942 - protein, 79 aa, Homo sapiens
MACGGLRGGVQPATVGALVLCPGAGGIRGGLQGGRGQLPPAAACAGGRGWSWPDSRGGTATPAPAGPPEPGKTACPCPD

SEQ ID NO: 13943 - protein, 213 aa, Homo sapiens
VVGCWVWSFPAPLGSDPLSVLLRRQPTSLLGAMTTTTTFKGVDPNSRNSSRVLRPPGGGSNFSLGFDEPTEQPVRKNKMASNIFGTPEENQASWAKSAGAKSSGGREDLESSGLQRRNSSEASSGDFLDLKKMWTQTCQAAWGRVKRSPCLLRLCPARWPRPQCHPEEIPLAASPASSWVSSDCPERCRSVCFLHACELHNLSLTVHLLDLFH

SEQ ID NO: 13944 - protein, 15 aa, Homo sapiens
LEARDLIFMNERSRD

SEQ ID NO: 13945 - protein, 52 aa, Homo sapiens
LEKTAGTSLQAVCHPDHVYLWGSHVAGRAQGIHQKTLSCGGDVKVTHLAGRH

SEQ ID NO: 13946 - protein, 7 aa, Homo sapiens
MRSSSGS

SEQ ID NO: 13947 - protein, 9 aa, Homo sapiens
LMLMGNLSA

SEQ ID NO: 13948 - protein, 23 aa, Homo sapiens
LAQPLARLRSLARLPASASQPPP

SEQ ID NO: 13949 - protein, 58 aa, Homo sapiens
LRLHSEKLPLAARSAGPSLLVIIQSSQCPGGRRCPTPACIHPSRVPGVTGPRRQPWFC

SEQ ID NO: 13950 - protein, 73 aa, Homo sapiens
MCVLPLAECVESCSGVRLHSEKLPLAARSAGPSLLVIIQSSQCPGGRRCPTPACIHPSRVPGVTGPRRQPWFC

SEQ ID NO: 13951 - protein, 17 aa, Homo sapiens
VILSSALSSSTHARDEL

SEQ ID NO: 13952 - protein, 67 aa, Homo sapiens
LAALPGRGGRRWRAPRPSLSPEPGGARTWRGELPPRPGTQTPPSQSPPPQSILGTGNGLRILQCTCN

SEQ ID NO: 13953 - protein, 110 aa, Homo sapiens
LVAASLAGVRKMATNFLAHEKIWFDKFKYDDAERRFYEQMNGPVCALSSWTGWSGGLPSWCPWATVSGSYRFSVWWRTTRWGQTCWRRRSPSLRSTCRVSISQLSTRSEA

SEQ ID NO: 13954 - protein, 47 aa, Homo sapiens
MPHHCPPEHATKLLQVLEATRVNRRKSALALRWEAGIYANQEEEDNE

SEQ ID NO: 13955 - protein, 62 aa, Homo sapiens
LRTLSTATTLRRNSGATHWWLALCQWCWGPHGPPMRPSCRLTPSCMWMTLAQPESWRLSSLA

SEQ ID NO: 13956 - protein, 7 aa, Homo sapiens
VSVCDSV

SEQ ID NO: 13957 - protein, 38 aa, Homo sapiens
VNCVWFLLLGDHAESFTSEERAAHVSHRATPRHHMLAR

SEQ ID NO: 13958 - protein, 39 aa, Homo sapiens
LSQESRTRAGGVGGLRVPAPVTMDSFFFALPHRGSQRRV

SEQ ID NO: 13959 - protein, 8 aa, Homo sapiens
LGLKSKVV

SEQ ID NO: 13960 - protein, 25 aa, Homo sapiens
LPSPPGVGTGGAGEVEVEPGSCHSS

SEQ ID NO: 13961 - protein, 10 aa, Homo sapiens
LALHRGEELR

SEQ ID NO: 13962 - protein, 42 aa, Homo sapiens
LDNYSQLLHRDPNESLIYTWTTTNGYTNGKQFYSALCNSSGK

SEQ ID NO: 13963 - protein, 7 aa, Homo sapiens
LCHPLSL

SEQ ID NO: 13964 - protein, 11 aa, Homo sapiens
VPRGPATPRFV

SEQ ID NO: 13965 - protein, 19 aa, Homo sapiens
LTKRPANSILSAAKCHRLS

SEQ ID NO: 13966 - protein, 7 aa, Homo sapiens
LGQVANT

SEQ ID NO: 13967 - protein, 104 aa, Homo sapiens
VIHTKGSKSPHQAEAPKHRSVHVLQGDASGRHRRRQNMFPDPIQRRGLPVRNLHSHRRHRLQEQGGDCGWRESEAADLGHRWAGTVPKRHPCLLQRCSGLASAV

SEQ ID NO: 13968 - protein, 97 aa, Homo sapiens
LRTSQTWPSVSSASRSWKAGSQMTTPCNGPGTVAYACNTSTLGGRGGRITREEHKKHSSGCAFLSVKKQFEELTLGEFLKLDRERAKNKIERALLAE

SEQ ID NO: 13969 - protein, 12 aa, Homo sapiens
MLYLKNTTSQRK

SEQ ID NO: 13970 - protein, 69 aa, Homo sapiens
VRMRNVRFGSRTARATAGPRCSVRPESCGLSHRPRPPEPDAAGGPGAAVEPTPRTPDVCGAVSRSHVPG

SEQ ID NO: 13971 - protein, 15 aa, Homo sapiens
VASRRLRDLLTRQRW

SEQ ID NO: 13972 - protein, 56 aa, Homo sapiens
LVYAVRGGRRRQRGAERGRRGLSRAAAAAVGPPAPAGGPKNAGRGPGGPAPGRPQP

SEQ ID NO: 13973 - protein, 72 aa, Homo sapiens
LPWLGLVCGLSNRFGFSSVPSRKTWNRRGDGHRLIMRGAHLTALEMLTAFASHIRARDAAGSGDKPGADTGR

SEQ ID NO: 13974 - protein, 10 aa, Homo sapiens
LARSCTARPL

SEQ ID NO: 13975 - protein, 30 aa, Homo sapiens
VRGPWALGERFRALGDSGEACSAVCVMWPS

SEQ ID NO: 13976 - protein, 13 aa, Homo sapiens
MEYPGCVQIHCPG

SEQ ID NO: 13977 - protein, 13 aa, Homo sapiens
LEGSGRKTEKGAV

SEQ ID NO: 13978 - protein, 74 aa, Homo sapiens
LAAHSETSGGGQGGYISVGGASVVALCAPALLLLFVYFLLLPRRRRRHHEGNRALAGRAVRQPNRRQVLGGDQR

SEQ ID NO: 13979 - protein, 74 aa, Homo sapiens
LPVASSEATPTSIELFDVSTPFPGCQEIAEEFRAQEIDGQALLLLKEDHLMSAMNIKLGPALKIYARISMLKDS

SEQ ID NO: 13980 - protein, 43 aa, Homo sapiens
LVGRAAPRWRVAAVGVDMNAGFQREQRFSFGHRKWCLQHRRRA

SEQ ID NO: 13981 - protein, 8 aa, Homo sapiens
LLRSFIGL

SEQ ID NO: 13982 - protein, 8 aa, Homo sapiens
LERDRVSP

SEQ ID NO: 13983 - protein, 8 aa, Homo sapiens
LEGAPSQL

SEQ ID NO: 13984 - protein, 13 aa, Homo sapiens
MVAGPELQRDLPV

SEQ ID NO: 13985 - protein, 23 aa, Homo sapiens
LAPENAQDENAQVQYAWLQSRGP

SEQ ID NO: 13986 - protein, 23 aa, Homo sapiens
LLCRGDCTARPARPARNGARRRQ

SEQ ID NO: 13987 - protein, 46 aa, Homo sapiens
LVHPLLSAGGQAAPHLPTIPEGQLQFPAGENVPPGQVLDLRLPSGV

SEQ ID NO: 13988 - protein, 120 aa, Homo sapiens
LCGRGTQGWPGSSEQHVQEATSSAGLHSGVDELGVRSEPGGRLPERSLGPAHPAPAAMAGTLDLDKGCTVEELLRGCIEAFAGGQAAPHLPTIPEGQLQFPAGENVPPGQVLDLRLPSGV

SEQ ID NO: 13989 - protein, 11 aa, Homo sapiens
LTADPGASAIW

SEQ ID NO: 13990 - protein, 110 aa, Homo sapiens
LPVLPLPEVPGGGHGEGSCPNRQPEGAAGPATFKTQAAPRCLPCQSPHFPGPCTPGLRAQHCQTGLLQVPGAGAAPLWEGRCWGCTAVLRPALRFSGGHPQVGGEDPWLC

SEQ ID NO: 13991 - protein, 492 aa, Homo sapiens
VLRVSTMTCGSYCGGRAFSCISACGPRPGRCCITAAPYRGISCYRGLTGGFGSHSVCGGFRAGSCGRSFGYRSGGVCGPSPPCITTVSVNESLLTPLNLEIDPNAQCVKQEEKEQIKSLNSRFAAFIDKVRFLEQQNKLLETKLQFYQNRECCQSNLEPLFEGYIETLRREAECVEADSGRLASELNHVQEVLEGYKKKYEEEVSLRATAENEFVALKKDVDCAYLRKSDLEANVEALIQEIDFLRRLYEEEIRVLQSHISDTSVVVKLDNSRDLNMDCIIAEIKAQYDDIVTRSRAEAESWYRSKCEEMKATVIRHGETLRRTKEEINELNRMIQRLTAEVENAKCQNSKLEAAVAQSEQQGEAALSDARCKLAELEGALQKAKQDMACLIREYQEVMNSKLGLDIEIATYRRLLEGEEQRLCEGVGSVNVCVSSSRGGVVCGDLCASTTAPVVSTRVSSVPSNSNVVVGTTNACAPSARVGVCGGSCKRC

SEQ ID NO: 13992 - protein, 130 aa, Homo sapiens [sequence omitted]

SEQ ID NO: 13993 - protein, 8 aa, Homo sapiens
LGEPSALQ

SEQ ID NO: 13994 - protein, 56 aa, Homo sapiens
MKAVWWSWSCGLSPRREAATDRRCGLSLPVPQRALPVQLPRGPAGLCRAGCGGGLL

SEQ ID NO: 13995 - protein, 69 aa, Homo sapiens
LVSMTATPQPGAALPPWATSVGGPHMGHSHGLSAPLNHTGPVCAWRVFREAEKGSPNARQTRPEWPLCS

SEQ ID NO: 13996 - protein, 37 aa, Homo sapiens
LLLSDASPGAGNEFQSTFLTPTILPSLRFPVLYTPNS

SEQ ID NO: 13997 - protein, 19 aa, Homo sapiens
MLTAFYSRLPLKPHVKKSL

SEQ ID NO: 13998 - protein, 41 aa, Homo sapiens
VIAKHAHGHGTHRTLPTSCLSDDNSFFFVSWNKSKLYPSVG

SEQ ID NO: 13999 - protein, 9 aa, Homo sapiens
MDLGMPVSR

SEQ ID NO: 14000 - protein, 46 aa, Homo sapiens
MGLCDGPQGCLHVLVALLCHQLLQELLRTAPGHVASAPGCQSPICG

SEQ ID NO: 14001 - protein, 90 aa, Homo sapiens
LRSRACVLGSNRCFLPLLFLCLPPISVRRADKGAILEGPRETWCRCGLALPCARLGGKACSRVRAFRHRHVGRWCDSWPRREQRLPHLRG

SEQ ID NO: 14002 - protein, 187 aa, Homo sapiens
LASPRVRTPDPSIPACRTVRVQLASCSCPRCSSWRLRFPGSVAEWAAAPAEMPGKKARKNAQPSPARAPAGPAGTAGTARDQAGFAIGMQLRFTRGKKLLSSSLSSSPLALPRGHEEQVQVAGSRVCYSTQEIWRQTELPAETSESDIQTLLLRNLTASKTCMRGLLQKSFLRRCTFHQFEERLHCN

SEQ ID NO: 14003 - protein, 86 aa, Homo sapiens
LDDFPASSTDLLPSPFLLFRDPAQGPPTLVQTWWALQREGWTCFSFTFICWCEPWGVYLYVGSRCLRFPFFPFPSLWGWKGGRDTS

SEQ ID NO: 14004 - protein, 82 aa, Homo sapiens
LTFSRSSSIPEAIAQRLNRQDPRGGVASGPEEAPVAKGTVPAKAPAQRLMHRLLQRLPVFPTSRDGFAHYQASFPCRHREEG

SEQ ID NO: 14005 - protein, 37 aa, Homo sapiens
MKRASCRRWLESDTSTNLSVTQMPSSPWLSRITSVRS

SEQ ID NO: 14006 - protein, 115 aa, Homo sapiens
LGATAASSIQTPAPPRARTPTPTQSFSSGGAASRAPRLNFLRGAQPPSGVRVAHLQTLRLLHLPPLSQRGRPSESWPTRGCSCWASFSPSWDGSAPSSALPCPSGGFTPMPATTS

SEQ ID NO: 14007 - protein, 33 aa, Homo sapiens
VGRRGCMFESGGEALQRWTKNECRNLGTELCKC

SEQ ID NO: 14008 - protein, 8 aa, Homo sapiens
VWLQPYLL

SEQ ID NO: 14009 - protein, 7 aa, Homo sapiens
VRSLVSR

SEQ ID NO: 14010 - protein, 33 aa, Homo sapiens
LALNILGTYNAATRGHRQGGHRMAGRLPQTHGN

SEQ ID NO: 14011 - protein, 8 aa, Homo sapiens
LFKMQRKM

SEQ ID NO: 14012 - protein, 37 aa, Homo sapiens
VRIIFTSRRAREEGTRQGAKAACVQPWGGKWKKRRYF

SEQ ID NO: 14013 - protein, 19 aa, Homo sapiens
MTMLKAMAVKWKRAFKKRR

SEQ ID NO: 14014 - protein, 29 aa, Homo sapiens
LCRSQGGLSPGRMTLRRGPGPSRPPPLGL

SEQ ID NO: 14015 - protein, 52 aa, Homo sapiens
LRRDNSNAYLQGASGMKGLMQQLRTTSNNNHTKNLANSDFTSPFRGPGNSSE

SEQ ID NO: 14016 - protein, 51 aa, Homo sapiens
LGLRRSFKCTSTIPAADTGIWLCPYRIDEVTSWKVPGPFLGAALRDFWVKG

SEQ ID NO: 14017 - protein, 71 aa, Homo sapiens
MVEEKYQKAENMYAQIKEEVRQRALALDEAVSQSTQITEKSRINWIKWYSSGRTSKLGLKNEKSNFLMSLN

SEQ ID NO: 14018 - protein, 28 aa, Homo sapiens
LQLQTPASSFQFLLPPLGLPALQWLKYH

SEQ ID NO: 14019 - protein, 26 aa, Homo sapiens
MEEPGRCGHSFNSVCSIGAVSKLEAS

SEQ ID NO: 14020 - protein, 116 aa, Homo sapiens
MSAPPACFRRWWLGPVGAGAGGARPWPGSGKGGVSCFDLLFTTCGRSAAPGGRWAGLRPGARSGLFALWMEWRCGPLWSANKALGWRGRLAAFLVVGPSEQSSWFWRWLRRLDCGV

SEQ ID NO: 14021 - protein, 44 aa, Homo sapiens
VASSLVLVPPGSGSQDRLSSDPSAATVAAAVTNFCFWKNLYRRF

SEQ ID NO: 14022 - protein, 54 aa, Homo sapiens
LGWMMCSRVYYMDYCIELLVSSYSTPKISFCYSKDQMLRLPFQVVLRIRVVVIH

SEQ ID NO: 14023 - protein, 79 aa, Homo sapiens
LVSPGLPVAGRRGGAELLGGCWIGEGSRLRKRRFFGTPVDGHGKERARLRMIYPLFTDEESEAQRTVMKCDQTLRSPKR

SEQ ID NO: 14024 - protein, 58 aa, Homo sapiens
LPPPFAPGPFSLSALPLSDHRPRPPHPAPLLVTWGRKETPDHWPKGLTPGEAKCLLGS

SEQ ID NO: 14025 - protein, 80 aa, Homo sapiens
LIRTSRGAKRGRLHSSPSWGWRSSIPPTPGPPCSRQPAPPTPQPSPLRSTSTPTSAWSHGTLAAPSRCPAKYRGSRQHCG

SEQ ID NO: 14026 - protein, 7 aa, Homo sapiens
MALILLP

SEQ ID NO: 14027 - protein, 18 aa, Homo sapiens
LCCVWGQRFMPALWCPHM

SEQ ID NO: 14028 - protein, 41 aa, Homo sapiens
MVDSSERERSEGRWMQKLEIVCFNIEKLWKRTSRHPTSWIT

SEQ ID NO: 14029 - protein, 40 aa, Homo sapiens
LAARVRSSRPTPTHPRPPQLPSLPQQARRHPSLPVIKYSS

SEQ ID NO: 14030 - protein, 79 aa, Homo sapiens
LKRRVGKSADLKLFLLKKKKKKLCAAHSGVFFFRLLFSSPLPLLPFESFFSSPCPPSPPDRMADSTPVSINFFFLLFLI

SEQ ID NO: 14031 - protein, 9 aa, Homo sapiens
VHSMSFHSV

SEQ ID NO: 14032 - protein, 59 aa, Homo sapiens
LLLCLPREHEGLAGAHLRLRLHEHLYLRVEDEWSHQLQHRAPPVVPAGFSALRSPHVYP

SEQ ID NO: 14033 - protein, 22 aa, Homo sapiens
LTGCPELARPLGPEPETRSPGL

SEQ ID NO: 14034 - protein, 77 aa, Homo sapiens
LGVAGTLIRAAGAGPSSQRAGAGGRAQSPGLLGPLLTWLDASGSGPSRGPRCTGSLCPWGPELCWGLELLPASSPSS

SEQ ID NO: 14035 - protein, 83 aa, Homo sapiens
MKSENLNEPLRKPPTRKSAFSHLQFLSPASPCCLLPSAVRLLVLHPPLSPQTHPNFCPFPKIGPGKSLPQKLSHFQTLRKKPP

SEQ ID NO: 14036 - protein, 57 aa, Homo sapiens
LESCGDFLPPSESSSLAHVQVSQPQMTICRARAVWKWTTACRRWSSGCSYRKTSWRS

SEQ ID NO: 14037 - protein, 57 aa, Homo sapiens
VGRWRSAARPSAACTTRPRCCDTATMTICRARAVWKWTTACRRWSSGCSYRKTSWRS

SEQ ID NO: 14038 - protein, 27 aa, Homo sapiens
LEKRNPPCPIHIRTSQLEFNLHPFCGS

SEQ ID NO: 14039 - protein, 83 aa, Homo sapiens [sequence omitted]

SEQ ID NO: 14040 - protein, 11 aa, Homo sapiens
LCSWGSWGLGK

SEQ ID NO: 14041 - protein, 34 aa, Homo sapiens
LRSASAAAQQRRESGSGAAEPAGGRAGGRTGRIA

SEQ ID NO: 14042 - protein, 132 aa, Homo sapiens
LETWGGEPPPHHPCQRHLCHTPPMSQQPHEPDQEPTGTAQWQCQCPLYSLLHSPGGAVPQQPGQAMWPQRDGLPALPRQRHGEGQAGGAVPHSRVPWHLPGQHHPGPEDPQPQCPQPPQQAQRHRRHPARPP

SEQ ID NO: 14043 - protein, 8 aa, Homo sapiens
LEEIRDCG

SEQ ID NO: 14044 - protein, 36 aa, Homo sapiens
VIEKKEAVLFPSGKDGPDRGSENGMLQNGVCHMIPA

SEQ ID NO: 14045 - protein, 11 aa, Homo sapiens
LSNCKDAVSRK

SEQ ID NO: 14046 - protein, 9 aa, Homo sapiens
LSRFKSEHQ

SEQ ID NO: 14047 - protein, 55 aa, Homo sapiens
LKARQRAQGAGPTAAPWAVSSPRVRVVSGALSKGWGELALPLKLRRNTRRHRRSL

SEQ ID NO: 14048 - protein, 15 aa, Homo sapiens
LPLTSLPLLAPPGWC

SEQ ID NO: 14049 - protein, 30 aa, Homo sapiens
VPSSWLRPAVTYKLAAVACASAGREAEQYC

SEQ ID NO: 14050 - protein, 25 aa, Homo sapiens
LLIYRELLVIKRFQFIANWCFKLLQ

SEQ ID NO: 14051 - protein, 20 aa, Homo sapiens
LCWAGSGSYLRRFNFQMVFS

SEQ ID NO: 14052 - protein, 54 aa, Homo sapiens
MPNLLSPDSPNSELSLPPGLTWKGPRRQLPAVVPAPLPPPCGSSAHLLPPVPGG

SEQ ID NO: 14053 - protein, 20 aa, Homo sapiens
LLCEKLIRKPSRKKLFVLQT

SEQ ID NO: 14054 - protein, 35 aa, Homo sapiens
LGPCGLFSHHEAAAAAPGLPELPPADPAWLMENHP

SEQ ID NO: 14055 - protein, 49 aa, Homo sapiens
LRRRSWEQELEEDNASFQGLFSHHEAAAAAPGLPELPPADPAWLMENHP

SEQ ID NO: 14056 - protein, 100 aa, Homo sapiens
LGPQSTSLSTPSPPAHARCGAGQLVVLAWPGCSSPRLAPKRATVARHAGAQALSGRGGAQARLGVRGCAGADGVGLKTFSVALAEQRQALGVEVFGFIRA

SEQ ID NO: 14057 - protein, 27 aa, Homo sapiens
MMIIMDKPSVCWKKLEIGILISFYLID

SEQ ID NO: 14058 - protein, 21 aa, Homo sapiens
LGSMKRCLVIWCTLIPVTFGL

SEQ ID NO: 14059 - protein, 36 aa, Homo sapiens
LWETGAGDSGDRSSGREPLGRQSLQPMPQEPSVPTN

SEQ ID NO: 14060 - protein, 144 aa, Homo sapiens [sequence omitted]

SEQ ID NO: 14061 - protein, 164 aa, Homo sapiens
MPENSNFPYRRYDRLPPIHQFSIESDTDLSETAELIEEYEVFDPTRPRPKIILVIGGPGSGKGTQSLKIAERYGFQYISVGELLRKKIHSTSSNRKWSLIAKIITTGELAPQETTITEIKQKLMQIPDEEGIVIDGFPRDVAQALSFEDQVRISPYILNELLFA

SEQ ID NO: 14062 - protein, 46 aa, Homo sapiens
LKQKYRQNTKGFWHLKSKSIQRWMNYKRNLKLQDLRSFSPNLYLLW

SEQ ID NO: 14063 - protein, 67 aa, Homo sapiens
MSSGMHWMWMTTALSTRGLRAAGPRSMLTSSAPSAGLSMSVGGRSGSSSPQGRKRPCGTATATCPTT

SEQ ID NO: 14064 - protein, 12 aa, Homo sapiens
LTQEPVRFGEGS

SEQ ID NO: 14065 - protein, 41 aa, Homo sapiens [sequence omitted]

SEQ ID NO: 14066 - protein, 74 aa, Homo sapiens
LLYFFDQLTYLRVILFIFRFLTEDFAFIFNYLGSDIFLLVDRTLGLDILHGSVNTWAQDFKANTDSPSPLIFKN

SEQ ID NO: 14067 - protein, 11 aa, Homo sapiens
VMTFSGIAVRP

SEQ ID NO: 14068 - protein, 27 aa, Homo sapiens
LWKDFTSCRMKVSKDTARVGNLESGIH

SEQ ID NO: 14069 - protein, 142 aa, Homo sapiens
LPARRAVPGPSKPGLPSRTRRAQGRWAQPDPGGTNRPRPAFSGLRREGRSGGPGGRGAAVSVLLAPRWAGSPPSSLTVAFQRTPVLERHPWVAENTDVSKGQRRTHHCCSSLTVERGPCCSLPVASSTVLIPSQSSLRPCQQ

SEQ ID NO: 14070 - protein, 30 aa, Homo sapiens
MMGLSSCRKTSSGLLLILFYGRNPQWRGTL

SEQ ID NO: 14071 - protein, 24 aa, Homo sapiens
LFVCLIFGELAILEKPQTPSTVKT

SEQ ID NO: 14072 - protein, 130 aa, Homo sapiens
VSPSLFTATSAFWAQVLPQPPKQLGLPLYTTMSGCSAVVVLLQAVLPAGARKPVGWQHPAVAGNPPGCWPEHRLCTIPHPDRRHQGTTSRRLAAQLHLALDPHHQLLLLARIRPWDFCESGGRPFYVYFL

SEQ ID NO: 14073 - protein, 124 aa, Homo sapiens
LHGDHWGPRIPAGQALTGDLMCGSWWPHSCFSVLQLQAVLPAGARKPVGWQHPAVAGNPPGCWPEHRLCTIPHPDRRHQGTTSRRLAAQLHLALDPHHQLLLLARIRPWDFCESGGRPFYVYFL

SEQ ID NO: 14074 - protein, 28 aa, Homo sapiens
LSLVETIRRSYRCSHRLIICLNVIGDAL

SEQ ID NO: 14075 - protein, 19 aa, Homo sapiens
LVQLLRSLTYQDCLRQATS

SEQ ID NO: 14076 - protein, 22 aa, Homo sapiens
LVQLLRSLTYQDCLRQATSWME

SEQ ID NO: 14077 - protein, 28 aa, Homo sapiens
LLRSLTYQDCLRQATSCFSRFQESGSVI

SEQ ID NO: 14078 - protein, 57 aa, Homo sapiens
VPQEVTHSPPGGRGRGQAINRRLGAAIPSERRDIGWRLGTEDALVFFCVAVQNDGSS

SEQ ID NO: 14079 - protein, 35 aa, Homo sapiens
LNAVLPQTRPAGTAKLGLVFEGKKIASKKSSTILH

SEQ ID NO: 14080 - protein, 59 aa, Homo sapiens
LLSPAHRRAGRLSSTVESGVRCLVARRSCFHVLASPQVKKDVTVWRKPSEEFNGYLIAV

SEQ ID NO: 14081 - protein, 42 aa, Homo sapiens
LDSIGFSIIRKCIHAVETRELFRCCLWQEKGKLLSPLMTELT

SEQ ID NO: 14082 - protein, 57 aa, Homo sapiens
MQGPQKWNTERRSVRMPICPASTPQPPQGTSCPSAGAKEPVLCLNVATWCSGLMKGM

SEQ ID NO: 14083 - protein, 39 aa, Homo sapiens
LYTIARYLQRADERDEKSSIHFLPNSIPWACHSIWEKSN

SEQ ID NO: 14084 - protein, 80 aa, Homo sapiens
VGDAGGQGAGVLGPGRGPHRPPRGGQLLAGSPDQRGTCLRSLHRSSRFIPGKFSRIRSTNLRAHHFHLASRPGGRNEARS

SEQ ID NO: 14085 - protein, 34 aa, Homo sapiens
VAAVAAAAAARECYDRQTRREAAGDHEQFAKPTA

SEQ ID NO: 14086 - protein, 134 aa, Homo sapiens
LDDSRECEGGHLMPGHLPHSFVLPDDSQASRQRTRVVRRSLSPVFNHTMVYDGFGPADLRQACAELSLWDHGALANRQLGGTRLSLGTGSSYGLQVPWMDSTPEEKQLWQALLEQPCEWVDGLLPLRTNLAPRT

SEQ ID NO: 14087 - protein, 92 aa, Homo sapiens
VWANRTADRHADSHLHPAPPAPVHRRQAQPGAFVCTPDAGDRAHHEAHHHQRGRGGHQRDRQREAKAELTVQAQQHGVPKIQPLPGAPVIPQ

SEQ ID NO: 14088 - protein, 7 aa, Homo sapiens
LVSLHNE

SEQ ID NO: 14089 - protein, 19 aa, Homo sapiens
LIMIKRNLEAEAREHLKGS

SEQ ID NO: 14090 - protein, 55 aa, Homo sapiens
LAQVSCPAPARREPQVLAAASDLSRCPVQLTARTERSPAQLLDQSAGRGARWSQG

SEQ ID NO: 14091 - protein, 52 aa, Homo sapiens
LGGEGAIRGDSGGFGCPKSDKFGFRHALAPAVSRSSMEVAAGTEWRLQQRLL

SEQ ID NO: 14092 - protein, 44 aa, Homo sapiens
VCVSSQKEKTLTTVMPENPVSVTFLQILHAVHLCPRRTTAAHDS

SEQ ID NO: 14093 - protein, 33 aa, Homo sapiens
VGPCLGGGLVFTGERHLPTAVRPLHRLLLHHGL

SEQ ID NO: 14094 - protein, 42 aa, Homo sapiens
MRSTLLLTCSAGVSYRIPWQLAVDTCRAVRRPVGAVGVLQRQ

SEQ ID NO: 14095 - protein, 123 aa, Homo sapiens
LVGLEEIGGRRVAALTWSGTWGEGTMGRKLDPTKEKRGPGRKARKQKGAETELVRFLPAVSDENSKRPNHCLESYQKGSLQELSRQLVRRDPSPYLMLLEARSAQHLAVMRKRRRKTLKKMVW

SEQ ID NO: 14096 - protein, 107 aa, Homo sapiens
VKYLKLKTLNQIFPQSLFCPQRHLYLLNWTCLWVPSYLLRNRCHLGTRLSSPPNRCFPRRKQDSPQKPLWPARAPTSPQGTLRLPDLQMETKQQQGTREIPPHHPAG

SEQ ID NO: 14097 - protein, 36 aa, Homo sapiens
LGRVWMDICRSSRKGCWTDVLPQDPIPRWWRVAGAA

SEQ ID NO: 14098 - protein, 79 aa, Homo sapiens
LPMAGWRPGTSSPLHWRHNCTFPHFSLPHTYSSSPLPGGTSPPVPAPPPPPPLPLGRVVARPGFWGKPVLTFKTFFFPI

SEQ ID NO: 14099 - protein, 227 aa, Homo sapiens
LGTLGWHEISTGPVITAGGTGPCSQSSGCPQRPSWRASSHPRQIPGLLGCCSGRSSHWATCPILGAPTRRCWTSSLEEAGWTLLGAAQGLCELSAAREGRSFTTMGGHELLPLPRYRIMTQCWQHEPELRPSFASILERLQYCTQDPDVLNSLLPMELGPTPEEEGTSGLGNRSLECLRPPQPQELSPEKLKSWGGSPLGPWLSSGLKPLKSRGLQPQNLWNPTYRS

SEQ ID NO: 14100 - protein, 28 aa, Homo sapiens
LAEQLEARLSCEGFSFLLPLLRRKLTNF

SEQ ID NO: 14101 - protein, 40 aa, Homo sapiens
LGNRGYCPLNQKLKVKVQKLFPPAGVKGPRRVSARGVGVA

SEQ ID NO: 14102 - protein, 17 aa, Homo sapiens
LHSALAKQDKFLSLVPL

SEQ ID NO: 14103 - protein, 39 aa, Homo sapiens
LSSAKLKKRSPLTTGVYVKMPPTEPECEKQFQPYFIPIN

SEQ ID NO: 14104 - protein, 49 aa, Homo sapiens
LLWYWPAAEASPALCLKKRSPLTTGVYVKMPPTEPECEKQFQPYFIPIN

SEQ ID NO: 14105 - protein, 109 aa, Homo sapiens
LCRRLLAALRPALQPAFCRPRRDGGAPAGARARLGSQSSRRVRWRPASGPPPGPPAGISWPPGVPGAGGRFLAGHHPHPDHARPRRARQPQPPDAPIPVSTGIRILPVV

SEQ ID NO: 14106 - protein, 56 aa, Homo sapiens
LRIICGRVPMSLLLPPLALLLLLAALVAPATAATAYRPDWNRLSGLTRARVETCGG

SEQ ID NO: 14107 - protein, 53 aa, Homo sapiens
LRPRVGKKQRPGRRFYLERSKHLCLFGVGNSDLKKWCVVDSVSRHVFSQDFHH

SEQ ID NO: 14108 - protein, 72 aa, Homo sapiens
VATSSRSLGRRCPACPGAWADTQPRAGWGLCGAASSACRAPCPSWKVRFFSMRKKSHSSARAAFLRRMPGSC

SEQ ID NO: 14109 - protein, 13 aa, Homo sapiens
LGAEGCGEVFEEG

SEQ ID NO: 14110 - protein, 22 aa, Homo sapiens
LINDFKSLEPGISMTLDMQMTV

SEQ ID NO: 14111 - protein, 9 aa, Homo sapiens
LRMPDCHQR

SEQ ID NO: 14112 - protein, 62 aa, Homo sapiens
LRSHSANVSGRRPRHPACPLPPPPRSRFPPGLPSPLPLPLPGALGGLGTSCHVMRVPSASFR

SEQ ID NO: 14113 - protein, 220 aa, Homo sapiens
LNCCGPEQRCWCCWGWQPVCVCAAHAQVQRGQRKSTSREVCVRTNRALRGPGPTPWSGRHGQDPWRTWHPQGRTSCCNSTPAWRIQHLPGTRTSAKEADTGRRKPTYDDANSYENVLICKQKTTETGAQQEGIGGLCRGDLSLSLALKTGPTSGLCPSASPEEDEESEDYQNSASIHQWRESRKVMGQLQREASPGPVGSPDEEDGEPDYVNGEVAATEA

SEQ ID NO: 14114 - protein, 17 aa, Homo sapiens
LVSLASFLLCKKLAKYF

SEQ ID NO: 14115 - protein, 81 aa, Homo sapiens
LPFPRRESSGPSSCQSGLRVRSGQIDLGTGCPEIPATLSVPAFCGAWHPQASRTDHRPEPPGGRPVRLTARSLSAPLPPSL

SEQ ID NO: 14116 - protein, 44 aa, Homo sapiens
LLLPRQHLLVPEPRAGLRVGRPVLRFPGPGPPLPSPPPAVGGEP

SEQ ID NO: 14117 - protein, 41 aa, Homo sapiens
MKCGSILCSGLAASPGRICLQTGLLLYQLVPGPAGTRKIHP

SEQ ID NO: 14118 - protein, 75 aa, Homo sapiens
LVRQTFPTLCPAGAHASVAAAADPDSWKRTIRGGPKSCTSPQSSMVHSLQRRKSGSHMQQHITFPSPGRHILVSR

SEQ ID NO: 14119 - protein, 26 aa, Homo sapiens
LASACPVSLLDTTRNPRPGEENGKGR

SEQ ID NO: 14120 - protein, 63 aa, Homo sapiens
VAGAGRGFGLLRLCSEESAVWLQLQFFPLSSAWNLTLPTLSPSRSRRRFRAAVQSWILQSLSH

SEQ ID NO: 14121 - protein, 31 aa, Homo sapiens
LPDPPGTGLVAASSRSTAALGLAPAMAVPWG

SEQ ID NO: 14122 - protein, 352 aa, Homo sapiens
LGHFLQENKQLLRDVLAQDLHKPAFEADISELILCQNEVDYALKNLQAWMKDEPRSTNLFMKLDSVFIWKEPFGLVLIIAPWNYPLNLTLVLLVGALAAGSCVVLKPSEISQGTEKVLAEVLPQYLDQSCFAVVLGGPQETGQLLEHKLDYIFFTGSPRVGKIVMTAATKHLTPVTLELGGKNPCYVDDNCDPQTVANRVAWFCYFNAGQTCVAPDYVLCSPEMQERLLPALQSTITRFYGDDPQSSPNLGHIINQKQFQRLRALLGCSRVAIGGQSNESDRYIAPTVLVDVQETEPVMQEEIFGPILPIVNVQSVDEAIKFINRQEKPLALYAFSNSSQVGVRPGWGQWRG

SEQ ID NO: 14123 - protein, 314 aa, Homo sapiens
VEPWLEENVFTGQSKIYSYMSPNKCSGMRFPLQEENSVTHHEVKCQGKPLAGIYRKREEKRNAGNAVRSAMKSEEQKIKDARKGPLVPFPNQKSEAAEPPKTPPSSCDSTNAAIAKQALKKPIKGKQAPRKKAQGKTQQNRKLTDFYPVRRSSRKSKAELQSEERKRIDELIESGKEEGMKIDLIDGKGRGVIATKQFSRGDFVVEYHGDLIEITDAKKREALYAQDPSTGCYMYYFQYLSKTYCVDATRETNRLGRLINHSKCGNCQTKLHDIDGVPHLILIASRDIAAGEELLYDYGDRSKASIEAHPWLKH

SEQ ID NO: 14124 - protein, 75 aa, Homo sapiens
LPSSLNSTYPISLNSTYPISLMLPPPTVTAPTGPRGPALRFRSEPHVHTDRPERCLRCHLHLDALKWEERCSRTT

SEQ ID NO: 14125 - protein, 54 aa, Homo sapiens
LACVACWHVFLFPARPPVVCSHTGFLLDRQGLAGLQATRWALPHTALLCIRLLP

SEQ ID NO: 14126 - protein, 185 aa, Homo sapiens
LLLGPSRPASRAGFPLVSFLSPSGEDEAVFLPANLLGTFPLFPSSAWDPFPSPQPVAVLCSRAPAWSLAAQGSLRRCTIQSFPVCLQLCNNRCNSRRFFPLQKETQDSPPRLAPTRLLSGHWVSLCWTLSVSGPPRHGWDVLAVCPALFSRPSGAWWGCTPLPGRTPFPWVCTPRRLFIRLPTGT

SEQ ID NO: 14127 - protein, 256 aa, Homo sapiens
LPTSPSMRLTACGSWSCVRSVRSLSPRKPWRSTASLSTSRLGVRCVSRACRSPRWSFIRPMSARSALLSVSSANWTCSSASWSSTSPTVAAGQSSAKAVASSSCTACSPSTEMSVAVNRPSSGKGKCCPDSEFKKHFPVGNPEILPSSLPSQAAENQTSTMEKDVRPKTRSINRFPLHSESSSKKAPRSKNKTLDPLLMSEPKPRTSSPRGDKAAYDILRRCSQCGILLPLPILNQHQEKCRWLASSKGKQVRNFS

SEQ ID NO: 14128 - protein, 22 aa, Homo sapiens
LQHPDCSCLILSDDHLHLCYAD

SEQ ID NO: 14129 - protein, 108 aa, Homo sapiens
VPRPRFVPAAASSTLRRPEPSLACSLSPFAHSLHLGLHHLCQPLPRSCRHSSPKLLTGTLAWYPSLHSSPSIFFPRPLSGPSFPKTRVSPRGPASRPGMSPAAPRPWS

SEQ ID NO: 14130 - protein, 29 aa, Homo sapiens
LPAPGGRRAAEENPAGEHFRIGIGQVLRR

SEQ ID NO: 14131 - protein, 241 aa, Homo sapiens [sequence omitted]

SEQ ID NO: 14132 - protein, 89 aa, Homo sapiens
MCTRFRLSTKQSRDSSPPCGRSTVHRYLCDFTYYTSLYQSHGRSAFVHVPPLGKPYNADQLGRALRAIIEEMLDLLEQSEGKINYCHKH

SEQ ID NO: 14133 - protein, 112 aa, Homo sapiens [sequence omitted]

SEQ ID NO: 14134 - protein, 12 aa, Homo sapiens
LPCFCCRKFPAS

SEQ ID NO: 14135 - protein, 44 aa, Homo sapiens
LYQHRRLLRVHLSSGTPRWPGPRLLPRRGRMSRARPSPVRVAAL

SEQ ID NO: 14136 - protein, 55 aa, Homo sapiens
VGEAAVVAAAQGGRLRGGAWRQEQEVMRWGAQPRAAQRPSWPAPDRAEDPWPWAW

SEQ ID NO: 14137 - protein, 27 aa, Homo sapiens
LQPPQGALASRPPIPTWGWRPLPASLP

SEQ ID NO: 14138 - protein, 17 aa, Homo sapiens
LSRSQRPRGHRAMHAPN

SEQ ID NO: 14139 - protein, 54 aa, Homo sapiens
LPKAAFSLTKLLEATSAVSAQVEELAFKCTENARFLKTWRDLLKEGYDSLKPDD

SEQ ID NO: 14140 - protein, 45 aa, Homo sapiens
LPTPCLTILLESKDLLLFVNLPSFMYILEGMRPTSTMIIFICLFV

SEQ ID NO: 14141 - protein, 34 aa, Homo sapiens
LCWPHAVNIFGRRWLDRQKMIWWSACLRRWCKDH

SEQ ID NO: 14142 - protein, 71 aa, Homo sapiens
LTERMALSTIVSQRKQIKRKAPRGFLKRVFKRKKPQLRLEKSGDLLKSPGQTLVRVNVESLTRSMYWPQQR

SEQ ID NO: 14143 - protein, 32 aa, Homo sapiens
LHPFQSCKGKKQNKTKKTQVPFPAVFALKLPS

SEQ ID NO: 14144 - protein, 172 aa, Homo sapiens
MPKGKKAKGKKVAPAPAVVKKQEAKKVVNPLFEKRPKNFGIGQDIQPKRDLTRFVKWPRYIRLQRQRAILYKRLKVPPAINQFTQALDRQTATQLLKLAHKYRPETKQEKKQRLLARAEKKAAGKGDVPTKRPPVLRAGVNTVTTLVENKKAQLVVIAHDVDPIEVRLPVDC

SEQ ID NO: 14145 - protein, 23 aa, Homo sapiens
VQFLQTRSCPRTSPNWCSQSPSV

SEQ ID NO: 14146 - protein, 70 aa, Homo sapiens
LSLPRGSLIPGKDYWAGSQEAWGTLSSAANMLHDHGLTGEPEVLCRDQRKALIPSLQPVQLSTWLTLGTQ

SEQ ID NO: 14147 - protein, 37 aa, Homo sapiens
LRCFTWLRLCQISMFLSLKCLNTRSSHLGAHCREKFS

SEQ ID NO: 14148 - protein, 98 aa, Homo sapiens
LGLQPIIGTTHPSIVDCVLKVLGTMHLEVQYEAIELIKDLVGYDVRQALLKGLVALLIPSVKEISKLQAKILSDPSVLQLTPSLPMFLQQAAAAKAIG

SEQ ID NO: 14149 - protein, 87 aa, Homo sapiens
LGIMQRASRLKRELHMLATEPPPGITCWQDKDQMDDLRARTHLNLLRSDFSLQFIIQTLILLEGFVWMFSNCHQKVLGDHPSTSQLC

SEQ ID NO: 14150 - protein, 172 aa, Homo sapiens
MQPTSWAVSCGLRPLPSWKPQGGEGRGGEERRGTVMGPWSRVRVAKCQMLVTCFFILVTAAGPLCGHHGDSYLLRGPLCCHPPSVPGEEPVPGCAPMGLLCGVEPGGPPDSGSRAERCSHREGGPGPHGRGLPVLLPGVLRTGAGGVLETPQPHPAPILPSWMLTCLEEGPA

SEQ ID NO: 14151 - protein, 442 aa, Homo sapiens
LLQPAEVGGDTESPVPRGARGKRRRQLNWSWREAPSAPLLSQHVPDSAAPQSARWGPRAVAAGAALTGCEPGGAPNAGVGVWERERPLRYERGVLSPVATPGPSHEEGRARRQSHAVPAAAGWGRLAPRESEERLREELREPLAAGPSARLLLPPLPLLQRGAAAAAGLSPAAAALLPLLPGAPLAGRPGCLCPRPAAGRGTRELGCRGRLAADAAERVFAQLEPPLQHRLCLLLPHLLPHPDQAGTRPGPELRLLVAAGAARLLLPGGLLGVAVVVLALGGWRRRVRGPAHAPGGGSGQVAAGAELRRAAADARAPAAAPALRSGAAPGQLRLVGLLHQPRVAALRPQAAALRPGGGRWLPAGPGVGSLLSNQGSASSSSTVQCRRRKSACDPTPEEVQLRVVRRNCSQLLWQLQNIQETVVALYFQRTDDSLGLGLKTMV

SEQ ID NO: 14152 - protein, 86 aa, Homo sapiens
LGRGGGFWEGLPGTAQVRSGPECRPLWCPGPPLHSFPLSCLLLHGPFLGEHLQACALPLPQEAFWCLVQICEVYLPGYYGPHMVRG

SEQ ID NO: 14153 - protein, 27 aa, Homo sapiens
VRCPVSKPNMGHQHRVRDPVTTWQATP

SEQ ID NO: 14154 - protein, 50 aa, Homo sapiens
LGFSLRAVVWDLFPGSKQIVRRKLRCPVSKPNMGHQHRVRDPVTTWQATP

SEQ ID NO: 14155 - protein, 90 aa, Homo sapiens
LPVLPLPEVPGGGHGEGSCPNRQPEGAAGPATFKTQAAPRCLPCQSPHFPGPCTPGLRAQHCQTGLLQGEVPPRVCLGEVYEHMQCLCAC

SEQ ID NO: 14156 - protein, 71 aa, Homo sapiens
VRPAGAEARRGGKRSRGGWGGRGTDRGAEARREKTWREGQSLDSGGHGIVRGEEGSTQQAPSAGHREGQPG

SEQ ID NO: 14157 - protein, 144 aa, Homo sapiens
LEPRSSARNVERGVAIRISYAASVRLAGSRMAGRHDWLVAHKPRALVGPRQRGSGELKSLCLSWKLAWPPELPGVGTGGFVLYAPFSLCAMGDVKESKMQITPETPGRIPVLNPFESPSDYSNLHEQTLASPSVFKSTKLPALT

SEQ ID NO: 14158 - protein, 146 aa, Homo sapiens
LSWKLAWPPELPGVGTGGFVLYAPFSLCAMGDVKESKMQITPETPGRIPVLNPFESPSDYSNLHEQTLASPSVFKSTKLPTPGKFRWSIDQLAVINPVEIDPEDIHRQALYLSHSRFSLKMSSYPLLGLIMKGNSFHNVIPVNALT

SEQ ID NO: 14159 - protein, 17 aa, Homo sapiens
LEVLLVFVSFLKSDMML

SEQ ID NO: 14160 - protein, 69 aa, Homo sapiens
MGLRQGCCSSCGRRSCGCGDCARGAQCHGLHLSRNRRILHSSQDDVYSSHCQRGRSCCWQSGGYSAVSG

SEQ ID NO: 14161 - protein, 33 aa, Homo sapiens
LPGHGFQSPADSGVLAARGEAGGVWRHHGPGAG

SEQ ID NO: 14162 - protein, 38 aa, Homo sapiens
MISKFELKNDTLKSSQCASLDFSISRFSAENVLKTLNT

SEQ ID NO: 14163 - protein, 52 aa, Homo sapiens
LLEAAVCFRSKETQSVWTPNKSAQNLSRRFAAAEKFSSKMDGVSSEANEEKY

SEQ ID NO: 14164 - protein, 46 aa, Homo sapiens
MSAPCAARRGSSEQQDTCSNPGPCSSPTGPMPSMGRSPPRATWTLT

SEQ ID NO: 14165 - protein, 53 aa, Homo sapiens
VAVELGSLRGGTMASEKPLAAVTCTAPVNIAVIKYLEMGFHRVSQAGLKLLTS

SEQ ID NO: 14166 - protein, 80 aa, Homo sapiens
VIGPGPCIRSSCVTTPPADRSLEPVCAGCREETAPPAVGSGRSDLLPLVQQPPHPAPGACSSHALTWLSRSSSSVASFMS

SEQ ID NO: 14167 - protein, 105 aa, Homo sapiens
LRPRFGISRARDFPATPDNHIPPAILTRPGSGTLPGSRRRGPAGTPGGPRRRGSPHARRRPPGTAAAVAHLQGSRRLRARQGGSKRGWEGCWRGLARCVWSIAGS

SEQ ID NO: 14168 - protein, 25 aa, Homo sapiens
LQLPGFCLPPPFPPSQANSGEMEPL

SEQ ID NO: 14169 - protein, 9 aa, Homo sapiens
LPWRVLASR

SEQ ID NO: 14170 - protein, 64 aa, Homo sapiens
VSATSPLGPVRSVESWGPPNLPGHLPSFPVLPACGREWLGPREPTQSEAKFTEGLSVSSMRACG

SEQ ID NO: 14171 - protein, 37 aa, Homo sapiens
MEAHTSQLHPCSGRVGQPQGSLCPETQLGPRPDVSQS

SEQ ID NO: 14172 - protein, 17 aa, Homo sapiens
LWFKFFMPHPLSAEGLL

SEQ ID NO: 14173 - protein, 17 aa, Homo sapiens
MMPVTSIHMEQIAAVGG

SEQ ID NO: 14174 - protein, 14 aa, Homo sapiens
MNLSYLSGRLQKAP

SEQ ID NO: 14175 - protein, 16 aa, Homo sapiens
LHRWARSVLCRSLVSR

SEQ ID NO: 14176 - protein, 95 aa, Homo sapiens
VGRVVSSKGAASTRRLEVSQELGVVSRGVGVPMSITLQNQEGRKCEGAESWKQVLGQLQQNIPAACRGRRRQGEGAVSESFHGVHPRAPPGSTVS

SEQ ID NO: 14177 - protein, 92 aa, Homo sapiens
LPTPAAAPLSLSPRPPLAPSPPPSRRTRGAGNELPCDARPLRELSVTHELPTSPAAGRGLRAGKTRGRGGGKGRKVLRRDKSVAVDHLCLGS

SEQ ID NO: 14178 - protein, 9 aa, Homo sapiens
LKENLCMML

SEQ ID NO: 14179 - protein, 89 aa, Homo sapiens
LFPPGLEAPSTERRRESSAGRGALATPPGPEQSPGAAGRSRGRGHTPARTSHGGLSRGGTSTPSEGQFEKEDRAHCGVSMEMWSLVTNL

SEQ ID NO: 14180 - protein, 38 aa, Homo sapiens
LLRPFGPGGGRAEPATPSIHSPRPFSGCPPVPLPALPP

SEQ ID NO: 14181 - protein, 45 aa, Homo sapiens
LTLLSPFPVRHGHSTEGCYYQVRCTGHFVIGETCRLYRILWLKER

SEQ ID NO: 14182 - protein, 97 aa, Homo sapiens
VQRRNGKRITATVPRRWFCPDVSWNNAEDCLSGSRPIQFTSSRKYLTPALDPAALLRAEEGGNPMCLLPELPQPIFPQLGTWKKEPRTRLCFSFGPS

SEQ ID NO: 14183 - protein, 98 aa, Homo sapiens
VQRRNGKRITATVPRRWFCPDVSWNNAEDCLSGSRPIQFTSSRKYLTPALDPAALLRAEEGGNPMCLLPELPQPIFPQLGTWKKEPRTRLCFSFGPSW

SEQ ID NO: 14184 - protein, 51 aa, Homo sapiens
LGLIACVSERREQRETQEQEQQRVEQTCARGAQRPCPPPGPKMVLPTGSHA

SEQ ID NO: 14185 - protein, 130 aa, Homo sapiens
VPERHPVCPARPMLAPVVWGPCVPEEQPWHLSGAGRGPWRPTVDGDHWQGPAPSIPSARDVCVASGPRQGLLQVLKAYTLYRPEQGYCQAQGPVAAVLLMHLPPEEAFWCLVQICEVYLPGYYGPHMVRG

SEQ ID NO: 14186 - protein, 136 aa, Homo sapiens
VPERHPVCPARPMLAPVVWGPCVPEEQPWHLSGAGRGPWRPTVDGDHWQGPAPSIPSARDVCVASGPRQGLLQVLKAYTLYRPEQGYCQAQGPVAAVLLMHLPPEEAFWCLVQICEVYLPGYYGPHMVPEYCSVWG

SEQ ID NO: 14187 - protein, 34 aa, Homo sapiens
VHSAPRGHYCAWNGCFWKAQLPEWTMTPTKDPCL

SEQ ID NO: 14188 - protein, 156 aa, Homo sapiens
LVAGPPATSELRCCTSLCFGRLGLCRDVGSWSGWPFGLSTATQPRLRLGKQTGAGQARRACRTVILRCGSCCRGRRTGSVVAWSSLPQRYYGGAEVVDEIELLCQRRALEAFDLDPAQWGVNVQPYSGSPANLAVYTALLQPHDRIMGLDLPDGGQ

SEQ ID NO: 14189 - protein, 97 aa, Homo sapiens
MWSWSWRLRPVDQSGLRRSHGNMTAVRRTWSGSPTMQRRRRSRVPIWRREKELAKVTIKKEDLELIMTEMEISRAAAERSLREHMGNVVEALIALTN

SEQ ID NO: 14190 - protein, 64 aa, Homo sapiens
VSLGKGYQVCMAQPVPGSLSGTDLTASSMFSVCSCLLQAMSTRAGPALAWEDFNSPAALPRVGE

SEQ ID NO: 14191 - protein, 55 aa, Homo sapiens
LTLPGWIVPGAGSMLPVLSPIWVPWSPAIQHYSLSTTQLRSLVNPASQSQSCSLG

SEQ ID NO: 14192 - protein, 22 aa, Homo sapiens
MSSTQFNKGPSYGLSAEVKNRG

SEQ ID NO: 14193 - protein, 105 aa, Homo sapiens
LPAAAPHVFSPTVVLTSLSRPLPSLTMAFWTQLMLLLWKNFMYRRRQPVTPQCETRAGWAGSPHCPPPSPTYSPPGPAPGRIAVASLPLLHPGGCSPLPPAPGAP

SEQ ID NO: 14194 - protein, 21 aa, Homo sapiens
LERDEGHHGRTGCGKRSFGLR

SEQ ID NO: 14195 - protein, 123 aa, Homo sapiens
VCCPGSGARDQRKEQLTDEEKCWTGRENSDANMQRSIMSFFHPKKEGKAKKPEKEASNSSRETEPPPKAALKEWNGVVSESDSPVKRPGRKKRRPRKKASQRLKWPQRRKEKTGTSPPRLPSP

SEQ ID NO: 14196 - protein, 85 aa, Homo sapiens
MAKDGVLLLLPKLECNGAIFAYCNLCFLGSSDSPASASRVAGITGTKHWEYNLEQDKNPGLQGTSNLLGDMIRHIRNHHVNGYLS

SEQ ID NO: 14197 - protein, 706 aa, Homo sapiens
LAWSSTCGALGLGGLGRAGNGRGGPEAAAADSPSLRGCDPEATGCRWEPAEPRMRAGRGATPARELFRDAAFPAADSSLFCDLSTPLAQFREDITWRRPQEICATPRLFPDDPREGQVKQGLLGDCWFLCACAALQKSRHLLDQVIPPGQPSWADQEYRGSFTCRIWQFGRWVEVTTDDRLPCLAGRLCFSRCQREDVFWLPLLEKVYAKVHGSYEHLWAGQVADALVDLTGGLAERWNLKGVAGSGGQQDRPGRWEHRTCRQLLHLKDQCLISCCVLSPRAGARELGEFHAFIVSDLRELQGQAGQCILLLRIQNPWGRRCWQGLWREGGEGWSQVDAAVASELLSQLQEGEFWVEEEEFLREFDELTVGYPVTEAGHLQSLYTERLLCHTRALPGAWVKGQSAGGCRNNSGFPSNPKFWLRVSEPSEVYIAVLQRSRLHAADWAGRARALVGDSHTSWSPASIPGKHYQAVGLHLWKVEKRRVNLPRVLSMPPVAGTACHAYDREVHLRCELSPGYYLAVPSTFLKDAPGEFLLRVFSTGRVSLSAIRAVAKNTTPGAALPAGEWGTVQLRGSWRVGQTAGGSRNFASYPTNPCFPFSVPEGPGPRCVRITLHQHCRPSDTEFHPIGFHIFQVPEGGRSQDAPPLLLQEPLLSCVPHRYAQEVSRLCLLPAGTYKVVPSTYLPDTEGAFTVTIATRIDRSPSWQ

SEQ ID NO: 14198 - protein, 725 aa, Homo sapiens
LAWSSTCGALGLGGLGRAGNGRGGPEAAAADSPSLRGCDPEATGCRWEPAEPRMRAGRGATPARELFRDAAFPAADSSLFCDLSTPLAQFREDITWRRPQEICATPRLFPDDPREGQVKQGLLGDCWFLCACAALQKSRHLLDQVIPPGQPSWADQEYRGSFTCRIWQFGRWVEVTTDDRLPCLAGRLCFSRCQREDVFWLPLLEKVYAKVHGSYEHLWAGQVADALVDLTGGLAERWNLKGVAGSGGQQDRPGRWEHRTCRQLLHLKDQCLISCCVLSPRAGARELGEFHAFIVSDLRELQGQAGQCILLLRIQNPWGRRCWQGLWREGGEGWSQVDAAVASELLSQLQEGEFWVEEEEFLREFDELTVGYPVTEAGHLQSLYTERLLCHTRALPGAWVKGQSAGGCRNNSGFPSNPKFWLRVSEPSEVYIAVLQRSRLHAADWAGRARALVGDSHTSWSPASIPGKHYQAVGLHLWKVEKRRVNLPRVLSMPPVAGTACHAYDREVHLRCELSPGYYLAVPSTFLKDAPGEFLLRVFSTGRVSLSAIRAVAKNTTPGAALPAGEWGTVQLRGSWRVGQTAGGSRNFASYPTNPCFPFSVPEGPGPRCVRITLHQHCRPSDTEFHPIGFHIFQVPEGGRSQDAPPLLLQEPLLSCVPHRYAQEVSRLCLLPAGTYKVVPSTYLPDTEGAFTVTIATRIDRPSIHSQEMLGQFLQEVSIMAVMKT

SEQ ID NO: 14199 - protein, 247 aa, Homo sapiens
VQIWGCQVAPGPLGQPPAPLSSVPRASASQDGAASVLGPSCPLGSRVLRPAPLAVGAVHSLPQARGRCSPQEEGAEAAGEAAGQCDGGGSASRTPDCTSCTGARAAAGVSRGRGGGGRAGLTVQRVPTPGPDPLLPPARSELCPDPTPSPAACQHGSPAPTLAGGVQGHHRTAGSPLCLPTPGAAPGSAGSCSHRRVRWPRGHLFQRGAGGPSRGQPGGQPCGGRVCPRPEAQRDPSQSPRATAGED

SEQ ID NO: 14200 - protein, 51 aa, Homo sapiens
VRAEGAGASRISLNTSWLGPRRLKNTGLGLRKKTNPSSQVSDWRAPWKVSQ

SEQ ID NO: 14201 - protein, 41 aa, Homo sapiens
LPDAQSLTGRQRPKEPHRGLRKKTNPSSQVSDWRAPWKVSQ

SEQ ID NO: 14202 - protein, 71 aa, Homo sapiens
LGHVVQRLVAFSPSAASHTSDFSQAVPRRAEATQVAHIQSHNLLSPPQGLRKKTNPSSQVSDWRAPWKVSQ

SEQ ID NO: 14203 - protein, 22 aa, Homo sapiens
LGPSPTMAVAQQLRAERFSSSR

SEQ ID NO: 14204 - protein, 71 aa, Homo sapiens
LLKHGVLMLSSPAPSQNLPKGYCNTLQCSSHDVVPLSSTSANHSWGLGVVGVGAWGTGSRSSSPSPTAIKH

SEQ ID NO: 14205 - protein, 147 aa, Homo sapiens
LEKPTASSGKRARGLEVPEASGLGTHGRDTQGRPCAVSPGITGGDFMEPGGWASGWGERLQTGSSPWLCPPLSLLEWWGPCILSCPPPPFSPNCRRLLSPGDTVPASSGLGKHGLSSPALAPAPPASWTWAFLHPVEPHSQERCLEG

SEQ ID NO: 14206 - protein, 25 aa, Homo sapiens
MSKCSFVQQFGLYLTCPNIFRPDGN

SEQ ID NO: 14207 - protein, 70 aa, Homo sapiens
VPSQDIFFPQVEKEGATLRLRVSGGGGSVEELTHPIIPPVPRLLRALTRSCFCSTPGSDSAQGSDVSLTA

SEQ ID NO: 14208 - protein, 90 aa, Homo sapiens
VAAAAAGPAAAAAAAAAATTSLLPRGAAARAPRAAHPAVLSAARPRWRALPPPVPAAPSVVLRLALGLPRQPQPQPQRHPQPQPQPQPQA

SEQ ID NO: 14209 - protein, 91 aa, Homo sapiens
LEQPLTGHRPALWEAERPRQEDRLRPGVPDCETSLGNIVRPSLQKKKKKKKKKACHGGLRLYPSYSRGSPEPSEAAASCEDATALRPGLKS

SEQ ID NO: 14210 - protein, 121 aa, Homo sapiens
LKKKKEKKKRILGEPAGKSLSYASGLPRARRRSAWRPSVSVRRSGASHQDRGEVQSRGEGRIVRRAFCLRCCGRGSRPPPPVSVPSPSPPTPARPRRAGATCEPRRGPGLRRRPFVLRRAR

SEQ ID NO: 14211 - protein, 105 aa, Homo sapiens
LKKKKEKKKRILGEPAGKSLSYASGLPRARRRSAWRPSVSVRRSGEIWSFAPGPRRSAKSRGGPYCAESLLSAVLRPWEPAPASRFRPVSKPADSSSSSPRRCHL

SEQ ID NO: 14212 - protein, 14 aa, Homo sapiens
LVSVVSFCDLCWDW

SEQ ID NO: 14213 - protein, 34 aa, Homo sapiens
VREKRGRKQCSQTRKKREEEKDSTFTLEQPSFQC

SEQ ID NO: 14214 - protein, 48 aa, Homo sapiens
MQKEITTRAPSTMKIKMIASPEHKYSVWISGSILASLSAFQQMWISKQ

SEQ ID NO: 14215 - protein, 9 aa, Homo sapiens
LSTDCSDPT

SEQ ID NO: 14216 - protein, 68 aa, Homo sapiens
MRVGLPSEASSCPWSARGPRDPPERRRSGLAHVVARELGLQVVRGANDDRQGRRQNPSNSQWFCAPAV

SEQ ID NO: 14217 - protein, 130 aa, Homo sapiens
LMRGRAAGTRGRYSEFERRSSASPPAPGELLGSRESPADGFCPGLKQPESYGKGRAWLARGIFQVLKRQAYGACDPSRRTKWDLKIHSTSAHGGPGPAPARGHTADWAAGMPGLCWRPLWLAFTSVCLQE

SEQ ID NO: 14218 - protein, 135 aa, Homo sapiens
LSVCPLGAGCDIFPRGRYSEFERRSSASPPAPGELLGSRESPADGFCPGLKQPESYGKGRAWLARGIFQVLKRQAYGACDPSRRTKWDLKIHSTSAHGGPGPAPARGHTADWAAGMPGLCWRPLWLAFTSVCLQE

SEQ ID NO: 14219 - protein, 36 aa, Homo sapiens
LHGGGAAPRVHRSLRWRPSCSTSTNNPGRTTPIPCR

SEQ ID NO: 14220 - protein, 42 aa, Homo sapiens
VAGTGAALGPGRDPRCLSSCRNLGPALSRTLSQLYCSYGPLT

SEQ ID NO: 14221 - protein, 31 aa, Homo sapiens
VSRRRLKSELLGFAQIGVGRACLWGAATPYC

SEQ ID NO: 14222 - protein, 88 aa, Homo sapiens
LSHDVYAWKLRPQEPAHQPEPLRHQEERGGEHAGRGPVHVQRHAAEGGAGAGTILSLLHHPGHPHQPLSAPAGGHRCPARGHCTAEPE

SEQ ID NO: 14223 - protein, 61 aa, Homo sapiens
LRHEARQIPLAASPGVCPAFPACGPDECSRSPASGLLFASSTICHCFSWVRPRLHWLSVAL

SEQ ID NO: 14224 - protein, 108 aa, Homo sapiens
VQYLSRSGVEAGRHPLLTSSAAGLKIRHGPELEGLGGTAARRAPGHGHGPEAVAGGRRRGLRCARICVHRGRRAQSHLLQSDRWSAAGHYPGRGPSLQDPLVPVPHYL

SEQ ID NO: 14225 - protein, 105 aa, Homo sapiens
VQYLSRSGVEAGRHPLLTSSAAGLKIRHGPELEGLGGTAARRAPGHGHGPEAVAGGRRRGLRCARICVHRGRRAQSHLLQSDRWSAAGHYPGRGPSLQVMAGRAC

SEQ ID NO: 14226 - protein, 19 aa, Homo sapiens
VAPGELPSVEGLGQILRGC

SEQ ID NO: 14227 - protein, 16 aa, Homo sapiens
LYPSPIWDTSTESGTP

SEQ ID NO: 14228 - protein, 16 aa, Homo sapiens
LPTQPWKVCRSGRSRT

SEQ ID NO: 14229 - protein, 27 aa, Homo sapiens
LVPANTNVKWGVFSMVVGRLVRLVPFV

SEQ ID NO: 14230 - protein, 52 aa, Homo sapiens
LASQAWGDKLPELQWAAAGDSCLASWAPCGCSARATERSSPRRQRHRGASAR

SEQ ID NO: 14231 - protein, 15 aa, Homo sapiens
MLKLCLHNHMRKKEQ

SEQ ID NO: 14232 - protein, 38 aa, Homo sapiens
VRELLAGGSGNSLGGRRGRTGGCWEPSLGLRPAVSVGL

SEQ ID NO: 14233 - protein, 65 aa, Homo sapiens
LVLPPLPLIRHQFHRGKLKINMQEGTPFACAQLPSGKKELENSLGCPLKILKKRIRFLKRQEAVA

SEQ ID NO: 14234 - protein, 46 aa, Homo sapiens
LASSYDFTNGSSKLLSSALTACAPASVRARFLAWGSNHVDKMGSVS

SEQ ID NO: 14235 - protein, 33 aa, Homo sapiens
LLSYLGCGSETWGWSQCQARSLQDRIQMKNPRY

SEQ ID NO: 14236 - protein, 75 aa, Homo sapiens
VCSSGGGGRGGGGGGSGLGGSGWARGERTGSSQCVRARACCRHMLALPNLKGPRSFPEKPSCEVWRSARFGIEAS

SEQ ID NO: 14237 - protein, 42 aa, Homo sapiens
LRQGLSQCPHAEGNCLRGAASHRPELRKPAPVRGAPGRHSEL

SEQ ID NO: 14238 - protein, 23 aa, Homo sapiens
LAHLAVSLIVVRLKKTSRCSDRL

SEQ ID NO: 14239 - protein, 86 aa, Homo sapiens
VTEGPGAPGREEIGQAGLPIAFLKILETLSFIELRHCPPLISSKTPVTRLKPCLVFRRSMGPRLKEPAPLLRATVTTLRENTAPIS

SEQ ID NO: 14240 - protein, 52 aa, Homo sapiens
LDPSSEAQPRSLLSAHLPACQAQGKVAGVRGWRRGVLETTLLLSLRILLSTM

SEQ ID NO: 14241 - protein, 31 aa, Homo sapiens
LHDRSGPGPGLDRCPGCHTDADGRAIGVPWS

SEQ ID NO: 14242 - protein, 23 aa, Homo sapiens
VKKGPAFKQERRKMAATTGSDNL

SEQ ID NO: 14243 - protein, 62 aa, Homo sapiens
LEAIMVRPTATAHLLPPAMPARRCASCLATGINSGHGGSCGCGWRRPSRHWVCLSQMNKSRR

SEQ ID NO: 14244 - protein, 79 aa, Homo sapiens
LTRTLNPSPPQRAEARARFPPRGGAACLRLQISRGAHQPSQHGLGRHCQAGRDTCQDSGGRGTAEFQRQEPQTQHCRRC

SEQ ID NO: 14245 - protein, 99 aa, Homo sapiens
VTSSSAFCRAWVSASSTCQVRPVPASSLPLAARQPPLPLNLVPMAARPSFTRTVGIWASPKPSRWLLGLLEPVSSPLPPRPDPLFCPKELALTASGSRS

SEQ ID NO: 14246 - protein, 81 aa, Homo sapiens
LQDIHDDIENEFFVFTRYSYMRRSILNSLNIFSSVGPAWQDLSEGMMERLLDYMIWIKPWVEAILPWLNLPGMSLRVKRWQ

SEQ ID NO: 14247 - protein, 45 aa, Homo sapiens
LPETSHKLLLQISRIWLSDMKYKTCEKCQLQEKWKDKVYRTEKVD

SEQ ID NO: 14248 - protein, 163 aa, Homo sapiens [sequence omitted]

SEQ ID NO: 14249 - protein, 69 aa, Homo sapiens
LMAFTSEKHCHSESSSKQDCSSSFLFILVLRSGIQSGGRSECLSALLLHPSRPREPRARLLGQRSLSCV

SEQ ID NO: 14250 - protein, 48 aa, Homo sapiens
VAALQQRAGLVWWFHRADPAALTGRRRRQRRRKAAHPERHAQRKIRAP

SEQ ID NO: 14251 - protein, 53 aa, Homo sapiens
VGGLTRNPASCSVPRHPAPSSPPPLPAPTPLRNPRFQPSSQIPATPPPPVSPL

SEQ ID NO: 14252 - protein, 54 aa, Homo sapiens
LGDSLGEDSGPHDHVYSRGGSKEPQKFTKDQSCLCCRRHVVYIKFVIVGGHFGI

SEQ ID NO: 14253 - protein, 74 aa, Homo sapiens
LGCRLSAAALARWRPLEPQPGYHRGGAEKPGTPQPWAKVDLGSGFQHVAALGLPLLPAGVGQCPEQALFPSPVG

SEQ ID NO: 14254 - protein, 53 aa, Homo sapiens
LIGRCTSVSVQGPPPTSFCFGAFASEDLQCHNKHMPALFYREPWRSWDRGHID

SEQ ID NO: 14255 - protein, 106 aa, Homo sapiens
LGATAPLVSLVPEVAAAVGNAGARGAGHWGPFAEGLSTGFWPRSAPRLLWIAPKHRGTVRAAAGGLGGGANGPIPPDPGAWFEHPHPCVRPDPICAESQGNCHQRA

SEQ ID NO: 14256 - protein, 48 aa, Homo sapiens
LGTVGPLRGCDAAISHLAGCTLVPVDQGPEQEPSGAGTVGEGQQGWVD

SEQ ID NO: 14257 - protein, 178 aa, Homo sapiens
VPWAASLIHSRFLLMDNKAPAGMVNRARLHITTSKVLTLSSSSHPTPSNHRPRPLMPNLRISSSHSLNHHSSSPLSLHTPSSHPSLHISSPRLHTPPSSRRHSSTPRASPPTHSHRLSLLTSSSNLSSQHPRRSPSRLRILSPSLSSPSKLPIPSSASLHRRSYLKIHLGLRHPQPPQ

SEQ ID NO: 14258 - protein, 34 aa, Homo sapiens
LRPLQHHHGYQRGQFLWQVRGPEEEGAAQLAAGG

SEQ ID NO: 14259 - protein, 32 aa, Homo sapiens
LEAGHGAGEPRVGMCQWPHEQEPSASEPPANH

SEQ ID NO: 14260 - protein, 63 aa, Homo sapiens
LCSRFSIRDSSSSAIVSASGFYMWPNTILLPTWPREAKRLDTHQTDGKGRFRLFFREVAGFTR

SEQ ID NO: 14261 - protein, 43 aa, Homo sapiens
VGGSRSAAWAQPTPRRRPWQAPWTWTRAARWRSCSAGASKPSS

SEQ ID NO: 14262 - protein, 145 aa, Homo sapiens
VESGREPQPQRGRRAGAHGGGVGQAGAGSLRQVPRGFGPSPVGGSRSAAWAQPTPRRRPWQAPWTWTRAARWRSCSAGASKPSVSGSGGHTEPEPSPESEPGSLPPRHSPGHSPDPDPPCSAACSLFNESLLRNAGQRDARPSDR

SEQ ID NO: 14263 - protein, 58 aa, Homo sapiens
VQASEELPGCSREEQLEAVAALSSLCWASCSSRVFISSFPWRFVQMPMSEVMLEKRSS

SEQ ID NO: 14264 - protein, 48 aa, Homo sapiens
VAGDRVYKALRGRPPFHYFSPGLLGSLLVGDPCCRPFASFTAADPFKF

SEQ ID NO: 14265 - protein, 114 aa, Homo sapiens
VGGSLGLATQRSSALPPGARSRLSSPHHFSLQTVPQAPGVPASVAVAPECPSEPRGACPPAPRRGPARHLGRRRTDAGTSTRSRLLDLGTLTRFLWGTAEDYFEFRWSPVVWHI

SEQ ID NO: 14266 - protein, 32 aa, Homo sapiens
MRNYQFVIWFPSGFKTEDPKLRLIWSQKEECM

SEQ ID NO: 14267 - protein, 143 aa, Homo sapiens
LLQGGWARSSPPAAPTRTLRLSSPFSHLLLRQARRPPGRLPRTCGAQLADRPIHWEPRLLPEPTSPATSSSERRVAPWRRATRPTATLTALRRGLRPGPELRGPRRDAHGVARASCGAKRWCCSPCPGCWRARAWARRCAGSA

SEQ ID NO: 14268 - protein, 24 aa, Homo sapiens
LHPARGLKLGRLSRTQESFPSSQR

SEQ ID NO: 14269 - protein, 61 aa, Homo sapiens
MFPSPKAWNFRGFFQGSPQKKTADTYIFAPGSALGELQTNSSENGNRAPKMKMLLAFAVST

SEQ ID NO: 14270 - protein, 87 aa, Homo sapiens
LQRDLERLAPSEEPGLCLVSPNPGNLLCCRRGSSCPRGWACCWDPSLPDGGLSHRPDPAAAGCAEEEQTAGPRPTADPPGPAPPAGE

SEQ ID NO: 14271 - protein, 33 aa, Homo sapiens
MVQVHTCERLHVSMRVSGFTHTPAEHACVPVSL

SEQ ID NO: 14272 - protein, 39 aa, Homo sapiens
LQSCGLPGPSLSPDSLPNPDGAALAMCTWCKCTRVSACT

SEQ ID NO: 14273 - protein, 22 aa, Homo sapiens
LMAVLLFPCVRSPGGKLKVFSR

SEQ ID NO: 14274 - protein, 97 aa, Homo sapiens
VIGLRGPRELAAGQFVSPDGECSLVGGAMGWGLVCSWGQRSEVGLRRTGPEGLDSGPSLAPNLCRVALGKSLSHCLDWALSLPVYPMEGLSVHLGTA

SEQ ID NO: 14275 - protein, 68 aa, Homo sapiens
VDSGFHPTCYMLTRSPLRKNRNAGSPTSFCCSPSCWGSLFSSHGRQAAHASSLSVCPSPTPRPPSHCK

SEQ ID NO: 14276 - protein, 61 aa, Homo sapiens
LHESRSYGPLASVTGHRFPGVSGSYLTALTRAGCSLFSPRPTSPRWLRWPRWVARRRRTVL

SEQ ID NO: 14277 - protein, 21 aa, Homo sapiens
MFSCVARTVRRSESCASGKSH

SEQ ID NO: 14278 - protein, 109 aa, Homo sapiens
LLKILPAAARQQRKKRGKSYSFPIQLKHYILALAALHCSSVLLVEIWILRREHSTALSSQENSRCKKLQCINCREESTVLQAERATTALLFNEREKMKERENFRRLGPI

SEQ ID NO: 14279 - protein, 18 aa, Homo sapiens
LPLRPPRNNKPGSTIPID

SEQ ID NO: 14280 - protein, 9 aa, Homo sapiens
MSRCEYRRT

SEQ ID NO: 14281 - protein, 18 aa, Homo sapiens
LAPEDAQGKNAQVQHAWL

SEQ ID NO: 14282 - protein, 121 aa, Homo sapiens
LQDPQEHGPHGFPLMFLSSLKYNSLVGRASCTGHAHAHGGHPATSEWHPHPSPSLLPPRRTWILPQEAQGAQPEPPTSAPCQGQHSHQPPLPSSDPRLAPAAAPAGVIPGRGLRDSAEPWV

SEQ ID NO: 14283 - protein, 105 aa, Homo sapiens
LRLLGQASHARTASCTGHAHAHGGHPATSEWHPHPSPSLLPPRRTWILPQEAQGAQPEPPTSAPCQGQHSHQPPLPSSDPRLAPAAAPAGVIPGRGLRDSAEPWV

SEQ ID NO: 14284 - protein, 97 aa, Homo sapiens
LVRGASCTGHAHAHGGHPATSEWHPHPSPSLLPPRRTWILPQEAQGAQPEPPTSAPCQGQHSHQPPLPSSDPRLAPAAAPAGVIPGRGLRDSAEPWV

SEQ ID NO: 14285 - protein, 136 aa, Homo sapiens
MQPCQLRDLRGPPAPFLPLPPTGRCPACCPATPGGSREAWRVTTPWPSGNSPLCGCPTCRMLPPLLPTGLLKASLSAAGTIAQAGAGPAWWPGIWHTPSPWGEGQSPTLLTSACFFPSAAFTAEFLFSLGSLCQHL

SEQ ID NO: 14286 - protein, 68 aa, Homo sapiens
MMLARVPRAPRCGRGGSPGFQGLGYGRSAAPAGEGAGCARTRGEAAAARSRRRGRVRRAAAALAATPP

SEQ ID NO: 14287 - protein, 75 aa, Homo sapiens
LAEADGLSTNHWLIGTDKCVERINEMVNRAKRKAGVDPLVPLRSLVELCSYLEQAPTAGSSTLMAPRVAAAAGAI

SEQ ID NO: 14288 - protein, 56 aa, Homo sapiens
MADDLGEPAPLWPHDPDAKEKPLHMPGGDGHRGKSLKLLEKIPEDAEATVVLVAVS

SEQ ID NO: 14289 - protein, 18 aa, Homo sapiens
LAWSSPVSYPFNFPHLWG

SEQ ID NO: 14290 - protein, 46 aa, Homo sapiens
MKALRSAEQIDYSGVPVLGTTAVRERTLIFAFNGEQKMKKEKEYIH

SEQ ID NO: 14291 - protein, 51 aa, Homo sapiens
LKTPDDIRATFQQPSQFSFSESRGSELGDRRTLIFAFNGEQKMKKEKEYIH

SEQ ID NO: 14292 - protein, 52 aa, Homo sapiens
VASRPPLRRERRWSEGRARRGAGPGRGGRRLRGPSLTEPEAGSRGGLGCTLD

SEQ ID NO: 14293 - protein, 59 aa, Homo sapiens
LRRERRWSEGRARRGAGPGRGGRRLRGPSLTEPEAGSRGGLGKCLDCELFQNCSQDSLF

SEQ ID NO: 14294 - protein, 56 aa, Homo sapiens
LKSVFLAAACIRSSTSPPWASWWGWAGGGGAAQQQRKPDLGDKRLHSDMQQSFHCS

SEQ ID NO: 14295 - protein, 29 aa, Homo sapiens
VTLSTLRMTTLFLVCEGGSADSVSVRHVL

SEQ ID NO: 14296 - protein, 63 aa, Homo sapiens
LGTTRPCGRQVEQAPFLFPITWLSVDDFYFRRRAINTFDSILFCPDLGDCFVLVVVLEKQFIN

SEQ ID NO: 14297 - protein, 34 aa, Homo sapiens
VKVAGRPRAALDPEPRRAWAVGPRGKVPCTRGLR

SEQ ID NO: 14298 - protein, 30 aa, Homo sapiens
VRTQLREGFVLSSVLWCRASSSPAQPRRLN

SEQ ID NO: 14299 - protein, 42 aa, Homo sapiens
LVEGTASGCMAACDKPRPLPPLPKPLHPCIHTGHSDSDRYYS

SEQ ID NO: 14300 - protein, 34 aa, Homo sapiens
VQGTQESFPLLLLSSEVPGWMEAGTYPPLLAFRD

SEQ ID NO: 14301 - protein, 17 aa, Homo sapiens
MRRVTGSFSSRLLAPRC

SEQ ID NO: 14302 - protein, 41 aa, Homo sapiens
MPHPRPGAAARGGAHRASPLPPAPFPSTTARRLHSFPAGES

SEQ ID NO: 14303 - protein, 8 aa, Homo sapiens
MKILKMPC

SEQ ID NO: 14304 - protein, 33 aa, Homo sapiens
VKLTCATTFLFTFLQRLKTREYFARFTGTHCPY

SEQ ID NO: 14305 - protein, 12 aa, Homo sapiens
LSRKIQKSCSQW

SEQ ID NO: 14306 - protein, 45 aa, Homo sapiens
VSAAGADSGAGCCASPGSAACSPGSGPRGALDRHQVATGAPSPPS

SEQ ID NO: 14307 - protein, 16 aa, Homo sapiens
LLASVDISLPSRSVSH

SEQ ID NO: 14308 - protein, 46 aa, Homo sapiens
LSTGAAQQTLPPFPVPLSLCWAKGFGGASTAPFPPRSRFFLKLSPF

SEQ ID NO: 14309 - protein, 57 aa, Homo sapiens
LPTGWVNLFPTMTFISLFFTIILKAVGEGRGWVLPDIKGWHPFPRPDAGPSRQLRLA

SEQ ID NO: 14310 - protein, 16 aa, Homo sapiens
LTSTEWKDCKESTLLL

SEQ ID NO: 14311 - protein, 69 aa, Homo sapiens
MCRTLTTGASGPFTVLKAIGLQRTGKQEEAFTLAQEVAALEPTDDNSLQALTILYREMHRRMFLSFHCF

SEQ ID NO: 14312 - protein, 32 aa, Homo sapiens
MAKAVNSPQRSRLFAYPTLESLQKWKEQNVRV

SEQ ID NO: 14313 - protein, 125 aa, Homo sapiens
VSQPWLIELLGLGSPKGHSSSLLIVFFPYCRLQHGGRQWGGRMPVTAQEHQRELSNCQRCCPFSTTGKWLIHTKNQPQTEQACRRSPTASPSNVHFTPPRRQHQAGCKTGKYLPESNTLYGSGFN

SEQ ID NO: 14314 - protein, 53 aa, Homo sapiens
VVWGRGAWKWNEGFPGAITLGMKRTHTRLSHCRSFATRPMSRPSAGPSNPVSP

SEQ ID NO: 14315 - protein, 8 aa, Homo sapiens
MGMCELLH

SEQ ID NO: 14316 - protein, 89 aa, Homo sapiens
LSQCFLSLSFELALRYPTRRPGPSHAGGPVERRQAVQPVPACGGGTQQARPPPAASPASPQTLVPSPLGPPCLGWGSCLETVPVLGPPP

SEQ ID NO: 14317 - protein, 16 aa, Homo sapiens
MGAGAERRGAARGRHG

SEQ ID NO: 14318 - protein, 24 aa, Homo sapiens
LRTMSREYVNNRNSCHFNRLLLTS

SEQ ID NO: 14319 - protein, 9 aa, Homo sapiens
LMQNPQVFK

SEQ ID NO: 14320 - protein, 42 aa, Homo sapiens
LAPGVEQTRTPPSWRRRRGLRARQRAGGQNESAGLKRQKCQQ

SEQ ID NO: 14321 - protein, 63 aa, Homo sapiens
LEETRLLYFAPNTRIDEHFKTSPKIPGIDLNSTRVLFEKLMNSQHSMILEQITGGLRYARNIS

SEQ ID NO: 14322 - protein, 23 aa, Homo sapiens
LPTPYPQLRKIQRPPPRTLYSPR

SEQ ID NO: 14323 - protein, 17 aa, Homo sapiens
LGTLLHSCVLFLDFQYL

SEQ ID NO: 14324 - protein, 52 aa, Homo sapiens
LPCDARPLRELSVTHELPTSPAAGRGLRAGKTRGRGGGKGRKVLRRAVCFRK

SEQ ID NO: 14325 - protein, 9 aa, Homo sapiens
LARSTWAMF

SEQ ID NO: 14326 - protein, 153 aa, Homo sapiens
LLEKPRNPRTFLRSELGAPRRAHGTRAAVGHAAAPGPPQGDGARSARKVRRRRCVLEEGGTRSGDPGWRTGALPPPRLRGTSSGSIVPARAGGAEHRAPPGVERRPRSSCDPARTRTEPGGGGPEPGTRAHARSHKPRRTLPRRNLHAERGSV

SEQ ID NO: 14327 - protein, 74 aa, Homo sapiens
LLPCRSISRPPGGRGNPGLRREGRRFERARSGDRAAYSAGKNGCLGGGGGGPGARGASPGSSNLPPNSGFLLFS

SEQ ID NO: 14328 - protein, 46 aa, Homo sapiens
LGCRRPHHVRGRLHGLRGCPVSGFHFEPRCGAGAWGRSGRRAAATT

SEQ ID NO: 14329 - protein, 8 aa, Homo sapiens
MGSASNTS

SEQ ID NO: 14330 - protein, 58 aa, Homo sapiens
VVPSAQKKSVISPPRPLISNPELKGRRATPSIQRGISCARTRDDWAMDTDVSNLQPFA

SEQ ID NO: 14331 - protein, 33 aa, Homo sapiens
LQSSTCLLQKLWKCRQIKRRKSYFQILLTPKTR

SEQ ID NO: 14332 - protein, 36 aa, Homo sapiens
LHLMWYTKQIGRLFQNPLSVDFYVKLSEVFIWWDVF

SEQ ID NO: 14333 - protein, 62 aa, Homo sapiens
LCGSRRRKQLLAEQPHPRPPALELPVQHAVHARPAGPESPLRPFHEVGGHQPHPTAQPRTAL

SEQ ID NO: 14334 - protein, 27 aa, Homo sapiens
MFKSKCQIMWRMYTSRAKLWVVHKFSK

SEQ ID NO: 14335 - protein, 81 aa, Homo sapiens
LLVQVPPFQLQHHLLVGWSCLPWSRAVGMERKGCAVRPHQSDPDAWNRPCGAGPDGGRGDVHPGVRRLRGGSAGEYLLAQL

SEQ ID NO: 14336 - protein, 43 aa, Homo sapiens
LELILQKTFLPQQKLLIKMKQMTTILEIKPSFFVLHHNVWKNR

SEQ ID NO: 14337 - protein, 72 aa, Homo sapiens
LELILQKTFLPQQKLLIKMKQMTTILEIKPSFFVLHHNVWKNRFAAASRRSGAGCKHQHSFLYPFCGPASYL

SEQ ID NO: 14338 - protein, 119 aa, Homo sapiens
LPGGRREKGKTGVGEGKEPGSRAGGRARAPLFQQCGGVARTPASAAGRDLRQWGGRWRWRRQRQLCGKLGPGLLDGGVAEAPPQAAGTWREAEEYVREGSVDCAGGNRHACGQEAEAEQ

SEQ ID NO: 14339 - protein, 61 aa, Homo sapiens
LDLLRLPSCDAVLLFVLGGSASAEMWAAGQDGHSGSAQQRSPDSDWGSKQGLDRPGEPVGQ

SEQ ID NO: 14340 - protein, 70 aa, Homo sapiens
LLKVSPPTCIALQSVASALANSASSPADWASAEMWAAGQDGHSGSAQQRSPDSDWGSKQGLDRPGEPVGQ

SEQ ID NO: 14341 - protein, 63 aa, Homo sapiens
MEQIRTTPWTLISSLAPELAFEASAEMWAAGQDGHSGSAQQRSPDSDWGSKQGLDRPGEPVGQ

SEQ ID NO: 14342 - protein, 65 aa, Homo sapiens
MEQIRTTPWTLISSLAPELAFEGGASAEMWAAGQDGHSGSAQQRSPDSDWGSKQGLDRPGEPVGQ

SEQ ID NO: 14343 - protein, 95 aa, Homo sapiens
MTWGLQHPSSKPFPKKVKRSQDDWHLLLLLLFFLFPCPAPSCACVSDNTGASTGVENPAAQLSSAHRSLGNGLSLCNKKIFFFFLNLHYIFFDCL

SEQ ID NO: 14344 - protein, 19 aa, Homo sapiens
LPELVHYREEKHIFPRGFL

SEQ ID NO: 14345 - protein, 71 aa, Homo sapiens
LMTPATLIHRLFKVHLALLEIKGQPNHWGAHGTAERHQKLFSRVPQPSLPAHILCHTLSSSCGAKNAIMAS

SEQ ID NO: 14346 - protein, 89 aa, Homo sapiens
MSTEERICMCETIQARRHLLPASKAGPEHSCPRSAACQGKGDGCHQEFLEGTHLWEKSWKPLPFWCSWNWKNCLLKPDSARPQEGTERL

SEQ ID NO: 14347 - protein, 27 aa, Homo sapiens
MQAPGSTEDHLRKFFLSKLWSNMSHEW

SEQ ID NO: 14348 - protein, 54 aa, Homo sapiens
LTSRTVPVEALLFLGQKYSPMGSIIVFVQKPGLKEKTALQITHLPGREARMPQC

SEQ ID NO: 14349 - protein, 37 aa, Homo sapiens
LARRRRGLAIASGSCELCFGAGALPRRTGGRMNPAYL

SEQ ID NO: 14350 - protein, 85 aa, Homo sapiens
MVGPGPTAAAAVEERQRKLQEYLAAKGKLKSQNTKLLDPKMMLPTMLFCLSNLKGPSALNSSPDHLILQGPRSRSWSHQNFWAKG

SEQ ID NO: 14351 - protein, 37 aa, Homo sapiens
MAYNGLGGPNNIKYILEMRVPVLDRPRHAFCFSFNAP

SEQ ID NO: 14352 - protein, 40 aa, Homo sapiens
MSSMRNSRRQCRIALKKANWPESKMLSRSFLHPTIGPWNT

SEQ ID NO: 14353 - protein, 8 aa, Homo sapiens
LALETRRA

SEQ ID NO: 14354 - protein, 88 aa, Homo sapiens
LRLPLGHVKARLVACFVLSAPDNLMEHLHLSCTFLKCAGQPGHKLRFSMYSSPCSLTCPLWKAYVYNMCHVLWKPGHLVKTLGILPWA

SEQ ID NO: 14355 - protein, 69 aa, Homo sapiens
LDKSFQYHLHHMPDPLLPSMLENRVGKMGFGPLRALPCTLVQCLCHGFRFSWGTLDVKIICIFYCIIWS

SEQ ID NO: 14356 - protein, 13 aa, Homo sapiens
LAFRFLKLVLEVA

SEQ ID NO: 14357 - protein, 62 aa, Homo sapiens
MIWWSACLRRSQPGALGRCYSLPTLPSCYSAEKTSARSSAVLSSCACTTWRTPASASCRPSS

SEQ ID NO: 14358 - protein, 30 aa, Homo sapiens
VPNQPLRRAAVSADTGLQIHQIPGDEDART

SEQ ID NO: 14359 - protein, 31 aa, Homo sapiens
MTYQDRTFPNYRVTHSRIGDSLQCVISGCCV

SEQ ID NO: 14360 - protein, 43 aa, Homo sapiens
LPRGSGSKPVCLAGLQVRRERKCLFHFGNWEDCDSSEACRITS

SEQ ID NO: 14361 - protein, 60 aa, Homo sapiens
VEVICRMKIRHFLSYREMNYSLSTGRLTVTGQRLVTVMNLKMTRVLWKSQTVLLVQVISL

SEQ ID NO: 14362 - protein, 11 aa, Homo sapiens
MVITNRMEWKT

SEQ ID NO: 14363 - protein, 43 aa, Homo sapiens
LEQKFHSIIKGFRSLAEKFEFDVVGKINRKLPRWKLCLSPDIM

SEQ ID NO: 14364 - protein, 30 aa, Homo sapiens
VAGQCCSGASPSRSLEFLVPGAPHLAAQPA

SEQ ID NO: 14365 - protein, 20 aa, Homo sapiens
MASARGHKISVLPASQKRCA

SEQ ID NO: 14366 - protein, 25 aa, Homo sapiens
LWRQMGLGGSSAGGGGGRSGSSWPC

SEQ ID NO: 14367 - protein, 105 aa, Homo sapiens
LARLCRQARTGANWPGDVAWTGAGASDWLRGPGAGPVGGARRRLCSKRAPSGTGGCLWPEADQDYCIELLVSSYSTPKISFCYSKDQMLRLPFQVVLRIRVVVIH

SEQ ID NO: 14368 - protein, 36 aa, Homo sapiens
LSRGLGAASRQNTFTARPGLPPCGRDPTTTWISVAG

SEQ ID NO: 14369 - protein, 32 aa, Homo sapiens
LQRPMLVLAKSRRSKGAAMMLAVATVDFSQEH

SEQ ID NO: 14370 - protein, 63 aa, Homo sapiens
LPFILRSRLGSATKPLDTGLRLSAVAPQILLPGWPDPISVQSSDLPWGNTHYRPEPLSSTTWL

SEQ ID NO: 14371 - protein, 49 aa, Homo sapiens
LLDTGLRLSAVAPQILLPGWPDPISVQSSDLPWGNTHYRPEPLSSTTWL

SEQ ID NO: 14372 - protein, 9 aa, Homo sapiens
MSKADAAPC

SEQ ID NO: 14373 - protein, 97 aa, Homo sapiens
MSRPRRPPPARPPRPGPTRAPRHRRLGPGRAARNLRAASRSSTAATSWCRRRTESTRPRRATISTRSTNRRARPTASARLAPATCPSTPRSPSSSSA

SEQ ID NO: 14374 - protein, 84 aa, Homo sapiens
LGGENHQGRLGLLRQVRGPQWGRGRTWDPAQPTDATCAGRTRTPAQRVRCKVKSHRGEDSVGTSKNWKKKTSGRRFAIRMGTRN

SEQ ID NO: 14375 - protein, 44 aa, Homo sapiens
MVYIQLVPELHNPEFRSIERHHLSISYLPPRTLQCKTTVLHFGK

SEQ ID NO: 14376 - protein, 26 aa, Homo sapiens
LGHFCLPETLMRPSLECSGCAPDHCC

SEQ ID NO: 14377 - protein, 189 aa, Homo sapiens [sequence omitted]

SEQ ID NO: 14378 - protein, 71 aa, Homo sapiens
LASLLAQGESRPLSLSWLGLRSPQHPHPFLLASVLPRRPGDRGHMEGGLTTSTPEQGTVQSGVTTPVSPPG

SEQ ID NO: 14379 - protein, 35 aa, Homo sapiens
LETPSPTESHGPIGPAPPRPRPHPPQPGGLPGLEG

SEQ ID NO: 14380 - protein, 91 aa, Homo sapiens
VGGASDLNASGADFCQAPAHVRLAAQRSLGSPEASLSLPDPAARAGAVGPGASTLCGVSWARAAGAESPRPRGGAARARPRPPAPPGGAPP

SEQ ID NO: 14381 - protein, 80 aa, Homo sapiens
VNPEVLRGGGPGNSFEWNRADSSPVCRQSRVGCAPLLLLPLSSRHHRGKTRVHIAASGSRPSSGEKEKIKYTWGSCTCQN

SEQ ID NO: 14382 - protein, 14 aa, Homo sapiens
LPRSELPGASPGWS

SEQ ID NO: 14383 - protein, 9 aa, Homo sapiens
LDFLIQLQH

SEQ ID NO: 14384 - protein, 71 aa, Homo sapiens
MSRSLCCPQLPAAHFFPPVTFKSCVWDHGAADNLGFCQCVFLRVIGSQLTSIQQNQLHRRLTSGSHGCDGA

SEQ ID NO: 14385 - protein, 29 aa, Homo sapiens
LGVGGEVKRSLFSFTKMAACPCFATVPTL

SEQ ID NO: 14386 - protein, 101 aa, Homo sapiens
LRFPPRPSEVQPIMKVLAAVHSPGGAVPQQPGQAMWPQRDGLPALPRQRHGEGQAGGAVPHSRVPWHLPGQHHPGPEDPQPQCPQPPQQAQRHRRHPARPP

SEQ ID NO: 14387 - protein, 11 aa, Homo sapiens
LDCEARHWVSK

SEQ ID NO: 14388 - protein, 14 aa, Homo sapiens
LVLSKILDCEARHW

SEQ ID NO: 14389 - protein, 59 aa, Homo sapiens
LKPSALGKAAARLPLSEPCPVCPPARQAPYEPGGARCESCCGLFGLFPPLSLAGMAPPA

SEQ ID NO: 14390 - protein, 48 aa, Homo sapiens
LLRVPWIQSAAPGERDPSLVEAQSSGRVHPACVWREAGKPVPGSWPQR

SEQ ID NO: 14391 - protein, 48 aa, Homo sapiens
LCPPRDRWPPSRPHQPAGITRHCPHPRPTTKNPAEAETTKRQSSLLLQ

SEQ ID NO: 14392 - protein, 14 aa, Homo sapiens
MDWKGKGHTRRRAP

SEQ ID NO: 14393 - protein, 29 aa, Homo sapiens
LCQGHWQRSCQVFTSGNSQLQAPARHHPA

SEQ ID NO: 14394 - protein, 15 aa, Homo sapiens
VPNGCCSWLDLMSRA

SEQ ID NO: 14395 - protein, 17 aa, Homo sapiens
LLPPVSLPTRVCRPGSH

SEQ ID NO: 14396 - protein, 44 aa, Homo sapiens
VGWEKIPLTPPGQRQESARNVLTNLDPAPKGTLKNVIVNRKINI

SEQ ID NO: 14397 - protein, 113 aa, Homo sapiens
LSSRLGTPGSLTAAAAASASRTIGSLGNNSGGRPQRGSGSPCLRGSGDSSRPPPPGRTASVVPACNASAGEWLLLCPSWGPSQDQSANSIPPAGRSRGAGTKPAASSRADPGT

SEQ ID NO: 14398 - protein, 89 aa, Homo sapiens
LPALRLAGRPLLLHSQPPLERPPAPPFSAQDTLQALITFFQVKISSHTCMTQSDLEMWICPASKPNIALPLQVPVMRRRHTARNTPRRS

SEQ ID NO: 14399 - protein, 85 aa, Homo sapiens
LSLESGFFKKLFFGWKVCACEWDEGEGRGLWTISSRPLSGSILCDPACPCERARTLSADHLLLSCADVDCVALPAVLPHAPFLCC

SEQ ID NO: 14400 - protein, 81 aa, Homo sapiens
LSTLDKLFFGWKVCACEWDEGEGRGLWTISSRPLSGSILCDPACPCERARTLSADHLLLSCADVDCVALPAVLPHAPFLCC

SEQ ID NO: 14401 - protein, 61 aa, Homo sapiens
LKSPPLGRRPPTSVQAHGCREGGRAAYLSPAQAPPWGRPTASWPPRCWRTLFRTLSSASRS

SEQ ID NO: 14402 - protein, 120 aa, Homo sapiens
VQQDLVELLHLQGVADLHLPQAVLQAGLQIFHGVQVDLQGLDRTSQLRECHLSSSNLGGLGGDHCGALLSPLRPALVQLLSVLPSQLVILGPDVCHDRGEVLRFGGINLHGQPRAGNLGL

SEQ ID NO: 14403 - protein, 31 aa, Homo sapiens
LEIQVYKGGKRLLLDFFFSFFYKSKHLKMET

SEQ ID NO: 14404 - protein, 31 aa, Homo sapiens
LGPQVYKGGKRLLLDFFFSFFYKSKHLKMET

SEQ ID NO: 14405 - protein, 27 aa, Homo sapiens
LSSASFLSDILTRLRCLLLFSELRNAA

SEQ ID NO: 14406 - protein, 23 aa, Homo sapiens
VTKDLTTQSPAPQNTARHGHRCD

SEQ ID NO: 14407 - protein, 13 aa, Homo sapiens
LGCFLCVWPQVSK

SEQ ID NO: 14408 - protein, 17 aa, Homo sapiens
LGTATHLGCAQKAGASE

SEQ ID NO: 14409 - protein, 33 aa, Homo sapiens
LLFPFAAERSQSKEELKEIQICEVDFHGNLVIL

SEQ ID NO: 14410 - protein, 29 aa, Homo sapiens
VGRAGPSRAVGRVGAGRRPGRRTAGWAAP

SEQ ID NO: 14411 - protein, 42 aa, Homo sapiens
LLQASGLDEPPFPVLGPFKYAGDRLENKTSVSVASWSECQNG

SEQ ID NO: 14412 - protein, 7 aa, Homo sapiens
VRRRSWR

SEQ ID NO: 14413 - protein, 27 aa, Homo sapiens
LGSACLRLSQPPRPCVVSSWVSERAGW

SEQ ID NO: 14414 - protein, 81 aa, Homo sapiens
LLVFYGPSTPTTTHSSWRPRATVGLLGILRLRLVETPGDGGALGHSETALGGAPYWPDWISQPATQPQATRKKPDLAFTAS

SEQ ID NO: 14415 - protein, 59 aa, Homo sapiens
LPGEPFRTEEPGSGRSGRRDARLPRGSGSKPVCLAGLQVRRERWMPIQKTSPLKPRSLQ

SEQ ID NO: 14416 - protein, 49 aa, Homo sapiens
LFNGRKKSSLSPEWRWPARQAGIAPLGNLGKSINSSADTKELCLGKAAA

SEQ ID NO: 14417 - protein, 124 aa, Homo sapiens
LGAQALRGVRVRRPLLGLWAAVDAVLQGEVHPGLIARETPQGIGGGAQTQQHGSPQPCLVPWPHPPRGLGDLGTTQRRLPHPGLTHQPGRLCAHVPLAQPGLALQDQQGGGEGRRELHTHPVPV

SEQ ID NO: 14418 - protein, 112 aa, Homo sapiens
LLLLPRLLRAGAVLQGEVHPGLIARETPQGIGGGAQTQQHGSPQPCLVPWPHPPRGLGDLGTTQRRLPHPGLTHQPGRLCAHVPLAQPGLALQDQQGGGEGRRELHTHPVPV

SEQ ID NO: 14419 - protein, 110 aa, Homo sapiens
LLLLPRLLRAVLQGEVHPGLIARETPQGIGGGAQTQQHGSPQPCLVPWPHPPRGLGDLGTTQRRLPHPGLTHQPGRLCAHVPLAQPGLALQDQQGGGEGRRELHTHPVPV

SEQ ID NO: 14420 - protein, 124 aa, Homo sapiens
LGHSTLGSECRGCWRARGWQRLCEVLQGEVHPGLIARETPQGIGGGAQTQQHGSPQPCLVPWPHPPRGLGDLGTTQRRLPHPGLTHQPGRLCAHVPLAQPGLALQDQQGGGEGRRELHTHPVPV

SEQ ID NO: 14421 - protein, 257 aa, Homo sapiens
MASDSRHTLLRAPAPELLPANVAGRETDAESWCQKLNQRKEKLSRREREHHAEAAQFQEDVNADPEVQRCSSWREYKELLQRRQVQRSQRRAPHLWGQPVTPLLSPGQASSPGTPSACHIFEGHWQLRNHRTLERAWMNWDGLRLKEDVGGGSGPTSTVSSPAAAAGPVWEGLEMPWSFSISLCCRQHTFLMEVPGCWRSLGAWKSSLMFTRPTLWPHSERITLANPMPGCALVDLMSLSQTSAASSGCLTRVGMSL

SEQ ID NO: 14422 - protein, 8 aa, Homo sapiens
MASTSCAA

SEQ ID NO: 14423 - protein, 9 aa, Homo sapiens
VTPESSLLM

SEQ ID NO: 14424 - protein, 91 aa, Homo sapiens
LAQASQWVPSLETKGPPLLQLDQASGVPSKAHTSPYRHEPGALAAAGPRSMLTSSAPSAGLSMSVGGRSGSSSPQGRKRPCGTATATCPTT

SEQ ID NO: 14425 - protein, 34 aa, Homo sapiens
VGVPDQVRLPLDCDRKQSVRVKDGYYDAECAESV

SEQ ID NO: 14426 - protein, 37 aa, Homo sapiens
LVTVATVIMTGLCHYLSANSKRSFAVEILFSRWSVFC

SEQ ID NO: 14427 - protein, 529 aa, Homo sapiens
LPSILPWTPDPGLEELFTALSPSLKPCAMSLQKRVFPRRQNGTHEVAAKPCPVATRQPRARDQERKKGSFTSSLRMESHSRAGKSRKSAKFRSISRSLMLCNAKTSDDGSSPDEKYPDPFEISLAQGKEGIFHSSVQLADTSEAGPSSVPDLALASEAAQLQAAGNDRGKTCRRIFFMKESSTASSREKPGKLEAQSSNFLFPKACHQRARSNSTSVNPYCTREIDFPMTKKSAAPTDRQPYSLCSNRKSLSQQLDCPAGKAAGTSRPTRSLSTAQLVQPSGGLQASVISNIVLMKGQAKGLGFSIVGGKDSIYGPIGIYVKTIFAGGAAAADGRLQEGDEILELNGESMAGLTHQDALQKFKQAKKGLLTLTVRTRLTAPPSLCSHLSPPLCRSLSSSTCITKDSSSFALESPSAPISTAKPNYRIMVEVSLQKEAGVGLGIGLCSVPYFQCISGIFVHTLSPGSVAHLDGRLRCGDEIVEISDSPVHCLTLNEVYTILSHCDPGPVPIIVSRHPDPQKEEMEAQEVK

SEQ ID NO: 14428 - protein, 63 aa, Homo sapiens
LRRRQSSTPTRPRWPGSGTHTQPCHRLHGPWSVPSGLVLYFPDRWWHATLNLDTSVFISTFLG

SEQ ID NO: 14429 - protein, 267 aa, Homo sapiens
LPLWAALPLHPQRGRAAARAVGGRLRGPACLWHARCVAPGLPAGAAAQVAPQPQLLGLPVGPPSAPGRPRVAAAARQPHVAHAAAALLLFGLVLLLLRLLLFLGLRGLHALGRPDMLRLRGGRGCGRSAVRHRGRRGPAGAGGPVRGLLVGLVRQQRLRLRSGAQQPHHAARHPDPQLCRRGRRRLLPQSAAAAAAGPGAPRAAAGAAQRDPPRRGRRTSLAALQLPAAAPPVRLARVRRAPQPPGLAVGPRQLPKRLPELRQPQRL

SEQ ID NO: 14430 - protein, 51 aa, Homo sapiens
LWTTSVRLRGARPRGLKETEGPRMPRTCRPHRGLVLNRGGAGGTLMWHQMK

SEQ ID NO: 14431 - protein, 57 aa, Homo sapiens
LPVAPTSDMPGTTLNRYGRTWPRWGWLWTPTGRCPSVRERALFSAGEGHGGGHRGEA

SEQ ID NO: 14432 - protein, 76 aa, Homo sapiens
LSPTWNPWPATSRSCCRRPSSWSAVRERPSMVMRPCARIAVQAPSTGGRSDPPRLLARRTAGGQCTMNWRSAGGPS

SEQ ID NO: 14433 - protein, 86 aa, Homo sapiens
LSPTWNPWPATSRSCCRRPSSWSAVREPDAGGDSLWQRPSMVMRPCARIAVQAPSTGGRSDPPRLLARRTAGGQCTMNWRSAGGPS

SEQ ID NO: 14434 - protein, 28 aa, Homo sapiens
LHRHRAGPASEGRCHGEMLPQEIPLGHP

SEQ ID NO: 14435 - protein, 27 aa, Homo sapiens
LFQQAIFKYCFLRPIQLGFTYFYTNFI

SEQ ID NO: 14436 - protein, 73 aa, Homo sapiens
VPSAPQVSSPACPPQSQLMAGVWAVRGAAAQTQFAPGSRETGGFHRSPALYQPCSLDKIFDLSDPRFSSPFFF

SEQ ID NO: 14437 - protein, 57 aa, Homo sapiens
LRALRKPGNTKANQMSGGFLPVLMPMEMPSPLHSLPRATEVCIPTFLLTSPRIPVLY

SEQ ID NO: 14438 - protein, 49 aa, Homo sapiens
MSGGFLPVLMPMEMPSPLHSLPRATEVCIPTFLLTSPRMPLPPVQPSRR

SEQ ID NO: 14439 - protein, 60 aa, Homo sapiens
MPMEMPSPLHSLPRATEVCIPTFLLTSPRFSLPHALLSLKRTALHGSPPPSTIPIRIPST

SEQ ID NO: 14440 - protein, 128 aa, Homo sapiens
LVLRPLSAPGSPGLRPDQGGPRRWGHIELHLRQDQARGRHAVSPARQEQHGASLRRHGEPAVCHRFPVPGHDAGHEVVPDGPHQSLEGHRPQVRVRPGLWPAGQPGVPEDQVPFREVHALQPDSCDPV

SEQ ID NO: 14441 - protein, 57 aa, Homo sapiens
MKSPCLCTWLSCCHYFRGRYSEFERRSSASPPAPGELLGLLFQQPLSLFYRIQRITR

SEQ ID NO: 14442 - protein, 54 aa, Homo sapiens
VRKGRGEPRRGAGGGRYSEFERRSSASPPAPGELLGLLFQQPLSLFYRIQRITR

SEQ ID NO: 14443 - protein, 36 aa, Homo sapiens
LYRMRQKIQGMISSPVRAQTVAFHGSSGFRSWPMTV

SEQ ID NO: 14444 - protein, 9 aa, Homo sapiens
VDRIGTAGL

SEQ ID NO: 14445 - protein, 38 aa, Homo sapiens
LQSLLQTLRSFMKLILRKWSPLINILREKRNILKNTIP

SEQ ID NO: 14446 - protein, 16 aa, Homo sapiens
LWTGGTAAGGLRPGLQ

SEQ ID NO: 14447 - protein, 97 aa, Homo sapiens
LLGSRSAAQLREHECCSDCREAGTGTGRPWESRGPRSCSSRSSGGGSTGERDPGGPSGPTQPAALCAGPLFGQGRLCQVLRDLGRGHQGGVRGQDCA

SEQ ID NO: 14448 - protein, 46 aa, Homo sapiens
MEHRGWCATCYLMLQFVPQRENIHRCHGFSGSSGIPQMQDSDSNEY

SEQ ID NO: 14449 - protein, 103 aa, Homo sapiens
LLPRLPGRRCLPLLRRLAGEALEHLRPLPDPGHHVRGRQGVGAPPGGGRPQGLLAALGAPVPDGKHLLCLPGVSPAAGRDLPQHPGGAGPAQGHLPAQGADQQ

SEQ ID NO: 14450 - protein, 189 aa, Homo sapiens
VCPIPSTVQCPASSTEDPSSSAYYSGGSPNTPPTSSYPCTPPSPSSPKTPCDHPRTNQHQDCGTCCDSSCTTHTYSSSAPSKKAASFPCFLHSTLSPYPSCSSTPANITQATELLCKTPSLSTVTGALGREADSQPVSTPSNSPCHGISALKACPSKCSSTVPSCSKSKAQVAAQLHPSPFSGLPSSPS

SEQ ID NO: 14451 - protein, 23 aa, Homo sapiens
LTGLALTVRRQDFPGESLHSELR

SEQ ID NO: 14452 - protein, 21 aa, Homo sapiens
MPGHWCQELDPSPSHDVLWGA

SEQ ID NO: 14453 - protein, 90 aa, Homo sapiens
VTLPGEPARGCQSARPRHGGPGAARGGSQALPARGPRGPCAGPPAQVLPSSDAAPQSRGAAGDLAREPILQRCQAEGRQRRRGSLFGTNS

SEQ ID NO: 14454 - protein, 59 aa, Homo sapiens
LCRIYRDSRHRGWNLSAFRSHLKHTTAKARVWLRSMSRSDKGSVPPGHPLCGLALQALL

SEQ ID NO: 14455 - protein, 9 aa, Homo sapiens
LPDLPWTYV

SEQ ID NO: 14456 - protein, 55 aa, Homo sapiens
LQGWRLALFGCRPGGRGAILSSRLVVATTPTPQRQAPEAAGQSACDPSRCSGEVT

SEQ ID NO: 14457 - protein, 32 aa, Homo sapiens
LCLGPTRQEVDQRWPFLKSLWICGPEAGQCHG

SEQ ID NO: 14458 - protein, 97 aa, Homo sapiens
LQTQLWSSAATAAGKTCPCSPLPPPPLSSSPLTQQAPPVPARPSCHVGPRRPQGLGCPRHVAPLFQGCLSPFKEPQPTPNLGPALSPRDHERGQEEE

SEQ ID NO: 14459 - protein, 43 aa, Homo sapiens
VVVSLLCWRGTQMLSPPRRMMMMMMTPLQRRKKQITPNQTVCP

SEQ ID NO: 14460 - protein, 53 aa, Homo sapiens
LVLGLVIRGPEQVVVSLLCWRGTQMLSPPRRMMMMMMTPLQRRKKQITPNQTP

SEQ ID NO: 14461 - protein, 32 aa, Homo sapiens
MFQMLSPPRRMMMMMMTPLQRRKKQITPNQTP

SEQ ID NO: 14462 - protein, 42 aa, Homo sapiens
VTPPTSPSMFQMLSPPRRMMMMMMTPLQRRKKQITPNQTVCP

SEQ ID NO: 14463 - protein, 27 aa, Homo sapiens
LLLSPLSSIYCTVKEVVPGRNHGSFVH

SEQ ID NO: 14464 - protein, 188 aa, Homo sapiens
LISVCTIGIRIAHPAGAGRETWKCSSELPRACPTVRPQHCSLIFTFTISFNLLSFWRHFSAKPRLETIELTCALCKLRSAAHRATAGLHCILRLLCLGQLHHPGLGRVGCGSAGLHRRHKHVSGWLAGHHLPGHRAHQHLLPAGQPHGHGPLWRGHGHPQLAAQAALLLLRLPHVPGARGFPWVFSGP

SEQ ID NO: 14465 - protein, 146 aa, Homo sapiens
VRPQHCSLIFTFTISFNLLSFWRHFSAKPRLETIELTCALCKLRSAAHRATAGLHCILRLLCLGQLHHPGLGRVGCGSAGLHRRHKHVSGWLAGHHLPGHRAHQHLLPAGQPHGHGPLWRGHGHPQLAAQAALLLLRLPHVPGARG

SEQ ID NO: 14466 - protein, 81 aa, Homo sapiens
LLPELAVFLSAAGTVGERERTEEGSLQTDAFSIPRRGQVPGRWAWRCFRRAQRWEEAEETRAWEINRKLPRWKLCLSPDIM

SEQ ID NO: 14467 - protein, 40 aa, Homo sapiens
LALTSCLAPGWAPQDRCLFDRFFGLGDHFRDVFQKYQRFN

SEQ ID NO: 14468 - protein, 17 aa, Homo sapiens
LRDQKTGTRLCLNRSTN

SEQ ID NO: 14469 - protein, 8 aa, Homo sapiens
LELEDAKD

SEQ ID NO: 14470 - protein, 74 aa, Homo sapiens
LNGPTRKGGCSQLAGGKILLPSSGKICSRPGCFGVGDPRVGDRRVGHRTVGHRTVKHRRVRPGFSEDWPPKPVY

SEQ ID NO: 14471 - protein, 73 aa, Homo sapiens
LVVLVAALRRHTWHVEGGLYMAVFDLAIPAEQIIFHGGRVCSNRHGLIRKYGLNMCRQCFRQYAKDIGFIKLD

SEQ ID NO: 14472 - protein, 30 aa, Homo sapiens
LGYVIIYPPTVREALQSRYCLADGVFSVEH

SEQ ID NO: 14473 - protein, 19 aa, Homo sapiens
LGLQHHGRTGCGKRSFGLR

SEQ ID NO: 14474 - protein, 57 aa, Homo sapiens
LRDRWGGRRRRRRRALRAVSVEARTRGGAGTAAAAAAAGGTLIPVLRTPRASPWLTS

SEQ ID NO: 14475 - protein, 54 aa, Homo sapiens
VRGGRSAALLPSRAAQSLPSLPSRCGACVSQPCSRESLPSGRSVFGSSWLATNT

SEQ ID NO: 14476 - protein, 38 aa, Homo sapiens
LSTLGGARTPNCGRALTPSAALVAPSRWRASCLRIFSM

SEQ ID NO: 14477 - protein, 68 aa, Homo sapiens
LPGLPPPPWGPVAAVHLFLLLPPKCGRPALHLDACPPGPLAGTEHPPGPQGMTQGEVEALAKWWLWLV

SEQ ID NO: 14478 - protein, 10 aa, Homo sapiens
LASRGLEQVC

SEQ ID NO: 14479 - protein, 14 aa, Homo sapiens
MCHNDDSLFATLEC

SEQ ID NO: 14480 - protein, 8 aa, Homo sapiens
LFLRLASG

SEQ ID NO: 14481 - protein, 47 aa, Homo sapiens
LDRANRRTFCVDRSLRTLKTAADEDGKHPLQAGQVPGGPGGCGLEEI

SEQ ID NO: 14482 - protein, 56 aa, Homo sapiens
VETLKKTHPCAVFTAWYLSVDRSLRTLKTAADEDGKHPLQAGQVPGGPGGCGLEEI

SEQ ID NO: 14483 - protein, 53 aa, Homo sapiens
MLSCWPSSPSSAWSRMDSLPIKWSTKAGPRMGGASRGPEHLPLSGSTLPTRTV

SEQ ID NO: 14484 - protein, 60 aa, Homo sapiens
VPGTFPHRMEPGHPHSSCPADAGLVEGGRQQEQCFLGLCSQSWPCCSLRLPAAQTSSWSS

SEQ ID NO: 14485 - protein, 92 aa, Homo sapiens
VARGQLLPAVQDRVGSAAQRPGPARPESADSARPGTFPHRMEPGHPHSSCPADAGLVEGGRQQEQCFLGLCSQSWPCCSLRLPAAQTSSWSS

SEQ ID NO: 14486 - protein, 89 aa, Homo sapiens
LRRADHLRSGVRDQPGALASPNGVALLWAPVPCELPGPAAGGKLWTLQDAVWRKEEGGSQEVWREVWSGGDERLRIPLGGRFEDRLELR

SEQ ID NO: 14487 - protein, 163 aa, Homo sapiens
LQPPCEPCHTAIASSRYSVRCVPAATASAPFLGPCSPKCLTLTLGLRNARKKDQMAKQPSDVSSECDREGRQLQPAERPPQLRPGAPTSLQTEPQDRSPAPMSCDKSTQTPSPPCQAFNHYLSAMASMRQAEPADMRPEIWIAQELRRIGDEFNAYYARRLEK

SEQ ID NO: 14488 - protein, 137 aa, Homo sapiens
LHSGLQKPRERSLPEATFQNLLHPPTDLPSPCPLFESRCQVLPADTWLLEGRCSFHLTMQACFAVGRAVLSSSQLHTGITWRVQKLPASVKEHQCISTANIPNARLDSLQLPGPPGFSSFQELSDPGSSLNVGYKLT

SEQ ID NO: 14489 - protein, 22 aa, Homo sapiens
LPLSLRLSYNSCPAAASSTRLC

SEQ ID NO: 14490 - protein, 146 aa, Homo sapiens [sequence omitted]

SEQ ID NO: 14491 - protein, 47 aa, Homo sapiens
LQCARPTLLTTPAPQPPLTHTAGRSRLRHLSFREVKRFTKGNGRGQI

SEQ ID NO: 14492 - protein, 12 aa, Homo sapiens
MAPNKGSCLCSL

SEQ ID NO: 14493 - protein, 133 aa, Homo sapiens
MQLKPMEINPEGVARAAQTRLHGLRGRHVWAALCAVSLRRPGWGWQGGTGAPPRLGCGRGGRAPPGPAPWQVPATRVSPCAWPPCLLSAGAVPAGGRRPVALRGRAGAGRGVSGLGASACLRAAAAVSPHGPA

SEQ ID NO: 14494 - protein, 97 aa, Homo sapiens
LRVVGCCRVGLGDATGSGSGAAAGPSSHCPSSDPTVLWKLVQGTCHCDHLDADTCFPTTARKNHGPVSTRLFCASFAHARPLARNILQTSDHSVYLS

SEQ ID NO: 14495 - protein, 150 aa, Homo sapiens
VNLLGLGEAVWTKQVRSVAMFSEQAAQRAHTLLSPPSANNATFARVPVATYTNSSQPFRLGERSFSRQYAHIYATRLIQMRPFLENRAQQHWGSGVGVKKLCELQPEEKCCVVGTLFKAMPLQPSILREVSEEVRQGATQWGRQADLASH

SEQ ID NO: 14496 - protein, 11 aa, Homo sapiens
LPPLCPELPRH

SEQ ID NO: 14497 - protein, 34 aa, Homo sapiens
MALKDYALEKGTGLRAREGVLRGEPPGEHLLVKG

SEQ ID NO: 14498 - protein, 21 aa, Homo sapiens
LEILNHVTISVFFHPVFFHIY

SEQ ID NO: 14499 - protein, 112 aa, Homo sapiens
VARNPRWLSVTWQDPHSWNSSFYRLRFELRYRAERSKTFTTWMNPGVLQLRTRCPPPCRHLLLIKTMIIFSSEILQMRQASQCKILLQYHCPHSWLLEGAWPSERSSALPLF

SEQ ID NO: 14500 - protein, 90 aa, Homo sapiens
VGPRPYIIRGMAPPTTPCSTDVCDSDYSASRWKASKYYLDLNSDSDPYPPPPTPHSQYLSAEDSCPPSPATERSYFHLFPPPPSPCTDSS

SEQ ID NO: 14501 - protein, 64 aa, Homo sapiens
VMCVLAFLTTPLLCISFFHFLFQAFLFLPCGNSFGASDCSSSECAAIPVDPVPGLQLLHLCQLS

SEQ ID NO: 14502 - protein, 114 aa, Homo sapiens [sequence omitted]

SEQ ID NO: 14503 - protein, 41 aa, Homo sapiens
LPHKPGYWQTADGQVHLPSGVSGLRSRDNGPDGMEPEGVIE

SEQ ID NO: 14504 - protein, 58 aa, Homo sapiens
LELFRCFFFFPSCDMCFSCSGKEMCHLWFGFKSGKLAAHILFYCRFTLRLIFSKSILL

SEQ ID NO: 14505 - protein, 95 aa, Homo sapiens
LEDTPRHLALAGGTGVGGVTWALGRLQARPSTWTRTLCREGPPPLLFRFPLVFFFLFLLRSFILFEQKSRTFSVEQNIHNRAVVIRIEQKKKKNT

SEQ ID NO: 14506 - protein, 117 aa, Homo sapiens [sequence omitted]

SEQ ID NO: 14507 - protein, 52 aa, Homo sapiens
LAPVQFGAQSSTKGRSVLLGSSLLQGLQEFSSAALSLHFFGGERLQKEKETQ

SEQ ID NO: 14508 - protein, 105 aa, Homo sapiens
LLKYLVGQKRWYRGRVGSGRAVLHTWVSLPRAVCSGSFGPVGGCGAAGVACAVRPGILPVMEAAAAAAAGSRCAPSTAAREVGKFAARRPKARGAAPLCRELSPI

SEQ ID NO: 14509 - protein, 28 aa, Homo sapiens
MHECDAVRDTDDQAETWNQRACPPLLPG

SEQ ID NO: 14510 - protein, 19 aa, Homo sapiens
MRRLGCFRREAEGSKMAAL

SEQ ID NO: 14511 - protein, 100 aa, Homo sapiens
LFVKNMSSLEISSSCFSLETKLPLSPPLVEDSAFEPSSLVPVSEASIIIAVSSAHRAASLEAVSYAIDTLKAKVPIWKKEIYEESSTWKGNKECFWASNS

SEQ ID NO: 14512 - protein, 16 aa, Homo sapiens
LGRKACQRVDRMDRRQ

SEQ ID NO: 14513 - protein, 40 aa, Homo sapiens
LPVFRRHVRTGWGCPSEPMRQQGLPPPLRPSGQRAAEPRL

SEQ ID NO: 14514 - protein, 38 aa, Homo sapiens
LFRRHVRTGWGCPSEPMRQQGLPPPLRPSGQRAAEPRL

SEQ ID NO: 14515 - protein, 85 aa, Homo sapiens
VERLSVKKVLELFLNYQSLICALEKQKRQKGSLAIFCWSFQGGCVSKRPDVPSLKSQKPKRKRITGRKRLSKGFWSLLFSNLGRF

SEQ ID NO: 14516 - protein, 97 aa, Homo sapiens
LREGERERRRERDGGRARQSEQRNLTEQVVRRRLLLLSALRYPGDPRRDSASERLRTPVQRSLARRIAESSPLFTTWSRFILPYPVFGFLSSPSSLC

SEQ ID NO: 14517 - protein, 53 aa, Homo sapiens
LFVVSMNKEKQIESYQISAFISLNIFFGISKAKLLNFFFFFFFFRYQHQDDLW

SEQ ID NO: 14518 - protein, 46 aa, Homo sapiens
LSHNAPAPFTSHSHRGKAPEKGCGDAPTANSGAGSIPKCRDPHPEE

SEQ ID NO: 14519 - protein, 167 aa, Homo sapiens
LRGRVGHQHRPLRRPGPRWLLAAWRCLLLQDRRGPGGGGHPRGPPGCHHYMPGTGHAAHGTQERHRAKPAVRGDPGLHLSHLLRQDGHAHHQSDVCLPDVRGSRGRCGLLPFARVHHLGYHVYPRGRSAAGGSACALRPVRRAGGAGDHLRPVQRLGSGLQRGQGCV

SEQ ID NO: 14520 - protein, 55 aa, Homo sapiens
LGLVVYLRHSEDFPRDYDVAAPLRGRRDGRGGSFNCDGCRPGEDHDGEGTPGRGL

SEQ ID NO: 14521 - protein, 52 aa, Homo sapiens
LPEDRVPHGAAGGRQAHFPQLLLLLQALSHQAQVRPCPARPRLACQPSPDLT

SEQ ID NO: 14522 - protein, 18 aa, Homo sapiens
LRLHPGADGRGWLHPLPH

SEQ ID NO: 14523 - protein, 43 aa, Homo sapiens
MAVSLRVSQDHGPRGGLSPRAGGLHTAGFPAALPLHLAPRQRH

SEQ ID NO: 14524 - protein, 12 aa, Homo sapiens
LKTVLRLIRDPN

SEQ ID NO: 14525 - protein, 17 aa, Homo sapiens
LGAPGAEEDQATLQTTH

SEQ ID NO: 14526 - protein, 51 aa, Homo sapiens
MAKVKEHQCISTANIPNARLDSLQLPGPPGFSSFQELSDPGSSLNVGYKLT

SEQ ID NO: 14527 - protein, 39 aa, Homo sapiens
VEAETAERLYWGAAQCLLGSAAELVHYSCGESAASSAAA

SEQ ID NO: 14528 - protein, 98 aa, Homo sapiens
MYRIVATVYSEEAVQAAATGQSGWSFPAESPACCLPHMEQTLAMAPPGKCPQCKSNTFPQGDIREASIFSLEAEDVSASRKPPGRENGHPSRRATASV

SEQ ID NO: 14529 - protein, 7 aa, Homo sapiens
LSCTYPE

SEQ ID NO: 14530 - protein, 12 aa, Homo sapiens
VLCLETWFSSDI

SEQ ID NO: 14531 - protein, 9 aa, Homo sapiens
VWEDPVSEL

SEQ ID NO: 14532 - protein, 11 aa, Homo sapiens
LEAQAACPEVP

SEQ ID NO: 14533 - protein, 58 aa, Homo sapiens
LGSAEAGGSGAAGPTAQGEAAQQAAEPAAAAGAAPGAGRGGRAGAAAGGQSGLLRPLL

SEQ ID NO: 14534 - protein, 72 aa, Homo sapiens
LCPVHHAEPAAPCQDAHPEAGGSGAAGPTAQGEAAQQAAEPAAAAGAAPGAGRGGRAGAAAGGQSGLLRPLL

SEQ ID NO: 14535 - protein, 72 aa, Homo sapiens
VGHQLPQLAMIFPLTGYSHQEVDRMKCLKRLPCLSSQPWMAIQYASLPMARQAVARPSQWRVGLGETPSWRG

SEQ ID NO: 14536 - protein, 34 aa, Homo sapiens
LVIESKGKTHQNSCLNTEKHTLHFENVYGCLSSS

SEQ ID NO: 14537 - protein, 87 aa, Homo sapiens
VYFSFRPRSASYLLLLRGGHGISYLFLPQPRTNNMRSLFTSSTVMGCFLLASGMGAFASEDLQCHNKHMPALFYREPWRSWDRGHID

SEQ ID NO: 14538 - protein, 20 aa, Homo sapiens
LFGSWKTEAEVLFCHRNERN

SEQ ID NO: 14539 - protein, 19 aa, Homo sapiens
MAKGEQGLWVYFFYSFAWC

SEQ ID NO: 14540 - protein, 57 aa, Homo sapiens
LPQPRPPACGRSRVETWAGELAGAAARSRLGPCWSMLDASVTPDTCVQQPAAAPSHG

SEQ ID NO: 14541 - protein, 45 aa, Homo sapiens
LVLQCTWLFRVHMCVYKHACMPGWTYVCTGYFLRTILSIRSLPLT

SEQ ID NO: 14542 - protein, 60 aa, Homo sapiens
LLPESPELAQRILQMFTAQSMCSPLCTPSQPDPDCCHGVPSGEGPGCDGVHLPQVLGQRG

SEQ ID NO: 14543 - protein, 106 aa, Homo sapiens
VPSAPGCPLRRAWPGDPRAGEGRRGVPTRGRGWGRCRPRAGFLDCGRNAGSRSDPRRDSASERLRTPVQRSLARRIAESSPLFTTWSRFILPYPVFGFLSSPSSLC

SEQ ID NO: 14544 - protein, 23 aa, Homo sapiens
LVPSTSCEGIHLCAELLGTMVFA

SEQ ID NO: 14545 - protein, 26 aa, Homo sapiens
LLASPLCSVRARRMAGPEVAASTGAG

SEQ ID NO: 14546 - protein, 78 aa, Homo sapiens
LGGAWRPLPRPAAPVLLAAERLPATAAAAAASCPCGASALAEPTAVRSGVRCVPSLRPGAGATDSRVRSAGGARAGTP

SEQ ID NO: 14547 - protein, 22 aa, Homo sapiens
VQSAVGGRPSCRRRRRGSMVSP

SEQ ID NO: 14548 - protein, 69 aa, Homo sapiens
LGTPDRLPLPPGTLAPSLPPTRRPSGAPIPDQPSGVADPASRKDFSPDLGRTPCTPPSSPACLLSPRAS

SEQ ID NO: 14549 - protein, 120 aa, Homo sapiens
MPRGGHGRGARGPAHPAQGRRTPGRRAAAPQAPAARALPGARRSPRRCGPCRPPGPSARRLRPAGGPRAPPRPGPAGGALLPRSLTAFVPHSGHGLPVSSGEPAYTPIPHDVPHGTPPFC

SEQ ID NO: 14550 - protein, 83 aa, Homo sapiens
LGEEEQAPERRGPRDAPLPGVLHAEIVAQHISREGCECRHHTPLPPGAAQVPARIPQVFAGGCHPPGGPHLQGPVQQRPVPAG

SEQ ID NO: 14551 - protein, 129 aa, Homo sapiens
VEFGYAKGTAPVSGQQSLRWLLTSLRGDLCDHQTGEKTHFTDEVTRSQQLPRSPEAGASSTHSSAVSAGMMGRPCLLTAGRPCLWRRMAPSLSRPQSNTCSLRPRPRTQTRSAWSSTWTRPWCTAPSSQ

SEQ ID NO: 14552 - protein, 43 aa, Homo sapiens
LTQPQPRLSCQHQGAQNTVSVAGVQLPTFCPDLWLLISPVSAD

SEQ ID NO: 14553 - protein, 36 aa, Homo sapiens
LIGAGCRWHLYDHWSLAGPSGCTGTSKGYIQMPGMH

SEQ ID NO: 14554 - protein, 54 aa, Homo sapiens
VRVAVCPLIEARLSWKFQSCNDFCKWSFSVCLEISEYCVLGLICDDLIPNLNFC

SEQ ID NO: 14555 - protein, 54 aa, Homo sapiens
MRVAVCPLIEARLSWKFQSCNDFCKWSFSVCLEISEYCVLGLICDDLIPNLNFC

SEQ ID NO: 14556 - protein, 39 aa, Homo sapiens
VLMTLSEGREDICLLLKDGKPDLSPRPWPLLGGPLGQTP

SEQ ID NO: 14557 - protein, 67 aa, Homo sapiens
LQWDLPGPLAPRNFWTHIRQTSLVTFQHQGELDPSWLHTLRLFGQFEKEDRAHCGVSMEMWSLVTNL

SEQ ID NO: 14558 - protein, 30 aa, Homo sapiens
LPGVDFSWIWLHTYRSSALFTGTVADMCSR

SEQ ID NO: 14559 - protein, 42 aa, Homo sapiens
LWRRGARSLAPLQPLHAASGLGAEPWVALKGLSVRCRLLRSW

SEQ ID NO: 14560 - protein, 24 aa, Homo sapiens
LHLHRVPGTRPPAGAYNMTRWRKI

SEQ ID NO: 14561 - protein, 46 aa, Homo sapiens
LGWSVEEPSRVSAWGRVRAGPAGRWRSGGRWWMAQPWKAEVKVTSP

SEQ ID NO: 14562 - protein, 29 aa, Homo sapiens
LDLSCLICKKEIKIIYLPERPYLSYERRG

SEQ ID NO: 14563 - protein, 74 aa, Homo sapiens
LESAAAARARCPTRSPPPDTPGSRGTTAMCSLASGATGYSHLLKKHFHTVSLSISLILTAWFINMDLNFMDTLS

SEQ ID NO: 14564 - protein, 46 aa, Homo sapiens
VDDTWAQAEVGPVTSCTGFVEAFRVLECWSLGRLGSRSWHSELAQG

SEQ ID NO: 14565 - protein, 42 aa, Homo sapiens
LRSGSRKAGEMRPDVGPPLSTRGKPDSRTIALTIALFPRRAT

SEQ ID NO: 14566 - protein, 126 aa, Homo sapiens
VGVLAGGGGGLPGLYLPRPGLPSEPRPPRRASRACKTVSKLPGPEAGARGPGRWLGSGGPRVCVDAGSRGGRPASTQRSCNRGPGVAAANQRAASILAVNSPQRSRLFAYPTLESLQKWKEQNVRV

SEQ ID NO: 14567 - protein, 57 aa, Homo sapiens
VMMVQSASVSKAGKGSSSSHGVAAALNQDLDPDPKCHVFNVSSQRCQMGSAQPCLCC

SEQ ID NO: 14568 - protein, 24 aa, Homo sapiens
LGMEERHRPSSIPSGEILFHWIPE

SEQ ID NO: 14569 - protein, 152 aa, Homo sapiens
LQPPCEPCHTAIASSRYSVRCVPAATASAPFLGPCSPKCLTLTLGLRNARKKDQMAKQPSDVSSECDREGRQLQPAERPPQLRPGAPTSLQTEPQDRSPAPMSCDKSTQTPSPPCQAFNHYLSAMDDSAGSSLRIALHREVQWPLKWLAKSS

SEQ ID NO: 14570 - protein, 100 aa, Homo sapiens
LTLTLGLRNARKKDQMAKQPSDVSSECDREGRQLQPAERPPQLRPGAPTSLQTEPQASMRQAEPADMRPEIWIAQELRRIGDEFNAYYARRLAKLLASST

SEQ ID NO: 14571 - protein, 53 aa, Homo sapiens
LDTSGVSCFMAKGTKHWEYNLEQDKNPGLQGTSNLLGDMIRHIRNHHVNGYLS

SEQ ID NO: 14572 - protein, 77 aa, Homo sapiens
LHMGPLRGAQELCAQVPLSPLLLQPPAYSPNGLCLSGMRFTARSASSSRRTSKQAAWPGAGSCSASASAASHPQRGS

SEQ ID NO: 14573 - protein, 42 aa, Homo sapiens
LTFPSSLSPLELSYVNSCLNYFGQKWWEPGICFLRRRTWKLC

SEQ ID NO: 14574 - protein, 451 aa, Homo sapiens
VRDGRGGEGQRLGASRPLSGVPLSRPCRGPPGCPRSSRSPPEPLRGGRSPAAPRGHHRPTEQCYQAPGGPEDRGPAWVGSHGVLQHTQGLPADRGGLRPGSLDAEIDLLSSTLAELNGGRGHASRRPDRQAYEPPPPPAYRTGSLKPNPASPLPASPYGGPTPASYTTASTPAGPAFPVQVKVAQPVRGCGPPRRGASQASGPLPGPHFPLPGRGEVWGPGYRSQREPGPGAKEEAAGVSGPAGRGRGGEHGPQVPLSQPPEDELDRLTKKLVHDMNHPPSGEYFGELRLWGGWDVGREAGRQRGQWLPGSVKTDAVSPCPQASVVAAEKMWLGMGLGLWPLIASFTWAALYVLHAGPSFAASISTPWRGGHIARAATWPPWRNVPRAPSPSWTGSCGLWGRPTTLAASPAWCVTAASTASPSQWMLRARSTALRTFTGSLPQDAQCAVGP

SEQ ID NO: 14575 - protein, 117 aa, Homo sapiens
VRRGGRKRNYATSPAAECTQQPGVTSGRRRGAGSRGPWPWPGTPPPTARRTTFSRQPRPARHLSPESPPLLPIHPREILKNTLYKSTCASFSPRVAPGRKERGKELKQRAFSPGAFY

SEQ ID NO: 14576 - protein, 13 aa, Homo sapiens
MQRKLSEISSAFY

SEQ ID NO: 14577 - protein, 60 aa, Homo sapiens
VRGCCAPGSRVSPPERVEEAQAVLGALPLPFPPASSPGPLALHCLSDARLSRPGPLGKPH

SEQ ID NO: 14578 - protein, 121 aa, Homo sapiens
LPPPPLPPGLSAASATIVAAAPSEAPGALACGGPGTRAGLRLPDAQPAWSPRATRAPGSGSCFAPRGGRAKTSLQTPSRRLEEVAEPAPNPQRLPARIPGLKKPGPPRPRTGCGSVRCALP

SEQ ID NO: 14579 - protein, 29 aa, Homo sapiens
LIFPRPPLPRPPRWQLRRSLERFFLEFQN

SEQ ID NO: 14580 - protein, 85 aa, Homo sapiens
MVGCVYGLPSCCYVNGSHLCRNHATYQRSGGLFASIAISCKFKGTYTTRKCRGHHQHPKDGSSHQPRPRWADNKRHFLWDICCDT

SEQ ID NO: 14581 - protein, 43 aa, Homo sapiens
VAATAASGTSATMASCPDSDNSWVLAGSEGRSSRLKALSLAAF

SEQ ID NO: 14582 - protein, 14 aa, Homo sapiens
LGTRFLIGVAAAKI

SEQ ID NO: 14583 - protein, 19 aa, Homo sapiens
LVIAKMSLGHQQTVTNLSF

SEQ ID NO: 14584 - protein, 19 aa, Homo sapiens
VEAPDQAPSASPSGSMCCC

SEQ ID NO: 14585 - protein, 53 aa, Homo sapiens
LGMGRAFPSRHKTARFECALVSASLTTAGTPGKNLSSYNSKCGGKTHQSRDGK

SEQ ID NO: 14586 - protein, 114 aa, Homo sapiens
VGARWEGDEACSGVGDQGRALLQDSFLLPSPAAGEGLETRIGVCPPPCFLLRSASLPTSPQDPLGGPQAQLPYLGAFSPARSQHAPLRVPSSLTATGDCVAPTSPHLPLPLTCF

SEQ ID NO: 14587 - protein, 21 aa, Homo sapiens
LDGKKGWAVPSRPHRNPKSRR

SEQ ID NO: 14588 - protein, 23 aa, Homo sapiens
LPQWRHHLSCPSCLITRGLGAER

SEQ ID NO: 14589 - protein, 80 aa, Homo sapiens
LVAAPCGGTPAADFPSRPLHCPQCGRLAHRPNGHQAEDQQPGLARRVRHRCVQRTQDRAGCLSRCPHRLRRLRGQLHHPV

SEQ ID NO: 14590 - protein, 31 aa, Homo sapiens
VLRTGASPSPPRLSPSPSPARTLAYPETPEP

SEQ ID NO: 14591 - protein, 49 aa, Homo sapiens
LFLSRKAGVLPRDAPARTSSQEGLGFAAQPAPATALRFVHRGGPLPKPG

SEQ ID NO: 14592 - protein, 84 aa, Homo sapiens
LPTPAAAPLSLSPRPPLAPSPPPSRRTRGAGNELPCDARPLRELSVTHELPTSPAAGRGLRAGKTRGRGGGKGRKVLRRARSFT

SEQ ID NO: 14593 - protein, 23 aa, Homo sapiens
LELSKCLPKQPGIFLEKLMLMVT

SEQ ID NO: 14594 - protein, 32 aa, Homo sapiens
MLRAGRRAPLPSPPSLDSPGPQAHALSASSAA

SEQ ID NO: 14595 - protein, 115 aa, Homo sapiens
LQVGSALGNQSPLHDQGTTPLTGSHLPGRSHFPTEALGLASCSATLRVFDKLSWTLHVVECQFVKYPKCGTCLPALGQGRWDMTNGLPAGYKDAHQAPSSHKLFYVTLQELRHYI

SEQ ID NO: 14596 - protein, 28 aa, Homo sapiens
IQGDHQIHVGFTVGKVPADGRRLARERI

SEQ ID NO: 14597 - protein, 42 aa, Homo sapiens
KMRTMSPLKYHRKTMGRCCSPRLQPSFQGRVGFATGIQCLSV

SEQ ID NO: 14598 - protein, 23 aa, Homo sapiens
IALRAESTSRDFGSIIFWYLGSW

SEQ ID NO: 14599 - protein, 8 aa, Homo sapiens
MQLLFIPP

SEQ ID NO: 14600 - protein, 12 aa, Homo sapiens
IFAWCCVSGGPL

SEQ ID NO: 14601 - protein, 13 aa, Homo sapiens
IFSGGERCTRYDD

SEQ ID NO: 14602 - protein, 25 aa, Homo sapiens
LADLEQKIEVHFMPPFESLALSPRL

SEQ ID NO: 14603 - protein, 46 aa, Homo sapiens
MGTSANTETRIKGHSTEGCYYQVRCTGHFVIGETCRLYRILWLKER

SEQ ID NO: 14604 - protein, 38 aa, Homo sapiens
IEVSWYCAFLFLADSPNGHGLVASGPPVSRSRYQDPTQ

SEQ ID NO: 14605 - protein, 20 aa, Homo sapiens
LTSQANIEAGGPLWLTCKIW

SEQ ID NO: 14606 - protein, 19 aa, Homo sapiens
LTSQANIEGGPLWLTCKIW

SEQ ID NO: 14607 - protein, 12 aa, Homo sapiens
LDLTRAQSYMHS

SEQ ID NO: 14608 - protein, 20 aa, Homo sapiens
MDALLVPSAPIDRYWTPWPC

SEQ ID NO: 14609 - protein, 31 aa, Homo sapiens
KARAGAGTLGLAVFSSCSAVGGGGRNQSLGD

SEQ ID NO: 14610 - protein, 18 aa, Homo sapiens
IQQFSYSSGLIFAYLPGE

SEQ ID NO: 14611 - protein, 23 aa, Homo sapiens
ILCGQNATVKRRTPGGINETGET

SEQ ID NO: 14612 - protein, 26 aa, Homo sapiens
TAHDPPTHESARPSRAPCLAPPASPL

SEQ ID NO: 14613 - protein, 14 aa, Homo sapiens
RWQKDLMKYFRQDW

SEQ ID NO: 14614 - protein, 8 aa, Homo sapiens
LASVVLGY

SEQ ID NO: 14615 - protein, 16 aa, Homo sapiens
LSAACMASRCCMPTAT

SEQ ID NO: 14616 - protein, 25 aa, Homo sapiens
MGIQKRFGPPQECFPRNSLFVSTNM

SEQ ID NO: 14617 - protein, 33 aa, Homo sapiens
IRRRGKWTQDLTGLSLLLAGHGGFGGRCKVYCG

SEQ ID NO: 14618 - protein, 36 aa, Homo sapiens
RCASRVMPGEWKDLTGLSLLLAGHGGFGGRCKVYCG

SEQ ID NO: 14619 - protein, 14 aa, Homo sapiens
LVSVVSFCDLCWDC

SEQ ID NO: 14620 - protein, 10 aa, Homo sapiens
RLKVEHSGEL

SEQ ID NO: 14621 - protein, 23 aa, Homo sapiens
ISGPERHRWRAQGGGKSSLNPWG

SEQ ID NO: 14622 - protein, 22 aa, Homo sapiens
LLSSRSMLERMVITTLSPRQSS

SEQ ID NO: 14623 - protein, 10 aa, Homo sapiens
IPGGGDRVSP

SEQ ID NO: 14624 - protein, 12 aa, Homo sapiens
VDREACKTETKG

SEQ ID NO: 14625 - protein, 1634 aa, Homo sapiens
RRNMERRAAGPGWAAYERLTAEEMDEQRRQNVAYQYLCRLEEAKRWMEACLKEELPSPVELEESLRNGVLLAKLGHCFAPSVVPLKKIYDVEQLRYQATGLHFRHTDNINFWLSAIAHIGLPSTFFPETTDIYDKKNMPRVVYCIHALSLFLFRLGLAPQIHDLYGKVKFTAEELSNMASELAKYGLQLPAFSKIGGILANELSVDEAAVHAAVLAINEAVERGVVEDTLAALQNPSALLENLREPLAAVYQEMLAQAKMEKAANARNHDDRESQDIYDHYLTQAEIQGNINHVNVHGALEVVDDALERQSPEALLKALQDPALALRGVRRDFADWYLEQLNSDREQKAQELGLVELLEKEEVQAGVAAANTKGDQEQAMLHAVQRINKAIRRRVAADTVKELMCPEAQLPPVYPVASSMYQLELAVLQQQQGELGQEELFVAVEMLSAVVLINRALEARDASGFWSSLVNPATGLAEVEGENAQRYFDALLKLRQERGMGEDFLSWNDLQATVSQVNAQTQEETDRVLAVSLINEALDKGSPEKTLSALLLPAAGLDDVSLPVAPRYHLLLVAAKRQKAQVTGDPGAVLWLEEIRQGVVRANQDTNTAQRMALGVAAINQAIKEGKAAQTERVLRNPAVALRGVVPDCANGYQRALESAMAKKQRPADTAFWVQHDMKDGTAYYFHLQTFQGIWEQPPGCPLNTSHLTREEIQSAVTKVTAAYDRQQLWKANVGFVIQLQARLRGFLVRQKFAEHSHFLRTWLPAVIKIQAHWRGYRQRKIYLEWLQYFKANLDAIIKIQAWARMWAARRQYLRRLHYFQKNVNSIVKIQAFFRARKAQDDYRILVHAPHPPLSVVRRFAHLLNQSQQDFLAEAELLKLQEEVVRKIRSNQQLEQDLNIMDIKIGLLVKNRITLQEVVSHCKKLTKRNKEQLSDMMVLDKQKGLKSLSKEKRQKLEAYQHLFYLLQTQPIYLAKLIFQMPQNKTTKFMEAVIFSLYNYASSRREAYLLLQLFKTALQEEIKSKVEQPQDVVTGNPTVVRLVVRFYRNGRGQSALQEILGKVIQDVLEDKVLSVHTDPVHLYKNWINQTEAQTGQRSHLPYDVTPEQALSHPEVQRRLDIALRNLLAMTDKFLLAITSSVDQIPYGMRYVAKVLKATLAEKFPDATDSEVYKVVGNLLYYRFLNPAVVAPDAFDIVAMAAGGALAAPQRHALGAVAQLLQHAAAGKAFSGQSQHLRVLNDYLEETHLKFRKFIHRACQVPEPEERFAVDEYSDMVAVAKPMVYITVGELVNTHRLLLEHQDCIAPDHQDPLHELLEDLGELPTIPDLIGESIAADGHTDLSKLEVSLTLTNKFEGLEADADDSNTRSLLLSTKQLLADIIQFHPGDTLKEILSLSASREQEAAHKQLMSRRQACTAQTPEPLRRHRSLTAHSLLPLAEKQRRVLRNLRRLEALGLVSARNGYQGLVDELAKDIRNQHRHRHRRKAELVKLQATLQGLSTKTTFYEEQGDYYSQYIRACLDHLAPDSKSSGKGKKQPSLHYTAAQLLEKGVLVEIEDLPASHFRNVIFDITPGDEAGKFEVNAKFLGVDMERFQLHYQDLLQLQYEGVAVMKLFNKAKVNVNLLIFLLNKKFLRK

SEQ ID NO: 14626 - protein, 18 aa, Homo sapiens
VLLRAQPPALLAQVLGEP

SEQ ID NO: 14627 - protein, 16 aa, Homo sapiens
MYIGPGDSASRPSCAS

SEQ ID NO: 14628 - protein, 9 aa, Homo sapiens
KDGVAFTIY

SEQ ID NO: 14629 - protein, 8 aa, Homo sapiens
KDRRAHSF

SEQ ID NO: 14630 - protein, 58 aa, Homo sapiens
IACLSHVSGGSWKASFSFPSSPACPPCFQAGSGLVFPRKEMAGELQGTQAPSLRRSLG

SEQ ID NO: 14631 - protein, 17 aa, Homo sapiens
TPRESIKVTLPIPWSTT

SEQ ID NO: 14632 - protein, 14 aa, Homo sapiens
MKPSEWGLNVRVHS

SEQ ID NO: 14633 - protein, 10 aa, Homo sapiens
IYIPHFGNRH

SEQ ID NO: 14634 - protein, 31 aa, Homo sapiens
TVRPMPPRPHRPRRGSRSAARERATAGPGCS

SEQ ID NO: 14635 - protein, 10 aa, Homo sapiens
VGRKMLEFMN

SEQ ID NO: 14636 - protein, 21 aa, Homo sapiens
MFRFPPSSSRCFRLLPSDAGF

SEQ ID NO: 14637 - protein, 13 aa, Homo sapiens
LAGFQTRGGKAGS

SEQ ID NO: 14638 - protein, 36 aa, Homo sapiens
IRDCEEEFRSPPWGHCQGSGSEEANLSEDCSLWPLW

SEQ ID NO: 14639 - protein, 15 aa, Homo sapiens
ILYPMFWLSLQQAMA

SEQ ID NO: 14640 - protein, 19 aa, Homo sapiens
LTLWRIFHWKERLTSLRRE

SEQ ID NO: 14641 - protein, 21 aa, Homo sapiens
RRVSEDGSDVKSNREFFYLGC

SEQ ID NO: 14642 - protein, 12 aa, Homo sapiens
ICNKVANPPWYS

SEQ ID NO: 14643 - protein, 13 aa, Homo sapiens
LGLNGKVYGASDL

SEQ ID NO: 14644 - protein, 15 aa, Homo sapiens
RPSAGPYAEYPRIYV

SEQ ID NO: 14645 - protein, 9 aa, Homo sapiens
ISFLCLTRQ

SEQ ID NO: 14646 - protein, 38 aa, Homo sapiens
IGGERIHRLLKQERKRDLPCSVTPLEKKKKSRSILLSP

SEQ ID NO: 14647 - protein, 2373 aa, Homo sapiens [sequence omitted]

SEQ ID NO: 14648 - protein, 35 aa, Homo sapiens
MLLEQNLITVDMQKHSLTFWWLVECWPQVVHWQMT

SEQ ID NO: 14649 - protein, 20 aa, Homo sapiens
VETGQEKGAMLISGSTKGPS

SEQ ID NO: 14650 - protein, 14 aa, Homo sapiens
KKLFHYLTKMVMEL

SEQ ID NO: 14651 - protein, 241 aa, Homo sapiens [sequence omitted]

SEQ ID NO: 14652 - protein, 16 aa, Homo sapiens
RQKAGIGSTDCKYPGS

SEQ ID NO: 14653 - protein, 10 aa, Homo sapiens
ICCMPSSRAV

SEQ ID NO: 14654 - protein, 12 aa, Homo sapiens
IERTEKCWHQNE

SEQ ID NO: 14655 - protein, 10 aa, Homo sapiens
MAAAPLEERD

SEQ ID NO: 14656 - protein, 17 aa, Homo sapiens
IQKENVGVAVDRSWSPV

SEQ ID NO: 14657 - protein, 29 aa, Homo sapiens
LQFLAYLCSLILSCLFVVLKGRSFVLWVC

SEQ ID NO: 14658 - protein, 7 aa, Homo sapiens
LTSPWNQ

SEQ ID NO: 14659 - protein, 29 aa, Homo sapiens
VAPQLFASISSRQAINYIQLSLQDWEELG

SEQ ID NO: 14660 - protein, 32 aa, Homo sapiens
LGCLAGDKLHSVESARLGGTGVIRNLFTVKVY

SEQ ID NO: 14661 - protein, 12 aa, Homo sapiens
MAQKRFPICTCG

SEQ ID NO: 14662 - protein, 24 aa, Homo sapiens
LVWWKVQHPGTQQGEGPGPGHPGQ

SEQ ID NO: 14663 - protein, 12 aa, Homo sapiens
TKEGNGQTESSS

SEQ ID NO: 14664 - protein, 22 aa, Homo sapiens
IKNSGFKQPLLQCNRRNSSGSI

SEQ ID NO: 14665 - protein, 11 aa, Homo sapiens
RQRRLWRTRWW

SEQ ID NO: 14666 - protein, 26 aa, Homo sapiens
ILHMERNIFLNMQRKFLVNPHRSFLK

SEQ ID NO: 14667 - protein, 10 aa, Homo sapiens
TALFWIPVVT

SEQ ID NO: 14668 - protein, 27 aa, Homo sapiens
VGGSAESGLTSCVAIPSESHTAIPVVT

SEQ ID NO: 14669 - protein, 23 aa, Homo sapiens
RTRSRNTGRSGEVGTTQPSPALV

SEQ ID NO: 14670 - protein, 41 aa, Homo sapiens
MGSWLHSSHSRCGLCFRLSTMRFQNTVTRFLAQDSWFFQNQ

SEQ ID NO: 14671 - protein, 25 aa, Homo sapiens
MILSFFSPSFVFPWSCRHEGRAVQF

SEQ ID NO: 14672 - protein, 10 aa, Homo sapiens
IFCLSVELSP

SEQ ID NO: 14673 - protein, 30 aa, Homo sapiens
MAAPSGGVNCEEFAEFQVMGFSSCGRNYSR

SEQ ID NO: 14674 - protein, 23 aa, Homo sapiens
KKFLGKAGHQVLSKILDCEARHW

SEQ ID NO: 14675 - protein, 9 aa, Homo sapiens
LVMLILECI

SEQ ID NO: 14676 - protein, 18 aa, Homo sapiens
RLDSDSLPEQWLPSGRNW

SEQ ID NO: 14677 - protein, 12 aa, Homo sapiens
LDYSGSCKCPLW

SEQ ID NO: 14678 - protein, 49 aa, Homo sapiens
LWSASLHYVGWPPEGAAQRLLRGAEPVPGPALPGEGGRAARREGPGQER

SEQ ID NO: 14679 - protein, 34 aa, Homo sapiens
LWSASLHYVGWPPEGAAQRLLRGAEPVPGPALPG

SEQ ID NO: 14680 - protein, 25 aa, Homo sapiens
VGTSVIGEVPCKHFLKVHPSVLNPR

SEQ ID NO: 14681 - protein, 28 aa, Homo sapiens
RAPILFGEKQASLPLWSRKFRLEKVVCG

SEQ ID NO: 14682 - protein, 15 aa, Homo sapiens
ILLLPCPWSSRRPCQ

SEQ ID NO: 14683 - protein, 7 aa, Homo sapiens
KNLDVSA

SEQ ID NO: 14684 - protein, 15 aa, Homo sapiens
VKEAELNTLRWMMET

SEQ ID NO: 14685 - protein, 29 aa, Homo sapiens
LELRGLTRHYVAGFGRATRAGQEPNPSRP

SEQ ID NO: 14686 - protein, 11 aa, Homo sapiens
KRRNFELKMLN

SEQ ID NO: 14687 - protein, 26 aa, Homo sapiens
IFRADFARACSICRLFIELHPEHSSC

SEQ ID NO: 14688 - protein, 11 aa, Homo sapiens
ILLCWTSYRPD

SEQ ID NO: 14689 - protein, 30 aa, Homo sapiens
LAERQCLLSSIGVTEFLHDGFLTRLKTCLG

SEQ ID NO: 14690 - protein, 13 aa, Homo sapiens
ICETEGLQSSNQS

SEQ ID NO: 14691 - protein, 121 aa, Homo sapiens
IPRSQPFPMADPEELQVSSPPPPPPSSPSSSDASAASSPGGPVSLGWPVPSRSSGPTVDQLEEVELQIGDAAFSLTKLLEATSAVSAQVEELAFKCTENARFLKTWRDLLKEGYDSLKPDD

SEQ ID NO: 14692 - protein, 832 aa, Homo sapiens
MPGGGPQGAPAAAGGGGVSHRAGSRDCLPPAACFRRRRLARRPGYMRSSTGPGIGFLSPAVGTLFRFPGGVSGEESHHSESRARQCGLDSRGLLVRSPVSKSAAAPTVTSVRGTSAHFGIQLRGGTRLPDRLSWPCGPGSAGWQQEFAAMDSSETLDASWEAACSDGARRVRAAGSLPSAELSSNSCSPGCGPEVPPTPPGSHSAFTSSFSFIRLSLGSAGERGEAEGCPPSREAESHCQSPQEMGAKAASLDGPHEDPRCLSRPFSLLATRVSADLAQAARNSSRPERDMHSLPDMDPGSSSSLDPSLAGCGGDGSSGSGDAHSWDTLLRKWEPVLRDCLLRNRRQMEVISLRLKLQKLQEDAVENDDYDKAETLQQRLEDLEQEKISLHFQLPSRQPALSSFLGHLAAQVQAALRRGATQQASGDDTHTPLRMEPRLLEPTAQDSLHVSITRRDWLLQEKQQLQKEIEALQARMFVLEAKDQQLRREIEEQEQQLQWQGCDLTPLVGQLSLGQLQEVSKALQDTLASAGQIPFHAEPPETIRSLQERIKSLNLSLKEITTKVCMSEKFCSTLRKKVNDIETQLPALLEAKMHAISGNHFWTAKDLTEEIRSLTSEREGLEGLLSKLLVLSSRNVKKLGSVKEDYNRLRREVEHQETAYETSVKENTMKYMETLKNKLCSCKCPLLGKVWEADLEACRLLIQSLQLQEARGSLSVEDERQMDDLEGAAPPIPPRLHSEDKRKTPLKESYILSAELGEKCEDIGKKLLYLEDQLHTAIHSHDEDLIHSLRRELQMVKETLQAMILQLQPAKEAGEREAAASCMTAGVHEAQA

SEQ ID NO: 14693 - protein, 14 aa, Homo sapiens
LSSRHGTGSQRHCD

SEQ ID NO: 14694 - protein, 24 aa, Homo sapiens
LRKSSHQARIPSNTLGWTRICQHG

SEQ ID NO: 14695 - protein, 10 aa, Homo sapiens
RLKEEERTRR

SEQ ID NO: 14696 - protein, 34 aa, Homo sapiens
ILNPAPYNAPPPLLPRPGLRASTPLPTAPSLWRI

SEQ ID NO: 14697 - protein, 26 aa, Homo sapiens
VKIHNSKSSGRLSIWYLREMKMFVIS

SEQ ID NO: 14698 - protein, 14 aa, Homo sapiens
LTTLILSTKSDRWK

SEQ ID NO: 14699 - protein, 8 aa, Homo sapiens
LLSTENSG

SEQ ID NO: 14700 - protein, 12 aa, Homo sapiens
MDTNSTTLPVIY

SEQ ID NO: 14701 - protein, 18 aa, Homo sapiens
RTYKAHDCQEQVCHIEAC

SEQ ID NO: 14702 - protein, 14 aa, Homo sapiens
MIWEGTSKELVKAP

SEQ ID NO: 14703 - protein, 16 aa, Homo sapiens
RPFLHDCQCESLCIYL

SEQ ID NO: 14704 - protein, 13 aa, Homo sapiens
MFGKDSRIRGLAC

SEQ ID NO: 14705 - protein, 854 aa, Homo sapiens [sequence omitted]

SEQ ID NO: 14706 - protein, 23 aa, Homo sapiens
IITGKSGQGWEKCRGCSASDFGN

SEQ ID NO: 14707 - protein, 661 aa, Homo sapiens
RMDVLVSECSARLLQQEEEIKSLTAEIDRLKNCGCLGASPNLEQLQEENLKLKYRLNILRKSLQAERNKPTKNMINIISRLQEVFGHAIKAAYPDLENPPLLVTPSQQAKFGDYQCNSAMGISQMLKTKEQKVNPREIAENITKHLPDNECIEKVEIAGPGFINVHLRKDFVSEQLTSLLVNGVQLPALGENKKVIVDFSSPNIAKEMHVGHLRSTIIGESISRLFEFAGYDVLRLNHVGDWGTQFGMLIAHLQDKFPDYLTVSPPIGDLQVFYKESKKRFDTEEEFKKRAYQCVVLLQGKNPDITKAWKLICDVSRQELNKIYDALDVSLIERGESFYQDRMNDIVKEFEDRGFVQVDDGRKIVFVPGCSIPLTIVKSDGGYTYDTSDLAAIKQRLFEEKADMIIYVVDNGQSVHFQTIFAAAQMIGWYDPKVTRVFHAGFGVVLGEDKKKFKTRSGETVRLMDLLGEGLKRSMDKLKEKERDKVLTAEELNAAQTSVAYGCIKYADLSHNRLNDYIFSFDKMLDDRGNTAAYLLYAFTRIRSIARLANIDEEMLQKAARETKILLDHEKEWKLGRCILRFPEILQKILDDLFLHTLCDYIYELATAFTEFYDSCYCVEKDRQTGKILKVNMWRMLLCEAVAAVMAKGFDILGIKPVQRM

SEQ ID NO: 14708 - protein, 9 aa, Homo sapiens
IHANVCPCS

SEQ ID NO: 14709 - protein, 19 aa, Homo sapiens
IINTKIKRTRILQETGKNS

SEQ ID NO: 14710 - protein, 37 aa, Homo sapiens
IWVPSFSGSVDDPLPVFLIRLKIHKAYINESGGSRSG

SEQ ID NO: 14711 - protein, 38 aa, Homo sapiens
MPTLQLCDGNVSSKARYTRGWKNHTRQRTCVKIRTEIH

SEQ ID NO: 14712 - protein, 19 aa, Homo sapiens
IVLERNVSVRRDNEFSSEK

SEQ ID NO: 14713 - protein, 14 aa, Homo sapiens
IERKVTTRGLWNET

SEQ ID NO: 14714 - protein, 15 aa, Homo sapiens
VYLCGVACAEACRAR

SEQ ID NO: 14715 - protein, 602 aa, Homo sapiens
VRCGQSPLLSGNKMSVSVHENRKSRASSGSINIYLFHKSSYADSVLTHLNLLRQQRLFTDVLLHAGNRTFPCHRAVLAACSRYFEAMFSGGLKESQDSEVNFDNSIHPEVLELLLDYAYSSRVIINEENAESLLEAGDMLEFQDIRDACAEFLEKNLHPTNCLGMLLLSDAHQCTKLYELSWRMCLSNFQTIRKNEDFLQLPQDMVVQLLSSEELETEDERLVYESAINWISYDLKKRYCYLPELLQTVRLALLPAIYLMENVAMEELITKQRKSKEIVEEAIRCKLKILQNDGVVTSLCARPRKTGHALFLLGGQTFMCDKLYLVDQKAKEIIPKADIPSPRKEFSACAIGCKVYITGGRGSENGVSKDVWVYDTLHEEWSKAAPMLVARFGHGSAELKHCLYVVGGHTAATGCLPASPSVSLKQVEHYDPTINKWTMVAPLREGVSNAAVVSAKLKLFAFGGTSVSHDKLPKVQCYDQCENRWTVPATCPQPWRYTAAAVLGNQIFIMGGDTEFSACSAYKFNSETYQWTKVGDVTAKRMSCHAVASGNKLYVVGGYFGIQRCKTLDCYDPTLDVWNSITTVPYSLIPTAFVSTWKHLPS

SEQ ID NO: 14716 - protein, 18 aa, Homo sapiens
LQFSILHTALSPCLDHFL

SEQ ID NO: 14717 - protein, 40 aa, Homo sapiens
LPVAPTSDMPGTTLNRYGRTWPRWGWLWTPTGRCPSVRER

SEQ ID NO: 14718 - protein, 19 aa, Homo sapiens
VCKGPADQEWQENHSLCTQ

SEQ ID NO: 14719 - protein, 19 aa, Homo sapiens
KLWTAWARLPGTRFQRPLR

SEQ ID NO: 14720 - protein, 458 aa, Homo sapiens
IMDSFKVVLEGPAPWGFRLQGGKDFNVPLSISRLTPGGKAAQAGVAVGDWVLSIDGENAGSLTHIEAQNKIRACGERLSLGLSRAQPVQSKPQKASAPAADPPRYTFAPSVSLNKTARPFGAPPPADSAPQQNGQPLRPLVPDASKQRLMENTEDWRPRPGTGQSRSFRILAHLTGTEFMQDPDEEHLKKSSQVPRTEAPAPASSTPQEPWPGPTAPSPTSRPPWAVDPAFAERYAPDKTSTVLTRHSQPATPTPLQSRTSIVQAAAGGVPGGGSNNGKTPVCHQCHKVIRGRYLVALGHAYHPEEFVCSQCGKVLEEGGFFEEKGAIFCPPCYDVRYAPSCAKCKKKITGEIMHALKMTWHVHCFTCAACKTPIRNRAFYMEEGVPYCERDYEKMFGTKCHGCDFKIDAGDRFLEALGFSWHDTCFVCAICQINLEGKTFYSKKDRPLCKSHAFSHV

SEQ ID NO: 14721 - protein, 16 aa, Homo sapiens
TGLVQGLKQSLGVVWD

SEQ ID NO: 14722 - protein, 18 aa, Homo sapiens
IQCHPRRCSDTRSRRRHD

SEQ ID NO: 14723 - protein, 21 aa, Homo sapiens
VGPRLQFSDHVCFDAGPRKRR

SEQ ID NO: 14724 - protein, 30 aa, Homo sapiens
IQTQRCLETWKEFEKPLSHFIFRSTSSLWT

SEQ ID NO: 14725 - protein, 12 aa, Homo sapiens
IIWARNQQDYCK

SEQ ID NO: 14726 - protein, 9 aa, Homo sapiens
VRGLLGRAI

SEQ ID NO: 14727 - protein, 17 aa, Homo sapiens
LIQLSPLPPRRRAPRRR

SEQ ID NO: 14728 - protein, 11 aa, Homo sapiens
LASSMRRPAEC

SEQ ID NO: 14729 - protein, 55 aa, Homo sapiens
LPKSVPCGAGAGRGFAEAPRHSEEAPCQNRLGMSVRTHAAARPAAASSAQWTASS

SEQ ID NO: 14730 - protein, 47 aa, Homo sapiens
MRVRGCVLRSQVFLRQAPCQNRLGMSVRTHAAARPAAASSAQWTASS

SEQ ID NO: 14731 - protein, 64 aa, Homo sapiens
IFRSPSIFLPVGTEPSIFGNRCWQFCQVFVTLKNGYWTGSSGCSRGHGLFFCSSGAAAKSSFEE

SEQ ID NO: 14732 - protein, 31 aa, Homo sapiens
MNSSVKWMKTTSRTNLILLDSMSRSLTIDKL

SEQ ID NO: 14733 - protein, 16 aa, Homo sapiens
RRPTRRRLCCSHVYCV

SEQ ID NO: 14734 - protein, 21 aa, Homo sapiens
MQRAVRYNSTLKMSAVIVEEI

SEQ ID NO: 14735 - protein, 46 aa, Homo sapiens
VQRPKLPHPTQEFHPSLQCHRHKARPQLKKFPRRQDPGVPQLLPQG

SEQ ID NO: 14736 - protein, 44 aa, Homo sapiens
VRPTEAAFSWTLVSPPDFEGVIAAPVGGERRAAAACLTGRKSPL

SEQ ID NO: 14737 - protein, 25 aa, Homo sapiens
RLRRRMERSANAAARRATLCMCTRC

SEQ ID NO: 14738 - protein, 22 aa, Homo sapiens
INRFPSNNQCSTHACICARTSI

SEQ ID NO: 14739 - protein, 15 aa, Homo sapiens
LRRKKITYFLAPYIP

SEQ ID NO: 14740 - protein, 8 aa, Homo sapiens
VSLGRWFW

SEQ ID NO: 14741 - protein, 9 aa, Homo sapiens
VDEVFIYHA

SEQ ID NO: 14742 - protein, 9 aa, Homo sapiens
LLFVFDHVW

SEQ ID NO: 14743 - protein, 14 aa, Homo sapiens
MRRPAVFLRCSWRM

SEQ ID NO: 14744 - protein, 13 aa, Homo sapiens
LGVFCWRFLHCAC

SEQ ID NO: 14745 - protein, 62 aa, Homo sapiens
TAPNLPQRPLRDLGADIATAKRFARQEGPLYVLLSRSWTRRARPRSSEQKSQKRKDWKWQTI

SEQ ID NO: 14746 - protein, 8 aa, Homo sapiens
LLTNCTLS

SEQ ID NO: 14747 - protein, 20 aa, Homo sapiens
KTPPGGPPAEGQDKAARGQG

SEQ ID NO: 14748 - protein, 20 aa, Homo sapiens
MARSASAAARRVTLCTCTRC

SEQ ID NO: 14749 - protein, 25 aa, Homo sapiens
RRRRRMARSASAVVRRATPCMCTRC

SEQ ID NO: 14750 - protein, 18 aa, Homo sapiens
LVLSPSVKSAAIRNRLSY

SEQ ID NO: 14751 - protein, 28 aa, Homo sapiens
MKKRNSNPQSSGIHLSRGLMRLVMTLKL

SEQ ID NO: 14752 - protein, 13 aa, Homo sapiens
VVTKCRRRIRIGR

SEQ ID NO: 14753 - protein, 24 aa, Homo sapiens
LGSPVDALFRERAPDRQLRTGAAV

SEQ ID NO: 14754 - protein, 15 aa, Homo sapiens
MYSKIGPRKQMESIR

SEQ ID NO: 14755 - protein, 18 aa, Homo sapiens
LRTAGACPWMSTTSPRTS

SEQ ID NO: 14756 - protein, 24 aa, Homo sapiens
IYYPFSTTAQAGTSKRTSMSSWPI

SEQ ID NO: 14757 - protein, 16 aa, Homo sapiens
RRHGGEHRTTVSYGCS

SEQ ID NO: 14758 - protein, 494 aa, Homo sapiens
RPEARGFKTAVWSPPFQAMSGPTWLPPKQPEPARAPQGRAIPRGTPGPPPAHGAALQPHPRVNFCPLPSEQCYQAPGGPEDRGPAWVGSHGVLQHTQGLPADRGGLRPGSLDAEIDLLSSTLAELNGGRGHASRRPDRQAYEPPPPPAYRTGSLKPNPASPLPASPYGGPTPASYTTASTPAGPAFPVQVKVAQPVRGCGPPRRGASQASGPLPGPHFPLPGRGEVWGPGYRSQREPGPGAKEEAAGVSGPAGRGRGGEHGPQVPLSQPPEDELDRLTKKLVHDMNHPPSGEYFGQCGGCGEDVVGDGAGVVALDRVFHVGCFVCSTCRAQLRGQHFYAVERRAYCEGCYVATLEKCATCSQPILDRILRAMGKAYHPGCFTCVVCHRGLDGIPFTVDATSQIHCIEDFHRKFAPRCSVCGGAIMPEPGQEETVRIVALDRSFHIGCYKCEECGLLLSSEGECQGCYPLDGHILCKACSAWRIQELSATVTTDC

SEQ ID NO: 14759 - protein, 36 aa, Homo sapiens
VCVGGSPSRMKAFIRSGARHCGHNRAGSGYLLQGRV

SEQ ID NO: 14760 - protein, 30 aa, Homo sapiens
VEFANKLLTVKVFHAEPASIPATRNVKPRW

SEQ ID NO: 14761 - protein, 13 aa, Homo sapiens
VYPEGSAVERVLE

SEQ ID NO: 14762 - protein, 7 aa, Homo sapiens
MNHISGA

SEQ ID NO: 14763 - protein, 43 aa, Homo sapiens
MPFEQCHLSWKNVRRLYKPCLRSWLESFCNLFNLIKRPLILSA

SEQ ID NO: 14764 - protein, 14 aa, Homo sapiens
KPSDCRLPPSSAFC

SEQ ID NO: 14765 - protein, 21 aa, Homo sapiens
LFLWRGKREKRNSSVSSLLVA

SEQ ID NO: 14766 - protein, 10 aa, Homo sapiens
RRTWRWQFWR

SEQ ID NO: 14767 - protein, 21 aa, Homo sapiens
LGTAEVRVAPGSPPPAPGWSS

SEQ ID NO: 14768 - protein, 24 aa, Homo sapiens
LGYTRKQAILFLQNKNQDSELLPK

SEQ ID NO: 14769 - protein, 38 aa, Homo sapiens
VPETVLLLPQSCQLSDNVVPPSRAAAAPAQQQQQLRGK

SEQ ID NO: 14770 - protein, 27 aa, Homo sapiens
LLSMPAFKIELDCVVVVLFLKVKLAIN

SEQ ID NO: 14771 - protein, 26 aa, Homo sapiens
RSRTDVETAARRGPGRRRTIQTFDWR

SEQ ID NO: 14772 - protein, 38 aa, Homo sapiens
MMKIKLLMKVILMMKHTMQRWELGHLLIWKNWMNHTRK

SEQ ID NO: 14773 - protein, 19 aa, Homo sapiens
LRPLLQASLLSSRPPLSAA

SEQ ID NO: 14774 - protein, 13 aa, Homo sapiens
RSCGRWTAVCSKG

SEQ ID NO: 14775 - protein, 12 aa, Homo sapiens
TVLLVEEYVEFL

SEQ ID NO: 14776 - protein, 16 aa, Homo sapiens
MTYPEGNASLSGQNGW

SEQ ID NO: 14777 - protein, 26 aa, Homo sapiens
LHCGKSFLSRSPAILAAAVGWGPSRS

SEQ ID NO: 14778 - protein, 21 aa, Homo sapiens
LLLVGGRPAPKAGRWWPQRRR

SEQ ID NO: 14779 - protein, 9 aa, Homo sapiens
LATTLQQTR

SEQ ID NO: 14780 - protein, 20 aa, Homo sapiens
VERDRRSRKTVFFTCSAFVE

SEQ ID NO: 14781 - protein, 22 aa, Homo sapiens
LRPLSSFQFRSRPVALRAAVPR

SEQ ID NO: 14782 - protein, 48 aa, Homo sapiens
LSLRRKTVPARIWLVDSRKFSLSRKMPKSKLDKRRNKDMTKRLLPKLP

SEQ ID NO: 14783 - protein, 398 aa, Homo sapiens
KMVKETTYYDVLGVKPNATQEELKKAYRKLALKYHPDKNPNEGEKFKQISQAYEVLSDAKKRELYDKGGEQAIKEGGAGGGFGSPMDIFDMFFGGGGRMQRERRGKNVVHQLSVTLEDLYNGATRKLALQKNVICDKCEGRGGKKGAVECCPNCRGTGMQIRIHQIGPGMVQQIQSVCMECQGHGERISPKDRCKSCNGRKIVREKKILEVHIDKGMKDGQKITFHGEGDQEPGLEPGDIIIVLDQKDHAVFTRRGEDLFMCMDIQLVEALCGFQKPISTLDNRTIVITSHPGQIVKHGDIKCVLNEGMPIYRRPYEKGRLIIEFKVNFPENGFLSPDKLSLLEKLLPERKEVEETDEMDQVELVDFDPNQERRRHYNGEAYEDDEHHPRGGVQCQTS

SEQ ID NO: 14784 - protein, 13 aa, Homo sapiens
MFWGSNPMLLRKN

SEQ ID NO: 14785 - protein, 17 aa, Homo sapiens
LQRKEDSSREENFRSSY

SEQ ID NO: 14786 - protein, 19 aa, Homo sapiens
RRKSSGTPRHPCVCGSVTS

SEQ ID NO: 14787 - protein, 30 aa, Homo sapiens
TRRSEPGDSRSAMAPIGLKAVVGERKRKTT

SEQ ID NO: 14788 - protein, 606 aa, Homo sapiens
TRRSEPGDSRSAMAPIGLKAVVGEKIMHDVIKKVKKKGEWKVLVVDQLSMRMLSSCCKMTDIMTEGITIVEDINKRREPLPSLEAVYLITPSEKSVHSLISDFKDPPTAKYRAAHVFFTDSCPDALFNELVKSRAAKVIKTLTEINIAFLPYESQVYSLDSADSFQSFYSPHKAQMKNPILERLAEQIATLCATLKEYPAVRYRGEYKDNALLAQLIQDKLDAYKADDPTMGEGPDKARSQLLILDRGFDPSSPVLHELTFQAMSYDLLPIENDVYKYETSGIGEARVKEVLLDEDDDLWIALRHKHIAEVSQEVTRSLKDFSSSKRMNTGEKTTMRDLSQMLKKMPQYQKELSKYSTHLHLAEDCMKHYQGTVDKLCRVEQDLAMGTDAEGEKIKDPMRAIVPILLDANVSTYDKIRIILLYIFLKNGITEENLNKLIQHAQIPPEDSEIITNMAHLGVPIVTDSTLRRRSKPERKERISEQTYQLSRWTPIIKDIMEDTIEDKLDTKHYPYISTRSSASFSTTAVSARYGHWHKNKAPGEYRSGPRLIIFILGGVSLNEMRCAYEVTQANGKWEVLIGSTHILTPQKLLDTLKKLNKTDEEISS

SEQ ID NO: 14789 - protein, 33 aa, Homo sapiens
MAVARFRASAARRPLIGLLPERPAPTWRPSSLW

SEQ ID NO: 14790 - protein, 70 aa, Homo sapiens
IITVCSPPGYRVKGEHNHRSWKPMGQGPGHSEHTIDISCCGVLISSPVQMHLTYETSVTPALCQTLKMEQ

SEQ ID NO: 14791 - protein, 32 aa, Homo sapiens
TAARVRGEGRSRGGSGAVRGTGWGRGRSAGRM

SEQ ID NO: 14792 - protein, 126 aa, Homo sapiens
RALRERGPPQPLPAVQPSGPINMEETRPEGSYFSKYSEAAELRSTASLLATQESDVMVGPFKLRSRKQRTLSMIEEEIRAAQEREEELKRQRQVLQSTQSPRTKNAPSLPSRTCYKTAPGPRGHTG

SEQ ID NO: 14793 - protein, 267 aa, Homo sapiens
KMPKGKKAKGKKVAPAPAVVKKQEAKKVVNPLFEKRPKNFGIGQDIQPKRDLTRFVKWPRYIRLQRQRAILYKRLKVPPAINQFTQALDRQTATQLLKLAHKYRPETKQEKKQRLLARAEKKAAGKGDVPTKRPPVLRAGVNTVTTLVENKKAQLVVIAHDVDPIELVVFLPALCRKMGVPYCIIKGKARLGRLVHRKTCTTVAFTQVNSEDKGALAKLVEAIRTNYNDRYDEIRRHWGGNVLGPKSVARIAKLEKAKAKELATKLG

SEQ ID NO: 14794 - protein, 24 aa, Homo sapiens
RWMSKCLMSKTKTAAILLSGSPTM

SEQ ID NO: 14795 - protein, 65 aa, Homo sapiens
MRPPCPWREAEAADLRPEAPGRRDGEDVGFLSPGNCPGCEQEEAAAHPGSPHPDTFSSKQDKTTS

SEQ ID NO: 14796 - protein, 13 aa, Homo sapiens
RGQITKEQIPAGK

SEQ ID NO: 14797 - protein, 11 aa, Homo sapiens
INGFSTSKDTC

SEQ ID NO: 14798 - protein, 19 aa, Homo sapiens
LGPAPGEIRLCRSKSNLRM

SEQ ID NO: 14799 - protein, 31 aa, Homo sapiens
VESRARRLEAAKSEPRCSGLRASRRSWTRRR

SEQ ID NO: 14800 - protein, 8 aa, Homo sapiens
VVALWMQI

SEQ ID NO: 14801 - protein, 47 aa, Homo sapiens
LDLAAAMDSSSKYGNFERYHQETKVHQKHPENYQVYENGSGSKICPS

SEQ ID NO: 14802 - protein, 27 aa, Homo sapiens
LTALAAASTLRHSEFISKRPGVCPHHA

SEQ ID NO: 14803 - protein, 31 aa, Homo sapiens
ILFIQSCENKKREGICSMDDVLDCFCSLYCD

SEQ ID NO: 14804 - protein, 25 aa, Homo sapiens
LLAPVREKVGMFSQAAGRPGVASCP

SEQ ID NO: 14805 - protein, 23 aa, Homo sapiens
TRQTTSPFFELDPASTRVGVTIA

SEQ ID NO: 14806 - protein, 17 aa, Homo sapiens
LAPLLSPAARTRLSSVS

SEQ ID NO: 14807 - protein, 13 aa, Homo sapiens
RSSGSHEKNQTRK

SEQ ID NO: 14808 - protein, 11 aa, Homo sapiens
IPGSGTSTHRG

SEQ ID NO: 14809 - protein, 18 aa, Homo sapiens
KGHYCPCRKNTSCSLSRI

SEQ ID NO: 14810 - protein, 519 aa, Homo sapiens
REGRSVGRSRPRDSISARSDNSPFPWRSLRAWHPAGRLKTVVSSIASLDLATISEMSSRSTKDLIKSKWGSKPSNSKSETTLEKLKGEIAHLKTSVDEITSGKGKLTDKERHRLLEKIRVLEAEKEKNAYQLTEKDKEIQRLRDQLKARYSTTTLLEQLEETTREGERREQVLKALSEEKDVLKQQLSAATSRIAELESKTNTLRLSQTVAPNCFNSSINNIHEMEIQLKDALEKNQQWLVYDQQREVYVKGLLAKIFELEKKTETAAHSLPQQTKKPESEGYLQEEKQKCYNDLLASAKKDLEVERQTITQLSFELSEFRRKYEETQKEVHNLNQLLYSQRRADVQHLEDDRHKTEKIQKLREENDIARGKLEEEKKRSEELLSQVQFLYTSLLKQQEEQTRVALLEQQMQACTLDFENEKLDRQHVQHQLHVILKELRKARNQITQLESLKQLHEFAITEPLVTFQGETENREKVAASPKSPTAALNESLVECPKCNIQYPATEHRDLLVHVEYCSK

SEQ ID NO: 14811 - protein, 13 aa, Homo sapiens
IQKGKKERGAISK

SEQ ID NO: 14812 - protein, 26 aa, Homo sapiens
LEDGGRRHSPRGSQRPVSPRARLPAR

SEQ ID NO: 14813 - protein, 20 aa, Homo sapiens
KEERRKKGIIPIPKGQGGGN

SEQ ID NO: 14814 - protein, 7 aa, Homo sapiens
MTHAGLQ

SEQ ID NO: 14815 - protein, 67 aa, Homo sapiens
RRSICSIWRRFLQRVSCCSLRLRLRQRIFQMINPSSRLDPRSRVQETPWGETLVCPSRLLVYNLLEM

SEQ ID NO: 14816 - protein, 39 aa, Homo sapiens
ITIQKCLPLKASVVVFKPQKSHTQDHLTPTLTSVHDAGP

SEQ ID NO: 14817 - protein, 40 aa, Homo sapiens
TAEAAAALHRPPGGHLESPAPRRPWPQVPTAGPRKEQGSG

SEQ ID NO: 14818 - protein, 14 aa, Homo sapiens
IRGDYANTHRANRR

SEQ ID NO: 14819 - protein, 31 aa, Homo sapiens
VPHGDQGNEGPPGVLVHGCEEHGDAGGAPGP

SEQ ID NO: 14820 - protein, 13 aa, Homo sapiens
TNVQCREWKVAHP

SEQ ID NO: 14821 - protein, 24 aa, Homo sapiens
MEKTLKTSLPRVLASLPVYLLVGL

SEQ ID NO: 14822 - protein, 22 aa, Homo sapiens
MCSFGNLSLLLWERGLLECVCE

SEQ ID NO: 14823 - protein, 25 aa, Homo sapiens
LSAGPPRPRMPSAPSTLTWNSWASS

SEQ ID NO: 14824 - protein, 13 aa, Homo sapiens
VPNVECFFFKGGS

SEQ ID NO: 14825 - protein, 13 aa, Homo sapiens
TGFRTALRYGAGQ

SEQ ID NO: 14826 - protein, 70 aa, Homo sapiens
LVPGSGWRGGIQGRPGPDRPQAATESVPNAWKFLIGLLCFKQNFVNSLLSPSGKKDVESFSRPRCVHRPG

SEQ ID NO: 14827 - protein, 32 aa, Homo sapiens
KMGCQDGAGLRAPGAYQHTQAEGECLSRASDP

SEQ ID NO: 14828 - protein, 18 aa, Homo sapiens
VPRRCRAPGTRSISTYTS

SEQ ID NO: 14829 - protein, 7 aa, Homo sapiens
IEINTTT

SEQ ID NO: 14830 - protein, 11 aa, Homo sapiens
KVKLEKMRVFT

SEQ ID NO: 14831 - protein, 61 aa, Homo sapiens
RQEEARIGRGGGPRRQHRGKGGRSWKWYLCSCPLTVLRLQTAEGAEGVCAGQNHFPTREGE

SEQ ID NO: 14832 - protein, 23 aa, Homo sapiens
TRSPLGLDSSPISATGTRMSVFW

SEQ ID NO: 14833 - protein, 10 aa, Homo sapiens
VVYSVPSCPS

SEQ ID NO: 14834 - protein, 18 aa, Homo sapiens
LLHRRNSNTKWYKVMMIP

SEQ ID NO: 14835 - protein, 8 aa, Homo sapiens
IQEEEVCR

SEQ ID NO: 14836 - protein, 25 aa, Homo sapiens
LREPRGSFRKAGQLIVVCCHPFMSR

SEQ ID NO: 14837 - protein, 36 aa, Homo sapiens
VVAVTWPGPEVSERHMKRSIQVFIQIGIKIINNVCH

SEQ ID NO: 14838 - protein, 47 aa, Homo sapiens
IRAQELRFSTCSRGAIGPETTRELRERKGLACQRNFPSAQTPGLRRL

SEQ ID NO: 14839 - protein, 22 aa, Homo sapiens
IVFVRSWGLRGHCDPSQAVPQG

SEQ ID NO: 14840 - protein, 9 aa, Homo sapiens
RPQVETASP

SEQ ID NO: 14841 - protein, 25 aa, Homo sapiens
VASSLLCPSSGLAIFLPEPCQKEWT

SEQ ID NO: 14842 - protein, 27 aa, Homo sapiens
ISHYWNCTNWPLTKMTPICVTSLRHIT

SEQ ID NO: 14843 - protein, 8 aa, Homo sapiens
ISGENRKF

SEQ ID NO: 14844 - protein, 26 aa, Homo sapiens
RVFKDIPGSRESRRSLCISFWSTYFP

SEQ ID NO: 14845 - protein, 18 aa, Homo sapiens
KRDASCRTGPDYKACSTC

SEQ ID NO: 14846 - protein, 33 aa, Homo sapiens
RPKIRRTQTLEKIQQELEKLSVHLISVLMAEDT

SEQ ID NO: 14847 - protein, 22 aa, Homo sapiens
VCCDQNLYTTDVLPSCDWVGGC

SEQ ID NO: 14848 - protein, 24 aa, Homo sapiens
VDALSRPPSPDPSDLRSLTMSSLH

SEQ ID NO: 14849 - protein, 7 aa, Homo sapiens
LALYGGE

SEQ ID NO: 14850 - protein, 42 aa, Homo sapiens
KLTASGASMMADSQGPLRRGGAANGEPHSLARVLRRSSWLPS

SEQ ID NO: 14851 - protein, 62 aa, Homo sapiens
TVLGPVSPSSAPESQGPPSAGFPGPRSRAGLTRLAGASWRTSKRWKRSERARTELCTKPETS

SEQ ID NO: 14852 - protein, 465 aa, Homo sapiens
TARRAEMTAEEMKATESGAQSAPLPMEGVDISPKQDEGVLKVIKREGTGTEMPMIGDRVFVHYTGWLLDGTKFDSSLDRKDKFSFDLGKGEVIKAWDIAIATMKVGEVCHITCKPEYAYGSAGSPPKIPPNATLVFEVELFEFKGEDLTEEEDGGIIRRIQTRGEGYAKPNEGAIVEVALEGYYKDKLFDQRELRFEIGEGENLDLPYGLERAIQRMEKGEHSIVYLKPSYAFGSVGKEKFQIPPNAELKYELHLKSFEKAKESWEMNSEEKLEQSTIVKERGTVYFKEGKYKQALLQYKKIVSWLEYESSFSNEEAQKAQALRLASHLNLAMCHLKLQAFSAAIESCNKALELDSNNEKGLFRRGEAHLAVNDFELARADFQKVLQLYPNNKAAKTQLAVCQQRIRRQLAREKKLYANMFERLAEEENKAKAEASSGDHPTDTEMKEEQKSNTAGSQSQVETEA

SEQ ID NO: 14853 - protein, 24 aa, Homo sapiens
LQTRICLRFSRQSSKDSPQCHACI

SEQ ID NO: 14854 - protein, 14 aa, Homo sapiens
MLLFVEMTKPSPRG

SEQ ID NO: 14855 - protein, 20 aa, Homo sapiens
IDPPAFRGMVLIQGSSTPWS

SEQ ID NO: 14856 - protein, 16 aa, Homo sapiens
RGGLPSIRDDTDRQAD

SEQ ID NO: 14857 - protein, 197 aa, Homo sapiens
VAEGQSVRGPPGECCLWQRGRLPPLREEDLRIENGRMGRQEGRLVSPSLQLHCCPQRAKLEAAIAEAEERGELALKDARAKQEELEAALQRGKQDMARQLREYQELMSVKLALDIEIATYRKLLEGEESRLAGDGVGAVNISVMNSTGGSSSGGGIGLTLGGTMGSNALSFSSSAGPGLLKAYSIRTASASRRSARD

SEQ ID NO: 14858 - protein, 11 aa, Homo sapiens
LGQPWFQTKMN

SEQ ID NO: 14859 - protein, 18 aa, Homo sapiens
TGPSLRDSCKVSPLMLSS

SEQ ID NO: 14860 - protein, 22 aa, Homo sapiens
KAVGRGLRRSPRCRSSWKTPRS

SEQ ID NO: 14861 - protein, 17 aa, Homo sapiens
VNLAPRSIMHCVALVGS

SEQ ID NO: 14862 - protein, 49 aa, Homo sapiens
LRFRHLSSLSRTGAETLLEGTPRWLRRESPRSSSNLYWLVMVVLEKRPS

SEQ ID NO: 14863 - protein, 22 aa, Homo sapiens
RKRSRRAEQSRCVTSPKTRPQR

SEQ ID NO: 14864 - protein, 10 aa, Homo sapiens
VTSPKTRPQI

SEQ ID NO: 14865 - protein, 17 aa, Homo sapiens
KTRPQVMARSCTASVGM

SEQ ID NO: 14866 - protein, 7 aa, Homo sapiens
IFFCVAR

SEQ ID NO: 14867 - protein, 40 aa, Homo sapiens
LEEPGARLRSYGLTAAATAVWRVHTCDSQWRVKTQIHNEN

SEQ ID NO: 14868 - protein, 28 aa, Homo sapiens
RIAVTDAPQSVPEKEDQKRWWGLLRLKT

SEQ ID NO: 14869 - protein, 28 aa, Homo sapiens
MGETSYQASSEPVIAPWLISFALCSGII

SEQ ID NO: 14870 - protein, 28 aa, Homo sapiens
MGETSYQASSEPVIAPWLISFALCSGSI

SEQ ID NO: 14871 - protein, 45 aa, Homo sapiens
ITLNPGDLVALVFQVERCATWERKPSGQLTVLLQRMRRSMLWRRC

SEQ ID NO: 14872 - protein, 32 aa, Homo sapiens
VKGGPGGARLTEVSSGGARPDGYYDAECAESV

SEQ ID NO: 14873 - protein, 25 aa, Homo sapiens
MSCPCFCPVALRKDGYYDAECAESV

SEQ ID NO: 14874 - protein, 10 aa, Homo sapiens
MVRVGVRGPL

SEQ ID NO: 14875 - protein, 15 aa, Homo sapiens
IANRVLNNPGRKTPG

SEQ ID NO: 14876 - protein, 31 aa, Homo sapiens
IIRGERRPGRFEVQPWREGLEAARLFFLPSQ

SEQ ID NO: 14877 - protein, 21 aa, Homo sapiens
LDFIHWGGTKTIWAASLREIH

SEQ ID NO: 14878 - protein, 37 aa, Homo sapiens
IDTKSQRLQLGAERTSGFTSVSSAPTASLGLGKARRN

SEQ ID NO: 14879 - protein, 24 aa, Homo sapiens
VVPSTADPHSSAIDPGLVKCSQSR

SEQ ID NO: 14880 - protein, 24 aa, Homo sapiens
MEAAGSPAATETASPLFLLLHLRP

SEQ ID NO: 14881 - protein, 14 aa, Homo sapiens
IYAIPTTTTRKSDR

SEQ ID NO: 14882 - protein, 16 aa, Homo sapiens
MAHSKAPRGGPASALQ

SEQ ID NO: 14883 - protein, 20 aa, Homo sapiens
ILVAAKNSLNLIKIWMMLKK

SEQ ID NO: 14884 - protein, 402 aa, Homo sapiens
ILVADIWSSYNMADIDNKEQSELDQDLDDVEEVEEEETGEETKLKARQLTVQMMQNPQILAALQERLDGLVETPTGYIESLPRVVKRRVNALKNLQVKCAQIEAKFYEEVHDLERKYAVLYQPLFDKRFEIINAIYEPTEEECEWKPDEEDEISEELKEKAKIEDEKKDEEKEDPKGIPEFWLTVFKNVDLLSDMVQEHDEPILKHLKDIKVKFSDAGQPMSFVLEFHFEPNEYFTNEVLTKTYRMRSEPDDSDPFSFDGPEIMGCTGCQIDWKKGKNVTLKTIKKKQKHKGRGTVRTVTKTVSNDSFFNFFAPPEVPESGDLDDDAEAILAADFEIGHFLRERIIPRSVLYFTGEAIEDDDDDYDEEGEEADEEGEEEGDEENDPDYDPKKDQNPAECKQQ

SEQ ID NO: 14885 - protein, 21 aa, Homo sapiens
LNFQQVDLLKVMIFFGKVFLV

SEQ ID NO: 14886 - protein, 24 aa, Homo sapiens
LSQSLQIVILPTLFMTLTRNLQPI

SEQ ID NO: 14887 - protein, 55 aa, Homo sapiens
IPNKMIQNDYKAGSSLISLRNIRGWECQTHTGSCLMPTGTTRFVKLTPENFMFPG

SEQ ID NO: 14888 - protein, 13 aa, Homo sapiens
IMIIYRDLISHGQ

SEQ ID NO: 14889 - protein, 43 aa, Homo sapiens
IGPVQIRGCSFAHKRGFAGSLNGKLESGPLIKILNWLEGRSRE

SEQ ID NO: 14890 - protein, 13 aa, Homo sapiens
IGWRADLASRATR

SEQ ID NO: 14891 - protein, 24 aa, Homo sapiens
VVLNGEDGDEAEPRLLAAAPMLEL

SEQ ID NO: 14892 - protein, 22 aa, Homo sapiens
IMAIFVTSELFSVSRFMCSSRL

SEQ ID NO: 14893 - protein, 16 aa, Homo sapiens
MWNYHPSSSNRRWRDS

SEQ ID NO: 14894 - protein, 8 aa, Homo sapiens
KAKTSANI

SEQ ID NO: 14895 - protein, 11 aa, Homo sapiens
RLWFCGSKGCR

SEQ ID NO: 14896 - protein, 32 aa, Homo sapiens
IGGTPAVAAPALVQPPSLPLLFLPSLAPWLIS

SEQ ID NO: 14897 - protein, 22 aa, Homo sapiens
VGSYLSVCSQLSWVSSDGVGPR

SEQ ID NO: 14898 - protein, 23 aa, Homo sapiens
MASICAASVSVSTRRISVSLRKT

SEQ ID NO: 14899 - protein, 429 aa, Homo sapiens
VGDFLRTQAPRPRRKMQTFLKGKRVGYWLSEKKIKKLNFQAFAELCRKRGMEVVQLNLSRPIEEQGPLDVIIHKLTDVILEADQNDSQSLELVHRFQEYIDAHPETIVLDPLPAIRTLLDRSKSYELIRKIEAYMEDDRICSPPFMELTSLCGDDTMRLLEKNGLTFPFICKTRVAHGTNSHEMAIVFNQEGLNAIQPPCVVQNFINHNAVLYKVFVVGESYTVVQRPSLKNFSAGTSDRESIFFNSHNVSKPESSSVLTELDKIEGVFERPSDEVIRELSRALRQALGVSLFGIDIIINNQTGQHAVIDINAFPGYEGVSEFFTDLLNHIATVLQGQSTAMAATGDVALLRHSKLLAEPAGGLVGERTCSASPGCCGSMMGQDAPWKAEADAGGTAKLPHQRLGCNAGVSPSFQQHCVASLATKASSQ

SEQ ID NO: 14900 - protein, 11 aa, Homo sapiens
VDVVAQLPDFV

SEQ ID NO: 14901 - protein, 40 aa, Homo sapiens
LPQGVQIRIPRKSNGIRGFLLTWRRDGNTSTSVQQTTSSL

SEQ ID NO: 14902 - protein, 474 aa, Homo sapiens
IANMPNSEPASLLELFNSIATQGELVRSLKAGNASKDEIDSAVKMLVSLKMSYKAAAGEDYKADCPPGNPAPTSNHGPDATEAEEDFVDPWTVQTSSAKGIDYDKLIVRFGSSKIDKELINRIERATGQRPHHFLRRGIFFSHRDMNQVLDAYENKKPFYLYTGRGPSSEAMHVGHLIPFIFTKWLQDVFNVPLVIQMTDDEKYLWKDLTLDQAYSYAVENAKDIIACGFDINKTFIFSDLDYMGMSSGFYKNVVKIQKHVTFNQVKGIFGFTDSDCIGKISFPAIQAAPSFSNSFPQIFRDRTDIQCLIPCAIDQDPYFRMTRDVAPRIGYPKPALLHSTFFPALQGAQTKMSASDPNSSIFLTDTAKQIKTKVNKHAFSGGRDTIEEHRQFGGNCDVDVSFMYLTFFLEDDDKLEQIRKDYTSGAMLTGELKKALIEVLQPLIAEHQARRKEVTDEIVKEFMTPRKLSFDFQ

SEQ ID NO: 14903 - protein, 15 aa, Homo sapiens
IKNELQSCRGGGLQG

SEQ ID NO: 14904 - protein, 15 aa, Homo sapiens
RERHHRGAQAVWGQL

SEQ ID NO: 14905 - protein, 49 aa, Homo sapiens
TMTSVVKTVYSLQPPSALSGGQPAGPKKSMFPNSFIQEVQRMMLQKSPN

SEQ ID NO: 14906 - protein, 21 aa, Homo sapiens
ITQDTQRMKYWKSCSTWPRMW

SEQ ID NO: 14907 - protein, 29 aa, Homo sapiens
LVIHLPSIAGISNRDDHPLSRGAGLPQVQ

SEQ ID NO: 14908 - protein, 8 aa, Homo sapiens
VQDCPCGP

SEQ ID NO: 14909 - protein, 31 aa, Homo sapiens
TLRPSRKLNRTRLPATPSSAFTLPFQERRAL

SEQ ID NO: 14910 - protein, 21 aa, Homo sapiens
MKKRKESVKTHFSMRLMSKCS

SEQ ID NO: 14911 - protein, 11 aa, Homo sapiens
MRVWAAWSLLP

SEQ ID NO: 14912 - protein, 45 aa, Homo sapiens
ISLWDWNEPHLPGRPLFLQPPLQPSYLLAKWECLLQSCQQDSRVR

SEQ ID NO: 14913 - protein, 26 aa, Homo sapiens
ISWVWSVTFQNQLFLELYLLQQCLGD

SEQ ID NO: 14914 - protein, 8 aa, Homo sapiens
MLRQWFFV

SEQ ID NO: 14915 - protein, 27 aa, Homo sapiens
LVGLHAGSTCVSKSVISVRGPSILDTA

SEQ ID NO: 14916 - protein, 21 aa, Homo sapiens
MKFTRNSLKVSRSGKKPGGFS

SEQ ID NO: 14917 - protein, 7 aa, Homo sapiens
KCFPEVR

SEQ ID NO: 14918 - protein, 41 aa, Homo sapiens
ISTAMTGTTRRPLTRMLRATWRAWMMRRRMRMRRSMMKMLR

SEQ ID NO: 14919 - protein, 11 aa, Homo sapiens
RRDLSSHVEAP

SEQ ID NO: 14920 - protein, 50 aa, Homo sapiens
RRKRKMRTKKRRCRTPRPWTCSRRVWLWWCRTRCSAICRSRLLWKKSTPK

SEQ ID NO: 14921 - protein, 66 aa, Homo sapiens
LQSSHTARPMQPRHLAPGSAAWDRPPLRAHTAASISQAQRATLPDWGWSSSTSRQSPWPGHFWDRS

SEQ ID NO: 14922 - protein, 9 aa, Homo sapiens
VILMPQPPE

SEQ ID NO: 14923 - protein, 23 aa, Homo sapiens
TRHPRARRRGILSAWMCGNSLPT

SEQ ID NO: 14924 - protein, 10 aa, Homo sapiens
RCGFWLLEPV

SEQ ID NO: 14925 - protein, 19 aa, Homo sapiens
LRGRFLSARLFSCAGAAGP

SEQ ID NO: 14926 - protein, 10 aa, Homo sapiens
RDKWRDYHPR

SEQ ID NO: 14927 - protein, 54 aa, Homo sapiens
KVASRCVGPGERVRRDGPIAQGPGSCGGHPRLALAQGHPGFTWEPLLLPPPSHH

SEQ ID NO: 14928 - protein, 9 aa, Homo sapiens
TDCRVSHVI

SEQ ID NO: 14929 - protein, 8 aa, Homo sapiens
VGSCMYQG

SEQ ID NO: 14930 - protein, 9 aa, Homo sapiens
KEALTGVPS

SEQ ID NO: 14931 - protein, 23 aa, Homo sapiens
MATGWSARGAAAAAGRPGSCSRS

SEQ ID NO: 14932 - protein, 35 aa, Homo sapiens
LLLPPTTPLIMVWVLRKRAWTQINTTKSAVKQFIS

SEQ ID NO: 14933 - protein, 9 aa, Homo sapiens
VATSRVALL

SEQ ID NO: 14934 - protein, 10 aa, Homo sapiens
MEETPGEYLG

SEQ ID NO: 14935 - protein, 13 aa, Homo sapiens
LGLRHKSGRTRQG

SEQ ID NO: 14936 - protein, 16 aa, Homo sapiens
TCRAPKTTRKRGSVFS

SEQ ID NO: 14937 - protein, 77 aa, Homo sapiens
MPGTMWSGRKSKPRRRREKSRRTVSSGCARRNKLIMRSMPTNTGMTSTKSTKMGFSRIDIGFLPNSLSWHLAKIKII

SEQ ID NO: 14938 - protein, 11 aa, Homo sapiens
KGSLMITIKRN

SEQ ID NO: 14939 - protein, 25 aa, Homo sapiens
IGLLGWSVGSRRLRTKTRVQQRRRR

SEQ ID NO: 14940 - protein, 15 aa, Homo sapiens
LQPEFKPKQLEGPCG

SEQ ID NO: 14941 - protein, 31 aa, Homo sapiens
RWRWKLKLKQSQRRRGGVLGGAARGPEALES

SEQ ID NO: 14942 - protein, 25 aa, Homo sapiens
IETAAPKDSRSGGAAAVAGEMSREA

SEQ ID NO: 14943 - protein, 17 aa, Homo sapiens
IWDWENGHICHIDSAAD

SEQ ID NO: 14944 - protein, 11 aa, Homo sapiens
MTFQLKHVLDC

SEQ ID NO: 14945 - protein, 15 aa, Homo sapiens
MPTPVSRSGSSSKMG

SEQ ID NO: 14946 - protein, 69 aa, Homo sapiens
LGNFFPFFRSGERECPIQRDMGARRTGVEELLELCSRHREAAALTAESVTAWYRSTSGISPNTPKTWGW

SEQ ID NO: 14947 - protein, 53 aa, Homo sapiens
LSTASSLRPLVMMVQSASVSKAGKGSSSSHGVAAALNQDLDPDPKCHVFNVSK

SEQ ID NO: 14948 - protein, 68 aa, Homo sapiens
RTWTRTQSAMSLMLAPSDARWDQHSPASAANCSSKVIAMRSLGFIFKGMKQLRLFWKTFWQLVKLEYN

SEQ ID NO: 14949 - protein, 29 aa, Homo sapiens
VGEATARTPSTPPALRLKSCPSSNNEDES

SEQ ID NO: 14950 - protein, 45 aa, Homo sapiens
MLGTPRGSSPDAPASEIARKWELARSADRPAGEAHGPGLPAAPRL

SEQ ID NO: 14951 - protein, 43 aa, Homo sapiens
MASSAFTPVPMTPPDKSPSSPLPLVPLDSRPYSPFPGQSNGIS

SEQ ID NO: 14952 - protein, 13 aa, Homo sapiens
LAAIALRGKRPLV

SEQ ID NO: 14953 - protein, 18 aa, Homo sapiens
VCVFVYRRSRRSRMLRTV

SEQ ID NO: 14954 - protein, 19 aa, Homo sapiens
LEGFRGVVFEAGVLFALGA

SEQ ID NO: 14955 - protein, 9 aa, Homo sapiens
LSPHLHLSS

SEQ ID NO: 14956 - protein, 25 aa, Homo sapiens
LVCACALPEEEDNVWHPGLPAPRDD

SEQ ID NO: 14957 - protein, 21 aa, Homo sapiens
LFLSPEAPFSPRSRTRQPGRS

SEQ ID NO: 14958 - protein, 28 aa, Homo sapiens
RLGAGTEWDRSEISAESCRGKNHGHFQH

SEQ ID NO: 14959 - protein, 24 aa, Homo sapiens
RESTPTAGIAPEFCGLQVVDPIFH

SEQ ID NO: 14960 - protein, 8 aa, Homo sapiens
VEEFYSKS

SEQ ID NO: 14961 - protein, 26 aa, Homo sapiens
IKNGKSNITKVWAPAHQRKLKNTLQI

SEQ ID NO: 14962 - protein, 15 aa, Homo sapiens
LKMMLLSAWPLAKNR

SEQ ID NO: 14963 - protein, 13 aa, Homo sapiens
RSEKGFVYLLQTE

SEQ ID NO: 14964 - protein, 18 aa, Homo sapiens
IHLYNAQLFGSIVISTKR

SEQ ID NO: 14965 - protein, 19 aa, Homo sapiens
KSVFHLHYRCQKKGCPKRN

SEQ ID NO: 14966 - protein, 20 aa, Homo sapiens
VEAFWGRIQRYGIRLFRTGS

SEQ ID NO: 14967 - protein, 8 aa, Homo sapiens
MPSASSMW

SEQ ID NO: 14968 - protein, 8 aa, Homo sapiens
RVQSASNY

SEQ ID NO: 14969 - protein, 16 aa, Homo sapiens
MPRQSCWRRRANLPAP

SEQ ID NO: 14970 - protein, 10 aa, Homo sapiens
ICMACDMGPS

SEQ ID NO: 14971 - protein, 27 aa, Homo sapiens
MSSPKIHRSSSFPKQPEVICENGSLFT

SEQ ID NO: 14972 - protein, 42 aa, Homo sapiens
LTGLVRPVWLLLWKQCCSYWKIKGKASPWWGKVICENGSLFT

SEQ ID NO: 14973 - protein, 26 aa, Homo sapiens
KFRSNSSSTIFKKPKRLSVDKDKSGL

SEQ ID NO: 14974 - protein, 22 aa, Homo sapiens
LRTPRRWPRWTATRRRCLSPGI

SEQ ID NO: 14975 - protein, 28 aa, Homo sapiens
MTPRRRQSSAPGSRDSPASPSAPTSRRA

SEQ ID NO: 14976 - protein, 14 aa, Homo sapiens
IERSTAKTPGTPEA

SEQ ID NO: 14977 - protein, 14 aa, Homo sapiens
LVVVPLPVRLWCLC

SEQ ID NO: 14978 - protein, 18 aa, Homo sapiens
MWGNCYSYVAFRRTCKSC

SEQ ID NO: 14979 - protein, 20 aa, Homo sapiens
MPRSRRSWRMPTGRTTTNTS

SEQ ID NO: 14980 - protein, 14 aa, Homo sapiens
LAGSAEAARCLELL

SEQ ID NO: 14981 - protein, 28 aa, Homo sapiens
IQDRAGRMGGRHPSWPWTRCLRMRPPRS

SEQ ID NO: 14982 - protein, 15 aa, Homo sapiens
RTSCREACLQGWTEA

SEQ ID NO: 14983 - protein, 60 aa, Homo sapiens
TRRCHGQYYQAEPILRYPSHQTRKRVRLREETTGNGAAAGLSSRNEDRDEARSTHQLPPA

SEQ ID NO: 14984 - protein, 70 aa, Homo sapiens
MPLDAILGVLLFGCHGQYYQAEPILRYPSHQTRKRVRLREETTGNGAAAGLSSRNEDRDEARSTHQLPPA

SEQ ID NO: 14985 - protein, 31 aa, Homo sapiens
KLEVSLSSARRRTGSQHHGRTGCGKRSFGLR

SEQ ID NO: 14986 - protein, 19 aa, Homo sapiens
RNQNHFPQGRRPDLQQHSS

SEQ ID NO: 14987 - protein, 10 aa, Homo sapiens
KDSPDIKNRT

SEQ ID NO: 14988 - protein, 31 aa, Homo sapiens
KRPCRGRGSVQATPQGEELKFSAVRIARDVC

SEQ ID NO: 14989 - protein, 9 aa, Homo sapiens
TESVVTIMF

SEQ ID NO: 14990 - protein, 13 aa, Homo sapiens
VLGLQEPPQQAQE

SEQ ID NO: 14991 - protein, 12 aa, Homo sapiens
ITGASSTSPRVR

SEQ ID NO: 14992 - protein, 31 aa, Homo sapiens
TILLSPQMATCMSVRPSWSTFCTRRRRLPGR

SEQ ID NO: 14993 - protein, 41 aa, Homo sapiens
LLKPPRCRRVPPQPGCPHWPSRPSRCPTMSAGGSKIWKETA

SEQ ID NO: 14994 - protein, 58 aa, Homo sapiens
TSHPEKLSYSQLLGPRNPGAPNSQLSDIWHTGQSREASAPSLGNLNTPASKSQGTSVL

SEQ ID NO: 14995 - protein, 40 aa, Homo sapiens
RCPHSGHHPRSSQPPGRPYLLDPGCGLASRPVLYRPQCRR

SEQ ID NO: 14996 - protein, 31 aa, Homo sapiens
TNFSYCKLSTTASSSNVTSWPVRSQRCSVTM

SEQ ID NO: 14997 - protein, 10 aa, Homo sapiens
RKFNTKSSGP

SEQ ID NO: 14998 - protein, 8 aa, Homo sapiens
LGLSVPQP

SEQ ID NO: 14999 - protein, 11 aa, Homo sapiens
ILQRGAGQQWA

SEQ ID NO: 15000 - protein, 29 aa, Homo sapiens
LDAKEFSVAQLGNRGSPWRPHWWGRRSCL

SEQ ID NO: 15001 - protein, 19 aa, Homo sapiens
MPTPRLWRTSGSRPAGAPP

SEQ ID NO: 15002 - protein, 13 aa, Homo sapiens
TAASLMVTVPTWG

SEQ ID NO: 15003 - protein, 216 aa, Homo sapiens
IPFWRESWWLARPREWEASAMFCEKAMELIRELHRAPEGQLPAFNEDGLRQVLEEMKALYEQNQSDVNEAKSGGRSDLIPTIKFRHCSLLRNRRCTVAYLYDRLLRIRALRWEYGSVLPNALRFHMAAEEMEWFNNYKRSLATYMRSLGGDEGLDITQDMKPPKSLYIEVRCLKDYGEFEVDDGTSVLLKKNSQHFLPRWKCEQLIRQGVLEHILS

SEQ ID NO: 15004 - protein, 29 aa, Homo sapiens
KMPSLNFSWTNLQKRLLGRQHLTLKALRM

SEQ ID NO: 15005 - protein, 17 aa, Homo sapiens
VRAGASGHASLGDRILL

SEQ ID NO: 15006 - protein, 22 aa, Homo sapiens
VKSVRETEEKKSCGRLSANNGS

SEQ ID NO: 15007 - protein, 11 aa, Homo sapiens
TKASFISCPSD

SEQ ID NO: 15008 - protein, 8 aa, Homo sapiens
ISFQTLPY

SEQ ID NO: 15009 - protein, 19 aa, Homo sapiens
IRQPFQMGRDHPWSSWNSI

SEQ ID NO: 15010 - protein, 14 aa, Homo sapiens
LTAGARASELLIYS

SEQ ID NO: 15011 - protein, 438 aa, Homo sapiens
ITSAASMSDKLPYKVADIGLAAWGRKALDIAENEMPGLMRMRERYSASKPLKGARIAGCLHMTVETAVLIETLVTLGAEVQWSSCNIFSTQDHAAAAIAKAGIPVYAWKGETDEEYLWCIEQTLYFKDGPLNMILDDGGDLTNLIHTKYPQLLPGIRGISEETTTGVHNLYKMMANGILKVPAINVNDSVTKSKFDNLYGCRESLIDGIKRATDVMIAGKVAVVAGYGDVGKGCAQALRGFGARVIITEIDPINALQAAMEGYEVTTMDEACQEGNIFVTTTGCIDIILGRHFEQMKDDAIVCNIGHFDVEIDVKWLNENAVEKVNIKPQVDRYRLKNGRRIILLAEGRLVNLGCAMGHPSFVMSNSFTNQVMAQIELWTHPDKYPVGVHFLPKKLDEAVAEAHLGKLNVKLTKLTEKQAQYLGMSCDGPFKPDHYRY

SEQ ID NO: 15012 - protein, 573 aa, Homo sapiens
TVPEKRFSPSRLRRMKVITCEIAWHNKEPVYSLDFQHGTAGRIHRLASAGVDTNVRIWKVEKGPDGKAIVEFLSNLARHTKAVNVVRFSPTGEILASGGDDAVILLWKVNDNKEPEQIAFQDEDEAQLNKENWTVVKTLRGHLEDVYDICWATDGNLMASASVDNTAIIWDVSKGQKISIFNEHKSYVQGVTWDPLGQYVATLSCDRVLRVYSIQKKRVAFNVSKMLSGIGAEGEARSYRMFHDDSMKSFFRRLSFTPDGSLLLTPAGCVESGENVMNTTYVFSRKNLKRPIAHLPCPGKATLAVRCCPVYFELRPVVETGVELMSLPYRLVFAVASEDSVLLYDTQQSFPFGYVSNIHYHTLSDISWSSDGAFLAISSTDGYCSFVTFEKDELGIPLKEKPVLNMRTPDTAKKTKSQTHRGSSPGPRPVEGTPASRTQDPSSPGTTPPQARQAPAPTVIRDPPSITPAVKSPLPGPSEEKTLQPSSQNTKAHPSRRVTLNTLQAWSKTTPRRINLTPLKTDTPPSSVPTSVISTPSTEEIQSETPGDAQGSPPELKRPRLDENKGGTESLDP

SEQ ID NO: 15013 - protein, 10 aa, Homo sapiens
LAYRGAIITI

SEQ ID NO: 15014 - protein, 21 aa, Homo sapiens
LFSGLIILTFGRNTARRCTLD

SEQ ID NO: 15015 - protein, 8 aa, Homo sapiens
LHLMGNKR

SEQ ID NO: 15016 - protein, 108 aa, Homo sapiens
TTPAARRPGRGETRKRMSELEKAMVALIDVFHQYSGREGDKHKLKKSELKELINNELSHFLEEIKEQEVVDKVMETLDNDGDGECDFQEFMAFVAMVTTACHEFFEHE

SEQ ID NO: 15017 - protein, 44 aa, Homo sapiens
MAWPAPTCWRMPLTKARRLERSVDFLLDSSLRKLYPTVGKPSSS

SEQ ID NO: 15018 - protein, 8 aa, Homo sapiens
VVSEKSGT

SEQ ID NO: 15019 - protein, 11 aa, Homo sapiens
LVLLPSCRCSS

SEQ ID NO: 15020 - protein, 20 aa, Homo sapiens
IRLSGPERAKPSLRRTGGLD

SEQ ID NO: 15021 - protein, 14 aa, Homo sapiens
LCTARDVPSSPGMD

SEQ ID NO: 15022 - protein, 13 aa, Homo sapiens
ILPLVQQVEEAAS

SEQ ID NO: 15023 - protein, 16 aa, Homo sapiens
LLHLLEPLLQLCPGNG

SEQ ID NO: 15024 - protein, 31 aa, Homo sapiens
ITKPRAMKKQRKNKKRTLKQVETINIQEEIV

SEQ ID NO: 15025 - protein, 28 aa, Homo sapiens
KRKARRMSRSSPLGSDRRPTRSESPHHT

SEQ ID NO: 15026 - protein, 189 aa, Homo sapiens
TRVCERAGPSGPRSGSAAQRAPSANMSVDPLSSKALKIKRELSENTPHLSDEALMGLSVRELNRHLRGLSAEEVTRLKQRRRTLKNRGYAASCRVKRVCQKEELQKQKSELEREVDKLARENAAMRLELDALRGKCEALQGFARSVAAARGPATLVAPASVITIVKSTPGSGSGPAHGPDPAHGPASCS

SEQ ID NO: 15027 - protein, 44 aa, Homo sapiens
REARHTIPGPTVAGRLRVLVKLGHPALSDDQQILSGRNICSAVR

SEQ ID NO: 15028 - protein, 31 aa, Homo sapiens
IAADPAPRETPENPPWPPLSPWLLASCCCCG

SEQ ID NO: 15029 - protein, 15 aa, Homo sapiens
IQRPERHQRTHHGPL

SEQ ID NO: 15030 - protein, 9 aa, Homo sapiens
LQCVGSFTW

SEQ ID NO: 15031 - protein, 15 aa, Homo sapiens
LWSLWARSMGMCSTS

SEQ ID NO: 15032 - protein, 14 aa, Homo sapiens
IAGEGEKCPRSFQD

SEQ ID NO: 15033 - protein, 19 aa, Homo sapiens
TEVLFPCLTQPWLVVPRSI

SEQ ID NO: 15034 - protein, 13 aa, Homo sapiens
VCLLLVHPPVPTS

SEQ ID NO: 15035 - protein, 42 aa, Homo sapiens
LPPSLARESPPSLGGVDARHHQVVEVDRQCHGGNSQNRGVMM

SEQ ID NO: 15036 - protein, 29 aa, Homo sapiens
TIPTHAANSRTQHCSKHLLPAPNGPQPPS

SEQ ID NO: 15037 - protein, 36 aa, Homo sapiens
RHQAWRPVGPGRPGPAPGAQILPLVAMGPRSMSPAS

SEQ ID NO: 15038 - protein, 71 aa, Homo sapiens
LLSPCLGTAGTCLATSSGGPRPPSSSLPSFLLPCPISAAPRSLRRAPWLLGRAVVGWPRPTPYGGGSSPPF

SEQ ID NO: 15039 - protein, 92 aa, Homo sapiens
VDLAAEAVRIRRSPLIFSKAVQTWRRLFGRRLSPGSGNTESEASLAFENIWACWRKRKITNFVQMTTVKNKNTSKLFGRRLLKKIQMNSTTK

SEQ ID NO: 15040 - protein, 38 aa, Homo sapiens
RGPVWPIAHARREQRSVAPHQDHLPRHCCKSGNWRTLL

SEQ ID NO: 15041 - protein, 29 aa, Homo sapiens
TTPGPTKARAPPPCPRERLKGMLREIKQR

SEQ ID NO: 15042 - protein, 70 aa, Homo sapiens
IADCRCMLEMGHRAGHDMSCLDIGGGFPGMEGSGPKFEEQLRTTSNNNHTKNLANSDFTSPFRGPGNSSE

SEQ ID NO: 15043 - protein, 17 aa, Homo sapiens
MQSIDPGCVCEGVAKED

SEQ ID NO: 15044 - protein, 20 aa, Homo sapiens
VDGRDIEEEKSARPEMCMES

SEQ ID NO: 15045 - protein, 7 aa, Homo sapiens
ITTIRRI

SEQ ID NO: 15046 - protein, 147 aa, Homo sapiens
IVSAKKAAREGVKEKSKKGGDTQVPVGVKGAGTGDLGGDQLQKKLSLGAVRPRRKQCCQALLQGTAGWRLPCPQQRGTGRGPREVAKWHRAPRLLSARRDGDRTGCPGTAATLPTQNLAYVSQDSPHLQRPPQNRERKERTAAAAAQ

SEQ ID NO: 15047 - protein, 24 aa, Homo sapiens
LGGFERPVCSLSPSKKLVRWQSSI

SEQ ID NO: 15048 - protein, 11 aa, Homo sapiens
IRTSRSPGQNL

SEQ ID NO: 15049 - protein, 22 aa, Homo sapiens
KSLTTTGRAEQGLPGSDGEVSV

SEQ ID NO: 15050 - protein, 26 aa, Homo sapiens
TEPLLEGSRPGPSPGREDVAPVHQRR

SEQ ID NO: 15051 - protein, 8 aa, Homo sapiens
LKQVVHYG

SEQ ID NO: 15052 - protein, 95 aa, Homo sapiens
VVQTLLLAGVALQGEPRALRGRRVTSFRKKARNALCGVSRTPQLRTISPGLRAPKSPTTSKRPQKDKSRSPSRAPWPRPPFVCATSPSTCPPGSP

SEQ ID NO: 15053 - protein, 10 aa, Homo sapiens
MCESRSHRRG

SEQ ID NO: 15054 - protein, 27 aa, Homo sapiens
VVMEILSTWGLEKPFWPWISRIQGSPG

SEQ ID NO: 15055 - protein, 11 aa, Homo sapiens
LNVSLRGNTKS

SEQ ID NO: 15056 - protein, 35 aa, Homo sapiens
VASFQWLTSREQYGWFPNMPHPHLYPLAAHRSGRD

SEQ ID NO: 15057 - protein, 60 aa, Homo sapiens
VASFQWLTSREQYGWFPNMPHPHLYPLAAHRVSSLWTRERAGRFRWWGRDFPPEVQSKAS

SEQ ID NO: 15058 - protein, 36 aa, Homo sapiens
VASFQWLTSREQYGWFPNMPHPHLYPLAAHRAPVKA

SEQ ID NO: 15059 - protein, 33 aa, Homo sapiens
VADFQRAIWLVPQHASPSSISFGSSQGQQPLDP

SEQ ID NO: 15060 - protein, 46 aa, Homo sapiens
VADFQRAIWLVPQHASPSSISFGSSQSTCQSLKSPWVCRAIRMAPV

SEQ ID NO: 15061 - protein, 72 aa, Homo sapiens
MTQGSTMWGYTAHHSSSPPPRSTCCMSTRTILKEDPANTVYSTVEIPKKMENPHSLLTMPDTPRLFAYENVI

SEQ ID NO: 15062 - protein, 44 aa, Homo sapiens
VTQTCHTSAQPRTPSAREAPSLSMLGSSVQIQEPPEEEQRGRLW

SEQ ID NO: 15063 - protein, 42 aa, Homo sapiens
TPSPHTSFKSRPVLQKVCCFCTKGFGIWHLARNAHSFTSFIL

SEQ ID NO: 15064 - protein, 31 aa, Homo sapiens
IIFCKGVSSIWSFFFLPPSFLTLKTNSVPSW

SEQ ID NO: 15065 - protein, 7 aa, Homo sapiens
LGRSEHP

SEQ ID NO: 15066 - protein, 16 aa, Homo sapiens
VRFSVVSVEGQSHTRS

SEQ ID NO: 15067 - protein, 13 aa, Homo sapiens
RRRIGSRGRMGRR

SEQ ID NO: 15068 - protein, 20 aa, Homo sapiens
VPAAGRGPQTIQWWVKRRCL

SEQ ID NO: 15069 - protein, 39 aa, Homo sapiens
MIPESKREELGFANLVALSVSCFSKAAVQKERRYQEGTC

SEQ ID NO: 15070 - protein, 47 aa, Homo sapiens
LESRWRSTRESLAHGELWMTVVGPLRWVPLVVVSFKQSKVFAILQWE

SEQ ID NO: 15071 - protein, 226 aa, Homo sapiens
ISTTFLSAEAFPPTLMLFNSVLRQPQLGVLRNAPNMEHVLAVANEEGFVRLYNTESQSFRKKCFKEWMAHWNAVFDLAWVPGELKLVTAAGDQTAKFWDVKAGELIGTCKGHQCSLKSVAFSKFEKAVFCTGGRDGNIMVWDTRCNKKDGFYRQVNQISGAHNTSDKQTPSKPKKKQNSKGLAPSVDFQQSVTVVLFQDENTLVSAGAVDGIFKSDFGFHWLYFIC

SEQ ID NO: 15072 - protein, 745 aa, Homo sapiens
ISTTFLSAEAFPPTLMLFNSVLRQPQLGVLRNGWSSQYPLQSLLTGYQCSGNDEHTSYGETGVPVPPFGCTFSSAPNMEHVLAVANEEGFVRLYNTESQSFRKKCFKEWMAHWNAVFDLAWVPGELKLVTAAGDQTAKFWDVKAGELIGTCKGHQCSLKSVAFSKFEKAVFCTGGRDGNIMVWDTRCNKKDGFYRQVNQISGAHNTSDKQTPSKPKKKQNSKGLAPSVDFQQSVTVVLFQDENTLVSAGAVDGIIKVWDLRKNYTAYRQEPIASKSFLYPGSSTRKLGYSSLILDSTGSTLFANCTDDNIYMFNMTGLKTSPVAIFNGHQNSTFYVKSSLSPDDQFLVSGSSDEAAYIWKVSTPWQPPTVLLGHSQEVTSVCWCPSDFTKIATCSDDNTLKIWRLNRGLEEKPGGDKLSTVGWASQKKKESRPGLVTVTSSQSTPAKAPRAKCNPSNSSPSSAACAPSCAGDLPLPSNTPTFSIKTSPAKARSPINRRGSVSSVSPKPPSSFKMSIRNWVTRTPSSSPPITPPASETKIMSPRKALIPVSQKSSQAEACSESRNRVKRRLDSSCLESVKQKCVKSCNCVTELDGQVENLHLDLCCLAGNQEDLSKDSLGPTKSSKIEGAGTSISEPPSPISPYASESCGTLPLPLRPCGEGSEMVGKENSSPENKNWLLAMAAKRKAENPSPRSPSSQTPNSRRQSGKKLPSPVTITPSSMRKICTYFHRKSQEDFCGPEHSTEL

SEQ ID NO: 15073 - protein, 38 aa, Homo sapiens
VPGTRWGGCPVSARTRRGSAHGDGLVVFSCMKRLAPLK

SEQ ID NO: 15074 - protein, 57 aa, Homo sapiens
IAERILLLGVPANKRDRAGIRIWEQSPLLLPQNERRPEFRCLCPRKAGFRSALLPDR

SEQ ID NO: 15075 - protein, 36 aa, Homo sapiens
RSTAASLASACPVSPGLSWRDTTRNPRPGEENGKGR

SEQ ID NO: 15076 - protein, 7 aa, Homo sapiens
MTCRLIA

SEQ ID NO: 15077 - protein, 61 aa, Homo sapiens
LGSSPPKPRQNCTLREVVFPSPRASLFTNVGVIKKAEQNELGFGRMERRAAYKSSSENSRA

SEQ ID NO: 15078 - protein, 39 aa, Homo sapiens
VRRRRSACSMNYRQLEEILKPAICKTCSHKKLVALKTVK

SEQ ID NO: 15079 - protein, 19 aa, Homo sapiens
IEENQDGQSKICKSVEEGK

SEQ ID NO: 15080 - protein, 72 aa, Homo sapiens
VGKEQQARRRGQACVRFSGPCVRLSFPGSLAPLTIGRSSSSSEERKLSSGMEPTWNCAGCYINISSPGKRCW

SEQ ID NO: 15081 - protein, 17 aa, Homo sapiens
LLNGAERNSCIYSNNHL

SEQ ID NO: 15082 - protein, 35 aa, Homo sapiens [sequence omitted]

SEQ ID NO: 15083 - protein, 18 aa, Homo sapiens
LLLARTRRVFPPTASRWW

SEQ ID NO: 15084 - protein, 9 aa, Homo sapiens
IILSFKPIF

SEQ ID NO: 15085 - protein, 61 aa, Homo sapiens
VGAPSFLSTSGACSLEVSSSRPRADMSSGNQPSLGWMMTHLPLRCSKTTRMSLELRRLMMS

SEQ ID NO: 15086 - protein, 16 aa, Homo sapiens
RVRGAGGARVETKALM

SEQ ID NO: 15087 - protein, 26 aa, Homo sapiens
MSAASLLKPARPRTHQEEQTTPDAQP

SEQ ID NO: 15088 - protein, 39 aa, Homo sapiens
MAWLWRQGPGIASSRSGTNASSMWMPWRLEDHSNLDALP

SEQ ID NO: 15089 - protein, 29 aa, Homo sapiens
VGWSSDLTGLSLLLAGHGGFGGRCKVYCG

SEQ ID NO: 15090 - protein, 11 aa, Homo sapiens
LRVLFLPGVGG

SEQ ID NO: 15091 - protein, 21 aa, Homo sapiens
LPSDWCFCGFSLLSSSMGQYT

SEQ ID NO: 15092 - protein, 36 aa, Homo sapiens
IDCGLSPTRTLMSSSCASPSTALTAWKTFLRSGPQR

SEQ ID NO: 15093 - protein, 48 aa, Homo sapiens
LLQAPGSFPFSVSEEGTAAPWTPACPLSARPAAASMSASQPPPWPSTM

SEQ ID NO: 15094 - protein, 21 aa, Homo sapiens
KEGDTGQRGAEKIFGVQGGCG

SEQ ID NO: 15095 - protein, 43 aa, Homo sapiens
VWVSWLPVSWVPVESCWSSESPRSRCLLLPSPCFLPGLSTTGA

SEQ ID NO: 15096 - protein, 22 aa, Homo sapiens
VGELAAGELGAGGVVLVLRIPA

SEQ ID NO: 15097 - protein, 50 aa, Homo sapiens
LASCVGTGTSKRGSERRTGAGPWAPWNSSLRHHVTHTLGAAIRAYNDIWI

SEQ ID NO: 15098 - protein, 32 aa, Homo sapiens
RLPSWSSPWPRYVPKGVTKPPSQPSAPSRSQT

SEQ ID NO: 15099 - protein, 10 aa, Homo sapiens
LETHPPPQSF

SEQ ID NO: 15100 - protein, 49 aa, Homo sapiens
KKKFRMKKMMMTMLKKGKKRKKRKKEVFEGRRGNEMLKTMERKKMTRSF

SEQ ID NO: 15101 - protein, 43 aa, Homo sapiens
MKKMMMTMLKKGKKRKKRKEVFEGRRGNEMLKTMERKKMTRSF

SEQ ID NO: 15102 - protein, 72 aa, Homo sapiens
LWRTRLGVRVQAGSWASPSTCASLGPWFCLAWGSSSSQVASQSLRLGPWRKWSGRSSQTPRCWKLWGTGRMG

SEQ ID NO: 15103 - protein, 29 aa, Homo sapiens
RKRPGKLSFLRSTVGIAAAEQGFWKALRT

SEQ ID NO: 15104 - protein, 18 aa, Homo sapiens
VVIFGLQHCPGCCQDGTV

SEQ ID NO: 15105 - protein, 8 aa, Homo sapiens
VRAMIKLA

SEQ ID NO: 15106 - protein, 23 aa, Homo sapiens
KPRRAEYVRILSDLPGICNVFQI

SEQ ID NO: 15107 - protein, 33 aa, Homo sapiens
ICEFIGLVFCFLGSRLVEKKKGRIHSHDLYSRP

SEQ ID NO: 15108 - protein, 26 aa, Homo sapiens
TDLFSVQNVKLDFSSTVHSIMATCKT

SEQ ID NO: 15109 - protein, 17 aa, Homo sapiens
LSTNWWWLEQVVLGKAH

SEQ ID NO: 15110 - protein, 206 aa, Homo sapiens
VCGSFYLGIMQRASRLKRELHMLATEPPPGITCWQDKDQMDDLRAQILGGANTPYEKGVFKLEVIIPERYPFEPPQIRFLTPIYHPNIDSAGRICLDVLKLPPKGAWRPSLNIATVLTSIQLLMSEPNPDDPLMADISSEFKYNKPAFLKNARQWTEKHARQKQKADEEEMLDNLPEAGDSRVHNSTQKRKASQLVGIEKKFHPDV

SEQ ID NO: 15111 - protein, 37 aa, Homo sapiens
KDLSGCSQIATKRCLETIPQHRNCVDLYSAAHVRTQP

SEQ ID NO: 15112 - protein, 14 aa, Homo sapiens
MEPTAGLTIILKNP

SEQ ID NO: 15113 - protein, 18 aa, Homo sapiens
ILPRQLHRFSCHTKQGGN

SEQ ID NO: 15114 - protein, 14 aa, Homo sapiens
RRNMDVGGNQQISY

SEQ ID NO: 15115 - protein, 18 aa, Homo sapiens
IITPATVMWGTMGPSVSL

SEQ ID NO: 15116 - protein, 10 aa, Homo sapiens
ISTRFGDHEL

SEQ ID NO: 15117 - protein, 29 aa, Homo sapiens
LGRRKPFVNHLESGQILVQYVKNWTKVSQ

SEQ ID NO: 15118 - protein, 31 aa, Homo sapiens
RRVIITPSSFQWQSWLLHSLGWHLSFGWQGD

SEQ ID NO: 15119 - protein, 36 aa, Homo sapiens
KESHLSADVQYLLHVFSEPSSLPMPHLDSHPHLSVP

SEQ ID NO: 15120 - protein, 103 aa, Homo sapiens
IKASSRCTCPCLRVRKSRPCISGSMVLEKDCAARPGPWTVSPSVWKSCLSGISMALVLYSLRVPTVTCISCLLPCFGTPSVRTLTSWCYVKFSSTIEGLQRPI

SEQ ID NO: 15121 - protein, 28 aa, Homo sapiens
VRRSPARLNAPRSHRHPLEWPTGDLHMA

SEQ ID NO: 15122 - protein, 84 aa, Homo sapiens
ICGYPEHGDLAGFTFTSVSAAPSASSPRRRDPVARSSPCLFSRSMPGRSLTLAGIPLLRLISSPQKVSSELLCPVVLQLVSMRP

SEQ ID NO: 15123 - protein, 48 aa, Homo sapiens
VGTRSTEISPALRSPRCLQHPPLPLLGDETQWLEVHHVYSQDPCQGDL

SEQ ID NO: 15124 - protein, 22 aa, Homo sapiens
TPLQLSATQRKGRLVRPPLFVF

SEQ ID NO: 15125 - protein, 47 aa, Homo sapiens
IPEAAVSSPVLGTPPVRPCAVRPSPSVTSGPSLRGFVRLPGGVNRGP

SEQ ID NO: 15126 - protein, 59 aa, Homo sapiens
LQAGCWVSRPTGPTGLKQLQEQQGKGSPLQNQKVKSGPLRSTERPSRGCPHPQRGSRSP

SEQ ID NO: 15127 - protein, 52 aa, Homo sapiens
ISTVEKGVQGRLGVATAGIAGPLNRRAFPPLSHSSFLSSIACEKIISEHFYF

SEQ ID NO: 15128 - protein, 39 aa, Homo sapiens
LATGRPCLPGLRTMKCCTPLAQAPTAAARRSGGRVMARY

SEQ ID NO: 15129 - protein, 27 aa, Homo sapiens
ISGNNRAPPRSVNYRKCQVGNLPMVKW

SEQ ID NO: 15130 - protein, 33 aa, Homo sapiens
VRLFSGSRPCHRRNLAQVNYRKCQVGNLPMVKW

SEQ ID NO: 15131 - protein, 51 aa, Homo sapiens
IDCLKVSSTSLHRGKHVVAVPIAPVCLLLWPRTTEEHTSYQSQSAISEYDL

SEQ ID NO: 15132 - protein, 58 aa, Homo sapiens
LSPALLGSSGRKHVLQRLGFVSGSGIATAASVTPGDQHSRSLGTYDRGLRQQRDSEHL

SEQ ID NO: 15133 - protein, 29 aa, Homo sapiens
VSVGREGASRRSRGGRGEDGGLLRDGCNA

SEQ ID NO: 15134 - protein, 62 aa, Homo sapiens
LRTPISSPYMQAELLSSQRMCNWPGGSGALRRDSAELLHPVFLSVFPAQPGGMIPGTLQSHD

SEQ ID NO: 15135 - protein, 19 aa, Homo sapiens
MISGRCIRRQRLPFGPPRR

SEQ ID NO: 15136 - protein, 31 aa, Homo sapiens
MISGRCIRRQRLPFGPPRRWTSPRTFSTGNP

SEQ ID NO: 15137 - protein, 35 aa, Homo sapiens
TCCSLCCSGRHFLFRFFCVDILAQETRTDAWPHIF

SEQ ID NO: 15138 - protein, 8 aa, Homo sapiens
MAEKPPVL

SEQ ID NO: 15139 - protein, 39 aa, Homo sapiens
MESCTVGCATASSWGCTSSFGRSMGPMCFLHSPQRSFSL

SEQ ID NO: 15140 - protein, 16 aa, Homo sapiens
KFKIGSCSLAATWFEM

SEQ ID NO: 15141 - protein, 235 aa, Homo sapiens
ICDQISDAVLDAHLQQDPDAKVACETVAKTGMILLAGEITSRAAVDYQKVVREAVKHIGYDDSSKGFDYKTCNVLVALEQQSPDIAQGVHLDRNEEDIGAGDQGLMFGYATDETEECMPLTIVLAHKLNAKLAELRRNGTLPWLRPDSKTQVTVQYMQDRGAVLPIRVHTIVISVQHDEEVCLDEMRDALKEKVIKAVVPAKYLDEDTIYHLQPSGRFVIGGPQVMSFCCIFLDF

SEQ ID NO: 15142 - protein, 42 aa, Homo sapiens
VGVGSRLTGGQGGVSSWAATVREGLKVCMCEGRERERRAPQR

SEQ ID NO: 15143 - protein, 55 aa, Homo sapiens
INAPNFPAAKGRGRYLCVHADGKGWGSGRTEKSRILAKQCLKMVLLSSKKSFGKS

SEQ ID NO: 15144 - protein, 24 aa, Homo sapiens
KRKILAKQCLKMVLLSSKKSFGKS

SEQ ID NO: 15145 - protein, 36 aa, Homo sapiens
MSQKLLVRAGFKSMLQILVEACVELFRDLAVSSFPE

SEQ ID NO: 15146 - protein, 29 aa, Homo sapiens
IQGNRKNRWQRRKNQIHHRECDTDKDSFG

SEQ ID NO: 15147 - protein, 46 aa, Homo sapiens
LPESDLCICLSSQHGTKADQRGLPCEEGERVQYVETHVGCIVRRWN

SEQ ID NO: 15148 - protein, 16 aa, Homo sapiens
MELNSIRRKVTTAPKE

SEQ ID NO: 15149 - protein, 10 aa, Homo sapiens
MERELRRSPG

SEQ ID NO: 15150 - protein, 30 aa, Homo sapiens
LPRASGFAVEDAEARGGQAPGRRASQPTCL

SEQ ID NO: 15151 - protein, 25 aa, Homo sapiens
LDAAEWLPQRRVARRKRAVLPSTKW

SEQ ID NO: 15152 - protein, 20 aa, Homo sapiens
MEWASRSVHLGHSKRFGNLP

SEQ ID NO: 15153 - protein, 21 aa, Homo sapiens
IAKGFKLSIKKPGIIQNPKIL

SEQ ID NO: 15154 - protein, 13 aa, Homo sapiens
MPTQYSHCLPFGT

SEQ ID NO: 15155 - protein, 7 aa, Homo sapiens
MISRGFS

SEQ ID NO: 15156 - protein, 35 aa, Homo sapiens
LEITAQSQKLRGLVVADVLPVLNLKGQRTYSGTVN

SEQ ID NO: 15157 - protein, 10 aa, Homo sapiens
ILQGTSGTWC

SEQ ID NO: 15158 - protein, 40 aa, Homo sapiens
LSLKNTSNSKKRARKERTGQLSIIGMMRPCMLSLKRTESQ

SEQ ID NO: 15159 - protein, 69 aa, Homo sapiens
IAQHQVRFQAFGFFASILGAPSRRLGERRLRWQRQESPAATGRTPPLERILKEMKSALRNEVDCLLAFC

SEQ ID NO: 15160 - protein, 25 aa, Homo sapiens
IELNLLKSGRPPRRKEPILSILGIS

SEQ ID NO: 15161 - protein, 24 aa, Homo sapiens
MKLTACWLSVDWPGAVLQDPCELP

SEQ ID NO: 15162 - protein, 10 aa, Homo sapiens
IERNIRIIAL

SEQ ID NO: 15163 - protein, 19 aa, Homo sapiens
IGHDIGRGCMGNLRELPSL

SEQ ID NO: 15164 - protein, 16 aa, Homo sapiens
ISSFQARATEEGKARN

SEQ ID NO: 15165 - protein, 42 aa, Homo sapiens
RTTGIYRNSCKIVKSCLSGSMRRCSQPRTCLTMKPEICTVNG

SEQ ID NO: 15166 - protein, 15 aa, Homo sapiens
MMAMSTSSKPKTMRK

SEQ ID NO: 15167 - protein, 54 aa, Homo sapiens
VAQARPRRPKGSSRPPGLPLRPLRDPETCRPHFCPPSTMSTSCARQRNPWPTST

SEQ ID NO: 15168 - protein, 34 aa, Homo sapiens
TLAGAVSHDGPSLPLFQSVDSLACMTKFFSFAMT

SEQ ID NO: 15169 - protein, 60 aa, Homo sapiens
TPGLQREREESRALRSKASVSPRSIHHEQSSPSRVEKIYGQEVIIEIKWWQTCPRNIAGI

SEQ ID NO: 15170 - protein, 13 aa, Homo sapiens
KKKKIPKTVEWIT

SEQ ID NO: 15171 - protein, 118 aa, Homo sapiens
LPPSVWHTSCRVAVCGWTRPLTSLSSAGGSSPPTSVSWGSCCSLRPRCCVTEVVPLCLPAPLCWQELTVDWWAPLWASTVPSPLAGLLPPQSFRSPHMGALGMPACWSFRPGALLLGD

SEQ ID NO: 15172 - protein, 21 aa, Homo sapiens
LLCAGQRALWQDLYLEGAKSE

SEQ ID NO: 15173 - protein, 81 aa, Homo sapiens
ISTRARCCCPFFLQNRGGRGNEKLLRPKSHCEGPRRCPRASSAPAPPGSSRGSPRLTRPELYRNNVDIWNPCRTSMKKGQR

SEQ ID NO: 15174 - protein, 29 aa, Homo sapiens
METLNQTISYLETDFWNRMMKMIYLLAWH

SEQ ID NO: 15175 - protein, 28 aa, Homo sapiens
KSIFKMNINSHQLISWQKWRKQTFNQIE

SEQ ID NO: 15176 - protein, 43 aa, Homo sapiens
VISARAQNPGARGCRFLDKDILAAKQHRTGSQNVWVLVLTAIN

SEQ ID NO: 15177 - protein, 69 aa, Homo sapiens
LQSLLQKRRHWESGLGLPGCGCESELVSGCGAPTLRQHIIPAGDKLHSVESARLGGTGVIRNLFTVKVY

SEQ ID NO: 15178 - protein, 33 aa, Homo sapiens
VLAGVIFIHNVFTKAPATQQQWQFGGLLRWASV

SEQ ID NO: 15179 - protein, 69 aa, Homo sapiens
ITLRPARIRVHPSFPSQPRHSGVCHARECGTPERGDCRGCRRPRERRLSGPRQASPDPLQQHFRRQSGC

SEQ ID NO: 15180 - protein, 14 aa, Homo sapiens
LHHLSSSSRHLMSS

SEQ ID NO: 15181 - protein, 11 aa, Homo sapiens
IWNCLCCVPAE

SEQ ID NO: 15182 - protein, 16 aa, Homo sapiens
RSPPMAVWRLNFGTCN

SEQ ID NO: 15183 - protein, 26 aa, Homo sapiens
LAVFFCHQKRSQCGPAEHVGREASWS

SEQ ID NO: 15184 - protein, 40 aa, Homo sapiens
MHTWLSPHSYISKCAFVLILRRFSLLDQYSERKTLIPIDI

SEQ ID NO: 15185 - protein, 30 aa, Homo sapiens
LENQRLPWRGSVYTLQITTPRKWAQGTMTP

SEQ ID NO: 15186 - protein, 25 aa, Homo sapiens
RNPVSVKKMLISIKSSCPPSTPSSS

SEQ ID NO: 15187 - protein, 27 aa, Homo sapiens
TPPTVRGQGSCWLKRWSMLASGSLPSC

SEQ ID NO: 15188 - protein, 30 aa, Homo sapiens
VDIHLFPLSLSLQVFTPANTDVKDFFLYDK

SEQ ID NO: 15189 - protein, 30 aa, Homo sapiens
IAVAWLLLDSSAPLVRFTLRRHHGEAREGR

SEQ ID NO: 15190 - protein, 10 aa, Homo sapiens
IQNSVCQRPV

SEQ ID NO: 15191 - protein, 106 aa, Homo sapiens
RRPWKTVKLMEIKLPWTGPNLRVKVASGVVVEAEAALEDEVVVEEAEEDLVAEAGEALEGEEASEEAEEEEVTTSHKERRRSLNSFCPSAFPFPFERKDSGVFTVT

SEQ ID NO: 15192 - protein, 23 aa, Homo sapiens
RHCFGRGLCPPSMHSSLGLIDSS

SEQ ID NO: 15193 - protein, 40 aa, Homo sapiens
MLSAKCPGSPHCDMAEKESCKPRKHGHLQREPWGGDPACL

SEQ ID NO: 15194 - protein, 15 aa, Homo sapiens
IRERRLARRRETAGS

SEQ ID NO: 15195 - protein, 12 aa, Homo sapiens
RAARKEKTHPGN

SEQ ID NO: 15196 - protein, 34 aa, Homo sapiens
IITMLRAQTLTSGRPTPMFLTPLSSFQSFTQLCS

SEQ ID NO: 15197 - protein, 21 aa, Homo sapiens
LECWGTLFSWERCISNPAAED

SEQ ID NO: 15198 - protein, 22 aa, Homo sapiens
IWLPLTSFFLSHCLSGWIKKHL

SEQ ID NO: 15199 - protein, 205 aa, Homo sapiens
KMGAYKYIQELWRKKQSDVMRFLLRVRCWQYRQLSALHRAPRPTRPDKARRLGYKAKQGYVIYRIRVRRGGRKRPVPKGATYGKPVHHGVNQLKFARSLQSVAEERAGRHCGALRVLNSYWVGEDSTYKFFEVILIDPFHKAIRRNPDTQWITKPVHKHREMRGLTSAGRKSRGLGKGHKFHHTIGGSRRAAWRRRNTLQLHRYR

SEQ ID NO: 15200 - protein, 293 aa, Homo sapiens
IKFSRDKKKKKRKMPADIMEKNSSSPVAATPASVNTTPDKPKTASEHRKSSKPIMEKRRRARINESLSQLKTLILDALKKDSSRHSKLEKADILEMTVKHLRNLQRAQMTAALSTDPSVLGKYRAGFSECMNEVTRFLSTCEGVNTEVRTRLLGHLANCMTQINAMTYPGQPHPALQAPPPPPPGPGGPQHAPFAPPPPLVPIPGGAAPPPGGAPCKLGSQAGEAAKVFGGFQVVPAPDGQFAFLIPNGAFAHSGPVIPVYTSNSGTSVGPNAVSPSSGPSLTADSMWRPWRN

SEQ ID NO: 15201 - protein, 13 aa, Homo sapiens
MISFKKLKKQRAH

SEQ ID NO: 15202 - protein, 14 aa, Homo sapiens
LSGFSDHVWWLRGL

SEQ ID NO: 15203 - protein, 17 aa, Homo sapiens
KHCAKIADTRTMSWFLQ

SEQ ID NO: 15204 - protein, 12 aa, Homo sapiens
MSFVLRFGAISH

SEQ ID NO: 15205 - protein, 27 aa, Homo sapiens
TADGGTVLEGPVRGASRGWRASKSLEM

SEQ ID NO: 15206 - protein, 21 aa, Homo sapiens
MLWQLKKGRKARASGWMGTKI

SEQ ID NO: 15207 - protein, 19 aa, Homo sapiens
LQGGMSWMSRASRKTLRKS

SEQ ID NO: 15208 - protein, 42 aa, Homo sapiens
ILHLSWSSERCRARVKRRAPTARTERSAEPWRTKRASTPRKS

SEQ ID NO: 15209 - protein, 33 aa, Homo sapiens
ILLFRWDPAKEISRYGFSRCHGQAPQQPEQIFQ

SEQ ID NO: 15210 - protein, 15 aa, Homo sapiens
IAFLPSLGLPSHAVW

SEQ ID NO: 15211 - protein, 13 aa, Homo sapiens
MTSSTRMCWRLAS

SEQ ID NO: 15212 - protein, 27 aa, Homo sapiens
IWLCFGQSPHQLSFTQVMALLQRRQWN

SEQ ID NO: 15213 - protein, 26 aa, Homo sapiens
MSKLSVTGGNPEALTTGFVEDSRARS

SEQ ID NO: 15214 - protein, 22 aa, Homo sapiens
IILGLLLNPISGHLEHPWERIM

SEQ ID NO: 15215 - protein, 18 aa, Homo sapiens
IWTSGTSMGKNHVMYSFI

SEQ ID NO: 15216 - protein, 12 aa, Homo sapiens
LVQAQWNNMCKT

SEQ ID NO: 15217 - protein, 23 aa, Homo sapiens
MGHTAVLQIFSLISLKATQQLFM

SEQ ID NO: 15218 - protein, 10 aa, Homo sapiens
LPEKAPRKAK

SEQ ID NO: 15219 - protein, 12 aa, Homo sapiens
MTVIGTPMTKRV

SEQ ID NO: 15220 - protein, 42 aa, Homo sapiens
IGKVIASFLHQQQQLVIGGDRIFSCTSPHQCTANDEETEALD

SEQ ID NO: 15221 - protein, 31 aa, Homo sapiens
LPPPLSRQHIPSPCRRPAPQLSLPELQSRWG

SEQ ID NO: 15222 - protein, 12 aa, Homo sapiens
MPEWITVLLQHL

SEQ ID NO: 15223 - protein, 8 aa, Homo sapiens
IALVTAAW

SEQ ID NO: 15224 - protein, 20 aa, Homo sapiens
MKMNQSRRTRQRLPLQGFAY

SEQ ID NO: 15225 - protein, 14 aa, Homo sapiens
LPTCKLSAFCTCHP

SEQ ID NO: 15226 - protein, 12 aa, Homo sapiens
MDIEILSLTLGP

SEQ ID NO: 15227 - protein, 27 aa, Homo sapiens
VEFLGQGPRGSRTAPLATPWPEMQKRP

SEQ ID NO: 15228 - protein, 52 aa, Homo sapiens
MKIHMSLVRLDLKKMKILRCMLKINFVNLNSAKSGVINILLRFRSKTALKTR

SEQ ID NO: 15229 - protein, 18 aa, Homo sapiens
IPFLQSHSVSTISVIRIA

SEQ ID NO: 15230 - protein, 70 aa, Homo sapiens
RLCRTRSLCCSWGPERCMGPWSCKIRCRHSSPIETCPDVLRYGLKRWVSAQQKHYLCQLECWRLWIGWCH

SEQ ID NO: 15231 - protein, 38 aa, Homo sapiens
RELQMPSLVTFGTLTMSFKCDTHSFHENSRVVWFLDLC

SEQ ID NO: 15232 - protein, 24 aa, Homo sapiens
LVPACYGPVGLGAASEEHAAGPGM

SEQ ID NO: 15233 - protein, 11 aa, Homo sapiens
VLRPCGPGSCL

SEQ ID NO: 15234 - protein, 10 aa, Homo sapiens
VEEGSTANPR

SEQ ID NO: 15235 - protein, 82 aa, Homo sapiens
VRSLRVMENLPAVTTEEPTPMGRGPVGPSGGGSTRDQVRTVVMRPSVSWEKAGPEEAKAPVRGERPGAFGAFRGARPLLGLP

SEQ ID NO: 15236 - protein, 25 aa, Homo sapiens
IQSPPGETDGQTDSQVLQWYLPPFS

SEQ ID NO: 15237 - protein, 28 aa, Homo sapiens
LDTEREPTAHQGSGCQNYSWNSTETSGG

SEQ ID NO: 15238 - protein, 36 aa, Homo sapiens
TMVFYLPNICLSQSNKSSACLSEWQAQRCRETCIIF

SEQ ID NO: 15239 - protein, 31 aa, Homo sapiens
RTFYFLTSKKMLKSICRHIGKKRSASRMSVF

SEQ ID NO: 15240 - protein, 62 aa, Homo sapiens
VGRGPSGKGSVHSGTPVKPVQPSVSCGHLESTLSLLCPSTPRTVSLSQMEAELNTLRWMMET

SEQ ID NO: 15241 - protein, 1047 aa, Homo sapiens
IEDYSESAASGLAGWQAVAERGQDSSRQGSRAMGAERRLLSIKEAFRLAQQPHQNQAKLVVALSRTYRTMDDKTVFHEEFIHYLKYVMVVYKREPAVERVIEFAAKFVTSFHQSDMEDDEEEEDGGLLNYLFTFLLKSHEANSNAVRFRVCLLINKLLGSMPENAQIDDDVFDKINKAMLIRLKDKIPNVRIQAVLALSRLQDPKDDECPVVNAYATLIENDSNPEVRRAVLSCIAPSAKTLPKIVGRTKDVKEAVRKLAYQVLAEKVHMRAMSIAQRVMLLQQGLNDRSDAVKQAMQKHLLQGWLRFSEGNILELLHRLDVENSSEVAVSVLNALFSITPLSELVGLCKNNDGRKLIPVETLTPEIALYWCALCEYLKSKGDEGEEFLEQILPEPVVYADYLLSYIQSIPVVNEEHRGDFSYIGNLMTKEFIGQQLILIIKSLDTSEEGGRKKLLAVLQEILILPTIPISLVSFLVERLLHIIIDDNKRTQIVTEIISEIRAPIVTVGVNNDPADVRKKELKMAEIKVKLIEAKEALENCITLQDFNRASELKEEIKALEDARINLLKETEQLEIKEVHIEKNDAETLQKCLILCYELLKQMSISTGLSATMNGIIESLILPGIISIHPVVRNLAVLCLGCCGLQNQDFARKHFVLLLQVLQIDDVTIKISALKAIFDQLMTFGIEPFKTKKIKTLHCEGTEINSDDEQESKEVEETATAKNVLKLLSDFLDSEVSELRTGAAEGLAKLMFSGLLVSSRILSRLILLWYNPVTEEDVQLRHCLGVFFPVFAYASRTNQECFEEAFLPTLQTLANAPASSPLAEIDITNVAELLVDLTRPSGLNPQAKTSQDYQALTVHDNLAMKICNEILTSPCSPEIRVYTKALSSLELSSHLAKDLLVLLNEILEQVKDRTCLRALEKIKIQLEKGNKEFGDQAEAAQDATLTTTTFQNEDEKNKEVYMTPLRGVKATQASKSTQLKTNRGQRKVTVSARTNRRCQTAEADSESDHEVPEPESEMKMRLPRRAKTAALEKSKLNLAQFLNEDLS

SEQ ID NO: 15242 - protein, 28 aa, Homo sapiens
KRLSESWLIRCCETSYAEASSSRLVTVL

SEQ ID NO: 15243 - protein, 21 aa, Homo sapiens
KTKWIKSSGQDFPRLSGLNST

SEQ ID NO: 15244 - protein, 16 aa, Homo sapiens
MSESFGENQDSVRKRK

SEQ ID NO: 15245 - protein, 46 aa, Homo sapiens
LEHLASPRCRWPAVISRPFRISQRHGKTNGSVSKFFSLITSVSSCL

SEQ ID NO: 15246 - protein, 7 aa, Homo sapiens
MGIPYSS

SEQ ID NO: 15247 - protein, 13 aa, Homo sapiens
MGKPMEVFQSSSL

SEQ ID NO: 15248 - protein, 11 aa, Homo sapiens
VGSNFWNRLSV

SEQ ID NO: 15249 - protein, 16 aa, Homo sapiens
TLSAGTQNGPAFDIPT

SEQ ID NO: 15250 - protein, 43 aa, Homo sapiens
IATFPALKAVLEPVLLVPRVIGFFFWQTSYSSFWSLKNSVAVR

SEQ ID NO: 15251 - protein, 8 aa, Homo sapiens
RRRSVVHS

SEQ ID NO: 15252 - protein, 599 aa, Homo sapiens
VDAFDIMTAEDSTAAMSSDSAAGSSAKVPEGVAGAPNEAALLALMERTGYSMVQENGQRKYGGPPPGWEGPHPQRGCEVFVGKIPRDVYEDELVPVFEAVGRIYELRLMMDFDGKNRGYAFVMYCHKHEAKRAVRELNNYEIRPGRLLGVCCSVDNCRLFIGGIPKMKKREEILEEIAKVTEGVLDVIVYASAADKMKNRGFAFVEYESHRAAAMARRKLMPGRIQLWGHQIAVDWAEPEIDVDEDVMETVKILYVRNLMIETTEDTIKKSFGQFNPGCVERVKKIRDYAFVHFTSREDAVHAMNNLNGTELEGSCLEVTLAKPVDKEQYSRYQKAARGGGAAEAAQQPSYVYSCDPYTLAYYGYPYNALIGPNRDYFVKAGSIRGRGRGAAGNRAPGPRGSYLGGYSAGRGIYSRYHEGKGKQQEKGYELVPNLEIPTVNPVAIKPGTVAIPAIGAQYSMFPAAPAPKMIEDGKIHTVEHMISPIAVQPDPASAAAAAAAAAAAAAAVIPTVSTPPPFQGRPITPVYTVAPNVQRIPTAGIYGASYVPFAAPATATIATLQKNAAAAAAMYGGYAGYIPQAFPAAAIQVPIPDVYQTY

SEQ ID NO: 15253 - protein, 17 aa, Homo sapiens
LTSVKNVILQKWSWIIR

SEQ ID NO: 15254 - protein, 8 aa, Homo sapiens
ILTNLSHC

SEQ ID NO: 15255 - protein, 380 aa, Homo sapiens
KDIMKFPGPLENQRLSFLLEKAITREAQMWKVNVRKMPSNQNVSPSQRDEVIQWLAKLKYQFNLYPETFALASSLLDRFLATVKAHPKYLSCIAISCFFLAAKTVEEDERIPVLKVLARDSFCGCSSSEILRMERIILDKLNWDLHTATPLDFLHIFHAIAVSTRPQLLFSLPKLSPSQHLAVLTKQLLHCMACNQLLQFRGSMLALAMVSLEMEKLIPDWLSLTIELLQKAQMDSSQLIHCRELVAHHLSTLQSSLPLNSVYVYRPLKHTLVTCDKGVFRLHPSSVPGPDFSKDNSKPEVPVRGTAAFYHHLPAASGCKQTSTKRKVEEMEVDDFYDGIKRLYNEDNVSENVGSVCGTDLSRQEGHASPCPPLQPVSVM

SEQ ID NO: 15256 - protein, 42 aa, Homo sapiens
MRSCTLQCMMDTVDLQQLISVIPTWRNVLWICFLRRRTWKLC

SEQ ID NO: 15257 - protein, 33 aa, Homo sapiens
LLAASLGVFGSPRWAVPACAFRNLLGPAWSRAG

SEQ ID NO: 15258 - protein, 12 aa, Homo sapiens
INTKDWIYPGKS

SEQ ID NO: 15259 - protein, 28 aa, Homo sapiens
RTTEDCLKDAWIPCYLRTLNTLTAVQCW

SEQ ID NO: 15260 - protein, 35 aa, Homo sapiens
VARRGSPYNAPPPLLPRPGLRASTPLPTAPSLWRI

SEQ ID NO: 15261 - protein, 38 aa, Homo sapiens
KGLTRIHSAPDVGSKPSGFGLTSVLCSGRRRWRTDPRR

SEQ ID NO: 15262 - protein, 88 aa, Homo sapiens
LRKSSHQVDADLSTWVKETPTSRGAKCPRTPSSCRPAGKSTRRNTRTLPSISRNSPRSVRRDGRPCLQRRSRSLKIWQKVTKLAMTGR

SEQ ID NO: 15263 - protein, 22 aa, Homo sapiens
LSSRRRDRRALQSWDSSLKEKK

SEQ ID NO: 15264 - protein, 39 aa, Homo sapiens
RCAWHGPGPGRHHLTEDFANIRDLRLFTGSGLRECLTGG

SEQ ID NO: 15265 - protein, 8 aa, Homo sapiens
MTLTVAYP

SEQ ID NO: 15266 - protein, 15 aa, Homo sapiens
MKTLRKLCSKIHFCD

SEQ ID NO: 15267 - protein, 31 aa, Homo sapiens
LQSNRSWWRCQQPSPCRWDDSWPSCASSTCL

SEQ ID NO: 15268 - protein, 55 aa, Homo sapiens
ILRPRVCAPNLRWSTRDPLSTNPSPPRGPLFAPTRYKKALDGGVVGGRERGREVP

SEQ ID NO: 15269 - protein, 59 aa, Homo sapiens
ILRPRVCAPNLRWSTRDPLSTNPSPPRGPLFAPTRELLAERRRWFIEQPQQMTKNFSSP

SEQ ID NO: 15270 - protein, 13 aa, Homo sapiens
ISNTNSKIVTLGQ

SEQ ID NO: 15271 - protein, 69 aa, Homo sapiens
KQVHRPLQTPDLSGFYSLTSGSMGQLPHTVSWPSPPLYPLSPSCGYRQHFPAPTAAPGAPYPSPLLSCA

SEQ ID NO: 15272 - protein, 125 aa, Homo sapiens
IPRLVSAGQLREEEEAVEGKAPRIHHRRKKKCIRYLPGEGRCPSPVPSDDSALGCPGSPAPQDSPSYHLLPRFPTELLTSPAEPAPTSPGLSTALSLPTPGPPQAPRSTLQSTQVQQQESQRQVA

SEQ ID NO: 15273 - protein, 33 aa, Homo sapiens
RRRRSCASSMTGWRCTSTRCAAWRRRTARCSCR

SEQ ID NO: 15274 - protein, 16 aa, Homo sapiens
IRKMQLLLLHLVTKKV

SEQ ID NO: 15275 - protein, 15 aa, Homo sapiens
IYRKSLEHVWKGFKN

SEQ ID NO: 15276 - protein, 8 aa, Homo sapiens
IYPLEEHF

SEQ ID NO: 15277 - protein, 25 aa, Homo sapiens
KICAEGRPDCYNLGCKRWCHSQPPN

SEQ ID NO: 15278 - protein, 26 aa, Homo sapiens
VGHWRRCEGYIEKFSGRGGCSKKYSL

SEQ ID NO: 15279 - protein, 20 aa, Homo sapiens
LDSKLKANLQKMMLSLELSN

SEQ ID NO: 15280 - protein, 22 aa, Homo sapiens
IKDSCSSTGTWCPGQADPGSGN

SEQ ID NO: 15281 - protein, 37 aa, Homo sapiens
ILSWRTHHYRKKRPRLGKMQRMFSIRFWQLRAQIKNM

SEQ ID NO: 15282 - protein, 25 aa, Homo sapiens
RTQCIDQACLTTDRTFCSLCCRSCC

SEQ ID NO: 15283 - protein, 19 aa, Homo sapiens
VLCPVSSEKVCICYSSESS

SEQ ID NO: 15284 - protein, 81 aa, Homo sapiens
TSRHCQAAAPRGTELGCWSVGSRAAAAKEEETQLEQLRGLTGARPQQRELECGRACGAFPCGWGRAGPAASSAARSRRASA

SEQ ID NO: 15285 - protein, 16 aa, Homo sapiens
IRITTSHTEAAAGATN

SEQ ID NO: 15286 - protein, 10 aa, Homo sapiens
IDQSNGDGEA

SEQ ID NO: 15287 - protein, 54 aa, Homo sapiens
LRGCSLEQRSFISVRLLSYLSACRHPMEDSMDMDMSPLRPQNYLFGQFRGWCKG

SEQ ID NO: 15288 - protein, 78 aa, Homo sapiens
LLLLRLAGISAGAAAAAAAYAPWSIASWGPGRTELPGCGMRPWSFFVLRCRYGNIAVVSRAMSIVSQRPKLWIGCMSC

SEQ ID NO: 15289 - protein, 14 aa, Homo sapiens
MTLKSRQRSYKNPG

SEQ ID NO: 15290 - protein, 17 aa, Homo sapiens
LELCSNHRSHRKCSTIL

SEQ ID NO: 15291 - protein, 495 aa, Homo sapiens
ISGTRERRKTGTMGRKKIQITRIMDERNRQVTFTKRKFGLMKKAYELSVLCDCEIALIIFNSTNKLFQYASTDMDKVLLKYTEYNEPHESRTNSDIVETLRKKGLNGCDSPDPDADDSALNKKENKGCESPDPDSSYALTPRTEEKYKKINEEFDNMIKSHKIPAVPPPNFEMPVSIPVSSHNSLVYSNPVSSLGNPNLLPLAHPSLQRNSMSPGVTHRPPSAGNTGGLMGGDLTSGAGTSAGNGYGNPRNSPGLLVSPGNLNKNMQAKSPPPMNLGMNNRKPDLRVLIPPGSKNTMPSVNQRINNSQSAQSLATPVVSVATPTLPGQGMGGYPSAISTTYGTEYSLSSADLSSLSGFNTASALHLGSVTGWQQQHLHNMPPSALSQLGACTSTHLSQSSNLSLPSTQSLNIKSEPVSPPRDRTTTPSRYPQHTRHEAGRSPVDSLSSCSSSYDGSDREDHRNEFHSPIGLTRPSPDERESPSVKRMRLSEGWAT

SEQ ID NO: 15292 - protein, 474 aa, Homo sapiens
ISGTRERRKTGTMGRKKIQITRIMDERNRQVTFTKRKFGLMKKAYELSVLCDCEIALIIFNSTNKLFQYASTDMDKVLLKYTEYNEPHESRTNSDIVETLRKKGLNGCDSPDPDADDSVGHSPESEDKYRKINEDIDLMISRQRLCAVPPPNFEMPVSIPVSSHNSLVYSNPVSSLGNPNLLPLAHPSLQRNSMSPGVTHRPPSAGGLMGGDLTSGAGTSAGNGYGNPRNSPGLLVSPGNLNKNMQAKSPPPMNLGMNNRKPDLRVLIPPGSKNTMPSVNQRINNSQSAQSLATPVVSVATPTLPGQGMGGYPSAISTTYGTEYSLSSADLSSLSGFNTASALHLGSVTGWQQQHLHNMPPSALSQLGACTSTHLSQSSNLSLPSTQSLNIKSEPVSPPRDRTTTPSRYPQHTRHEAGRSPVDSLSSCSSSYDGSDREDHRNEFHSPIGLTRPSPDERESPSVKRMRLSEGWAT

SEQ ID NO: 15293 - protein, 477 aa, Homo sapiens
ISGTRERRKTGTMGRKKIQITRIMDERNRQVTFTKRKFGLMKKAYELSVLCDCEIALIIFNSTNKLFQYASTDMDKVLLKYTEYNEPHESRTNSDIVETLRKKGLNGCDSPDPDADDSVGHSPESEDKYRKINEDIDLMISRQRLCAVPPPNFEMPVSIPVSSHNSLVYSNPVSSLGNPNLLPLAHPSLQRNSMSPGVTHRPPSAGNTGGLMGGDLTSGAGTSAGNGYGNPRNSPGLLVSPGNLNKNMQAKSPPPMNLGMNNRKPDLRVLIPPGSKNTMPSVNQRINNSQSAQSLATPVVSVATPTLPGQGMGGYPSAISTTYGTEYSLSSADLSSLSGFNTASALHLGSVTGWQQQHLHNMPPSALSQLGACTSTHLSQSSNLSLPSTQSLNIKSEPVSPPRDRTTTPSRYPQHTRHEAGRSPVDSLSSCSSSYDGSDREDHRNEFHSPIGLTRPSPDERESPSVKRMRLSEGWAT

SEQ ID NO: 15294 - protein, 33 aa, Homo sapiens
LWFRILWREITFPMIALGGWKLEQRQSSTNQSL

SEQ ID NO: 15295 - protein, 11 aa, Homo sapiens
RASWDTYATCL

SEQ ID NO: 15296 - protein, 37 aa, Homo sapiens
ISYSRWKTLHTVLPQCIRPLLFCLLQKDPCPVAERGK

SEQ ID NO: 15297 - protein, 8 aa, Homo sapiens
IVNWFRNL

SEQ ID NO: 15298 - protein, 33 aa, Homo sapiens
LNSSVRKQRHLYLYQIKMEICTHLQYMVPLHLF

SEQ ID NO: 15299 - protein, 11 aa, Homo sapiens
RSRTCAFKHSN

SEQ ID NO: 15300 - protein, 10 aa, Homo sapiens
ICTSTTDYTC

SEQ ID NO: 15301 - protein, 16 aa, Homo sapiens
LHLNHRLHLLNWLLGP

SEQ ID NO: 15302 - protein, 25 aa, Homo sapiens
MMRRCTQPTCPLTCAVMPAELWLTR

SEQ ID NO: 15303 - protein, 47 aa, Homo sapiens
MMRRCTQPTCPLTCAVMPAELWLTRCGKIWQRQRPNFIPQTLGGGGS

SEQ ID NO: 15304 - protein, 9 aa, Homo sapiens
RQVSWTSYC

SEQ ID NO: 15305 - protein, 7 aa, Homo sapiens
ILMVKTL

SEQ ID NO: 15306 - protein, 11 aa, Homo sapiens
VSFFPGEQPWH

SEQ ID NO: 15307 - protein, 18 aa, Homo sapiens
MDAFIWDTRFLYPNVSLL

SEQ ID NO: 15308 - protein, 12 aa, Homo sapiens
IKCSICSYQFNI

SEQ ID NO: 15309 - protein, 16 aa, Homo sapiens
VEDFRKPRERKASTQS

SEQ ID NO: 15310 - protein, 37 aa, Homo sapiens
LNISSRPRETVGSSTPSPPPGTGLFSLHNRPRSDLAG

SEQ ID NO: 15311 - protein, 33 aa, Homo sapiens
LGSSVYTTDQEATSQDEKGRFKLHEVCGALPRG

SEQ ID NO: 15312 - protein, 25 aa, Homo sapiens
LLQRHVPHLPGAVPAAVGTRSPTCP

SEQ ID NO: 15313 - protein, 14 aa, Homo sapiens
LECWWPSWCWRSSC

SEQ ID NO: 15314 - protein, 31 aa, Homo sapiens
VICTTSRCHPCPPPLKLQQMRMRKGNYLRTS

SEQ ID NO: 15315 - protein, 10 aa, Homo sapiens
KISIHSKLVF

SEQ ID NO: 15316 - protein, 31 aa, Homo sapiens
VPASQSRPHPQEEEATPPGSWRAGQRAVSAQ

SEQ ID NO: 15317 - protein, 30 aa, Homo sapiens
LGEMMMLLASSSRRQRRWPIRCGNLVQWPE

SEQ ID NO: 15318 - protein, 11 aa, Homo sapiens
RRCPWEPCPRG

SEQ ID NO: 15319 - protein, 39 aa, Homo sapiens
KWPDINQEEENGRNVGKEEEKEENKNNAVNHRCLLKELF

SEQ ID NO: 15320 - protein, 453 aa, Homo sapiens
VAAAAAPAMLCYVTRPDAVLMEVEVEAKANGEDCLNQVCRRLGIIEVDYFGLQFTGSKGESLWLNLRNRISQQMDGLAPYRLKLRVKFFVEPHLILQEQTRHIFFLHIKEALLAGHLLCSPEQAVELSALLAQTKFGDYNQNTAKYNYEELCAKELSSATLNSIVAKHKELEGTSQASAEYQVLQIVSAMENYGIEWHSVRDSEGQKLLIGVGPEGISICKDDFSPINRIAYPVVQMATQSGKNVYLTVTKESGNSIVLLFKMISTRAASGLYRAITETHAFYRCDTVTSAVMMQYSRDLKGHLASLFLNENINLGKKYVFDIKRTSKEVYDHARRALYNAGVVDLVSRNNQSPSHSPLKSSESSMNCSSCEGLSCQQTRVLQEKLRKLKEAMLCMVCCEEEINSTFCPCGHTVCCESCAAQLQSCPVCRSRVEHVQHVYLPTHTSLLNLTVI

SEQ ID NO: 15321 - protein, 35 aa, Homo sapiens
TRIERLHPSSVLHHLHNESQYEAETRRNQREYKGM

SEQ ID NO: 15322 - protein, 34 aa, Homo sapiens
TRIERLHPSSVLHHLHNESQYEAETRRNQREYKE

SEQ ID NO: 15323 - protein, 57 aa, Homo sapiens
VLASHLQLPRLPVSTPRCILPTAPSNLLLTSLETPASRTHCSGEQTRTVPSSRMVSP

SEQ ID NO: 15324 - protein, 8 aa, Homo sapiens
LEKSRKKK

SEQ ID NO: 15325 - protein, 53 aa, Homo sapiens
VRCPRLETSAPGGEESGALQGCCGREHQPGTYPGREKSTPGPPSWQWSLTGAL

SEQ ID NO: 15326 - protein, 22 aa, Homo sapiens
KATMPSGSGPARRCIWQRCWST

SEQ ID NO: 15327 - protein, 37 aa, Homo sapiens
LGFSSPWAECTACSARVIMPSGLEPARQCTWLRCWST

SEQ ID NO: 15328 - protein, 22 aa, Homo sapiens
LQKLRVVVCLRSCLVEAKVVKV

SEQ ID NO: 15329 - protein, 14 aa, Homo sapiens
MDACSNPKALFRAT

SEQ ID NO: 15330 - protein, 43 aa, Homo sapiens
LLRERARERESQDPRHPVLFHCIPPARVGPRWTWIRRGPPYWK

SEQ ID NO: 15331 - protein, 42 aa, Homo sapiens
IPGTQFSSTAFPRRVWDRGGHGSAEVPPIGSKGEHRTEETSD

SEQ ID NO: 15332 - protein, 28 aa, Homo sapiens
LPGPPCPAGGAHSTPWPPPVSLWPWWAL

SEQ ID NO: 15333 - protein, 11 aa, Homo sapiens
LDFLVLWAPWQ

SEQ ID NO: 15334 - protein, 43 aa, Homo sapiens
MTLRNWLSGASWTSQTRTKCTGLFLREPKKEPSSSPWRTRRCP

SEQ ID NO: 15335 - protein, 17 aa, Homo sapiens
MSHDVWTPRPPLARPSL

SEQ ID NO: 15336 - protein, 53 aa, Homo sapiens
VEPELGADSPRHRGTQRRRHVRTGWGCPSEPMRQQGLPPPLRPSGQRAAEPRL

SEQ ID NO: 15337 - protein, 13 aa, Homo sapiens
MELRLCHRDTTGG

SEQ ID NO: 15338 - protein, 20 aa, Homo sapiens
RKPAVLEARGPQRPALHLLP

SEQ ID NO: 15339 - protein, 344 aa, Homo sapiens
IHLLLLSSLLSDKLPSAMTVVSVPQREPLVLGGRLAPLGFSSRGYFGALPMVTTAPPPLPRIPDPRALPPTLFLPHFLGGDGPCLTPQPRAPAALPNRSLAVAGGTPRAAPKKRRKKKVRASPAGQLPSRFHQYQQHRPSLEGGRSPATGPSGAQEVPGPAAALAPSPAAAAGTEGASPDLAPLRPAAPGQTPLRKEVLKSKMGKSEKIALPHGQLVHGIHLYEQPKINRQKSKYNLPLTKITSAKRNENNFWQDSVSSDRIQKQEKKPFKNTENIKNSHLKKSAFLTEVSQKENYAGAKFSDPPSPSVLPKPPSHWMGSTVENSNQNRELMAVHLKTLLKVQT

SEQ ID NO: 15340 - protein, 72 aa, Homo sapiens
IRTGLFSLAQCPRSLCAIQRAPRKLRQLVLDREDGAVDHSLPEEADKAEGSPWLSKASLQAKEASTSSGEKW

SEQ ID NO: 15341 - protein, 29 aa, Homo sapiens
TDRIVFAGPVSPELVCDTESTSEAEAAGT

SEQ ID NO: 15342 - protein, 19 aa, Homo sapiens
MLSGSGPARRCTWRRCWST

SEQ ID NO: 15343 - protein, 14 aa, Homo sapiens
RKFIVWVQKMLMES

SEQ ID NO: 15344 - protein, 33 aa, Homo sapiens
REMSTPAKWSTPAWIVLSPWSGRHSLILPGVRH

SEQ ID NO: 15345 - protein, 11 aa, Homo sapiens
RMENTARCVLK

SEQ ID NO: 15346 - protein, 31 aa, Homo sapiens
ILTKRLYQFWCQLEKVLLKLKQMSFLAMGAT

SEQ ID NO: 15347 - protein, 40 aa, Homo sapiens
MASTPPAPTTGTATCSWTASLCTTMKPQVANMFLVPSWWI

SEQ ID NO: 15348 - protein, 52 aa, Homo sapiens
MLTSASWQSTWSPSHVSISLCLALPLSPAVEASSIELSQCRNSPSRSSMPRT

SEQ ID NO: 15349 - protein, 37 aa, Homo sapiens
ITPPADPASERARPQASMERRLRPVPAPTPACGALLP

SEQ ID NO: 15350 - protein, 53 aa, Homo sapiens
LQHPQKANHCHFRQNAKKFGIRFQFRPFESGWNLLASPLACPGMLQIPHCSRL

SEQ ID NO: 15351 - protein, 130 aa, Homo sapiens
INATMPEPTKSAPAPKKGSKKAVTKAQKKDGKKRKRSRKESYSVYVYKVLKQVHPDTGISSKAMGIMNSFVNDIFERIAGEASRLAHYNKRSTITSREIQTAVRLLLPGELAKHAVSEGTKAVTKYTSSK

SEQ ID NO: 15352 - protein, 15 aa, Homo sapiens
RSTPTPASPLKPWGS

SEQ ID NO: 15353 - protein, 106 aa, Homo sapiens
VLVMSGRGKGGKGLGKGGAKRHRKVLRDNIQGITKPAIRRLARRGGVKRISGLIYEETRGVLKVFLENVIRDAVTYTEHAKRKTVTAMDVVYALKRQGRTLYGFGG

SEQ ID NO: 15354 - protein, 22 aa, Homo sapiens
RMDRRTACLPPCLPPAPSFCQG

SEQ ID NO: 15355 - protein, 15 aa, Homo sapiens
VLAFILPTWWQRKWL

SEQ ID NO: 15356 - protein, 14 aa, Homo sapiens
LSCCAIIPPSLEMR

SEQ ID NO: 15357 - protein, 7 aa, Homo sapiens
IWTICQL

SEQ ID NO: 15358 - protein, 55 aa, Homo sapiens
TASITSTVSSATGAGRPLAAGTPRAARSRCAALCTGRGAPTGRALPSCCSRAPRR

SEQ ID NO: 15359 - protein, 23 aa, Homo sapiens
RPARLTWWGSLRTPTCVLSTPSE

SEQ ID NO: 15360 - protein, 8 aa, Homo sapiens
LLSHVWPW

SEQ ID NO: 15361 - protein, 22 aa, Homo sapiens
RWCVRSTGDSPSPRPSGECIGT

SEQ ID NO: 15362 - protein, 27 aa, Homo sapiens
IETLQTTSSDCKHNMSCAPMLVNSCCN

SEQ ID NO: 15363 - protein, 14 aa, Homo sapiens
MRRLVAFSRCFWRT

SEQ ID NO: 15364 - protein, 15 aa, Homo sapiens
KTVCQIVSETCSTKT

SEQ ID NO: 15365 - protein, 52 aa, Homo sapiens
LGARRSGRLWKPCASASRLPGLGDAPPLAVPGPGGPLLSWGDGHSILYGPPH

SEQ ID NO: 15366 - protein, 136 aa, Homo sapiens
VWQEGMGHEQNQGAALLQMLPLLWLLPHSWAVPEAPTPMWPDDLQNHTFLHTVYCQDGSPSVGLSEAYDEDQLFFFDFSQNTRVPRLPEFADWAQEQGDAPAILFDKEFCEWMIQQIGPKLDGKIPVSRGQEFSGE

SEQ ID NO: 15367 - protein, 17 aa, Homo sapiens
VRSRRTSRLICVFRARR

SEQ ID NO: 15368 - protein, 115 aa, Homo sapiens
LVPLPPPIPSFRHLCRVVPSLPGAPSSPPTGLPFPAGLSPPRFPQPFSLPAEPRRQQQQQQQQEEEPGGGGGRGAHGVQSRRRQKKSLLLLRRLHPAISSESVILEIIIMDRVIP

SEQ ID NO: 15369 - protein, 68 aa, Homo sapiens
IAPTFPSALFSPGRAAAAAAAAAAAGGGARWRRWPGSPWRTVKEAAKKKSATTTTVILEIIIMDRVIP

SEQ ID NO: 15370 - protein, 15 aa, Homo sapiens
KGTQTCLSNYFSTTQ

SEQ ID NO: 15371 - protein, 14 aa, Homo sapiens
LQAPGWDSVFAAAG

SEQ ID NO: 15372 - protein, 41 aa, Homo sapiens
RILTRNRKCRNQSMSELPPWMQSWSLQSSQIQLENSFLIRW

SEQ ID NO: 15373 - protein, 71 aa, Homo sapiens
IARVRSTPSQPLLWSPVGRGAAILVARGVSRIRRVSLPSRWRGLCPCSVTAALGKRSAPKTLWLQLRLPIL

SEQ ID NO: 15374 - protein, 53 aa, Homo sapiens [sequence omitted]

SEQ ID NO: 15375 - protein, 53 aa, Homo sapiens
LPGTSDPSGPSCVDYHCFSLRLSYVLEEGFADPRRPSGSNCHLDAGDAELPTG

SEQ ID NO: 15376 - protein, 21 aa, Homo sapiens
LPPAMMWRKTTAVSNLVSRAW

SEQ ID NO: 15377 - protein, 32 aa, Homo sapiens
MSEPAGGRGSEKRIGSWASVMRQAHLSVLACC

SEQ ID NO: 15378 - protein, 73 aa, Homo sapiens
TASADRALGSDVCAGAKPPWPTTASWWSPSAATPGTRTAPRLPSAPTTMRCISMKRAVPNGPRCTSSRSTTGR

SEQ ID NO: 15379 - protein, 38 aa, Homo sapiens
TSAREPSRHGLPQLPGGAHQLPRLEQGPHPDCHLPQQP

SEQ ID NO: 15380 - protein, 60 aa, Homo sapiens
VAAAPARSPEPVRRVDCPESAAGAREEPSRHGLPQLPGGAHQLPRLEQGPHPDCHLPQQP

SEQ ID NO: 15381 - protein, 95 aa, Homo sapiens
LLPRLECGDTTLTHCSICLPGSSDSPASASQVAGITGAKPPWPTTASWWSPSAATPGTRTAPRLPSAPTTMRCISMKRAVPNGPRCTSSRSTTGR

SEQ ID NO: 15382 - protein, 14 aa, Homo sapiens
RRPPETRRARSGLR

SEQ ID NO: 15383 - protein, 11 aa, Homo sapiens
RAPSLISGSSP

SEQ ID NO: 15384 - protein, 36 aa, Homo sapiens
RTAGSPCRLRQMTMAASPWTVTCSVGSATLLEPRPE

SEQ ID NO: 15385 - protein, 14 aa, Homo sapiens
MSPKQLPVWFLKDP

SEQ ID NO: 15386 - protein, 29 aa, Homo sapiens
VTPPFPRPASVRRAGGRAPLGQEAPLGRV

SEQ ID NO: 15387 - protein, 28 aa, Homo sapiens
TFPCPGPPCWRPTVPRTLTPRPGAAVLR

SEQ ID NO: 15388 - protein, 17 aa, Homo sapiens
IIACCRGASCSSRLGWS

SEQ ID NO: 15389 - protein, 24 aa, Homo sapiens
LAPLYIFLRRRHGGEHRTTVSYGK

SEQ ID NO: 15390 - protein, 27 aa, Homo sapiens
LAPLYIFLRRRHGGEHRTTVSYADTLL

SEQ ID NO: 15391 - protein, 85 aa, Homo sapiens
IRRASSTTMPGTMWSGRKSKPRRRREKSRRTVSSGCARRNKLIMRSMPTNTGMTSTKSTKMGFSRIDIGFLPNSLSWHLAKIKII

SEQ ID NO: 15392 - protein, 20 aa, Homo sapiens
IPDAVVAVRGPPCATRPSPW

SEQ ID NO: 15393 - protein, 16 aa, Homo sapiens
LCSSRCWKEGMRSCAF

SEQ ID NO: 15394 - protein, 28 aa, Homo sapiens
MMNYSWSWNQCAMTWSAASRPQWRCWGS

SEQ ID NO: 15395 - protein, 35 aa, Homo sapiens
LAPAAGTTQAGMEGLPEGLRFPDKLRIRCMVTLLL

SEQ ID NO: 15396 - protein, 39 aa, Homo sapiens
LASLVLSRWRSKKRKRSGGEAAGKMQPPSTPPPCHRASG

SEQ ID NO: 15397 - protein, 57 aa, Homo sapiens
TERQRPRGAEERRHGPSRVTREETRDTHSLAATGSRGGLGRPLPHQSPDPWGFRGRS

SEQ ID NO: 15398 - protein, 35 aa, Homo sapiens
ILSFPRSKTSEPAKRGRTALGSDGTEGLRAREGKG

SEQ ID NO: 15399 - protein, 55 aa, Homo sapiens
VDDHLPASLVPSIGRSGGDLGLQCFRRSEWRRRLGCCCWACCRRVGRCWARRWRR

SEQ ID NO: 15400 - protein, 15 aa, Homo sapiens
TASALQGKKSAMILD

SEQ ID NO: 15401 - protein, 29 aa, Homo sapiens
TERGEAHFSPSSQPRQGARGARPLSSGPR

SEQ ID NO: 15402 - protein, 31 aa, Homo sapiens
ISGHGCPRPPGMFPNKESQLPSSHSSRLLPR

SEQ ID NO: 15403 - protein, 14 aa, Homo sapiens
MDFTSWSSLPQVWR

SEQ ID NO: 15404 - protein, 27 aa, Homo sapiens
MIFLRSRHQELEGEEQRLHIRSHTVDT

SEQ ID NO: 15405 - protein, 22 aa, Homo sapiens
KKSALVRRSSGWRGPSGEWAPS

SEQ ID NO: 15406 - protein, 12 aa, Homo sapiens
IGKLNILMLLGH

SEQ ID NO: 15407 - protein, 15 aa, Homo sapiens
LLTMISLTRSSLGTE

SEQ ID NO: 15408 - protein, 28 aa, Homo sapiens
TRIYKSFKCYQTGTSICKTIPCFAGWSP

SEQ ID NO: 15409 - protein, 29 aa, Homo sapiens
RLLVPASARRAGQAALVCDLQAGRPSSPE

SEQ ID NO: 15410 - protein, 16 aa, Homo sapiens
TCQLYGPVFAENKHHP

SEQ ID NO: 15411 - protein, 31 aa, Homo sapiens
RKANQRFRFLTLCQKTIKCRVEELSITEDSS

SEQ ID NO: 15412 - protein, 19 aa, Homo sapiens
LGKKNISFLCREYPCSGSL

SEQ ID NO: 15413 - protein, 26 aa, Homo sapiens
VPHSQPLETGALRETHCPRDPTAPLV

SEQ ID NO: 15414 - protein, 65 aa, Homo sapiens
LQPGTRVAWRWARSAFSVWRAAVPPAMIYTHRTRMRFVKQYCYGGAAEKGRGFEREQKKMVGARS

SEQ ID NO: 15415 - protein, 22 aa, Homo sapiens
IDLSVQSNLYWKYFFISAMLHI

SEQ ID NO: 15416 - protein, 90 aa, Homo sapiens
LVAAPESRAPWVWPLAPAVFSCTALLRSCCARTLQSGPVPQHVLSRRGAISFSSSSALFGCPNPRQLSQRRGAISYDSSDQTALYIRMLA

SEQ ID NO: 15417 - protein, 28 aa, Homo sapiens
TLPGVSRGALTLSPPTSLSHPALPGLGF

SEQ ID NO: 15418 - protein, 7 aa, Homo sapiens
LDLATHL

SEQ ID NO: 15419 - protein, 13 aa, Homo sapiens
ITGYSSSQLKWLA

SEQ ID NO: 15420 - protein, 11 aa, Homo sapiens
RNQVGYSYIMT

SEQ ID NO: 15421 - protein, 12 aa, Homo sapiens
LSQGTPTTEWCS

SEQ ID NO: 15422 - protein, 10 aa, Homo sapiens
LKAIGTNNLY

SEQ ID NO: 15423 - protein, 27 aa, Homo sapiens
RTSNSSISSVMLSMSPLLKSQAASRSQ

SEQ ID NO: 15424 - protein, 46 aa, Homo sapiens
LPKSLRPMKFCCSKELHSWLFPTTSAKSSATSTGLRRSATSSNSSS

SEQ ID NO: 15425 - protein, 25 aa, Homo sapiens
MEFWWMNLDCHRSLLHRFASFKHIL

SEQ ID NO: 15426 - protein, 10 aa, Homo sapiens
MYFKQKAANY

SEQ ID NO: 15427 - protein, 61 aa, Homo sapiens
TKFSLMQRKGNYMTKEENRQLKRVEQVAVLAPPWTSLICFLEEEEGCREKGEVKMLYISSQ

SEQ ID NO: 15428 - protein, 18 aa, Homo sapiens
VEETWCPTESRLGSLHDS

SEQ ID NO: 15429 - protein, 38 aa, Homo sapiens
MSQNHIFFSLDDLFQKINKNEVYLGIVKSFSNLMYMCI

SEQ ID NO: 15430 - protein, 27 aa, Homo sapiens
LAAAPWTPPGRWSTLGLVPPSCRTQCC

SEQ ID NO: 15431 - protein, 14 aa, Homo sapiens
LPTQPALFPASRSL

SEQ ID NO: 15432 - protein, 18 aa, Homo sapiens
IRTCCSSPRRTSLAAATS

SEQ ID NO: 15433 - protein, 19 aa, Homo sapiens
VGRWAGDWFVHGDRDQKWA

SEQ ID NO: 15434 - protein, 10 aa, Homo sapiens
LVIPFHTWTP

SEQ ID NO: 15435 - protein, 20 aa, Homo sapiens
RASKTSQLRAWLLAVRAAVQ

SEQ ID NO: 15436 - protein, 14 aa, Homo sapiens
MAFGCQGSCTIVDV

SEQ ID NO: 15437 - protein, 19 aa, Homo sapiens
IPSRPRCSAQQGCATMPGG

SEQ ID NO: 15438 - protein, 9 aa, Homo sapiens
RGRAGLLGR

SEQ ID NO: 15439 - protein, 59 aa, Homo sapiens
TALAAQAGTPLPPPPPPRKVKFEEGGRGEHGHEEEDPPGAEEPDPGSCSRTCLGQLQIK

SEQ ID NO: 15440 - protein, 53 aa, Homo sapiens
RRLRRRWPRAFSHWGKQGSSVNSLFTPSLSCGLSHCVHLLFSLSTSMLYRHHH

SEQ ID NO: 15441 - protein, 10 aa, Homo sapiens
LNKPCGQHCI

SEQ ID NO: 15442 - protein, 18 aa, Homo sapiens
IQRLAVSPGGKIVPISKM

SEQ ID NO: 15443 - protein, 50 aa, Homo sapiens
ISSKGTNHQRTNSSRQINSTRRENSSQMVEAMNQQPRSPNGMTSKRRRKN

SEQ ID NO: 15444 - protein, 7 aa, Homo sapiens
LLSEKAW

SEQ ID NO: 15445 - protein, 24 aa, Homo sapiens
RTGLPRRGKYECSGGNLSPWRLRV

SEQ ID NO: 15446 - protein, 28 aa, Homo sapiens
VLCILRCPGLPALVSAGSSLLACSLLLA

SEQ ID NO: 15447 - protein, 7 aa, Homo sapiens
IRGRDGG

SEQ ID NO: 15448 - protein, 27 aa, Homo sapiens
MESFTCASWTLTRQATVWRTLSMPSPS

SEQ ID NO: 15449 - protein, 34 aa, Homo sapiens
ISIGPYSRSSDSSSQDGEADREQDCFSGSLGRCR

SEQ ID NO: 15450 - protein, 39 aa, Homo sapiens
RGSCVCLRTLLLSSTRRWRPPTWPWPPLSTRASWTVSAS

SEQ ID NO: 15451 - protein, 11 aa, Homo sapiens
VEDHQCHQAVP

SEQ ID NO: 15452 - protein, 74 aa, Homo sapiens
LGTAPPGGCEAWGSWPGWLCSLPSGSCGCWGQPLGVPRHPSPRSPSLSGTGPSLTSPQSCPATPAPATASPAAT

SEQ ID NO: 15453 - protein, 11 aa, Homo sapiens
LTPLKPRRMTW

SEQ ID NO: 15454 - protein, 19 aa, Homo sapiens
IDLLGCFASVRGKRRGLYF

SEQ ID NO: 15455 - protein, 72 aa, Homo sapiens
VERRGGGAAEETPGEELRAGGGRADSGLSAVAGISGGKGIAGEGDQRAAPAARSAPSRPLHHELGHRALGSV

SEQ ID NO: 15456 - protein, 24 aa, Homo sapiens
ILFGDHQRLNMAEGCHVCSKLRQH

SEQ ID NO: 15457 - protein, 32 aa, Homo sapiens
TAEAESNSAPVRLLSERNFYTVCLQRQSIGML

SEQ ID NO: 15458 - protein, 9 aa, Homo sapiens
IAEMQCGTQ

SEQ ID NO: 15459 - protein, 30 aa, Homo sapiens
LIFWRGPSWRRSQIRLRRRKRRRGRTSRWW

SEQ ID NO: 15460 - protein, 22 aa, Homo sapiens
RLSSRREAEMLQRSLGKCKKRS

SEQ ID NO: 15461 - protein, 46 aa, Homo sapiens
LRRLRGGRSGGSGGCCSPGGCREGGRGNTKPATRCEITRVIHRLKT

SEQ ID NO: 15462 - protein, 36 aa, Homo sapiens
LKMMIMAHQLLLTHLVISQKENLKSIRGQSNVNNKA

SEQ ID NO: 15463 - protein, 14 aa, Homo sapiens
RMICMMLKMSLLSE

SEQ ID NO: 15464 - protein, 32 aa, Homo sapiens
VPRPRTPWPWTPWPWAPAGRAARGRWPAAAAA

SEQ ID NO: 15465 - protein, 35 aa, Homo sapiens
MTRVAQLKSFPSSTLEVPTMHPSASSSPTCTSQPC

SEQ ID NO: 15466 - protein, 13 aa, Homo sapiens
ILKTSFCHAAPVR

SEQ ID NO: 15467 - protein, 29 aa, Homo sapiens
LSPPPPALTSTRDRPRQSTPRTLPLLGSG

SEQ ID NO: 15468 - protein, 90 aa, Homo sapiens
VQGAAAQRVPAGFETAVLRRPRTPLRSLSPLESDPGIREPRCRPTCCRTISLAPIPPPPPLQRLPPGSCRMEEISWRRCPSTWKTTFALI

SEQ ID NO: 15469 - protein, 15 aa, Homo sapiens
LAGEQCCPPLRISSL

SEQ ID NO: 15470 - protein, 39 aa, Homo sapiens
ILGSRTWPEPLDRAGPSPETWRVATTQVWMVLLNMMISN

SEQ ID NO: 15471 - protein, 13 aa, Homo sapiens
KQNLAGATRQSRA

SEQ ID NO: 15472 - protein, 7 aa, Homo sapiens
RKAGCLL

SEQ ID NO: 15473 - protein, 10 aa, Homo sapiens
MVERKTLSVI

SEQ ID NO: 15474 - protein, 7 aa, Homo sapiens
RNSLQTG

SEQ ID NO: 15475 - protein, 7 aa, Homo sapiens
LFYEYVL

SEQ ID NO: 15476 - protein, 35 aa, Homo sapiens
KKTCRAISSLRNTARWSSVTCGRGLELMIKISRIP

SEQ ID NO: 15477 - protein, 23 aa, Homo sapiens
MISLMRAKRFILMTTTRRSSWKN

SEQ ID NO: 15478 - protein, 14 aa, Homo sapiens
TSLQEIPSVCCQLR

SEQ ID NO: 15479 - protein, 21 aa, Homo sapiens
TGPATVGRTAWVAMTSFVRNI

SEQ ID NO: 15480 - protein, 21 aa, Homo sapiens
LFFHSLARRLHPTVFFSLFWS

SEQ ID NO: 15481 - protein, 128 aa, Homo sapiens
VCAERGGRSLPGGGMKMKVFRMEGSQLNFQEKYVNRSQHVVSQDLASLLTLMRKLKIPRPIQKSLKEKFQEILRYISRMSKKTVPQMTQKTVLLREQLMFIPQNMLDVMAEMQLIPFLGILKKFPALN

SEQ ID NO: 15482 - protein, 120 aa, Homo sapiens
LIVPSGMKMKVFRMEGSQLNFQEKYVNRSQHVVSQDLASLLTLMRKLKIPRPIQKSLKEKFQEILRYISRMSKKTVPQMTQKTVLLREQLMFIPQNMLDVMAEMQLIPFLGILKKFPALN

SEQ ID NO: 15483 - protein, 32 aa, Homo sapiens
MFQKKKWCFGSKSDCCKIMGRCSKTWCKTNTN

SEQ ID NO: 15484 - protein, 34 aa, Homo sapiens
KLILKKYMCLLDPTECSTTSFPTKKWTLRKIFQE

SEQ ID NO: 15485 - protein, 32 aa, Homo sapiens
ISPTRTNRHCHEHKEMPQDTSQERSKRGALSS

SEQ ID NO: 15486 - protein, 8 aa, Homo sapiens
KMETAEQP

SEQ ID NO: 15487 - protein, 50 aa, Homo sapiens
LKRQGKGGLTEHRPSIRTPQRPFAPRRKPHFSNLHSTLPSPKPEDAQGGT

SEQ ID NO: 15488 - protein, 11 aa, Homo sapiens
MSSGPCSTPSS

SEQ ID NO: 15489 - protein, 26 aa, Homo sapiens
MTTPLPFKVMMLDSVAWVPPEGKLGR

SEQ ID NO: 15490 - protein, 25 aa, Homo sapiens
MRWWPEPGGSSSSTRKLGSARTEFL

SEQ ID NO: 15491 - protein, 13 aa, Homo sapiens
MEKTLKTSLPRVS

SEQ ID NO: 15492 - protein, 29 aa, Homo sapiens
IELGAKTHLFTILVLCKSSYLSGSQLSHL

SEQ ID NO: 15493 - protein, 55 aa, Homo sapiens
ISSLFWYCASHLTSLDLSCLICKKEIKIIYLPEHEVEDHPATVLLSLDYMFTYCS

SEQ ID NO: 15494 - protein, 40 aa, Homo sapiens
LRRADHLRSGVQDQPGQHDEVEDHPATVLLSLDYMFTYCS

SEQ ID NO: 15495 - protein, 12 aa, Homo sapiens
VTEPRAVQSDAD

SEQ ID NO: 15496 - protein, 26 aa, Homo sapiens
LLLCGRHVGTGRSGPCDQLHWFRGSI

SEQ ID NO: 15497 - protein, 13 aa, Homo sapiens
IGEEGAGRGGSRL

SEQ ID NO: 15498 - protein, 51 aa, Homo sapiens
LRQRQQDGTVKESGRLAGSAVSAEPLQPWPQSRWEMPSQQWRCLKGSQGTR

SEQ ID NO: 15499 - protein, 21 aa, Homo sapiens
LLAGGLGPWLRRQVWCPDGQS

SEQ ID NO: 15500 - protein, 16 aa, Homo sapiens
RTWQMNLLLLMSSKTN

SEQ ID NO: 15501 - protein, 22 aa, Homo sapiens
KIRNSGKRFTSRWLRGSLRNKG

SEQ ID NO: 15502 - protein, 19 aa, Homo sapiens
MAKNIRTSSGWTSRWARWQ

SEQ ID NO: 15503 - protein, 46 aa, Homo sapiens
MMPYSATPKLLSWIPTTTCCTATVLLPMPRKETTRRLMRMAARLST

SEQ ID NO: 15504 - protein, 40 aa, Homo sapiens
LPATPNSWSSSWHSRTVRNVSSWSRPSSRVIHGKPLRWKR

SEQ ID NO: 15505 - protein, 7 aa, Homo sapiens
LAHSPIM

SEQ ID NO: 15506 - protein, 35 aa, Homo sapiens
ILPLCRIEIVPVFGKDFKMSDSYLEQRANNQSTAN

SEQ ID NO: 15507 - protein, 49 aa, Homo sapiens
KETQTQQLFRMQQKIFKEMTDGCLSTTDLFWTVKTKSLMYCSWETPWCS

SEQ ID NO: 15508 - protein, 158 aa, Homo sapiens
LGSQGSSARKAGTLPSAGEKAGGGGAVGGVGEDKSRKRRGPGLHTPAGRQPSVQRAAGAGRPQCTGRHSRQAAWGREGTRARGPPSARCRCPPSAGRRFRSITCAPTGGWSLTARFTTSPNGPSSTRGASGSSGTTLEKMQRMPSAPSTLTWNSWASS

SEQ ID NO: 15509 - protein, 8 aa, Homo sapiens
LNTRRSRY

SEQ ID NO: 15510 - protein, 16 aa, Homo sapiens
RRSLRKPQISFFLFER

SEQ ID NO: 15511 - protein, 10 aa, Homo sapiens
IERKDYRAPN

SEQ ID NO: 15512 - protein, 8 aa, Homo sapiens
VQKLEGKA

SEQ ID NO: 15513 - protein, 67 aa, Homo sapiens
RCYTEVDSVNLGRQQQTGFQEPVFDEARTEEQASKQQFVVKIGKESRSQCDLVKEARKKEGALTIWW

SEQ ID NO: 15514 - protein, 9 aa, Homo sapiens
TEEASRRCA

SEQ ID NO: 15515 - protein, 42 aa, Homo sapiens
LGSSGLRRLCCVPMFRLPQTGISSLSEELLHFIWEQKTAGSC

SEQ ID NO: 15516 - protein, 19 aa, Homo sapiens
LCLQIQMSWPAHRQPSCRS

SEQ ID NO: 15517 - protein, 13 aa, Homo sapiens
MKACTSAYITATL

SEQ ID NO: 15518 - protein, 76 aa, Homo sapiens
RSMPRMPWEFPAQRMTTSCGHHLMSGGMSVCWDTRLFSNGGPPMPHASMERTLTGRWSCPTAPAPGRTMSVTSVSR

SEQ ID NO: 15519 - protein, 29 aa, Homo sapiens
MSFLLGSWLKMATLELRCELHQPGQKSLS

SEQ ID NO: 15520 - protein, 64 aa, Homo sapiens
IPAISARPRRPSPTRPPPPCSPPAFCRSPSACWLHPPPRSSGSRCTSSRPSAGPCRRLGALWRT

SEQ ID NO: 15521 - protein, 38 aa, Homo sapiens
LTLFPQRSGLPGRSALAEKTRTAPTAGRWGKGHSSPPP

SEQ ID NO: 15522 - protein, 25 aa, Homo sapiens
RTSGKARKQATTAPTQLKHQGFNWI

SEQ ID NO: 15523 - protein, 60 aa, Homo sapiens
RMVSRKCSPRLSGLCSTPRRSSVGGPASSCDPGTWLGGCPCPPPTSCALVPCPPQLCLKD

SEQ ID NO: 15524 - protein, 36 aa, Homo sapiens
IPCFRILPCVSPTLDPMTPNTVFLSSVLYIFFSLKV

SEQ ID NO: 15525 - protein, 20 aa, Homo sapiens
LLMLDCYGYGPSHFPNLSIC

SEQ ID NO: 15526 - protein, 46 aa, Homo sapiens
MPLKRFVTVTSGESWKKERELLQERKIGIVQPENIQPPLQCQKSHG

SEQ ID NO: 15527 - protein, 33 aa, Homo sapiens
LPRPETTRELRERKGLACQRNFPSAQTPGLRRL

SEQ ID NO: 15528 - protein, 11 aa, Homo sapiens
ICQKLGSPWAL

SEQ ID NO: 15529 - protein, 15 aa, Homo sapiens
MPRIPLWPSTSTRAL

SEQ ID NO: 15530 - protein, 74 aa, Homo sapiens
RPTMSSSCCTCCTSCCWMVQPGSPFGSLGRPFCPSSSVRCCSVQFRPRLAGCSMTLGTCRSSAPQSGTICYIIL

SEQ ID NO: 15531 - protein, 21 aa, Homo sapiens
MRIFVFLPGTFLKFEMPSFTF

SEQ ID NO: 15532 - protein, 22 aa, Homo sapiens
KRAYEAVKPRALNAVTKDGSSL

SEQ ID NO: 15533 - protein, 27 aa, Homo sapiens
RIATPMRLTTLSLWKAFRRGSHLSPVP

SEQ ID NO: 15534 - protein, 29 aa, Homo sapiens
ISRPGAQSSKGWEVGGREKRTSGWVGTGQ

SEQ ID NO: 15535 - protein, 38 aa, Homo sapiens
KLLSRGGVFYGSDKDEGNCRSLPWEDCYQCCGHSASLL

SEQ ID NO: 15536 - protein, 56 aa, Homo sapiens
RITTCLASLNSQACQEECLGDFLVVELLPLVVLPQGPPLKRLIKPTKCRCSIVPHI

SEQ ID NO: 15537 - protein, 23 aa, Homo sapiens
MSLLWTRVREKRTRLLSLMTRAV

SEQ ID NO: 15538 - protein, 36 aa, Homo sapiens
KTLNVWSRKLRSTKLKMRSRGTRCHPRIHLSPMPST

SEQ ID NO: 15539 - protein, 14 aa, Homo sapiens
RRGPHSVSPDIKHS

SEQ ID NO: 15540 - protein, 37 aa, Homo sapiens
RRGPHSVSPASCLVPSQTAPASLENQPHLSPSACPPR

SEQ ID NO: 15541 - protein, 11 aa, Homo sapiens
LFETGVTDGNF

SEQ ID NO: 15542 - protein, 8 aa, Homo sapiens
TTASLCRR

SEQ ID NO: 15543 - protein, 16 aa, Homo sapiens
MEWKETSGRPRAVPSQ

SEQ ID NO: 15544 - protein, 24 aa, Homo sapiens
KENSKAQKWTLMPQMWMFMAQTGT

SEQ ID NO: 15545 - protein, 24 aa, Homo sapiens
MLNLKVPKWTLMSQMWRFKAQTGT

SEQ ID NO: 15546 - protein, 32 aa, Homo sapiens
LAPEDAQDENAQVQHAWLQSRGPRSGCEPAQG

SEQ ID NO: 15547 - protein, 10 aa, Homo sapiens
MLTWILKDPK

SEQ ID NO: 15548 - protein, 11 aa, Homo sapiens
LASKERAEKWM

SEQ ID NO: 15549 - protein, 27 aa, Homo sapiens
KCQMLTLKGPKLTLVLQMWMFMAQIGT

SEQ ID NO: 15550 - protein, 13 aa, Homo sapiens
VFQDPRWTLMFQM

SEQ ID NO: 15551 - protein, 15 aa, Homo sapiens
IYRRTKSLCLMLDLI

SEQ ID NO: 15552 - protein, 27 aa, Homo sapiens
KCQMLTLKGPKWTLMPQMWRFTTQIGT

SEQ ID NO: 15553 - protein, 32 aa, Homo sapiens
LAPEDAQDENAQVQHAWLQSRGPRSGCELAQG

SEQ ID NO: 15554 - protein, 27 aa, Homo sapiens
KCQMLTSEGPKWTLMPQMWMFMAQTGT

SEQ ID NO: 15555 - protein, 7 aa, Homo sapiens
RQKERWM

SEQ ID NO: 15556 - protein, 11 aa, Homo sapiens
RATCGCQWARH

SEQ ID NO: 15557 - protein, 9 aa, Homo sapiens
LASKQRALK

SEQ ID NO: 15558 - protein, 9 aa, Homo sapiens
RTRGKVERA

SEQ ID NO: 15559 - protein, 26 aa, Homo sapiens
RLTLMSQAPKWTLKALMLTLKDQRES

SEQ ID NO: 15560 - protein, 17 aa, Homo sapiens
KWTLMSRMWAFKAQTGT

SEQ ID NO: 15561 - protein, 13 aa, Homo sapiens
ISKLPRSPCLTLT

SEQ ID NO: 15562 - protein, 8 aa, Homo sapiens
ILKVQMRN

SEQ ID NO: 15563 - protein, 8 aa, Homo sapiens
ISKVQTQN

SEQ ID NO: 15564 - protein, 12 aa, Homo sapiens
RTKSEREPWGHW

SEQ ID NO: 15565 - protein, 19 aa, Homo sapiens
RSSRHWCSRPRRKPPDAWN

SEQ ID NO: 15566 - protein, 14 aa, Homo sapiens
RRECETPNWADFWA

SEQ ID NO: 15567 - protein, 22 aa, Homo sapiens
RETREAEIRYLWWIGVKEQRSL

SEQ ID NO: 15568 - protein, 80 aa, Homo sapiens
LDTELSPCTRILKTGGPSRLSSLLSTAGLRSACSPHHPTSILAKPTAPLNFSANFLPARSQHLRVMMDSVCLRATPLPTM

SEQ ID NO: 15569 - protein, 7 aa, Homo sapiens
LDHKKKK

SEQ ID NO: 15570 - protein, 21 aa, Homo sapiens
ICNSWVLSACSWPPNSKRPAR

SEQ ID NO: 15571 - protein, 62 aa, Homo sapiens
LDSSSVCSSPGPCSASAENSGAGDDPPDPQGHGEGEGAGQRDGGAAHRPRASDCCPGQELLQ

SEQ ID NO: 15572 - protein, 41 aa, Homo sapiens
IVAGPVLRFSPSPTFLPPSLSLPRRLLLAGRRLPDPSLTPP

SEQ ID NO: 15573 - protein, 95 aa, Homo sapiens
IALLFLLPSPALVSGRGPGAARGTAAEERKDNDDPQLASPVAGFAAAMAMRQTPLTCSGHTRPVVDLAFSGITPYGYFLISACKAKCGMLSQEMN

SEQ ID NO: 15574 - protein, 11 aa, Homo sapiens
ITSMWVWPRPT

SEQ ID NO: 15575 - protein, 10 aa, Homo sapiens
RPFLNLDVPK

SEQ ID NO: 15576 - protein, 40 aa, Homo sapiens
LHKDCPGLRAGNLAGLAGAAPPPWPPAPRGGRPRATGPAA

SEQ ID NO: 15577 - protein, 31 aa, Homo sapiens
LAAALCRSLSVWQQCGRGPSLCSLVSSVTRP

SEQ ID NO: 15578 - protein, 33 aa, Homo sapiens
RYSMSGLMPLLAICPSQPTTQTSGRDGGRTQSK

SEQ ID NO: 15579 - protein, 49 aa, Homo sapiens
RYSMSGLMPLLAICPSQPTTQTSGRDGGRTQSKWTCISSWPKTMFLSIA

SEQ ID NO: 15580 - protein, 36 aa, Homo sapiens
RYSMSGLMPLLAICPSQPTTQTSGRDGGRTQSNPRS

SEQ ID NO: 15581 - protein, 37 aa, Homo sapiens
RQYHCWIGYEGRHHWRYGYPGYNRKFSSEATGSSECS

SEQ ID NO: 15582 - protein, 23 aa, Homo sapiens
IQPKRSKWFWKLWWWSWRWFRWE

SEQ ID NO: 15583 - protein, 35 aa, Homo sapiens
VAEKAAGRRRRRRRRLWRPQSGSWLRPQPHHGDAC

SEQ ID NO: 15584 - protein, 16 aa, Homo sapiens
VEAAVRVLASASAPPW

SEQ ID NO: 15585 - protein, 23 aa, Homo sapiens
VLAPPPGDRCSRPAPFSTALPTR

SEQ ID NO: 15586 - protein, 48 aa, Homo sapiens
LSSLPAQTSCTSSFPAPPSSPEAPRMVVSPRPQWAGCRDPAQGPRCPR

SEQ ID NO: 15587 - protein, 37 aa, Homo sapiens
IFFCVASRATSLRHHGEGEGRSQRIWSYWAPGHQGCF

SEQ ID NO: 15588 - protein, 10 aa, Homo sapiens
LLMPPCSSWV

SEQ ID NO: 15589 - protein, 25 aa, Homo sapiens
RTHDHSPCHHCHPEDCGWPLRETVA

SEQ ID NO: 15590 - protein, 13 aa, Homo sapiens
MSASQLVSQCRTR

SEQ ID NO: 15591 - protein, 10 aa, Homo sapiens
TQVERNTGLD

SEQ ID NO: 15592 - protein, 38 aa, Homo sapiens
LEDEHGSKARTMTRKISTFPWWRARPCMAPAMQSPRAW

SEQ ID NO: 15593 - protein, 34 aa, Homo sapiens
RHRERAWSLEAGSRFSTFISFTVEGRQRKRKGCA

SEQ ID NO: 15594 - protein, 26 aa, Homo sapiens
LAPSPIPRRVFTGDSELWLLQFPTTL

SEQ ID NO: 15595 - protein, 12 aa, Homo sapiens
LSPGLLWRDDWL

SEQ ID NO: 15596 - protein, 8 aa, Homo sapiens
LPVLRSQS

SEQ ID NO: 15597 - protein, 26 aa, Homo sapiens
MLSPCGKAVTVHSCLKQQWTRSSLEF

SEQ ID NO: 15598 - protein, 16 aa, Homo sapiens
KNQKSRKVERVSLGRK

SEQ ID NO: 15599 - protein, 210 aa, Homo sapiens
TPSLPLSLPPGEEARGGCSAVGAAPPSPSRPGPPPHAAPMHPFYTRAATMIGEIAAAVSFISKFLRTKGLTSERQLQTFSQSLQELLAEHYKHHWFPEKPCKGSGYRCIRINHKMDPLIGQAAQRIGLSSQELFRLLPSELTLWVDPYEVSYRIGEDGSICVLYEASPAGGSTQNSTNVQMVDSRISCKEELLLGRTSPSKNYNMMTVSG

SEQ ID NO: 15600 - protein, 10 aa, Homo sapiens
MCISTIRSPS

SEQ ID NO: 15601 - protein, 50 aa, Homo sapiens
ICERRLNGGSSCSWSMTRPWLFSVPSSRKLTFCRRLRLRLRRSMKAQCGC

SEQ ID NO: 15602 - protein, 10 aa, Homo sapiens
LAQLASKAWK

SEQ ID NO: 15603 - protein, 21 aa, Homo sapiens
RPHSIRPKLWETAGEISHFLS

SEQ ID NO: 15604 - protein, 12 aa, Homo sapiens
IWSSYNMADIDK

SEQ ID NO: 15605 - protein, 16 aa, Homo sapiens
MLTCSVIWFRNTMNLF

SEQ ID NO: 15606 - protein, 118 aa, Homo sapiens
LERTLQRGWQRGRCAGAQAQESRARPLAPSPRAHPRAALIGQVGTLPSGKFWVPGGSLTFGRLQDSSSEVGGGLGGHGGAPCARRGRGGGRGGRGEGRGWARGGAGQEPLPADRRGRV

SEQ ID NO: 15607 - protein, 289 aa, Homo sapiens
KMAGEKVEKPDTKEKKPEAKKVDAGGKVKKGNLKAKKPKKGKPHCSRNPVLVRGIGRYSRSAMYSRKAMYKRKYSAAKSKVEKKKKEKVLATVTKPVGGDKNGGTRVVKLRKMPRYYPTEDVPRKLLSHGKKPFSQHVRKLRASITPGTILIILTGRHRGKRVVFLKQLASGLLLVTGPLVLNRVPLRRTHQKFVIATSTKIDISNVKIPKHLTDAYFKKKKLRKPRHQEGEIFDTEKEKYEITEQRKIDQKAVDSQILPKIKAIPQLQGYLRSVFALTNGIYPHKLVF

SEQ ID NO: 15608 - protein, 21 aa, Homo sapiens
ICHCHFNQNRYQQCKNPKTSY

SEQ ID NO: 15609 - protein, 23 aa, Homo sapiens
RLWDNYCYSFEGSREDWPPKPVY

SEQ ID NO: 15610 - protein, 20 aa, Homo sapiens
KCRYPVGHPEGPKRPVTSEL

SEQ ID NO: 15611 - protein, 23 aa, Homo sapiens
LSSLSLLSDIVFKPCVAIPDAPP

SEQ ID NO: 15612 - protein, 26 aa, Homo sapiens
ISGGMWALCSPRRTSLRSGTCCWPIR

SEQ ID NO: 15613 - protein, 36 aa, Homo sapiens
ISGGMWALCSPRRTSLRSGTCCWPISCCPCWCHCPM

SEQ ID NO: 15614 - protein, 7 aa, Homo sapiens
IPSHYGE

SEQ ID NO: 15615 - protein, 29 aa, Homo sapiens
RRGILIIHSFWPCSMSCSQNFSFSLTDRR

SEQ ID NO: 15616 - protein, 21 aa, Homo sapiens
VQLEAEQSSLGSLKQTWIKKL

SEQ ID NO: 15617 - protein, 80 aa, Homo sapiens
LREPQEVKSFRRETAAAGTEAEGALRRRRRRRGWPWELSTEKTPSLGSRIPSRAGWITTSRGLGATRCFLMKRITQNHRL

SEQ ID NO: 15618 - protein, 26 aa, Homo sapiens
IIGYRAATYFKPSTADCAGCVFSTST

SEQ ID NO: 15619 - protein, 78 aa, Homo sapiens
LAWPPELPGVGTGGFVLYAPFSLCAMGDVKESKMQITPETPGRIPVLNPFESPSDYSNLHEQTLASPSVFKSTKLPNR

SEQ ID NO: 15620 - protein, 29 aa, Homo sapiens
ILNANMKINKNNIYAVLKTVRRPLRNISS

SEQ ID NO: 15621 - protein, 14 aa, Homo sapiens
RHSSCRGLCSFLWA

SEQ ID NO: 15622 - protein, 9 aa, Homo sapiens
RTISRVMEV

SEQ ID NO: 15623 - protein, 50 aa, Homo sapiens
MHQCPCGEWGSRRPEKCQWPDSSRHCTNPGFPRVCPVSLEPPELSSEPFL

SEQ ID NO: 15624 - protein, 27 aa, Homo sapiens
RRVHICLDSSICSDTPTPHQPYVKAGG

SEQ ID NO: 15625 - protein, 10 aa, Homo sapiens
LHVKGIRERL

SEQ ID NO: 15626 - protein, 30 aa, Homo sapiens
IPSLQMESEMDCILVYSDVNCMTNFAGLPL

SEQ ID NO: 15627 - protein, 18 aa, Homo sapiens
ITSTGRLPRELQKRLEKC

SEQ ID NO: 15628 - protein, 63 aa, Homo sapiens
IGPVQIRGCSFAHKRGFAGSLNGKLEQRGKNIASVGDAVQLPKGVRNGNAEAWEKGSGGGRRG

SEQ ID NO: 15629 - protein, 21 aa, Homo sapiens
LSYHPIPSTVTPPLNHFEPGK

SEQ ID NO: 15630 - protein, 8 aa, Homo sapiens
IHKIQNCL

SEQ ID NO: 15631 - protein, 25 aa, Homo sapiens
KLKINFVGNRVQFKEHRAALPGCKS

SEQ ID NO: 15632 - protein, 21 aa, Homo sapiens
RLWKIVVQLLESDAKMVLSLG

SEQ ID NO: 15633 - protein, 17 aa, Homo sapiens
KVPTKDFLMLIGMLEWQ

SEQ ID NO: 15634 - protein, 16 aa, Homo sapiens
RILSAVSLKRTLYCSY

SEQ ID NO: 15635 - protein, 11 aa, Homo sapiens
MNRVSAKPGLP

SEQ ID NO: 15636 - protein, 17 aa, Homo sapiens
IQRRKATSKIERAERES

SEQ ID NO: 15637 - protein, 49 aa, Homo sapiens
LYGLQGQRPKTKWSRLRLITRVMFEQSDLVQDKLLKRKCQTKRKKLCSL

SEQ ID NO: 15638 - protein, 35 aa, Homo sapiens
MSLKQQKKFWHKNVKLTLPRQYSKIQINCHVLWVL

SEQ ID NO: 15639 - protein, 87 aa, Homo sapiens
LVFPGLASPSPCARPEREVPEPRRGRVLGCRRCWPARPSRGSRHRLESFSCPRIRIPRKSNGIRGFLLTWRRDGNTSTSVQQTTSSL

SEQ ID NO: 15640 - protein, 15 aa, Homo sapiens
TLLASPPQPRFSAPP

SEQ ID NO: 15641 - protein, 17 aa, Homo sapiens
RTGTRSCTWPSSMKKRH

SEQ ID NO: 15642 - protein, 100 aa, Homo sapiens
TARDRACGLASQAWGDKLPELQWAAAGDSCLASWAPCGCSARATERSSPRRQRHRGASARLVVTWMIVPVMLKPLIDLITTGFSQDYKNFLKVTTLGITR

SEQ ID NO: 15643 - protein, 37 aa, Homo sapiens
MASICAASVSVSTRRISVSLSWTKCSSFRGLSGASTQ

SEQ ID NO: 15644 - protein, 13 aa, Homo sapiens
RTMKSQRKYGNQL

SEQ ID NO: 15645 - protein, 86 aa, Homo sapiens
TSLQTVPQAPGVPASVAVAPECPSEPRGACPPAPRRGPARHLGRRRTDAGTSTRSRLLDLGTLTRFLWGTAEDYFEFRWSPVVWHI

SEQ ID NO: 15646 - protein, 33 aa, Homo sapiens
MRPPCVSPIKTQPSGSSPSPHPLPASSSPSPPS

SEQ ID NO: 15647 - protein, 14 aa, Homo sapiens
LSPRPQAGTSPTAS

SEQ ID NO: 15648 - protein, 19 aa, Homo sapiens
IYLPPDWGLPFRAGGCHFG

SEQ ID NO: 15649 - protein, 13 aa, Homo sapiens
TSSETWLRSDLYD

SEQ ID NO: 15650 - protein, 50 aa, Homo sapiens
RKRISAKLFLMPCSAKSRTLITKIGRTLSSAVTTLRISISISGSWRFCSP

SEQ ID NO: 15651 - protein, 17 aa, Homo sapiens
KVIELHSSFANGFFIQK

SEQ ID NO: 15652 - protein, 31 aa, Homo sapiens
MTPKGVQEVLVPLERIKIYAKNRKQEVIPFS

SEQ ID NO: 15653 - protein, 47 aa, Homo sapiens
LAWLVCKGPGQRQHWEPHLQCRGRWTCSSSWCCTSRRSCPLHCCCSS

SEQ ID NO: 15654 - protein, 17 aa, Homo sapiens
IFRLLLKISVERNNSES

SEQ ID NO: 15655 - protein, 39 aa, Homo sapiens
MTVHIRSSSMYLNLAPSMMFCLTQYGSCWKLLYEIVMAF

SEQ ID NO: 15656 - protein, 13 aa, Homo sapiens
RKRWWRLWPSTTL

SEQ ID NO: 15657 - protein, 13 aa, Homo sapiens
LGMEKKMGSLTGS

SEQ ID NO: 15658 - protein, 16 aa, Homo sapiens
IRLLPWTGTARGPREL

SEQ ID NO: 15659 - protein, 27 aa, Homo sapiens
ILSTLPQQLQGEPAQDFALHQAEDDRL

SEQ ID NO: 15660 - protein, 9 aa, Homo sapiens
IQPSDGKGV

SEQ ID NO: 15661 - protein, 8 aa, Homo sapiens
TEAGKMAL

SEQ ID NO: 15662 - protein, 46 aa, Homo sapiens
RQFEWSWFSTGTSAFIARSRDKLLPLSVLRTTQKVCSSSTMLRLCG

SEQ ID NO: 15663 - protein, 12 aa, Homo sapiens
TSYRRITEKMEY

SEQ ID NO: 15664 - protein, 62 aa, Homo sapiens
VAVSSLRHGVCSPTDIGVLRKGGVIWQKCHFACCIQGSYSTRYCELCSHQLAQKQQTALCCQ

SEQ ID NO: 15665 - protein, 31 aa, Homo sapiens
INCGGIVFGSLSSETPSAGKSVRSLLSSLLV

SEQ ID NO: 15666 - protein, 8 aa, Homo sapiens
RSLSLQLG

SEQ ID NO: 15667 - protein, 26 aa, Homo sapiens
LHHAVWRNSQRGLSSGGCAHAAPDCP

SEQ ID NO: 15668 - protein, 14 aa, Homo sapiens
IYTGIFLRVCWNCR

SEQ ID NO: 15669 - protein, 32 aa, Homo sapiens
TPAPPSPAAARESTRRVAINVRASIALSSSLR

SEQ ID NO: 15670 - protein, 20 aa, Homo sapiens
VPALFPPCTVYAGLSMFLFK

SEQ ID NO: 15671 - protein, 10 aa, Homo sapiens
LSQQKIPMAR

SEQ ID NO: 15672 - protein, 16 aa, Homo sapiens
RTTTSCSWCWSSAAGG

SEQ ID NO: 15673 - protein, 27 aa, Homo sapiens
RTTTSCSWCWSSAAGGLSWSCTRGGKP

SEQ ID NO: 15674 - protein, 51 aa, Homo sapiens
MTSTHPLLSQPAKPRAPTAPSMGTVKQNSPWSLKCRAWSGAKNSPRGPTRC

SEQ ID NO: 15675 - protein, 19 aa, Homo sapiens
KSGQQEEEEKEGKEKTQET

SEQ ID NO: 15676 - protein, 42 aa, Homo sapiens
MPIIPALLEAEAGRSLEIRSSRPAWCLGISQWGGFALGSCSL

SEQ ID NO: 15677 - protein, 7 aa, Homo sapiens
RWQALGT

SEQ ID NO: 15678 - protein, 38 aa, Homo sapiens
LNPAATPRSPSDCPQHTEWISEKEAETEDEAMRLREVE

SEQ ID NO: 15679 - protein, 91 aa, Homo sapiens
LNPAATPRSPSDCPQHTEWISEKEAETEGPWESACRVAGPPPCSCCCSREAGAAPTSSATPITSRRSSASWKCGTSTPARSPLPGKTSMKS

SEQ ID NO: 15680 - protein, 69 aa, Homo sapiens
TGNGSDGPWESACRVAGPPPCSCCCSREAGAAPTSSATPITSRRSSASWKCGTSTPARSPLPGKTSMKS

SEQ ID NO: 15681 - protein, 18 aa, Homo sapiens
RASFSMSCSTGTGETPGL

SEQ ID NO: 15682 - protein, 30 aa, Homo sapiens
LGCESEEKADLSGLKKCLPPPPGVPQRLEL

SEQ ID NO: 15683 - protein, 38 aa, Homo sapiens
VPAQAPSAAGRRGLRAGRCRASCPTREASSRTRSFLGS

SEQ ID NO: 15684 - protein, 36 aa, Homo sapiens
LGSETPTPAQREQGPSQGRTLIPPRDPRPLSLSGPL

SEQ ID NO: 15685 - protein, 16 aa, Homo sapiens
TPPPSPSEPACNLSRL

SEQ ID NO: 15686 - protein, 8 aa, Homo sapiens
TWALGRPC

SEQ ID NO: 15687 - protein, 35 aa, Homo sapiens
VMTMTRKKKGPSGSLVSGVPGAQGRRASESTTASS

SEQ ID NO: 15688 - protein, 8 aa, Homo sapiens
VGRTQEMK

SEQ ID NO: 15689 - protein, 26 aa, Homo sapiens
MGESTMSPASSTSTLEEKRFCWNKLV

SEQ ID NO: 15690 - protein, 15 aa, Homo sapiens
ICVRKSVQVSVMLPC

SEQ ID NO: 15691 - protein, 59 aa, Homo sapiens
LIPDPTLPCLPQVPALAPACLPGNGHASPSPWGAGGKPRRSGEHNSSADTHLRRAFGLY

SEQ ID NO: 15692 - protein, 28 aa, Homo sapiens
ISRAGPSSCSCLFAWKWPRFSFSLGCWW

SEQ ID NO: 15693 - protein, 36 aa, Homo sapiens
IHSPARRPLPPHPAHPPLSCARNLLLPAPCPTNIQH

SEQ ID NO: 15694 - protein, 10 aa, Homo sapiens
MAHPSGWPLL

SEQ ID NO: 15695 - protein, 10 aa, Homo sapiens
ITACSCGRAL

SEQ ID NO: 15696 - protein, 40 aa, Homo sapiens
MLSPTSTARTARPLWAGNMNRPLRAARSTKRGSTSLNSTT

SEQ ID NO: 15697 - protein, 164 aa, Homo sapiens
IPAAGQGRARPPRTVSRCGSAAMATKIDKEACRAAYNLVRDDGSAVIWVTFKYDGSTIVPGEQGAEYQHFIQQCTDDVRLFAFVRFTTGDAMSKRSKFALITWIGENVSGLQRAKTGTDKTLVKEVVQNFAKEFVISDRKELEEDFIKSELKKAGGANYDAQTE

SEQ ID NO: 15698 - protein, 39 aa, Homo sapiens
MTAPPSSPASRERSTSTSSSSAQMTSGCLPSCASPPGMP

SEQ ID NO: 15699 - protein, 7 aa, Homo sapiens
RPFCRKM

SEQ ID NO: 15700 - protein, 19 aa, Homo sapiens
IWRQGCWYRNLPWESVHPE

SEQ ID NO: 15701 - protein, 31 aa, Homo sapiens
IDGSQMQTDDNQAPDHPEHRLPLKPHVKKSL

SEQ ID NO: 15702 - protein, 22 aa, Homo sapiens
MGAPATRRCCRASSTQSSLETC

SEQ ID NO: 15703 - protein, 42 aa, Homo sapiens
ISQVPPAPSLESTAPPVSRGSDTARPGHGLVAEGGSGSEAQG

SEQ ID NO: 15704 - protein, 21 aa, Homo sapiens
LGSRRADGVESVRSREFSSWL

SEQ ID NO: 15705 - protein, 17 aa, Homo sapiens
LALLGELVCVPVGGRGW

SEQ ID NO: 15706 - protein, 22 aa, Homo sapiens
VSSRPSLCLKMRTPATSAVVRS

SEQ ID NO: 15707 - protein, 9 aa, Homo sapiens
RPKCRATGA

SEQ ID NO: 15708 - protein, 11 aa, Homo sapiens
LCVCVCVCPCA

SEQ ID NO: 15709 - protein, 104 aa, Homo sapiens
RMTIRHQGQQYRPRMAFLQKIEALVKDMQNPETGVRMQNQRVLVTSVPHAMTGSDVLQWIVQRLWISSLGESSSGTQLSGTALCTAPWEKLNRDLACVSEKFTF

SEQ ID NO: 15710 - protein, 26 aa, Homo sapiens
RFREVSSQPRTSDVIVLAALPPHSRQ

SEQ ID NO: 15711 - protein, 50 aa, Homo sapiens [sequence omitted]

SEQ ID NO: 15712 - protein, 39 aa, Homo sapiens
IAVRRSESLPIVQSSRKKRSQSPTLSALMEVSSFGKSFI

SEQ ID NO: 15713 - protein, 43 aa, Homo sapiens
TESLQGEVSSLEIAEEPAASTSVKEDVPFLGSLSRGSPASCIF

SEQ ID NO: 15714 - protein, 13 aa, Homo sapiens
LQPQPALRRTCRF

SEQ ID NO: 15715 - protein, 14 aa, Homo sapiens
LHFLTGSRNRTKRS

SEQ ID NO: 15716 - protein, 24 aa, Homo sapiens
IEPKEAEQGSSAAPRKAEVGALEA

SEQ ID NO: 15717 - protein, 31 aa, Homo sapiens
LELLQVPPVLGKGPCGCLGLCCFSGSQDVLL

SEQ ID NO: 15718 - protein, 31 aa, Homo sapiens
LELLQVPPVLGKGPCGCLGLCCFSGSQHQRQ

SEQ ID NO: 15719 - protein, 34 aa, Homo sapiens
VASAGKASTTKGGGGGIQHCGLPQGRTSLCLGGV

SEQ ID NO: 15720 - protein, 29 aa, Homo sapiens
KDRKMGPRDGATVYFRDRLSRRGASYLKL

SEQ ID NO: 15721 - protein, 76 aa, Homo sapiens
LLSQRSAAARPLQLPGKAVGAHPLATPPVPSSACAAAGPWPTWSAPSSPSSRTACSAAWWARSSSASSRRDSASWP

SEQ ID NO: 15722 - protein, 63 aa, Homo sapiens
VLKKKSAYGLSLKNWLTTSLVLMTGSMNKRWTQQQSPSARRGVSLDTALHSIDLEATGLIILL

SEQ ID NO: 15723 - protein, 31 aa, Homo sapiens
VDNVKHHSRPPGPDTASCESWISPIPCQCSL

SEQ ID NO: 15724 - protein, 28 aa, Homo sapiens
RLGQHRTSCPGDFWPPTEETNRYQEEAK

SEQ ID NO: 15725 - protein, 17 aa, Homo sapiens
MASRGARPGPSPPRPAL

SEQ ID NO: 15726 - protein, 28 aa, Homo sapiens
LEKNKTAHRTQPSDAIYWSAHSYKGKKR

SEQ ID NO: 15727 - protein, 9 aa, Homo sapiens
LSQSRLWRS

SEQ ID NO: 15728 - protein, 57 aa, Homo sapiens
VEGLWCCWPLIAGRIPRCSFRSGSFVRIGRLASVTVANGRLSTCLHWAICISWDRCY

SEQ ID NO: 15729 - protein, 34 aa, Homo sapiens
TAARAPSSPPPPARQPRQLEPSPRPQQQRREQPQ

SEQ ID NO: 15730 - protein, 18 aa, Homo sapiens
ISKQCGKTKKLNASEIHW

SEQ ID NO: 15731 - protein, 21 aa, Homo sapiens
MAQKENSYPWPYGRQTYGSQV

SEQ ID NO: 15732 - protein, 43 aa, Homo sapiens
TSCTRRARRSRPSRAPALPRCSPPSRGSVVQAAPKQPEQDHSR

SEQ ID NO: 15733 - protein, 14 aa, Homo sapiens
LLWLTKKKKMYRTS

SEQ ID NO: 15734 - protein, 71 aa, Homo sapiens
TAAATWGGAEQTPEVVVVRVRLRGTRHRLRPPERLREPRPEGVGVAAAETQPPLFPLFAERRRVASIRQLP

SEQ ID NO: 15735 - protein, 20 aa, Homo sapiens
VSFESTSFFLFSGVQDVEAR

SEQ ID NO: 15736 - protein, 33 aa, Homo sapiens
TEDLGKKDHIVHRRRVLGTSNWLLKRRSCVAVE

SEQ ID NO: 15737 - protein, 26 aa, Homo sapiens
IMEKVFLLLNTKLKRCMSQLSYLDSS

SEQ ID NO: 15738 - protein, 11 aa, Homo sapiens
IQYQIYCGNSQ

SEQ ID NO: 15739 - protein, 11 aa, Homo sapiens
KTSYPVQIFWS

SEQ ID NO: 15740 - protein, 23 aa, Homo sapiens
RIEDNESYLGFLRITCMDKLPHI

SEQ ID NO: 15741 - protein, 18 aa, Homo sapiens
IKKKESIRFVERRLGYIY

SEQ ID NO: 15742 - protein, 40 aa, Homo sapiens
LWRGRDAVGPDKVFFLGEGFYYVFAPAISPNEKTRLHNLW

SEQ ID NO: 15743 - protein, 58 aa, Homo sapiens
LCLWLRLLTGCAQLREEGGNKYFCLILKPWKELSPCLTRTQPFLLSRRRSCLTLPCGL

SEQ ID NO: 15744 - protein, 32 aa, Homo sapiens
LAAHRELSPCLTRTQPFLLSRRRSCLTLPCGL

SEQ ID NO: 15745 - protein, 9 aa, Homo sapiens
ISISRGSRP

SEQ ID NO: 15746 - protein, 15 aa, Homo sapiens
LPGLEGPLPGSLGWG

SEQ ID NO: 15747 - protein, 17 aa, Homo sapiens
MGAPAPTREANRGKPRQ

SEQ ID NO: 15748 - protein, 16 aa, Homo sapiens
TETGRKERDSATCWAS

SEQ ID NO: 15749 - protein, 33 aa, Homo sapiens
LPEPLPLWMIERIWCTRRSWPSRLSDTTKWWSQ

SEQ ID NO: 15750 - protein, 57 aa, Homo sapiens
ILSSKDRSSNSLSRRVSRWKNSGISSLKPLSPRWFSSTSMTTGSRLFHLTRPSPVSS

SEQ ID NO: 15751 - protein, 68 aa, Homo sapiens
ILLTESRLTILGFQRRLRYPQLETQRRVAFCSRTDLRLESVCWGPCLWKRPRGLKDGLVRSGTIMLSC

SEQ ID NO: 15752 - protein, 30 aa, Homo sapiens
VSCPASCTRDRETWASVCLSTSPATPCSRT

SEQ ID NO: 15753 - protein, 13 aa, Homo sapiens
VTLYTLWEMHIFT

SEQ ID NO: 15754 - protein, 68 aa, Homo sapiens
LRKLMTSKLKTFRLKGTIRIQLLKWKWLFRVLSKELEGYCQSLGVGLDAEVKVLFALKEKGTRSKICP

SEQ ID NO: 15755 - protein, 19 aa, Homo sapiens
INGCTKRSRMRRLIKEEAS

SEQ ID NO: 15756 - protein, 93 aa, Homo sapiens
VGGGTGGDAWEEGAQERSTEPRAGSSRAGSRVCYSTQEIWRQTELPAETSESDIQTLLLRNLTASKTCMRGLLQKSFLRRCTFHQFEERLHCN

SEQ ID NO: 15757 - protein, 9 aa, Homo sapiens
IPLMHTLMP

SEQ ID NO: 15758 - protein, 32 aa, Homo sapiens
IASVGRGDHCPRALMELGPAFALRSPRFRDQA

SEQ ID NO: 15759 - protein, 64 aa, Homo sapiens
KSLTKTQMGRSVRASSTHISRTSLSNSFQRWIILLYFWLFFMYTELYVKRCFGIHQFPLPRTCL

SEQ ID NO: 15760 - protein, 7 aa, Homo sapiens
LPPPHRM

SEQ ID NO: 15761 - protein, 23 aa, Homo sapiens
LSFKLRPFSCVHTSEKEDTTDNI

SEQ ID NO: 15762 - protein, 25 aa, Homo sapiens
VSGNSCHQQYISNTYIFVFSKQSEN

SEQ ID NO: 15763 - protein, 7 aa, Homo sapiens
VYKMMSF

SEQ ID NO: 15764 - protein, 20 aa, Homo sapiens
LEDKRESKPLVICENGSLFT

SEQ ID NO: 15765 - protein, 16 aa, Homo sapiens
MSYCKYVLTELHCTFL

SEQ ID NO: 15766 - protein, 59 aa, Homo sapiens
IEHIQVNKAPKMRRRTYRAHGRINPYMSSPCHIEMILTEKEQIVPKPEEEVAQKKKVNK

SEQ ID NO: 15767 - protein, 8 aa, Homo sapiens
MELSYAHS

SEQ ID NO: 15768 - protein, 38 aa, Homo sapiens
RCLFSPWRGRPRLRGCRAGWTLASSTRRSRSGISTMPP

SEQ ID NO: 15769 - protein, 25 aa, Homo sapiens
ISCPPWTTRPSASRWARTSVPARWA

SEQ ID NO: 15770 - protein, 38 aa, Homo sapiens
RSWSSCRRPRPTTSATSSSSTCVSFPSRSSPSASTTSS

SEQ ID NO: 15771 - protein, 45 aa, Homo sapiens
MPRTRTRSCSREAARVATSGSSAWTCGGSWSRSLPAVCRFVRRTR

SEQ ID NO: 15772 - protein, 26 aa, Homo sapiens
KPRLPEPIPGQGLFLGLPILVAVVPH

SEQ ID NO: 15773 - protein, 14 aa, Homo sapiens
RQASSPDGRSPMGS

SEQ ID NO: 15774 - protein, 76 aa, Homo sapiens
RPCSSRRTRRKTARRACSGSWTASASGARKLKVMWPPSTDASSSLRRSWTGLRNDWPRPCRSWRRQKKLQMRVREE

SEQ ID NO: 15775 - protein, 49 aa, Homo sapiens
TQRQGRSCVSWTRWSPTPPLRRSRTSSLRPIRSGTPPASPSAWTPRASP

SEQ ID NO: 15776 - protein, 16 aa, Homo sapiens
LSGRFNWALTPTTLGP

SEQ ID NO: 15777 - protein, 12 aa, Homo sapiens
IHKHIRAADLPN

SEQ ID NO: 15778 - protein, 31 aa, Homo sapiens
TPEGEMNALASLTVRTCDRFWQTEPALLPPG

SEQ ID NO: 15779 - protein, 17 aa, Homo sapiens
IRLPRGGMPTLSSSCPQ

SEQ ID NO: 15780 - protein, 43 aa, Homo sapiens
LPALLPPRLASHSVYLLVPPWPLSPGTPSSRSCSNGTASTAPS

SEQ ID NO: 15781 - protein, 11 aa, Homo sapiens
RRSPRLVCLQH

SEQ ID NO: 15782 - protein, 43 aa, Homo sapiens
IAWSEGHAAARLTSKESCCVMKKPRREGRGKQRSQGWLFLRDT

SEQ ID NO: 15783 - protein, 53 aa, Homo sapiens
LCLCLWRVVRVSAAAEEEARAAPSGAAGALRRVQRAPATREGAPPAALFALGL

SEQ ID NO: 15784 - protein, 14 aa, Homo sapiens
VLVLVARGAGFGGG

SEQ ID NO: 15785 - protein, 35 aa, Homo sapiens
VARRLGWASISSKGSLSSTTKSLLSPATSEGPLAK

SEQ ID NO: 15786 - protein, 49 aa, Homo sapiens
VAGARWPHLPRPGHAVCDGHRGPAVQRLQDPLVGERVWLRHVLHQRCGH

SEQ ID NO: 15787 - protein, 109 aa, Homo sapiens
LGSFPPGPRLPAPAALCPVRPGLEPTPPPSCRPCPRAMGCGGSRCSSPTSGTVRAKRRKLRESTRNWPTSAPSSKETKPWMATVRKNMCVNCFSSSCLAMTLTLGTWRL

SEQ ID NO: 15788 - protein, 31 aa, Homo sapiens
MGDVRETASCPATSAEAPRVWPAGSSKPWRG

SEQ ID NO: 15789 - protein, 23 aa, Homo sapiens
TRRRREPQPRRPRWPQRGMRRRP

SEQ ID NO: 15790 - protein, 28 aa, Homo sapiens
IENSSRRLDAVAHTCHPGTLGDLRSRIA

SEQ ID NO: 15791 - protein, 16 aa, Homo sapiens
MFETSLRSAPPSPLLR

SEQ ID NO: 15792 - protein, 47 aa, Homo sapiens
ITQDLSRTPGYTGRGAQHWAAPSCMDQSWTRGSYVSIVMASTWYTSR

SEQ ID NO: 15793 - protein, 62 aa, Homo sapiens
LRLKDPGVSALLQTPWAWRRVSYGPQCLWWMDRPTSHSRGWDEATGDSRAVWPGWVWVSCCC

SEQ ID NO: 15794 - protein, 17 aa, Homo sapiens
RPTPPTHPSSQRLMPWV

SEQ ID NO: 15795 - protein, 52 aa, Homo sapiens
TILPVLHRRTHWTPGLAAGPTPGLDLAQGRCCHCNKACLHASETGVGTTSVL

SEQ ID NO: 15796 - protein, 37 aa, Homo sapiens
LAFNQAKRLGFCPGCSVFCGLRCASFSRLWHQIHTIL

SEQ ID NO: 15797 - protein, 7 aa, Homo sapiens
KAPGGKC

SEQ ID NO: 15798 - protein, 8 aa, Homo sapiens
TFGGCSRG

SEQ ID NO: 15799 - protein, 34 aa, Homo sapiens
KFVPLAGSLAVTRLSPTWMTARNISPNTIRLANG

SEQ ID NO: 15800 - protein, 66 aa, Homo sapiens
MGLHGEWKGRLCTLGKVEQGRSYSGRRWRSAAEKLEKAGPWEPQSHGSCPGWCRSWTWGNWRAWPG

SEQ ID NO: 15801 - protein, 12 aa, Homo sapiens
LSSPTWTMASPR

SEQ ID NO: 15802 - protein, 18 aa, Homo sapiens
LHHHQVNCHLPLLRALGE

SEQ ID NO: 15803 - protein, 38 aa, Homo sapiens
LPSESPMAHWWWWTACQACACRRRQCCGRPLPSASSLC

SEQ ID NO: 15804 - protein, 43 aa, Homo sapiens
LAACRRRLVADDHHPPALPCDGPEVPLRAPVRGAPGRRGCHGH

SEQ ID NO: 15805 - protein, 18 aa, Homo sapiens
RSGSWGPTIPLGRRRTST

SEQ ID NO: 15806 - protein, 87 aa, Homo sapiens
KKASLPWTTSWTNCRRPFLQRLPPRGLAAPTAPRPRILRRHLETVPTQRRSPERFLGPAACHHSTITLDAVSFNIYFQSPEAADTPS

SEQ ID NO: 15807 - protein, 48 aa, Homo sapiens
LRRRAVRLSSPRSEPCRPRARCSLCRSSDARRQRQLWRTANAAMVSSR

SEQ ID NO: 15808 - protein, 63 aa, Homo sapiens
LRRRAVRLSSPRSEPCRPRARCSLCRSSDARRQRQLWRTANAAMVSSSCWSQFCFSARSDLLV

SEQ ID NO: 15809 - protein, 7 aa, Homo sapiens
IFSGRGT

SEQ ID NO: 15810 - protein, 19 aa, Homo sapiens
TGVNGERSDHHEPPQQAQE

SEQ ID NO: 15811 - protein, 30 aa, Homo sapiens
MNGAGTDFAYGKTVPYCLQTSQGSRRFLSS

SEQ ID NO: 15812 - protein, 33 aa, Homo sapiens
MNGAGTDFAYGKEGKTVPYCLQTSQGSRRFLSS

SEQ ID NO: 15813 - protein, 34 aa, Homo sapiens
VPAALPLSVHALQRDPAHPQEAGAAPGQGHARAE

SEQ ID NO: 15814 - protein, 22 aa, Homo sapiens
KAATRSSSLSTRTSVNPRTTGP

SEQ ID NO: 15815 - protein, 49 aa, Homo sapiens
KRCSEGTDLEAPAGRRTETAERSSLFQGSSKHRHLSGALCSQEREEISC

SEQ ID NO: 15816 - protein, 19 aa, Homo sapiens
MRTDSQPYTSAASTTLRKL

SEQ ID NO: 15817 - protein, 12 aa, Homo sapiens
LTVPSTSWTRST

SEQ ID NO: 15818 - protein, 64 aa, Homo sapiens
TRRGTRQSRGTAARSLLVHAARRAARPLSVRRRHGSAGGNHLPRRRAHLPQARPDLRGALHRDA

SEQ ID NO: 15819 - protein, 25 aa, Homo sapiens
ITNQRRDSVSEQVFWTMDWLSPSLL

SEQ ID NO: 15820 - protein, 34 aa, Homo sapiens
TETFLGSPRYSRRVRSLLLVTWPHGGPSFVREQL

SEQ ID NO: 15821 - protein, 62 aa, Homo sapiens
TRSFSRRVLLGECPLLPVRVAALRLAASSWSGARPGGPCSSPASPWPRFPSCCSSRRRTAAS

SEQ ID NO: 15822 - protein, 53 aa, Homo sapiens
MLIPRFRLTYLMRSVRETKSNLQCTQRFHLLLRSPTLMVLERRCRNWEKVKGL

SEQ ID NO: 15823 - protein, 33 aa, Homo sapiens
ILTAELLEDLGPWVAGGSRRGLTPLPRPECGDI

SEQ ID NO: 15824 - protein, 80 aa, Homo sapiens
ILTAELLEDLGPWVAGSHSIAQARVRGYLIRNFSEGRARWLMPVIPAFSEAEASWTDLKKTAFQDLLRLQLQLEVQNVFS

SEQ ID NO: 15825 - protein, 73 aa, Homo sapiens
LGRRWEPTGSHSIAQARVRGYLIRNFSEGRARWLMPVIPAFSEAEASWTDLKKTAFQDLLRLQLQLEVQNVFS

SEQ ID NO: 15826 - protein, 20 aa, Homo sapiens
RSKTCSRDSAISLSESITCK

SEQ ID NO: 15827 - protein, 74 aa, Homo sapiens
IILRRNWHQNRKMKNQKRGSGLWKTLKLVALWVKESLVMFIWQEKSKASLFWLLKCYLKLSWRKPEWSISSEEK

SEQ ID NO: 15828 - protein, 22 aa, Homo sapiens
LEMRPSQEAASCLDMSRPTRRL

SEQ ID NO: 15829 - protein, 49 aa, Homo sapiens
IAEPRAARRASAGNQGDAPGTADNLSAFQEQPTRDLTCHLGSPTQWRWL

SEQ ID NO: 15830 - protein, 35 aa, Homo sapiens
ISRTTYQRPYLSPWLSHPMEMALMVAQTRKGKSVV

SEQ ID NO: 15831 - protein, 9 aa, Homo sapiens
IVIGVFASN

SEQ ID NO: 15832 - protein, 10 aa, Homo sapiens
TWTAATGTEP

SEQ ID NO: 15833 - protein, 8 aa, Homo sapiens
LALAVILE

SEQ ID NO: 15834 - protein, 30 aa, Homo sapiens
VHSLGVVRIQNAQEKAIQCFREGETSKTKG

SEQ ID NO: 15835 - protein, 42 aa, Homo sapiens
VHSLGVVRIQNAQEKAIQCFREGETSKTKAKQQFWEFRSFSE

SEQ ID NO: 15836 - protein, 11 aa, Homo sapiens
ISTDAFHFNSS

SEQ ID NO: 15837 - protein, 39 aa, Homo sapiens
TAAVTWRTTCTRGATNSTTHRWASWRTSWLKTTSSPSSR

SEQ ID NO: 15838 - protein, 7 aa, Homo sapiens
IRAVLRV

SEQ ID NO: 15839 - protein, 7 aa, Homo sapiens
VTSTREL

SEQ ID NO: 15840 - protein, 45 aa, Homo sapiens
VRREARPSRERHGGPGAAAAAGAAGRAGGALRRHGLRYEGGDRAE

SEQ ID NO: 15841 - protein, 28 aa, Homo sapiens
IMHCSCCKSGSDSEEARDQIAAASSGLC

SEQ ID NO: 15842 - protein, 16 aa, Homo sapiens
RRFAACVRKETVRVPP

SEQ ID NO: 15843 - protein, 26 aa, Homo sapiens
LPASMMIKEDVRRGCAPWPRLGPKFQ

SEQ ID NO: 15844 - protein, 36 aa, Homo sapiens
RRNARGSTLTSWKDLDCYCCLSCLSGISLKFKCLNC

SEQ ID NO: 15845 - protein, 20 aa, Homo sapiens
MMLLPEPLQRAWFQETQSPL

SEQ ID NO: 15846 - protein, 38 aa, Homo sapiens
IFRSGPKRRKVGQSRTLFLPRCLLVCRLKYCMRPRATL

SEQ ID NO: 15847 - protein, 28 aa, Homo sapiens
VESSDSWCACPGTSSWTQSWLVVWSPAT

SEQ ID NO: 15848 - protein, 16 aa, Homo sapiens
LKSCQDPRQAAQDGPF

SEQ ID NO: 15849 - protein, 39 aa, Homo sapiens
RYTQAEVTLRVWLGSMGGTPSTKCLVTSAWSGFSACTPC

SEQ ID NO: 15850 - protein, 9 aa, Homo sapiens
LPPSLTSSF

SEQ ID NO: 15851 - protein, 112 aa, Homo sapiens
RALERWPRSQHRGGLESARCHRPMSQPGLPSSAPPCGCNGGPCSVLASAPPHPPPAPGYLLGICSGEWHFPVHMLLQLESQHLLCLEPRWGSAGHFLPSPCLAGQTAVEPNL

SEQ ID NO: 15852 - protein, 14 aa, Homo sapiens
MQHKLGNLPSLPLL

SEQ ID NO: 15853 - protein, 67 aa, Homo sapiens
VVVSPAAPREGHCLGLQTLWLMWGVQKSQKKSFWSTSPPWGSPCSEVRPTTSLNTIVTPSATKWHSS

SEQ ID NO: 15854 - protein, 26 aa, Homo sapiens
LCCSLVGKMAQTGAVRTACCRMVSAT

SEQ ID NO: 15855 - protein, 44 aa, Homo sapiens
LESSMESLSVTWLLAPWTQKRNALLKRPPNTSGRESAQCICKSC

SEQ ID NO: 15856 - protein, 37 aa, Homo sapiens
RHHPGSEQRSPDPECDHFRHLPCTGCGQPCIRVKALA

SEQ ID NO: 15857 - protein, 13 aa, Homo sapiens
LDSDWRAPRKAPR

SEQ ID NO: 15858 - protein, 30 aa, Homo sapiens
KSSREKQRLFPGQIQVQVLAISHHGTASCR

SEQ ID NO: 15859 - protein, 58 aa, Homo sapiens
LPPSPTPCTPGPSLRALGAPWPAGLRWRCCSSACWVFWSPPRMVVSIYPMPFLGMTLT

SEQ ID NO: 15860 - protein, 11 aa, Homo sapiens
MAPAQPHLSPS

SEQ ID NO: 15861 - protein, 26 aa, Homo sapiens
ILPGVEAEACTVSTLFPLPSFFRTMK

SEQ ID NO: 15862 - protein, 18 aa, Homo sapiens
MNSLEISEENRKKLKWHE

SEQ ID NO: 15863 - protein, 28 aa, Homo sapiens
ISPQRHDYQRGPLAPILASAPKTGQLCT

SEQ ID NO: 15864 - protein, 32 aa, Homo sapiens
MKDTHVPASMETVLRGIEKRPFTSSAQEKAQF

SEQ ID NO: 15865 - protein, 20 aa, Homo sapiens
TGQRCGSRFSPDSPSWACAC

SEQ ID NO: 15866 - protein, 33 aa, Homo sapiens
KATMTTTMKRATSPPGLMGSPSLPARPGLSASQ

SEQ ID NO: 15867 - protein, 48 aa, Homo sapiens
INTSRSSWVVWTREPSFGSTLQGIWHRVVPQGPHPCVLCTLLILPVPV

SEQ ID NO: 15868 - protein, 7 aa, Homo sapiens
KGIPRPR

SEQ ID NO: 15869 - protein, 27 aa, Homo sapiens
ILPSASDIGTPGCYRDHETEAYFDSTK

SEQ ID NO: 15870 - protein, 98 aa, Homo sapiens
LFSSSVPTLSFSLQPLKILVSPWAAAPPVVTGIVRTSRTQSLASAEVSLMPRFAFLTWGGKRQKWMSFRFVATWCQMNMSSCPLKPWRLPEFVPISTW

SEQ ID NO: 15871 - protein, 11 aa, Homo sapiens
LMVCPCLTSTP

SEQ ID NO: 15872 - protein, 25 aa, Homo sapiens
VPEPESELRPLQELRGAGWNCRIQR

SEQ ID NO: 15873 - protein, 20 aa, Homo sapiens
LSSPWLSAPSCTWTPRGTGS

SEQ ID NO: 15874 - protein, 19 aa, Homo sapiens
RPLVVLRCKWLCPQGGQSH

SEQ ID NO: 15875 - protein, 29 aa, Homo sapiens
RQNGKRQSCVRCSLRPMDCRCGSSTPRVT

SEQ ID NO: 15876 - protein, 66 aa, Homo sapiens
MPMATALPLDFPTFLLLARATNHGFLFPEERVSASPLLKRETKDWRPNRAVGEMGPWVTCQIFVRN

SEQ ID NO: 15877 - protein, 38 aa, Homo sapiens
VGFDGAAARPPWPLTGSCGGSGGCRLSMRRKSKRCAGS

SEQ ID NO: 15878 - protein, 70 aa, Homo sapiens
LERRRWAARARGREGRGQPDPARTHGARRRLGRAGRRTGALGCGARLARPGGIYTLRPGAREHMPAQRIL

SEQ ID NO: 15879 - protein, 7 aa, Homo sapiens
KMAALLF

SEQ ID NO: 15880 - protein, 77 aa, Homo sapiens
VPRSSPNPRCGVSDQVPASSTSRIQRWRRYYLPALFSIPFRSFLGRRRRRSTLRVILYARPLPLPPGGTSPSPPDLS

SEQ ID NO: 15881 - protein, 25 aa, Homo sapiens
RVPEVGGRETKFPGLPPGPRSGLRV

SEQ ID NO: 15882 - protein, 587 aa, Homo sapiens
RQSTTVICSPGGESWKEGASVQIMKEHGGTFSSTGISGGSGDSAMDSLQPLQPNYMPVCLFAEESYQKLAMETLEELDWCLDQLETIQTYRSVSEMASNKFKRMLNRELTHLSEMSRSGNQVSEYISNTFLDKQNDVEIPSPTQKDREKKKKQQLMTQISGVKKLMHSSSLNNTSISRFGVNTENEDHLAKELEDLNKWGLNIFNVAGYSHNRPLTCIMYAIFQERDLLKTFRISSDTFITYMMTLEDHYHSDVAYHNSLHAADVAQSTHVLLSTPALDAVFTDLEILAAIFAAAIHDVDHPGVSNQFLINTNSELALMYNDESVLENHHLAVGFKLLQEEHCDIFMNLTKKQRQTLRKMVIDMVLATDMSKHMSLLADLKTMVETKKVTSSGVLLLDNYTDRIQVLRNMVHCADLSNPTKSLELYRQWTDRIMEEFFQQGDKERERGMEISPMCDKHTASVEKSQVGFIDYIVHPLWETWADLVQPDAQDILDTLEDNRNWYQSMIPQSPSPPLDEQNRDCQGLMEKFQFELTLDEEDSEGPEKEGEGHSYFSSTKTLCVIDPENRDSLGETDIDIATEDKSPVDT

SEQ ID NO: 15883 - protein, 37 aa, Homo sapiens
RGDTMITKVVFLRAKLIHCVPDVLTPAISPSVGNSSA

SEQ ID NO: 15884 - protein, 8 aa, Homo sapiens
IIMLGNAW

SEQ ID NO: 15885 - protein, 23 aa, Homo sapiens
LTLLSGPSTQPLLSPYSQKGALS

SEQ ID NO: 15886 - protein, 15 aa, Homo sapiens
ISLVSEERETRREQS

SEQ ID NO: 15887 - protein, 52 aa, Homo sapiens
LGTGGGCGQFELDSGLQPAEAAPELYSPRGRFPVPESKFIYKCWSNKEGRTK

SEQ ID NO: 15888 - protein, 11 aa, Homo sapiens
VRRNSEVVHYG

SEQ ID NO: 15889 - protein, 26 aa, Homo sapiens
TDGSGQARRKTWQQAGVGDSVIGSDW

SEQ ID NO: 15890 - protein, 79 aa, Homo sapiens
VCPGGGLVCASRSLPISKRVTPAPTALCRGSRWSSSWRLIASSASLWARSTTRGSSAAASSCIRTSWSRWCCAAPAKST

SEQ ID NO: 15891 - protein, 15 aa, Homo sapiens
IWNEIFQVQGCTFCC

SEQ ID NO: 15892 - protein, 9 aa, Homo sapiens
RQGGQCMQE

SEQ ID NO: 15893 - protein, 213 aa, Homo sapiens
TIMQSAMFLAVQHDCRPMDKSAGSGHKSEEKREKMKRTLLKDWKTRLSYFLQNSSTPGKPKTGKKSKQQAFIKPSPEEAQLWSEAFDELLASKYGLAAFRAFLKSEFCEENIEFWLACEDFKKTKSPQKLSSKARKIYTDFIEKEAPKEINIDFQTKTLIAQNIQEATSGCFTTAQKRVYSLMENNSYPRFLESEFYQDLCKKPQITTEPHAT

SEQ ID NO: 15894 - protein, 14 aa, Homo sapiens
LKSSAIVAARCQQG

SEQ ID NO: 15895 - protein, 15 aa, Homo sapiens
LLTPAVSPNVGNLTV

SEQ ID NO: 15896 - protein, 7 aa, Homo sapiens
ILTRKHL

SEQ ID NO: 15897 - protein, 21 aa, Homo sapiens
ILGVQESLRLFFVEVKLHIKE

SEQ ID NO: 15898 - protein, 7 aa, Homo sapiens
IRIAISV

SEQ ID NO: 15899 - protein, 18 aa, Homo sapiens
INSYMTSLPAPTLLRMDK

SEQ ID NO: 15900 - protein, 15 aa, Homo sapiens
MPQIGPLPSWKKNDS

SEQ ID NO: 15901 - protein, 21 aa, Homo sapiens
KLQLLPHSCCGQKGAQSDSFP

SEQ ID NO: 15902 - protein, 24 aa, Homo sapiens
IAAVVKKEPRVTVFLDGRRSVCCN

SEQ ID NO: 15903 - protein, 19 aa, Homo sapiens
IRVAFQMIVKWWKWIQNNK

SEQ ID NO: 15904 - protein, 14 aa, Homo sapiens
TRSTLEKQRISSMG

SEQ ID NO: 15905 - protein, 42 aa, Homo sapiens
VLVGWQMRKKTPRLRKKMKKLEEVQKVDRVKERDFFLKNCDV

SEQ ID NO: 15906 - protein, 76 aa, Homo sapiens
LIGRCLQEMLKLGTLPPTSKPQLLCQMVSLKISACLTTKENMLCSSFTLLTSPLCAPRRSLLSVIGQKNLRNSTAK

SEQ ID NO: 15907 - protein, 60 aa, Homo sapiens
IRWHVEPRRGSRGLKAGSSGQGRPLLAAWVSGYPVSSCRCGTCVRRDGHSPALGFGVGIR

SEQ ID NO: 15908 - protein, 30 aa, Homo sapiens
IYVVFKIPGVYQSETPESLCTSFTLLREYL

SEQ ID NO: 15909 - protein, 18 aa, Homo sapiens
VHRVPDCCLPEVCWKGWL

SEQ ID NO: 15910 - protein, 17 aa, Homo sapiens
LAGKEIKKRQEIQEKYE

SEQ ID NO: 15911 - protein, 17 aa, Homo sapiens
MKPVLVWCWVQMQCGSG

SEQ ID NO: 15912 - protein, 25 aa, Homo sapiens
KCRRRTARSASAAARRATPFTCTRC

SEQ ID NO: 15913 - protein, 104 aa, Homo sapiens
IALLRGFSTLCQSENHRRGRGGTPIHGVEASSRLGNLLPRQDGSRISRRLLRGLFFPVFCRPLPHSLPSVAFLLARRSAWSSDATAGQGRDSVGFLRIPSTSSR

SEQ ID NO: 15914 - protein, 37 aa, Homo sapiens
MQWSRGWRPGRKKRRRRTWQPLDSTLSMVEDFYYLPS

SEQ ID NO: 15915 - protein, 20 aa, Homo sapiens
TARSASAAAKRATPSTCTRC

SEQ ID NO: 15916 - protein, 8 aa, Homo sapiens
KTLLIHSS

SEQ ID NO: 15917 - protein, 44 aa, Homo sapiens
LAPFDTRRIRSAARTHLQPQPQPPPGPRSSRSSRHQWPSERSRV

SEQ ID NO: 15918 - protein, 14 aa, Homo sapiens
IVRTANLIFFSPSL

SEQ ID NO: 15919 - protein, 25 aa, Homo sapiens
KLRTRSWRPRPTCSGNRWHSLNRKS

SEQ ID NO: 15920 - protein, 35 aa, Homo sapiens
TPDFDVLSRDLGLFLSRRSASSPRRKPCSVRAPRS

SEQ ID NO: 15921 - protein, 29 aa, Homo sapiens
LYGQLSPASDSFRLPAFEPLFFFFENSEK

SEQ ID NO: 15922 - protein, 15 aa, Homo sapiens
RRGQKKTKWQSNLLM

SEQ ID NO: 15923 - protein, 10 aa, Homo sapiens
RSWAVTTGPV

SEQ ID NO: 15924 - protein, 14 aa, Homo sapiens
MARRLQKFHEEVSV

SEQ ID NO: 15925 - protein, 16 aa, Homo sapiens
LKSASTPSTLALSVAK

SEQ ID NO: 15926 - protein, 18 aa, Homo sapiens
LKSASTPSTLALSVAKPR

SEQ ID NO: 15927 - protein, 28 aa, Homo sapiens
RQRVLILCGTASAFVLCPPRPRRPFEAA

SEQ ID NO: 15928 - protein, 29 aa, Homo sapiens
IRGQVENFGRQRDKKNKWNRKSISKNRKI

SEQ ID NO: 15929 - protein, 38 aa, Homo sapiens
TRVGAPGSRARNETARIVLRKWQTNQTWGKSPASIRPS

SEQ ID NO: 15930 - protein, 18 aa, Homo sapiens
LWRPTCSGTLTLFRTIEC

SEQ ID NO: 15931 - protein, 27 aa, Homo sapiens
LERRASRRASEGRSHDHLGRWNYFSSG

SEQ ID NO: 15932 - protein, 47 aa, Homo sapiens
LAALKSHLCIVPHPPPCSPQPPPPRASSAAADSGSFIARVPELSLSF

SEQ ID NO: 15933 - protein, 49 aa, Homo sapiens
LKPLEKNDVTVPIKKDSETYTICEESGPFSRLQNRHSQIPKCQPRPQFT

SEQ ID NO: 15934 - protein, 50 aa, Homo sapiens
VRSRVGQAGRKTNLRSRDLKTACTQPFPRVALHSQAQCRIQACMCGGWRS

SEQ ID NO: 15935 - protein, 20 aa, Homo sapiens
VSDRARPRWRLSLMGRSLLR

SEQ ID NO: 15936 - protein, 24 aa, Homo sapiens
VAKRDIMLMIVIVTAGEEEAGQKI

SEQ ID NO: 15937 - protein, 323 aa, Homo sapiens
KEEEEAPVAMGLEAARELECAALGTLLRDPREAERTLLLDCRPFLAFCRRHVRAARPVPWNALLRRRARGPPAAVLACLLPDRALRTRLVRGELARAVVLDEGSASVAELRPDSPAHVLLAALLHETRAGPTAVYFLRGGFDGFQGCCPDLCSEAPAPALPPTGDKTSRSDSRAPVYDQGGPVEILPYLFLGSCSHSSDLQGLQACGITAVLNVSASCPNHFEGLFRYKSIPVEDNQMVEISAWFQEAIGFIDWVKNSGGRVLVHCQAGISRSATICLAYLMQSRRVRLDEAFDFVKQRRGVISPNFSFMGQLLQFETQVLCH

SEQ ID NO: 15938 - protein, 29 aa, Homo sapiens
LQSLVRPAGAAGLWHHSRPQRVRQLPQPL

SEQ ID NO: 15939 - protein, 30 aa, Homo sapiens
VSGFPSPSSPTPTRPRRPGSQRELHFGRVE

SEQ ID NO: 15940 - protein, 76 aa, Homo sapiens
LAVAASLARERRAWGGGGGSGWRSASGGFLARGRGKADRLPRWSSYQMKKLIMVLKKTVTRKIRTWTKCLEPGLEN

SEQ ID NO: 15941 - protein, 42 aa, Homo sapiens
LAWGGTWARGRGVRHAAGLKRRRRWGLHVARRSAWLSWCSVW

SEQ ID NO: 15942 - protein, 69 aa, Homo sapiens
VRLPSGQRLPGKPALREREREQEQEQRRPRPEASAGRRESGEPGQLPERGGAARGNHRASPGLGRAPNI

SEQ ID NO: 15943 - protein, 26 aa, Homo sapiens
RKPQSEPRPGEGAEHLRRLRGRQSRA

SEQ ID NO: 15944 - protein, 72 aa, Homo sapiens
IAPGRPQTEQRRPSALGRGCTAAPPPSPSGSCAQRCLSGTNFSSLTQNSWSRFTSFMMTVFPWKSDSTWHSG

SEQ ID NO: 15945 - protein, 50 aa, Homo sapiens
VVKTDNNENKICGCLSGTNFSSLTQNSWSRFTSFMMTVFPWKSDSTWHSG

SEQ ID NO: 15946 - protein, 17 aa, Homo sapiens
MQNTGGQPSSLCWPASW

SEQ ID NO: 15947 - protein, 46 aa, Homo sapiens [sequence omitted]

SEQ ID NO: 15948 - protein, 78 aa, Homo sapiens [sequence omitted]

SEQ ID NO: 15949 - protein, 50 aa, Homo sapiens
MRSEMAHTDSSSTQSSSSLGKRMLPTTMPVVTIPLARRSLTQCWIGSASW

SEQ ID NO: 15950 - protein, 7 aa, Homo sapiens
RTKQPET

SEQ ID NO: 15951 - protein, 198 aa, Homo sapiens
IVGSSHGLSRAPHLSAAPAPALASRPRFSSAPCSQGGGGGGPATMIHFILLFSRQGKLRLQKWYITLPDKERKKITREIVQIILSRGHRTSSFVDWKELKLVYKRYASLYFCCAIENQDNELLTLEIVHRYVELLDKYFGNVCELDIIFNFEKAYFILDEFIIGGEIQETSKKIAVKAIEDSDMLQETMEEYMNKPTF

SEQ ID NO: 15952 - protein, 15 aa, Homo sapiens
IDILKYFVTQIIAIR

SEQ ID NO: 15953 - protein, 20 aa, Homo sapiens
IRKLEAVHSKTLSYMFRRFM

SEQ ID NO: 15954 - protein, 17 aa, Homo sapiens
IWRTSGYHGGDQYIHFR

SEQ ID NO: 15955 - protein, 11 aa, Homo sapiens
LCTSGFPSPRP

SEQ ID NO: 15956 - protein, 28 aa, Homo sapiens
KVKIKTIEVERIALGVMILGKQTSHQPM

SEQ ID NO: 15957 - protein, 29 aa, Homo sapiens
KKLFRKYLRKQLLSKYPRTKMANLKGMHL

SEQ ID NO: 15958 - protein, 9 aa, Homo sapiens
RVWFCRLQQ

SEQ ID NO: 15959 - protein, 92 aa, Homo sapiens
TSRSVGLFPGFGGSREPLFARNLVVAVVAERIVVLLWRNHRNPSPWHPARPSVGEAMILSPPALAEAPGVLMPSPPALAVTFHHLRMSPRGS

SEQ ID NO: 15960 - protein, 19 aa, Homo sapiens
ILGGRGGRITRSRDRDHPG

SEQ ID NO: 15961 - protein, 54 aa, Homo sapiens
LRIFALPSAFDRLPLQPSRSGDPASSEIGLPPVRPEFGQDAGQQRGGEAAPGAG

SEQ ID NO: 15962 - protein, 10 aa, Homo sapiens
MLAEYTQEEK

SEQ ID NO: 15963 - protein, 7 aa, Homo sapiens
ITSLTGP

SEQ ID NO: 15964 - protein, 21 aa, Homo sapiens
LQGEERGRLRRIPFPPEITQC

SEQ ID NO: 15965 - protein, 28 aa, Homo sapiens
RNHLTVCKHDFQAGRGSLGSLPDFCSSV

SEQ ID NO: 15966 - protein, 34 aa, Homo sapiens
IKKFILCGIQESVKMPVKLQANLLQHFMYCVGLL

SEQ ID NO: 15967 - protein, 46 aa, Homo sapiens
VEPRAPRKSRTFGSVQLLGPAQARRGGAAQGSARVGVSLLHQFIAT

SEQ ID NO: 15968 - protein, 57 aa, Homo sapiens
VVAVRGVEARAFVCVPGHGAAALPGAGNHPARERRNRGRVLLIRHQQHFISAWHISI

SEQ ID NO: 15969 - protein, 38 aa, Homo sapiens
VVRFSPRPQDISCSEPCLLIVSVAHFVSRALGVKLQLI

SEQ ID NO: 15970 - protein, 11 aa, Homo sapiens
INNHMNRKQLS

SEQ ID NO: 15971 - protein, 25 aa, Homo sapiens
IAVRRRSRWWDLTVGPISLFSALLA

SEQ ID NO: 15972 - protein, 9 aa, Homo sapiens
VVGSHRGSD

SEQ ID NO: 15973 - protein, 11 aa, Homo sapiens
LSFSGIRNGWR

SEQ ID NO: 15974 - protein, 43 aa, Homo sapiens
VQLPDPSASASRRRPAYRRPALRRSPGVSGHLGPTVWSCFTFP

SEQ ID NO: 15975 - protein, 36 aa, Homo sapiens
IPSACVWQSWCETRQSCPAAGIIKSFGRTFEHTPRE

SEQ ID NO: 15976 - protein, 41 aa, Homo sapiens
MKGLFLLTTNVSVPGLLPGSSVLPKILMRTLWRETSELLFL

SEQ ID NO: 15977 - protein, 8 aa, Homo sapiens
ISLIPPHH

SEQ ID NO: 15978 - protein, 36 aa, Homo sapiens
MKTVLQRPATLMTETSATQLWSHSYMVVRPKWWKQP

SEQ ID NO: 15979 - protein, 34 aa, Homo sapiens
IALFLERLSILIQKVSIFITNEFETRAFFFFWVM

SEQ ID NO: 15980 - protein, 16 aa, Homo sapiens
IKIFQLSCSPERGMLS

SEQ ID NO: 15981 - protein, 54 aa, Homo sapiens
LPWRARASAFSLLFFLKKVSLCREHICINIGQLYVSIRKIIIGKHVLELVTKII

SEQ ID NO: 15982 - protein, 10 aa, Homo sapiens
ISWYVFSSTV

SEQ ID NO: 15983 - protein, 19 aa, Homo sapiens
LCASRGRAGARQRRGLLCC

SEQ ID NO: 15984 - protein, 30 aa, Homo sapiens
KPIVWPSLPDHKKTLEHLCKKPRKVSVFGA

SEQ ID NO: 15985 - protein, 13 aa, Homo sapiens
TILPKLKSRIRRG

SEQ ID NO: 15986 - protein, 8 aa, Homo sapiens
KNSSWGHW

SEQ ID NO: 15987 - protein, 7 aa, Homo sapiens
TQDPRIL

SEQ ID NO: 15988 - protein, 39 aa, Homo sapiens
TAAARTLLGLQSPSSCIFPRACVSGCVCFLTKGISRSID

SEQ ID NO: 15989 - protein, 37 aa, Homo sapiens
TAAARTLLGLQSPSSCIFPRACVSGCFSVPLNASVWT

SEQ ID NO: 15990 - protein, 16 aa, Homo sapiens
IQSVAVSFKHSVDPGC

SEQ ID NO: 15991 - protein, 12 aa, Homo sapiens
ILSSLAHHGQLP

SEQ ID NO: 15992 - protein, 9 aa, Homo sapiens
LWKKVCQER

SEQ ID NO: 15993 - protein, 20 aa, Homo sapiens
KGKGRKRNTRDLKDRRRRWP

SEQ ID NO: 15994 - protein, 10 aa, Homo sapiens
KNWCGTRCLR

SEQ ID NO: 15995 - protein, 21 aa, Homo sapiens
MSWTGAAPGTGRTTEFEKWTK

SEQ ID NO: 15996 - protein, 40 aa, Homo sapiens
TGNHRVMCVLPLAECVESCSGVRYSVFDRGGLRGTRCSEL

SEQ ID NO: 15997 - protein, 56 aa, Homo sapiens
VACGSFLRCFSLSLRPVAPTGWASVVDFVLLGSSVVTDETRSGMINSIRKLIWAQP

SEQ ID NO: 15998 - protein, 62 aa, Homo sapiens
VPSPRRPCPAALRTRQPLPSSLFHSESRSARPHCSPCVAGTLARDRRIAPAAEPTCPSLGCA

SEQ ID NO: 15999 - protein, 58 aa, Homo sapiens
LPSSLFHSESRSARPHCSPCVAGTLARDRRIAPAAEADTKQGKRSQIPRRGRPTFAVP

SEQ ID NO: 16000 - protein, 13 aa, Homo sapiens
LISSCHGSPSTTC

SEQ ID NO: 16001 - protein, 13 aa, Homo sapiens
ILPDQRQKLLLER

SEQ ID NO: 16002 - protein, 41 aa, Homo sapiens
VSGLQHMQLPGEREPVSYVRAAAAAEPPPGRSSRCRPGLGP

SEQ ID NO: 16003 - protein, 438 aa, Homo sapiens
KMADDPSAADRNVEIWKIKKLIKSLEAARGNGTSMISLIIPPKDQISRVAKMLADEFGTASNIKSRVNRLSVLGAITSVQQRLKLYNKVPPNGLVVYCGTIVTEEGKEKKVNIDFEPFKPINTSLYLCDNKFHTEALTALLSDDSKFGFIVIDGSGALFGTLQGNTREVLHKFTVDLPKKHGRGGQSALRFARLRMEKRHNYVRKVAETAVQLFISGDKVNVAGLVLAGSADFKTELSQSDMFDQRLQSKVLKLVDISYGGENGFNQAIELSTEVLSNVKFIQEKKLIGRYFDEISQDTGKYCFGVEDTLKALEMGAVEILIVYENLDIMRYVLHCQGTEEEKILYLTPEQEKDKSHFTDKETGQEHELIESMPLLEWFANNYKKFGATLEIVTDKSQEGSQFVKGFGGIGGILRYRVDFQGMEYQGGDDEFFDLDDY

SEQ ID NO: 16004 - protein, 15 aa, Homo sapiens
VSGGGGSSNGWAQAV

SEQ ID NO: 16005 - protein, 45 aa, Homo sapiens
KEFVTRGLRDRGSVFELLVRWSARCPRPRAKPGGRSLVTVSTESV

SEQ ID NO: 16006 - protein, 24 aa, Homo sapiens
VKNGTSKGEGKEGRTGHQPRTSGG

SEQ ID NO: 16007 - protein, 14 aa, Homo sapiens
LPCDWWDEGKGRPR

SEQ ID NO: 16008 - protein, 39 aa, Homo sapiens
KYRKTLKMFPLKLSVPPMVMPGLRLMGNCILRVRLEHLC

SEQ ID NO: 16009 - protein, 10 aa, Homo sapiens
VSVLKSRGCF

SEQ ID NO: 16010 - protein, 24 aa, Homo sapiens
LCVRRGSEGQSGEPRRSRGARSPA

SEQ ID NO: 16011 - protein, 20 aa, Homo sapiens
IGLVQWLSARFAATRSPPSC

SEQ ID NO: 16012 - protein, 27 aa, Homo sapiens
KDSRGPAKRERSNYRPPLKTTLRRHIP

SEQ ID NO: 16013 - protein, 17 aa, Homo sapiens
TPHPLTSCQAGSLPLTY

SEQ ID NO: 16014 - protein, 14 aa, Homo sapiens
TRRLAGCSRCFWRT

SEQ ID NO: 16015 - protein, 11 aa, Homo sapiens
MRRLEVCLRFS

SEQ ID NO: 16016 - protein, 64 aa, Homo sapiens
KFSPVATASYRLLPDITLLEPVEGEAAEELSRCFSPGVIEVQEVQGMVFGMLFKLGPKLYFLSR

SEQ ID NO: 16017 - protein, 10 aa, Homo sapiens
TPPLVLQPCL

SEQ ID NO: 16018 - protein, 20 aa, Homo sapiens
RAWCKSFRKNRWNCRKNGGD

SEQ ID NO: 16019 - protein, 42 aa, Homo sapiens
RILPTDTEPSSRPGPPLQSTSIRLEMAFVPAYDWSQRAVQTP

SEQ ID NO: 16020 - protein, 15 aa, Homo sapiens
MASLFMVYTCMSNQR

SEQ ID NO: 16021 - protein, 20 aa, Homo sapiens
TARSASAAAKRVTLSTCTRC

SEQ ID NO: 16022 - protein, 62 aa, Homo sapiens
VPACVPACPRGCVFAGVCCVHRCFCGRRHVRTGWGCPSEPMRQQGLPPPLRPSGQRAAEPRL

SEQ ID NO: 16023 - protein, 9 aa, Homo sapiens
RVENGGRPA

SEQ ID NO: 16024 - protein, 54 aa, Homo sapiens
ILPRPTAIPSRGAPRPGSRIPAHPARGQRLRHLLSGPQALARFGGGACRTQHTQ

SEQ ID NO: 16025 - protein, 12 aa, Homo sapiens
RRGHGRDGVHRG

SEQ ID NO: 16026 - protein, 16 aa, Homo sapiens
VSSAFLVSSTRRLAGF

SEQ ID NO: 16027 - protein, 17 aa, Homo sapiens
ISDGRDLRASWQRGSRQ

SEQ ID NO: 16028 - protein, 12 aa, Homo sapiens
RPGDHCSGRRPS

SEQ ID NO: 16029 - protein, 23 aa, Homo sapiens
RPCFCLRRPRVTTRPRASDLTGI

SEQ ID NO: 16030 - protein, 17 aa, Homo sapiens
LNLPSLLLPQRRAPRRR

SEQ ID NO: 16031 - protein, 20 aa, Homo sapiens
TGRSASAAARRAIQCMCTRC

SEQ ID NO: 16032 - protein, 21 aa, Homo sapiens
KIACLSQRNPLPPRRRAPRRP

SEQ ID NO: 16033 - protein, 10 aa, Homo sapiens
IDLCLHLAAL

SEQ ID NO: 16034 - protein, 17 aa, Homo sapiens
LAFPLRIPRPTPTASIA

SEQ ID NO: 16035 - protein, 42 aa, Homo sapiens
KQCSRTQGASVRHMEVMVFLREKITEETSALMALQSWQYYNP

SEQ ID NO: 16036 - protein, 33 aa, Homo sapiens
LSELFVTVSRQPRARPRLLSAAAGRERRNPVRF

SEQ ID NO: 16037 - protein, 7 aa, Homo sapiens
MRRLVVF

SEQ ID NO: 16038 - protein, 24 aa, Homo sapiens
RVSGARARRRVTESASPRGDRFST

SEQ ID NO: 16039 - protein, 324 aa, Homo sapiens
RERGNEFTRNQQAAQEVVNPKKKMKKKKYVNSGTVTLLSFAVESECTFLDYIKGGTQINFTVAIDFTASNGNPSQSTSLHYMSPYQLNAYALALTAVGEIIQHYDSDKMFPALGFGAKLPPDGRVSHEFPLNGNQENPSCCGIDGILEAYHRSLRTVQLYGPTNFAPVVTHVARNAAAVQDGSQYSVLLIITDGVISDMAQTKEAIVNAAKLPMSIIIVGVGQAEFDAMVELDGDDVRISSRGKLAERDIVQFVPFRDYVDRTGNHVLSMARLARDVLAEIPDQLVSYMKAQGIRPRPPPAAPTHSPSQSPARTPPASPLHTHI

SEQ ID NO: 16040 - protein, 26 aa, Homo sapiens
LDVASRAARLAPRPKPAPLELGSNFL

SEQ ID NO: 16041 - protein, 92 aa, Homo sapiens
VPLPPPIPSFRHLCRVVPSLPGAPSSPPTGLPFPAGLSPPRFPQPFSLPAEPRRQQQQQQQQEEEPGGGGGRGAHGVQSRRRQKKSLLLLRR

SEQ ID NO: 16042 - protein, 58 aa, Homo sapiens
TFPSALFSPGRAAAAAAAAAAAGGGARWRRWPGSPWRTVKEAAKKKSATTTTPIHLLT

SEQ ID NO: 16043 - protein, 62 aa, Homo sapiens
RGREGPYAGGEELQPEPCFSLVAQMRPWWSPGSAEAPQSWWLEGVSLSCPASNRSRGSLSTH

SEQ ID NO: 16044 - protein, 48 aa, Homo sapiens
MFFTCGPNEAMVVSGLFALFGEGSNSSSPKRCTDWRSRGQERCWDPGS

SEQ ID NO: 16045 - protein, 11 aa, Homo sapiens
RRGWPSFTSEK

SEQ ID NO: 16046 - protein, 17 aa, Homo sapiens
LSANVFLSPRGGDDGEN

SEQ ID NO: 16047 - protein, 16 aa, Homo sapiens
KSFSANQPWPVVQSSC

SEQ ID NO: 16048 - protein, 12 aa, Homo sapiens
IHLLWHAGVSRT

SEQ ID NO: 16049 - protein, 29 aa, Homo sapiens
LGPSRVSAQEDAGASGGPCVNLCRVCTDA

SEQ ID NO: 16050 - protein, 43 aa, Homo sapiens
RRRKRTQSSPASAFVHIAPSFNISPPTEDIIWDQADEPLKHSR

SEQ ID NO: 16051 - protein, 19 aa, Homo sapiens
RRRKRTQSSPASAAVCFRK

SEQ ID NO: 16052 - protein, 28 aa, Homo sapiens
KFSGECSCLLQKVRAPGMRRIFKNFLAL

SEQ ID NO: 16053 - protein, 12 aa, Homo sapiens
IFLAGAGWTDKK

SEQ ID NO: 16054 - protein, 40 aa, Homo sapiens
LLAAPCCLPGPARCPRRQHHALLFFFQVPCGQGCGRGTKE

SEQ ID NO: 16055 - protein, 58 aa, Homo sapiens
RSSTLGMRWIWRGSPCTSSLWSLRTSSEVSPGSYFQATSLRSGWVLWRCRTRRTESRP

SEQ ID NO: 16056 - protein, 9 aa, Homo sapiens
LAAVRAERV

SEQ ID NO: 16057 - protein, 80 aa, Homo sapiens
IQLLLQCGQMTCKTTHSCTQCTARMGVPVWDSLRPTTRTSFSSSTFPRTLGCLACPNLLTGLRNREMLLPFYLTKSSASG

SEQ ID NO: 16058 - protein, 11 aa, Homo sapiens
MTRSLINSWGV

SEQ ID NO: 16059 - protein, 167 aa, Homo sapiens
KQPRNFMNKHQKPVLTGQRFKTRKRDEKEKFEPTVFRDTLVQGLNEAGDDLEAVAKFLDSTGSRLDYRRYADTLFDILVAGSMLAPGGTRIDDGDKTKMTNHCVFSANEDHETIRNYAQVFNKLIRRYKYLEKAFEDEMKKALRPHLLSSFSKHGWQKKMPTLLPRL

SEQ ID NO: 16060 - protein, 14 aa, Homo sapiens
VATLLKQMVTMFRY

SEQ ID NO: 16061 - protein, 584 aa, Homo sapiens
VKSEVPVGLEPISPLDLRTDLRMMMPVVDPVVREKQLQQELLLIQQQQQIQKQLLIAEFQKQHENLTRQHQAQLQEHIKLQQELLAIKQQQELLEKEQKLEQQRQEQEVERHRREQQLPPLRGKDRGRERAVASTEVKQKLQEFLLSKSATKDTPTNGKNHSVSRHPKLWYTAAHHTSLDQSSPPLSGTSPSYKYTLPGAQDAKDDFPLRKTASEPNLKVRSRLKQKVAERRSSPLLRRKDGNVVTSFKKRMFEVTESSVSSSSPGSGPSSPNNGPTGSVTENETSVLPPTPHAEQMVSQQRILIHEDSMNLLSLYTSPSLPNITLGLPAVPSQLNASNSLKEKQKCETQTLRQGVPLPGQYGGSIPASSSHPHVTLEGKPPNSSHQALLQHLLLKEQMRQQKLLVAGGVPLHPQSPLATKERISPGIRGTHKLPRHRPLNRTQSAPLPQSTLAQLVIQQQHQQFLEKQKQYQQQIHMNKLLSKSIEQLKQPGSHLEEAEEELQGDQAMQEDRAPSSGNSTRSDSSACVDDTLGQVGAVKVKEEPVDSDEDAQIQEMESGEQAAFMQQVIGKDLAPGFVIKVII

SEQ ID NO: 16062 - protein, 46 aa, Homo sapiens
MFSPSPSPSLRSNSMSSPRPSLCLWLTPSPEGPQPHLRLQPLSFLQ

SEQ ID NO: 16063 - protein, 40 aa, Homo sapiens
VSPTTTSSTPRGAPSALSPSCLSLAEMRLCEWSPWTRTST

SEQ ID NO: 16064 - protein, 8 aa, Homo sapiens
IVSPHNRA

SEQ ID NO: 16065 - protein, 40 aa, Homo sapiens
TAGDFCPAVHATLETTARLLPAAKAPPAERPDGARSPMPS

SEQ ID NO: 16066 - protein, 77 aa, Homo sapiens
LGFLLYKLKCLVLLPRLECGDTTLTHCSICLPGSSDSPASASQEPSRHGLPQLPGGAHQLPRLEQGPHPDCHLPQQP

SEQ ID NO: 16067 - protein, 17 aa, Homo sapiens
LRKNRNPFCMMSEVYTK

SEQ ID NO: 16068 - protein, 36 aa, Homo sapiens
LGQISMVSLGGRQVRPLDTLTQPPIRTKASSGERIH

SEQ ID NO: 16069 - protein, 31 aa, Homo sapiens
VPLLPCTVLRFWSTSLQRCWSWQVMLLRISK

SEQ ID NO: 16070 - protein, 24 aa, Homo sapiens
LRSEWEGQSAPKRWKRTGFRLEAP

SEQ ID NO: 16071 - protein, 15 aa, Homo sapiens
IALPDRASGSPSRKN

SEQ ID NO: 16072 - protein, 11 aa, Homo sapiens
IQSVWSLQTNY

SEQ ID NO: 16073 - protein, 13 aa, Homo sapiens
MASQSAGITAHHG

SEQ ID NO: 16074 - protein, 20 aa, Homo sapiens
TETQGSLHRLTAAEKGERSA

SEQ ID NO: 16075 - protein, 48 aa, Homo sapiens
LGPCGEAARGRGRLRAPGLFSHHEAAAAAPGLPELPPADPAWLMENHP

SEQ ID NO: 16076 - protein, 27 aa, Homo sapiens
RRWMGKCATQCAYFIWFSELWTHWKMT

SEQ ID NO: 16077 - protein, 23 aa, Homo sapiens
VHLLRGSAEPAESCPRGSGPRDR

SEQ ID NO: 16078 - protein, 13 aa, Homo sapiens
LSPSWNPGTSTQK

SEQ ID NO: 16079 - protein, 23 aa, Homo sapiens
LPGVCVGARGSCRVSLGAARDQF

SEQ ID NO: 16080 - protein, 461 aa, Homo sapiens
KLKSKPGKKDKERGEIEVDIQFMRNNMTASMFDLSMKDKSRNPFGKLKDKIKGKNKDSGSDTASAIIPSTTPSVDSDDESVVKDKKKKSKIKTLLSKSNLQKTPLSQSMSVLPTSKPEKVLLRPGDFQSQWDEDDNEDESSSASDVMSHKRTASTDLKQLNQVNFTLPKKEGLSFLGGLRSKNDVLSRSNVCINGNHVYLEQPEAKGEIKDSSPSSSPSPKGFRKKHLFSSTENLAAGSWKEPAEGGGLSSDRQLSESSTKDSLKSMTLPSYRPAPLVSGDLRENMAPANSEATKEAKESKKPESRRSSLLSLMTGKKDVAKGSEGENPLTVPGREKEGMLMGVKPGEDASGPAEDLVRRSEKDTAAVVSRQGSSLNLFEDVQITEPEAEPESKSEPRPPISSPRAPQTRAVKPRLHPVKPMNAMATKVANCSLGTATIISENLNNEVMMKVCPLRSWCVR

SEQ ID NO: 16081 - protein, 55 aa, Homo sapiens
LRIFGPHAPAPDSPLFALAEEQVGQEARAQQPWLLRIPEKHPWSRRWQFTEFESP

SEQ ID NO: 16082 - protein, 31 aa, Homo sapiens
LVRTLLLLTHRCSLSPRNKSVRKPARNSHGF

SEQ ID NO: 16083 - protein, 45 aa, Homo sapiens
LLLHNREKPGCLFILEQQQLTDGEAVTLHPAIPLQTAPTGVMPSV

SEQ ID NO: 16084 - protein, 45 aa, Homo sapiens
LPFVTPDPKIPVLFSVSSRLGAVPLLRQEDGGRKEDEKVAGVDQL

SEQ ID NO: 16085 - protein, 32 aa, Homo sapiens
RKMVAAKKTVSEAGQARKTIHVERCLGQGGQM

SEQ ID NO: 16086 - protein, 47 aa, Homo sapiens
TSPSPPGRPRLPIRLVRSRCHAIPRAGLAVPRAELGEDGRRLEALPG

SEQ ID NO: 16087 - protein, 37 aa, Homo sapiens
VFPLSAALVNRTRRHGPCDPWTEEGRRVCVPRAREAP

SEQ ID NO: 16088 - protein, 40 aa, Homo sapiens
IIKKSKKNLKKSFKKPQKNLQKIRVSPAGDFYFFSSSFIK

SEQ ID NO: 16089 - protein, 12 aa, Homo sapiens
IRVSSVPSLPSH

SEQ ID NO: 16090 - protein, 67 aa, Homo sapiens
LLPALFPQITKTWKLRCLLQNVKVFLESPLPHIPWTIPPLSIHPRIMASLLITTNPWIMMLPERSAI

SEQ ID NO: 16091 - protein, 12 aa, Homo sapiens
IKCSICSYKFNI

SEQ ID NO: 16092 - protein, 32 aa, Homo sapiens
LPSVWFPFRTALRCRSMGSLRTPSGCDYLSAR

SEQ ID NO: 16093 - protein, 16 aa, Homo sapiens
IHSAQQEGDQAWPVQV

SEQ ID NO: 16094 - protein, 51 aa, Homo sapiens
LPVHPPRPGIMWTPRCRRRPPCLSACSPRPSMTYPGSQPFFGEWRPWSSES

SEQ ID NO: 16095 - protein, 35 aa, Homo sapiens
IKGESKQRVLKLCLVLWIHFHRSLQPLVRLQQPRW

SEQ ID NO: 16096 - protein, 16 aa, Homo sapiens
VVWALQNDQAFLSFPL

SEQ ID NO: 16097 - protein, 21 aa, Homo sapiens
KYMPSLHESEQRNEAPLCGWP

SEQ ID NO: 16098 - protein, 22 aa, Homo sapiens
KHPRFSVLLLHVSCSTNGGVLL

SEQ ID NO: 16099 - protein, 27 aa, Homo sapiens
LQVGNCAVLLCYGLWLDCLLLPNWLAR

SEQ ID NO: 16100 - protein, 8 aa, Homo sapiens
LSEDRSPS

SEQ ID NO: 16101 - protein, 15 aa, Homo sapiens
LKIDRHHERHRNYPH

SEQ ID NO: 16102 - protein, 37 aa, Homo sapiens
LVPRLTPGRSPSCLTAASTLRHSEFISKRPGVCPHHA

SEQ ID NO: 16103 - protein, 28 aa, Homo sapiens
KTRLTWMGCRCPTSSCSVTLRMNTCVPT

SEQ ID NO: 16104 - protein, 76 aa, Homo sapiens
LPALAFKFPARGPPRTAASADNQLACKAPRLSAYRRASKPQSSGDPELRSGASAPWKVIPASESQDAGPLAAGRYL

SEQ ID NO: 16105 - protein, 23 aa, Homo sapiens
KHAWGPQWRNHNFSKRDAQVIEL

SEQ ID NO: 16106 - protein, 11 aa, Homo sapiens
RNSVKKMFCFG

SEQ ID NO: 16107 - protein, 22 aa, Homo sapiens
VRGADAQEGAEDARRVGSDLNP

SEQ ID NO: 16108 - protein, 73 aa, Homo sapiens
LDHSTVLRLPQSRGLGAGTLLWTTFSLSAGRATQSPFACGWTTRRTTSTRGTIMASPPCTGPAERAALLWLRC

SEQ ID NO: 16109 - protein, 8 aa, Homo sapiens
RCPITCPR

SEQ ID NO: 16110 - protein, 9 aa, Homo sapiens
MRPKSNLGS

SEQ ID NO: 16111 - protein, 29 aa, Homo sapiens
RRIKRLRSWKMTSDKREPPGRQEETPPKG

SEQ ID NO: 16112 - protein, 21 aa, Homo sapiens
RRTNRSSANTRRPSLPSVPQM

SEQ ID NO: 16113 - protein, 83 aa, Homo sapiens
LLLCGRHVGTGRSGPCDQLHWFRGRKLQDWRDGLSLYQSHQILSLPLQLDLLYPGRSDPGLRGVDPGRQEQFHLCPANLLQLA

SEQ ID NO: 16114 - protein, 14 aa, Homo sapiens
IQTSLETRMMTLSV

SEQ ID NO: 16115 - protein, 34 aa, Homo sapiens
LARRNPGPTRAGPTPGGDGISPQCLEIPHWITVF

SEQ ID NO: 16116 - protein, 26 aa, Homo sapiens
RKIWCADRQTRQMCPWLGSPGEIAAA

SEQ ID NO: 16117 - protein, 8 aa, Homo sapiens
MRLPSRQS

SEQ ID NO: 16118 - protein, 14 aa, Homo sapiens
IALADASMGATPRP

SEQ ID NO: 16119 - protein, 9 aa, Homo sapiens
VSQQGTQHQ

SEQ ID NO: 16120 - protein, 14 aa, Homo sapiens
LERSSRSSTASTAT

SEQ ID NO: 16121 - protein, 244 aa, Homo sapiens
KMAVQISKKRKFVADGIFKAELNEFLTRELAEDGYSGVEVRVTPTRTEIIILATRTQNVLGEKGRRIRELTAVVQKRFGFPEGSVELYAEKVATRGLCAIAQAESLRYKLLGGLAVRRACYGVLRFIMESGAKGCEVVVSGKLRGQRAKSMKFVDGLMIHSGDPVNYYVDTAVRHVLLRQGVLGIKVKIMLPWDPTGKIGPKKPLPDHVSIVEPKDEILPTTPISEQKGGKPEPPAMPQPVPTA

SEQ ID NO: 16122 - protein, 12 aa, Homo sapiens
RLLEELEEFGRP

SEQ ID NO: 16123 - protein, 12 aa, Homo sapiens
RTFVTEVIQDQE

SEQ ID NO: 16124 - protein, 19 aa, Homo sapiens
MKMLHYINPGIKEAEINER

SEQ ID NO: 16125 - protein, 22 aa, Homo sapiens
MQEHSADTRMRRAREARPSKKK

SEQ ID NO: 16126 - protein, 11 aa, Homo sapiens
TYAKGQRSQTQ

SEQ ID NO: 16127 - protein, 16 aa, Homo sapiens
KELPVEFTSGQNEENR

SEQ ID NO: 16128 - protein, 31 aa, Homo sapiens
IMHPWRSDHAGTHPPAVLTMGPERPAPNSRG

SEQ ID NO: 16129 - protein, 33 aa, Homo sapiens
TGKEGLGLPEEFSKCSNARLTAPVIRPGGQSGI

SEQ ID NO: 16130 - protein, 20 aa, Homo sapiens
IVFVRSWGLRGHCDPSQAVD

SEQ ID NO: 16131 - protein, 52 aa, Homo sapiens
KTSSSLCLPPRPLFTSTMSLDIQSLDIQCEELSDARWAELLPLLQQCQVVRL

SEQ ID NO: 16132 - protein, 60 aa, Homo sapiens
LPPLQQLHPRCRASSAWWWVMGLWARRACSSATQLTLSPKSTSPPCSTITARRAQLTGAQ

SEQ ID NO: 16133 - protein, 41 aa, Homo sapiens
MAAYFAVWASVPSPASICCGTCSQGWCGTNASRHHGRVWTK

SEQ ID NO: 16134 - protein, 11 aa, Homo sapiens
KFLYCVFLVQP

SEQ ID NO: 16135 - protein, 33 aa, Homo sapiens
LLMLDCYVILCVRSVWIPDLYSIDHCLCLVLYL

SEQ ID NO: 16136 - protein, 99 aa, Homo sapiens
LLAVTGGAAALSALSPPGENEPQCPPARSQPCPGQRKTTRIPGSGRRPGWAAPVRAGDSAPPLAAVSGNWVPALRGFQRTGTPFPGSPAHPAGEGGRCR

SEQ ID NO: 16137 - protein, 19 aa, Homo sapiens
LAVANGFHSGAIAFPATHD

SEQ ID NO: 16138 - protein, 22 aa, Homo sapiens
RRRRTHAFGESRILVGSSAQAG

SEQ ID NO: 16139 - protein, 116 aa, Homo sapiens
KRPAGPDVLRRESSGFPASTVLGRNPALVPHPGRPPIASPPSPLHRTLGLPQGPRRRSSAAQPPPPPPPLLSRRHDDRVHLAGAPELPPGLRGRHQPPDQPGALRLLRLPVHVLLL

SEQ ID NO: 16140 - protein, 9 aa, Homo sapiens
IKLAHYDRQ

SEQ ID NO: 16141 - protein, 7 aa, Homo sapiens
MTDSENT

SEQ ID NO: 16142 - protein, 49 aa, Homo sapiens
TRETEGKRGRRGGLLARHSLLSGILQRWRRRRQPGSCCCPTGRVVAPTG

SEQ ID NO: 16143 - protein, 11 aa, Homo sapiens
KSSAPAALKWF

SEQ ID NO: 16144 - protein, 9 aa, Homo sapiens
RCKGRGNWD

SEQ ID NO: 16145 - protein, 8 aa, Homo sapiens
RYKGEGRV

SEQ ID NO: 16146 - protein, 14 aa, Homo sapiens
LRCTSRPPRSPCLM

SEQ ID NO: 16147 - protein, 9 aa, Homo sapiens
KDPSLKCLS

SEQ ID NO: 16148 - protein, 11 aa, Homo sapiens
KEVRLDSRLLG

SEQ ID NO: 16149 - protein, 13 aa, Homo sapiens
VLETASGKSLKSN

SEQ ID NO: 16150 - protein, 15 aa, Homo sapiens
IAAAATARAGMNRDG

SEQ ID NO: 16151 - protein, 16 aa, Homo sapiens
MAPIRLSDQEHLRARN

SEQ ID NO: 16152 - protein, 86 aa, Homo sapiens
ITSGGRSFPSVRSHTSRRADQGCCQHLPLRAPLSLGPFRTLFAHKLPKKKEPTCWYCWLVSLWSTSLLLLCYLLAPLPMSGWFPIR

SEQ ID NO: 16153 - protein, 9 aa, Homo sapiens
RSLEKLYQH

SEQ ID NO: 16154 - protein, 12 aa, Homo sapiens
LAVHSCGGVHLH

SEQ ID NO: 16155 - protein, 74 aa, Homo sapiens
RTWDSGAVAPIAAPAVADATDPAAGGLGTERPLGLGAARGARRVAAVSKTSALSALVYKLKWRKFRWPTWILTS

SEQ ID NO: 16156 - protein, 35 aa, Homo sapiens
LALHGELPKGGKDRRGHVRSCVQSQKQVDGRGGGA

SEQ ID NO: 16157 - protein, 38 aa, Homo sapiens
VRGFTCVRNSSEPWRPFPLHLLTSLRQELMKREQRQLV

SEQ ID NO: 16158 - protein, 31 aa, Homo sapiens
IFPASVGRARRRFWKERRDGCAGRAPACIGW

SEQ ID NO: 16159 - protein, 35 aa, Homo sapiens
IFPASVGRARRRFWKERRDGCAGRAPGPVQTCIGW

SEQ ID NO: 16160 - protein, 13 aa, Homo sapiens
MYGTQPARRNSVD

SEQ ID NO: 16161 - protein, 22 aa, Homo sapiens
LPRLAAPPHSLRPLPLRKPPGW

SEQ ID NO: 16162 - protein, 26 aa, Homo sapiens
VVLETLVVEATMILGITTISLQILDP

SEQ ID NO: 16163 - protein, 79 aa, Homo sapiens
VVLETLVVVVEVVSVGMTTSVVEETSVVVVALVAAVVVVDMVAVGMAIMDLVMMEAILEVVEATMILGITTISLQILDP

SEQ ID NO: 16164 - protein, 7 aa, Homo sapiens
LALPEDR

SEQ ID NO: 16165 - protein, 9 aa, Homo sapiens
LPSRKTCQI

SEQ ID NO: 16166 - protein, 28 aa, Homo sapiens
KSKNPEKEKKEGLQDCRECHQWGNIRRK

SEQ ID NO: 16167 - protein, 21 aa, Homo sapiens
ILVAVPSPPSPPQTPSSSSHA

SEQ ID NO: 16168 - protein, 77 aa, Homo sapiens
KNNPRKYLRSVGDGETVEFDVVEGEKGAEAANVTGPDGVPVEGSRYAADRRRYRRGYYGRRRGPPRNVRCLCYLTSD

SEQ ID NO: 16169 - protein, 48 aa, Homo sapiens
REMSVAQLPRLECNGMILAHCSLHLLGSSGSRASVSQVAGITGWSAMA

SEQ ID NO: 16170 - protein, 15 aa, Homo sapiens
LSLKTLLSKRWGRLI

SEQ ID NO: 16171 - protein, 27 aa, Homo sapiens
TQLTLSSPHDCYRGLQSLLSPVQNGNS

SEQ ID NO: 16172 - protein, 9 aa, Homo sapiens
LRCSLGGRD

SEQ ID NO: 16173 - protein, 27 aa, Homo sapiens
VDKKMMPPVPISQHVMKGPSKFLSCVL

SEQ ID NO: 16174 - protein, 20 aa, Homo sapiens
LGWTEKGTWSPMEVVKWQRI

SEQ ID NO: 16175 - protein, 19 aa, Homo sapiens
MAKNLTTGSTLQGLTSVFF

SEQ ID NO: 16176 - protein, 79 aa, Homo sapiens
IIRKHVHLLTIIEWNSRKSVSVDAALWSEVFHRDFVKKNFIVSWEFSSKQNYGKKGRNSRKICTVGFYCHELEASQVDQ

SEQ ID NO: 16177 - protein, 24 aa, Homo sapiens
IDYYRMELKEICVSGCCSVVRSLP

SEQ ID NO: 16178 - protein, 20 aa, Homo sapiens
MEKKEEIPGKSALWAFIAMS

SEQ ID NO: 16179 - protein, 14 aa, Homo sapiens
KKFQENLHCGLLLP

SEQ ID NO: 16180 - protein, 22 aa, Homo sapiens
MRRMTMQPLDALYIILNPEIMK

SEQ ID NO: 16181 - protein, 43 aa, Homo sapiens
RPTDEGSHFSAMELNGQVGFSFVANGECFSFDSTIQFRTSQCV

SEQ ID NO: 16182 - protein, 41 aa, Homo sapiens
VGHALARSFCRHLGSAFPAQNARRSHRNRPCYRAGVAAAPG

SEQ ID NO: 16183 - protein, 107 aa, Homo sapiens
ILVGLEEIGGRRVAALTWSGTWGEGTMGRKLDPTKEKRGPGRKARKQKGAETELVRFLPAVSDENSKRLSSRARKRAAKRRLGSVEAPKTNKSPEAKPLPGKLPKGP

SEQ ID NO: 16184 - protein, 13 aa, Homo sapiens
TSSCWPFAPVQWD

SEQ ID NO: 16185 - protein, 16 aa, Homo sapiens
RASSRHLQGSDMSKAN

SEQ ID NO: 16186 - protein, 16 aa, Homo sapiens
VPDRLEKRKECHFENY

SEQ ID NO: 16187 - protein, 9 aa, Homo sapiens
MNHLVLVPG

SEQ ID NO: 16188 - protein, 28 aa, Homo sapiens
LPPSPEGSEKRPRPERKSGVATGEKSTP

SEQ ID NO: 16189 - protein, 35 aa, Homo sapiens
IFFTVLIQMIPSIKERTDQFYVVYEKENLASHGQG

SEQ ID NO: 16190 - protein, 22 aa, Homo sapiens
LQERRRKGPCGDDVVDGGGRGS

SEQ ID NO: 16191 - protein, 51 aa, Homo sapiens
IQHFLNTLFPERAILTEATQRYPFDRSGSAEKCSSLTQTFDGQEVLLSVNH

SEQ ID NO: 16192 - protein, 54 aa, Homo sapiens
IQHFLNTLFPERAILTEATQRYPFDRSGSAEKCSSLTQTFDGQEFLSIMPTNKL

SEQ ID NO: 16193 - protein, 27 aa, Homo sapiens
IPSTEVEVLKNAHLSHRLLMDRRCCFL

SEQ ID NO: 16194 - protein, 24 aa, Homo sapiens
IPSTEVEVLKNAHLSHRLLMDRSF

SEQ ID NO: 16195 - protein, 15 aa, Homo sapiens
LFSVSHLTMLQLFNI

SEQ ID NO: 16196 - protein, 48 aa, Homo sapiens
TRPGQKAAAGEAGRGPEDADRDPRRRRTASRPCRWWGWTWARRAATSR

SEQ ID NO: 16197 - protein, 17 aa, Homo sapiens
KSQLRRMKCLLKLTWSV

SEQ ID NO: 16198 - protein, 22 aa, Homo sapiens
MTCSRLLACLCLGIEYEKLQKT

SEQ ID NO: 16199 - protein, 80 aa, Homo sapiens
IGPVQIRGCSFAHKRGFAGSLNGKLESGPLIKILNWLEGRSREQRGKNIASVGDAVQLPKGVRNGNAEAWEKGSGGGRRG

SEQ ID NO: 16200 - protein, 34 aa, Homo sapiens
LQPVPPQPLPPAPDPEPSCPSVPSATRRCTSPRG

SEQ ID NO: 16201 - protein, 45 aa, Homo sapiens
KLGCGVIPVCLLPAFLGFFRRRGASLRNSRPLRATALAVSFASSS

SEQ ID NO: 16202 - protein, 35 aa, Homo sapiens
IGWWEYRTRLLRVPCAATFQPWPQVNRVSAKPGLP

SEQ ID NO: 16203 - protein, 10 aa, Homo sapiens
ICSEHLRSQD

SEQ ID NO: 16204 - protein, 17 aa, Homo sapiens
LCPEPARSRRLSPSVLF

SEQ ID NO: 16205 - protein, 9 aa, Homo sapiens
MPQPEEGAD

SEQ ID NO: 16206 - protein, 16 aa, Homo sapiens
VRSEPSVLRQGSVPWP

SEQ ID NO: 16207 - protein, 21 aa, Homo sapiens
MASICAASVSVSTRRISVSLR

SEQ ID NO: 16208 - protein, 19 aa, Homo sapiens
TGSPLVAFVVEKVDKWQSA

SEQ ID NO: 16209 - protein, 36 aa, Homo sapiens
LAGQGTLSSSTAQRDQWPPLQCLPQPGLDSSAEQIL

SEQ ID NO: 16210 - protein, 20 aa, Homo sapiens
MGTWSSPAWSRASSPRSHSV

SEQ ID NO: 16211 - protein, 11 aa, Homo sapiens
IRPNPFPPRLL

SEQ ID NO: 16212 - protein, 32 aa, Homo sapiens
LTLLACPQARGGWPLCVCMQTNRVNGVRCCIL

SEQ ID NO: 16213 - protein, 14 aa, Homo sapiens
KVLGPSEEAKAALG

SEQ ID NO: 16214 - protein, 8 aa, Homo sapiens
LVSPLSPC

SEQ ID NO: 16215 - protein, 8 aa, Homo sapiens
KLESPGKL

SEQ ID NO: 16216 - protein, 26 aa, Homo sapiens
TMSAQSQALTRSTQPREGGRPLPAEP

SEQ ID NO: 16217 - protein, 12 aa, Homo sapiens
KLQERSVKCYLS

SEQ ID NO: 16218 - protein, 16 aa, Homo sapiens
LSLQSPKTRGRGFGVY

SEQ ID NO: 16219 - protein, 25 aa, Homo sapiens
KSKIKNCAKFFVCPTMILTVPQCPA

SEQ ID NO: 16220 - protein, 24 aa, Homo sapiens
VKHPRLGSQFVLSSPLFLFEHGAD

SEQ ID NO: 16221 - protein, 7 aa, Homo sapiens
VWQLSPG

SEQ ID NO: 16222 - protein, 21 aa, Homo sapiens
TRNARHASRTPAATAARKSYI

SEQ ID NO: 16223 - protein, 61 aa, Homo sapiens
LSALPCRRRWAGSLPRSPAHSAGSGDQGWQVKPLGVDPERWSSRLALRGTLHLAAGGDFQE

SEQ ID NO: 16224 - protein, 76 aa, Homo sapiens
LSALPCRRRWAGSLPRSPAHSAGSGDQGWQVKPLGVDPERWSSRLALRGTLHLAAGTQTRAGQQVVTSKSDSVGGK

SEQ ID NO: 16225 - protein, 11 aa, Homo sapiens
KGWTAGGDFQE

SEQ ID NO: 16226 - protein, 12 aa, Homo sapiens
IEQPGALEQCWV

SEQ ID NO: 16227 - protein, 47 aa, Homo sapiens
VRPGAGGVFLDPVVLRGAALLSSGRGTPGVEGGRGGQWRQNVGYQGI

SEQ ID NO: 16228 - protein, 36 aa, Homo sapiens
LLQPLFTTSFQLKTSLPIRMLLLKWLLILEPIKICG

SEQ ID NO: 16229 - protein, 56 aa, Homo sapiens
VLELRCLLACARVRGHGLKRLYPTSNPKLWGLPHPARAGLFPAEQSALRTAELQWL

SEQ ID NO: 16230 - protein, 8 aa, Homo sapiens
KKRKMKGC

SEQ ID NO: 16231 - protein, 68 aa, Homo sapiens
MLSLLRNETGNSSISLGISSWPWLGKWGSWQNSFSGKPMGNLAPKAGPPGNGQPFKRSLVTSSSTWWH

SEQ ID NO: 16232 - protein, 40 aa, Homo sapiens
MIVTGGIAVPTAALTWPTTTTSSPSPSRAVRGVPTSSTQW

SEQ ID NO: 16233 - protein, 24 aa, Homo sapiens
IPSLRNTSLPRHAKEESDLPRRGR

SEQ ID NO: 16234 - protein, 23 aa, Homo sapiens
LHLCLALCTEVESARGRERKEKK

SEQ ID NO: 16235 - protein, 34 aa, Homo sapiens
LRLRGDGHQDRQRGLPGGVQPGARRRLGRHLGDF

SEQ ID NO: 16236 - protein, 18 aa, Homo sapiens
IPVPPAVVWSPCHSERLV

SEQ ID NO: 16237 - protein, 26 aa, Homo sapiens
KLSVNSAYKKKLTILRILEVVCQEMG

SEQ ID NO: 16238 - protein, 12 aa, Homo sapiens
KMAPRAFLPLPV

SEQ ID NO: 16239 - protein, 34 aa, Homo sapiens
IVRPDAISRSCAGPARLLVPGARVNARPRPRSPD

SEQ ID NO: 16240 - protein, 18 aa, Homo sapiens
ISWGVVSAHSTSPQPSLE

SEQ ID NO: 16241 - protein, 14 aa, Homo sapiens
RGGALKQGASPGLS

SEQ ID NO: 16242 - protein, 113 aa, Homo sapiens
TGSSQCVRASSLLGSSWNRSLLKWQMTWTSRQEMQGPQPPSQCSAQHYVRMALWCSKAGHVRSSRCLLRRLASTATPRSIWLVLTSLLGRNMKISARQLIIWMSPTSKGMTSS

SEQ ID NO: 16243 - protein, 22 aa, Homo sapiens
RKSHPWDSAEAGDGPSPAGETE

SEQ ID NO: 16244 - protein, 23 aa, Homo sapiens
MMAPQIAPTAMLWWLELTATPAK

SEQ ID NO: 16245 - protein, 13 aa, Homo sapiens
VVLPETAVLDALF

SEQ ID NO: 16246 - protein, 59 aa, Homo sapiens
RTTASLHSRTGPSWRAAPAPRSGWPRLASSTAPLRTSQTWPSVSSASRSWKAGSQMTTP

SEQ ID NO: 16247 - protein, 10 aa, Homo sapiens
ICSARACACA

SEQ ID NO: 16248 - protein, 54 aa, Homo sapiens
LLSQRSAAARPLQLPGPWPTWSAPSSPSSRTACSAAWWARSSSASSRRDSASWP

SEQ ID NO: 16249 - protein, 46 aa, Homo sapiens
TPPPRTRSLAPAAARPQDNGSILLGSAIVSSAGPGSSCKPLTFVPW

SEQ ID NO: 16250 - protein, 22 aa, Homo sapiens
TALFYWGPPSSRPPVLALLVSR

SEQ ID NO: 16251 - protein, 25 aa, Homo sapiens
TALFYWGPPSSRPPVLALLLTFVPW

SEQ ID NO: 16252 - protein, 32 aa, Homo sapiens
VCKPERTGLQIREESASCLAAEYWSQEPAMRF

SEQ ID NO: 16253 - protein, 18 aa, Homo sapiens
RKRPRNKTSHFVCTYWPL

SEQ ID NO: 16254 - protein, 14 aa, Homo sapiens
TQEHMPVPRRDWTG

SEQ ID NO: 16255 - protein, 8 aa, Homo sapiens
KGCPNIRM

SEQ ID NO: 16256 - protein, 8 aa, Homo sapiens
RQPNPDLK

SEQ ID NO: 16257 - protein, 44 aa, Homo sapiens
LATWPTPPEMPGSSRRLHHGTRRPRWTSATWGLTPSWSRCAGRP

SEQ ID NO: 16258 - protein, 17 aa, Homo sapiens
RLNGRSFTTKAKWAHHR

SEQ ID NO: 16259 - protein, 24 aa, Homo sapiens
TRMVLRSPLPSSSEPFYLVSRVMM

SEQ ID NO: 16260 - protein, 529 aa, Homo sapiens
RSTWRGRVATAAAPARPGSDMEDIQTNAELKSTQEQSVPAESAAVLNDYSLTKSHEMENVDSGEGPANEDEDIGDDSMKVKDEYSERDENVLKSEPMGNAEEPEIPYSYSREYNEYENIKLERHVVSFDSSRPTSGKMNCDVCGLSCISFNVLMVHKRSHTGERPFQCNQCGASFTQKGNLLRHIKLHTGEKPFKCHLCNYACQRRDALTGHLRTHSVEKPYKCEFCGRSYKQRSSLEEHKERCRTFLQSTDPGDTASAEARHIKAEMGSERALVLDRLASNVAKRKSSMPQKFIGEKRHCFDVNYNSSYMYEKESELIQTRMMDQAINNAISYLGAEALRPLVQTPPAPTSEMVPVISSMYPIALTRAEMSNGAPQELEKKSIHLPEKSVPSERGLSPNNSGHDSTDTDSNHEERQNHIYQQNHMVLSRARNGMPLLKEVPRSYELLKPPPICPRDSVKVINKEGEVMDVYRCDHCRVLFLDYVMFTIHMGCHGFRDPFECNMCGYRSHDRYEFSSHIARGEHRALLK

SEQ ID NO: 16261 - protein, 21 aa, Homo sapiens
LMSTIIQVTCMRKRVSSYRPA

SEQ ID NO: 16262 - protein, 15 aa, Homo sapiens
KPGQRYCCTNGQKSI

SEQ ID NO: 16263 - protein, 8 aa, Homo sapiens
VGSVFNYE

SEQ ID NO: 16264 - protein, 12 aa, Homo sapiens
IRTKMVPTSKAC

SEQ ID NO: 16265 - protein, 24 aa, Homo sapiens
LSQLTATVPASFSSASCPVWASGY

SEQ ID NO: 16266 - protein, 17 aa, Homo sapiens
KKTRKEVVYQNHVIIRF

SEQ ID NO: 16267 - protein, 41 aa, Homo sapiens
KIAKHAHGHGTHRTLPTSCLSDDNSFFFVSWNKSKLYPSVG

SEQ ID NO: 16268 - protein, 10 aa, Homo sapiens
KSLLSDDQNK

SEQ ID NO: 16269 - protein, 57 aa, Homo sapiens
MNRSDFSRAAERLCSSSSTTAPTAAGPALPTGLRPPCLPATKAPFSPRSRTRQPGRS

SEQ ID NO: 16270 - protein, 46 aa, Homo sapiens
RTQEREESEEHRTVSVAHTPSPVTTSPLTLTLPAWPWTPSQDLPIS

SEQ ID NO: 16271 - protein, 14 aa, Homo sapiens
LRDNFYSVFLEEYI

SEQ ID NO: 16272 - protein, 49 aa, Homo sapiens
MSLRPQGTRARAPAPMMKAKCTTPSSSSSRSRASARPRRGWSCSRESGR

SEQ ID NO: 16273 - protein, 73 aa, Homo sapiens
TAISQGLPEASVLCPQPRSGNVLHSASSPLPTLPRPRPAALLPAQPRVCGPSRPEAARTRSLKVKDNLLIPAL

SEQ ID NO: 16274 - protein, 67 aa, Homo sapiens
TAISQGLPEASVLCPQPRSGNVLHSASSPLPTLPRPRPAALLPAQPRVCGPSRPEAAPSQETCQHFW

SEQ ID NO: 16275 - protein, 8 aa, Homo sapiens
IQREWFGH

SEQ ID NO: 16276 - protein, 44 aa, Homo sapiens
LPEPLPLWMIERIWCTRRSWPSRLSDTTCSGTEPAVSSKKWWSQ

SEQ ID NO: 16277 - protein, 20 aa, Homo sapiens
ILNRAAEPSGVPTQAKLEHG

SEQ ID NO: 16278 - protein, 23 aa, Homo sapiens
LRLFLGQRKRRGGRRSGLKLRRW

SEQ ID NO: 16279 - protein, 41 aa, Homo sapiens
ISARPDTRSQHPCLQDCSCSARVLQLSEVLQLEAEVPGLCS

SEQ ID NO: 16280 - protein, 38 aa, Homo sapiens
LARLGKVNSVARHVLLRGAPGPGGWPHRPLGKTCKEFA

SEQ ID NO: 16281 - protein, 36 aa, Homo sapiens
LEAVASYAGGRGGGPDFGSRGQSASEVICENGSLFT

SEQ ID NO: 16282 - protein, 25 aa, Homo sapiens
TAVSGEQQPWPYATLWPWASTRATK

SEQ ID NO: 16283 - protein, 34 aa, Homo sapiens
LRTWRTCTAATRSCSKSWSSWRCRRNTSKMSKRT

SEQ ID NO: 16284 - protein, 30 aa, Homo sapiens
IRKLGRSSMWRRRGSSLRFAIAKTSLPEAP

SEQ ID NO: 16285 - protein, 45 aa, Homo sapiens
RTALQFSWSSLRSSCEPTMSSFASTRTARTEPPCSEPSAFWALRL

SEQ ID NO: 16286 - protein, 41 aa, Homo sapiens
KILEQPTLGQRIWRNPGLKSRFSSFKTYLNTSLHGSSRDPP

SEQ ID NO: 16287 - protein, 15 aa, Homo sapiens
KDLEKPRAKVTFFLL

SEQ ID NO: 16288 - protein, 8 aa, Homo sapiens
LIFPAAAQ

SEQ ID NO: 16289 - protein, 106 aa, Homo sapiens
VSLRGLVCVERRERARCPECTCCLFCPSREPPPLSPSSRHGSAERGTAHHDPVGVEDVSLPHAARWPAAAPESAAVAGHAQRPGALPLGQGGGPRARGVVAGRPPL

SEQ ID NO: 16290 - protein, 40 aa, Homo sapiens
LGGRGAAVQLSPEPSPAERPPLPVRLCASAPWPASTPWRR

SEQ ID NO: 16291 - protein, 15 aa, Homo sapiens
VSPSASFLPGSRPWR

SEQ ID NO: 16292 - protein, 59 aa, Homo sapiens
ICARTQVRSPTTATGTAAAGSLRAQTSSRATTESTRATGHSSAICAIVPSRAPITWRCT

SEQ ID NO: 16293 - protein, 34 aa, Homo sapiens
IYWTQRTGPGTAWLQRVSLDDDDDDATTPAPVCD

SEQ ID NO: 16294 - protein, 18 aa, Homo sapiens
LDPENRAGHSVATEGLPR

SEQ ID NO: 16295 - protein, 26 aa, Homo sapiens
MTTTTTPPPQPPSVTEGPVGKDHDPP

SEQ ID NO: 16296 - protein, 26 aa, Homo sapiens
VVCLGADGEAEPTCQWPGAGFVAKLM

SEQ ID NO: 16297 - protein, 35 aa, Homo sapiens
LGWMVARAFRVSMSADGEAEPTCQWPGAGFVAKLM

SEQ ID NO: 16298 - protein, 26 aa, Homo sapiens
MGSGTNVRSGGSNLPWPRSARPPGNC

SEQ ID NO: 16299 - protein, 71 aa, Homo sapiens
LGLLQLKLTNPLGEDAWGSRSPPSSACHHLPPLPAVCCLPGPWVPGPVDAQGPSIIDGEPGGRRPLPMPAQ

SEQ ID NO: 16300 - protein, 57 aa, Homo sapiens
LQSPGRWKTSPEGRPPQAPPGLAWFPSASSGLRMRILRTSWRQTQKSKTASSRAWSR

SEQ ID NO: 16301 - protein, 10 aa, Homo sapiens
LFDPHESSTG

SEQ ID NO: 16302 - protein, 19 aa, Homo sapiens
LFSRWSSDAHVGTAEKATW

SEQ ID NO: 16303 - protein, 7 aa, Homo sapiens
LSPTATA

SEQ ID NO: 16304 - protein, 25 aa, Homo sapiens
LQLVVAAEAAWISASWRETIQAAVA

SEQ ID NO: 16305 - protein, 88 aa, Homo sapiens
VIASGRPNRRSCPRGDAQLPAAQTHGPRPSTPSGYPVEGCPPFLPPVPSDGPPQPRLEPPEGPGTSRALAGGSSKRSSSGRSWPGGRS

SEQ ID NO: 16306 - protein, 117 aa, Homo sapiens
IGQERTRRRRKMRMWIVRIRKMIQKQPWEKLSQTHIPPTRTRGPTSGAGDIDLEKRQRKRKLLRTGEKLSPAPSEWPSMYLERSHRLPGLLLGCPSDCKGGSSAQKPLLMIRTLRLP

SEQ ID NO: 16307 - protein, 17 aa, Homo sapiens
MKTTWPKTAGVTSGERI

SEQ ID NO: 16308 - protein, 34 aa, Homo sapiens
RRGDGQGVGAERGGPGEPEPFPQPLPVRDQLRVQ

SEQ ID NO: 16309 - protein, 125 aa, Homo sapiens
RETHVCLSETDAVGVTVVLITCTYHGQEFIRVGYYVNNEYLNPELRENPPMKPDFSQLQRNILASNPRVTRFHINWDNNMDRLEAIETQDPSLGCGLPLNCTPIKGLGLPGCIPGLLPENSMDCI

SEQ ID NO: 16310 - protein, 27 aa, Homo sapiens
KSRGAASSSSPTLAGCRDNFSLPQSSP

SEQ ID NO: 16311 - protein, 74 aa, Homo sapiens
KYLGQKSTTSPWNQQISSFTETLTYSLLKKILTFLLDKVLSVLRDWIVRETLRKLMSHVFPKKMFLEPTTVIVV

SEQ ID NO: 16312 - protein, 28 aa, Homo sapiens
ISPESVAEALCLEVPLSRPPRWGLDDAS

SEQ ID NO: 16313 - protein, 38 aa, Homo sapiens
LQRADRLIWTPPRPDCMISRDPLELHVSAPRTSNPRRS

SEQ ID NO: 16314 - protein, 8 aa, Homo sapiens
LTVASSPA

SEQ ID NO: 16315 - protein, 8 aa, Homo sapiens
TRRQRSPA

SEQ ID NO: 16316 - protein, 29 aa, Homo sapiens
MTMAECPTLCVSSSPALLQAGTTDDVCRE

SEQ ID NO: 16317 - protein, 31 aa, Homo sapiens
RSSGGLRTRGDPQESTHQDARAASAVTTFSL

SEQ ID NO: 16318 - protein, 20 aa, Homo sapiens
VPASSSTSLTPPGMSTSPRR

SEQ ID NO: 16319 - protein, 64 aa, Homo sapiens
KKPRCFPSWWPILLETPRGSQRRSPPPTGAWRWPPSRTKARQQAATAVPGTRCAAAFEPTCLCC

SEQ ID NO: 16320 - protein, 14 aa, Homo sapiens
RRLQGVLPSAPELL

SEQ ID NO: 16321 - protein, 69 aa, Homo sapiens
TAELLEDLGPWVAGSHSIAQARVRGYLIRNFSEGRARWLMPVIPAFSEAEAGVQWCDLSSLQPLLPGFK

SEQ ID NO: 16322 - protein, 20 aa, Homo sapiens
TPPGLPRGGRGGAAERGPAH

SEQ ID NO: 16323 - protein, 78 aa, Homo sapiens
IARHRTPSLEICRHLDFSHAVCQVSAATRRQGAGPCGLCCTSDGFAPASALSLLQHSDLHPLRGFHCPRGENAPGSVT

SEQ ID NO: 16324 - protein, 18 aa, Homo sapiens
LGAAAAWDAHLTEGGQGI

SEQ ID NO: 16325 - protein, 18 aa, Homo sapiens
IRRTTACWTRLCRMTPSS

SEQ ID NO: 16326 - protein, 22 aa, Homo sapiens
ITTGPQGSQRDSLHPGQETQPP

SEQ ID NO: 16327 - protein, 18 aa, Homo sapiens
TQRSFEARCIPNLSTTQR

SEQ ID NO: 16328 - protein, 54 aa, Homo sapiens
VRREARPSRERHGGPGAAAAAGAAGRAGGALRRHGLRYEGGETNLCVFAFLRPS

SEQ ID NO: 16329 - protein, 66 aa, Homo sapiens
MVRTSVCSPQVQEAAAQPWTGRSSSHRTRPTWNLLCRQRLQSRCPGCFLETPRTCPTWTPSTCSWR

SEQ ID NO: 16330 - protein, 15 aa, Homo sapiens
LTGLALTVRRQVGVR

SEQ ID NO: 16331 - protein, 19 aa, Homo sapiens
REHRGEDSGPYRMFIGSQL

SEQ ID NO: 16332 - protein, 26 aa, Homo sapiens
REHRGEDSGPYRMFIGSQPSPPTTGD

SEQ ID NO: 16333 - protein, 38 aa, Homo sapiens
KRSPCVGSWSLQILFRGRVHIPPHHVPKKPAPHALLPG

SEQ ID NO: 16334 - protein, 29 aa, Homo sapiens
TVFSRASVSAARASPTGWSSRSFGRDMRS

SEQ ID NO: 16335 - protein, 76 aa, Homo sapiens
LNCQRAGESQGARGGQGSTHRAPSAIASFRAPKPGEAAHPAGPVCQRDESWRGRRSAGNPATPAIARPPARALESA

SEQ ID NO: 16336 - protein, 68 aa, Homo sapiens
VLPPPLLLLLQPLRPPRPPREPETPVYAPPLTPLATCPPRLGGASCGTSRGCRRILQPESAGLRPRTT

SEQ ID NO: 16337 - protein, 9 aa, Homo sapiens
IHGRTSNLN

SEQ ID NO: 16338 - protein, 35 aa, Homo sapiens
LKKVIQQWRDGGQAFGACHLRQGHYRPCSPFLQIC

SEQ ID NO: 16339 - protein, 27 aa, Homo sapiens
LQKCRKSTGLRKVTPRPFQKPERPSVM

SEQ ID NO: 16340 - protein, 32 aa, Homo sapiens
RLWHRIRNSEESKPGCNEVSLQQHALLGSRME

SEQ ID NO: 16341 - protein, 93 aa, Homo sapiens
LGLEHWTMDWQGRLPWAGCTGSASCATLTARKSQIPASVRSSSWRWQSSWSQKAGRMQVMSTSALMTVGWLPKEIQKADFRQTLSAFLMGFAS

SEQ ID NO: 16342 - protein, 23 aa, Homo sapiens
RRKLPWLEPCRFITRELQEPGRS

SEQ ID NO: 16343 - protein, 13 aa, Homo sapiens
MPAPSATPIPSSR

SEQ ID NO: 16344 - protein, 59 aa, Homo sapiens
VEEETAPPSFASFAGLLLLRHHGAVAVEGAGGHRSLCPSPRRLFRCAASFLYAINRKRR

SEQ ID NO: 16345 - protein, 11 aa, Homo sapiens
KMAAPTAAGAA

SEQ ID NO: 16346 - protein, 27 aa, Homo sapiens
LCSLLASTSPRAPSRCTWISHRVTPAK

SEQ ID NO: 16347 - protein, 106 aa, Homo sapiens
KAENPGGPPVLVVPYPILASGETAKEGKTYRCKVCPLTFFTKSEMQIHSKSHTEAKPHKCPHCSKSFANASYLAQHLRIHLGVKPYHCSYCDKSFRQLSHLQQHTR

SEQ ID NO: 16348 - protein, 14 aa, Homo sapiens
LILNWVRCRCCCSC

SEQ ID NO: 16349 - protein, 145 aa, Homo sapiens
IKDNLDDIKRIIKAREHRNRLLADIRDYRPYADLVSEIRILLVGPVGSGKSSFFNSVKSIFHGHVTGQAVVGSDITSITERYRIYSVKDGKNGKSLPFMLCDTMGLDGAEGAGLCMDDIPHILKGCMPDRYQDSLCGLCLRHQLY

SEQ ID NO: 16350 - protein, 37 aa, Homo sapiens
IGPMQTWFQKFVFFWWVQLGLESPVFSIQSSLFFMAM

SEQ ID NO: 16351 - protein, 47 aa, Homo sapiens
RPHEWEVLSRSGFWHLKSKSIQRWMNYKRNLKLQDLRSFSPNLYLLW

SEQ ID NO: 16352 - protein, 46 aa, Homo sapiens
LFYSQGMTAWEAMAPHVNPTLKDKALSPQQPQQLALHPVSLTTTSK

SEQ ID NO: 16353 - protein, 16 aa, Homo sapiens
LIVSSGPGLWAGVWNW

SEQ ID NO: 16354 - protein, 22 aa, Homo sapiens
VSATGHSRTVPDPEGKLRAEGG

SEQ ID NO: 16355 - protein, 17 aa, Homo sapiens
LSLYHLFLNTEEKFVMD

SEQ ID NO: 16356 - protein, 16 aa, Homo sapiens
MKPLRWPLVMVHTWLR

SEQ ID NO: 16357 - protein, 8 aa, Homo sapiens
MYSTFDIR

SEQ ID NO: 16358 - protein, 26 aa, Homo sapiens
LGPAHAKDLPLSPPLLLPSFPSQNIP

SEQ ID NO: 16359 - protein, 10 aa, Homo sapiens
ISRTSFLGFL

SEQ ID NO: 16360 - protein, 21 aa, Homo sapiens
TSTCQSLKSPWVCRAIRMAPV

SEQ ID NO: 16361 - protein, 39 aa, Homo sapiens
VAKVSSMDKCLHEGSAVPAPRLCPTTDSAKDQNSCETNS

SEQ ID NO: 16362 - protein, 11 aa, Homo sapiens
LLCRLGWSAVA

SEQ ID NO: 16363 - protein, 12 aa, Homo sapiens
LPWPLKVLGLQA

SEQ ID NO: 16364 - protein, 55 aa, Homo sapiens
LKTTQEICWKENDRGKYMNVAIFRPHAALDGCAALCSLCWENCLAVPPSLAKPCV

SEQ ID NO: 16365 - protein, 43 aa, Homo sapiens
LKTTQEICWKENDRGKYMNVAIFSSLCWENCLAVPPSLAKPCV

SEQ ID NO: 16366 - protein, 9 aa, Homo sapiens
VKAEATDSP

SEQ ID NO: 16367 - protein, 28 aa, Homo sapiens
ISHVQVEPNLLLLYVGSTWPDVSEVDTR

SEQ ID NO: 16368 - protein, 7 aa, Homo sapiens
LHLVELE

SEQ ID NO: 16369 - protein, 9 aa, Homo sapiens
LATGRPGET

SEQ ID NO: 16370 - protein, 16 aa, Homo sapiens
IPCFRGLCRLSAIHTE

SEQ ID NO: 16371 - protein, 14 aa, Homo sapiens
KRCQMRTPVTMKMC

SEQ ID NO: 16372 - protein, 9 aa, Homo sapiens
MNEDPGTQP

SEQ ID NO: 16373 - protein, 26 aa, Homo sapiens
LKQENRLNPGGGGCSKPRLCHCTPAW

SEQ ID NO: 16374 - protein, 12 aa, Homo sapiens
LEDTAHWKSRRK

SEQ ID NO: 16375 - protein, 17 aa, Homo sapiens
LDAGIPAVQTDFGVPAL

SEQ ID NO: 16376 - protein, 22 aa, Homo sapiens
LWSPKLPLWPATLTLPMARPRC

SEQ ID NO: 16377 - protein, 27 aa, Homo sapiens
LSRTFLIPVDCAEYTACRLSSIHHGFF

SEQ ID NO: 16378 - protein, 7 aa, Homo sapiens
LKLTNLF

SEQ ID NO: 16379 - protein, 9 aa, Homo sapiens
LLWSKRSPE

SEQ ID NO: 16380 - protein, 18 aa, Homo sapiens
KRWVHLEEGAKQELNCRA

SEQ ID NO: 16381 - protein, 104 aa, Homo sapiens
LEWAVCSARNWSRWPRPRRMLAWKGTSEATGQQTTMGLTPLRPGLHPHLPTSPTTATSPLRPSTLASLIVAPSGVCQVSPRGRRQELPGSWEKLREEEEMRTCP

SEQ ID NO: 16382 - protein, 36 aa, Homo sapiens
KKCYDHEGGFSRARLSNFAVDVLTPVISPNVGISIT

SEQ ID NO: 16383 - protein, 133 aa, Homo sapiens
KTPGSQTPAAPLPQDMNTSLSWFEQLDVLLNATDGNVVRNKQWLYPLGVSTELIGLCICFFCSSGCIFLGSPPQNSTAVTPAVLWEESEIMQKELKLLQYQLSQHQELLLKQLAEGRQAQVGSWKDLHSCCPI

SEQ ID NO: 16384 - protein, 13 aa, Homo sapiens
IYLSTSDAFTAIT

SEQ ID NO: 16385 - protein, 21 aa, Homo sapiens
LKPPLCHIITPGVILAKSAIL

SEQ ID NO: 16386 - protein, 14 aa, Homo sapiens
TLHPESANLQCSNH

SEQ ID NO: 16387 - protein, 28 aa, Homo sapiens
MTRTPSSGMLQIAPSPLMTRCPSGSTTG

SEQ ID NO: 16388 - protein, 10 aa, Homo sapiens
MTKELLKRRR

SEQ ID NO: 16389 - protein, 19 aa, Homo sapiens
LTLTEPGRWRKPQDVGGVK

SEQ ID NO: 16390 - protein, 21 aa, Homo sapiens
ICVDSQRFHPGTGSRWRTHHC

SEQ ID NO: 16391 - protein, 9 aa, Homo sapiens
LLMTTWSFR

SEQ ID NO: 16392 - protein, 19 aa, Homo sapiens
IPKHHQIVAWLYFRIYLAL

SEQ ID NO: 16393 - protein, 27 aa, Homo sapiens
MNEQLQSVKQLPLNLTQNHDACIFVEP

SEQ ID NO: 16394 - protein, 30 aa, Homo sapiens
LSQPDHEPTRRKKLQTHPNIRRSKLLTRHL

SEQ ID NO: 16395 - protein, 20 aa, Homo sapiens
TNPPEGRNSKHIRTSEGANS

SEQ ID NO: 16396 - protein, 8 aa, Homo sapiens
LTPRAWEM

SEQ ID NO: 16397 - protein, 7 aa, Homo sapiens
MCFTLKC

SEQ ID NO: 16398 - protein, 19 aa, Homo sapiens
MCESIAEEERQMVEEYTYL

SEQ ID NO: 16399 - protein, 55 aa, Homo sapiens
IVDAAVPAAALWQPTTRTIRPKPKPLPLAPPPLPSEPLPPALLTRWSTIMRIQAL

SEQ ID NO: 16400 - protein, 21 aa, Homo sapiens
RWPMARRPASSPRWATSGSLT

SEQ ID NO: 16401 - protein, 27 aa, Homo sapiens
LGMACSATTRRPSKACFGNWTSKTKTM

SEQ ID NO: 16402 - protein, 16 aa, Homo sapiens
MREPRNEETDIQHDCI

SEQ ID NO: 16403 - protein, 24 aa, Homo sapiens
MSPNDIDCKCHSSGERLLGHEHRQ

SEQ ID NO: 16404 - protein, 13 aa, Homo sapiens
MSKGTFSWKLEIK

SEQ ID NO: 16405 - protein, 12 aa, Homo sapiens
IGKMETPSGGPL

SEQ ID NO: 16406 - protein, 19 aa, Homo sapiens
LWTIWKLVISRTNLSSDSV

SEQ ID NO: 16407 - protein, 22 aa, Homo sapiens
MTHIKSPLVKENSWNTKNHEIL

SEQ ID NO: 16408 - protein, 29 aa, Homo sapiens
LAPPDRRLRRGAASPRRRRPRLAVGLVDF

SEQ ID NO: 16409 - protein, 11 aa, Homo sapiens
MAFLRSKSARP

SEQ ID NO: 16410 - protein, 8 aa, Homo sapiens
RAKMKYML

SEQ ID NO: 16411 - protein, 13 aa, Homo sapiens
VESGELCPPCRRR

SEQ ID NO: 16412 - protein, 10 aa, Homo sapiens
ITDLPRPVRF

SEQ ID NO: 16413 - protein, 41 aa, Homo sapiens
LFWNHHHHKRPLEMGSLQLYHPNSQRKTVGTKFIIHIRNKI

SEQ ID NO: 16414 - protein, 30 aa, Homo sapiens
LVLPKNRSLKSQKGKRKKRKKSRTLMKMIS

SEQ ID NO: 16415 - protein, 30 aa, Homo sapiens
IHCINQWRSSNAVFQFRIKKEKEEKEKNGE

SEQ ID NO: 16416 - protein, 32 aa, Homo sapiens
MENLVERLVWKRETISGWGSHFPDSQEKMDPS

SEQ ID NO: 16417 - protein, 14 aa, Homo sapiens
LAVPGRTIPLPLSR

SEQ ID NO: 16418 - protein, 30 aa, Homo sapiens
MQLTDCQRIQVVHQETWNYSKSKDPLALNC

SEQ ID NO: 16419 - protein, 36 aa, Homo sapiens
TEFCSCCPSWSAMVRSSLTATSASWVQVIPLPQPPE

SEQ ID NO: 16420 - protein, 15 aa, Homo sapiens
VTHPPWPPKVLGLQV

SEQ ID NO: 16421 - protein, 8 aa, Homo sapiens
ILLGTESK

SEQ ID NO: 16422 - protein, 8 aa, Homo sapiens
ILIGTEFK

SEQ ID NO: 16423 - protein, 20 aa, Homo sapiens
IHTSMERLKTHLKTDISSSM

SEQ ID NO: 16424 - protein, 21 aa, Homo sapiens
MPKEHPQNRPEDKNPEVQAVW

SEQ ID NO: 16425 - protein, 24 aa, Homo sapiens
VGKWEIFLTQETRRRNENLRRTTD

SEQ ID NO: 16426 - protein, 25 aa, Homo sapiens
ILLMPRYHLRSASLLRRLTATYAGS

SEQ ID NO: 16427 - protein, 15 aa, Homo sapiens
LVVVIINIWTSVMVK

SEQ ID NO: 16428 - protein, 18 aa, Homo sapiens
MSGGSWPRDRETGSWPAI

SEQ ID NO: 16429 - protein, 17 aa, Homo sapiens
MSGGSWPRDRETDLLMR

SEQ ID NO: 16430 - protein, 8 aa, Homo sapiens
LNYDTVHL

SEQ ID NO: 16431 - protein, 19 aa, Homo sapiens
LAPRCLVARCASTGPCTSP

SEQ ID NO: 16432 - protein, 16 aa, Homo sapiens
TGSRNPREWKNCKTRL

SEQ ID NO: 16433 - protein, 31 aa, Homo sapiens
MSENPRPRTKSEPKRCFEFLKRNLCTQMQDW

SEQ ID NO: 16434 - protein, 45 aa, Homo sapiens
LLGHKVAGCLSGTNFSSLTQNSWSRFTSFMMTVFPWKSDSTWHSG

SEQ ID NO: 16435 - protein, 16 aa, Homo sapiens
MKIKYVDVSVVRTSAA

SEQ ID NO: 16436 - protein, 41 aa, Homo sapiens
RCVSAFASLEPWALLAKEPSTRVCHHVALRAVRRRNQGVCW

SEQ ID NO: 16437 - protein, 78 aa, Homo sapiens
LMRSEMAHTDSSSTQSSSSLGKRMLPTTMPVVTIPLARRSLTQCWIGSASCLTSAQDFRASWCSTALVGALALASPHS

SEQ ID NO: 16438 - protein, 20 aa, Homo sapiens
MTNITVHWYLQDIIEHLKLF

SEQ ID NO: 16439 - protein, 7 aa, Homo sapiens
IRIQGIT

SEQ ID NO: 16440 - protein, 12 aa, Homo sapiens
RLEGRRTYEAEI

SEQ ID NO: 16441 - protein, 9 aa, Homo sapiens
VDRPAVIPG

SEQ ID NO: 16442 - protein, 14 aa, Homo sapiens
RPQLCIRSLMPLDR

SEQ ID NO: 16443 - protein, 7 aa, Homo sapiens
LPLLCAC

SEQ ID NO: 16444 - protein, 58 aa, Homo sapiens
REKCPHLLLSSSLTPSHPLASDPFSTGDLPLLRSSSSSFTSPPSSSLALIMLMLEENE

SEQ ID NO: 16445 - protein, 9 aa, Homo sapiens
ITKGLNTET

SEQ ID NO: 16446 - protein, 16 aa, Homo sapiens
IKTIEVERIALGVVRN

SEQ ID NO: 16447 - protein, 23 aa, Homo sapiens
MPEASHPKLCLSKACLRIPLKRH

SEQ ID NO: 16448 - protein, 10 aa, Homo sapiens
IIDEISRKFL

SEQ ID NO: 16449 - protein, 11 aa, Homo sapiens
IRTRRRENSQN

SEQ ID NO: 16450 - protein, 10 aa, Homo sapiens
MLKRDMEYLQ

SEQ ID NO: 16451 - protein, 7 aa, Homo sapiens
RPMECGS

SEQ ID NO: 16452 - protein, 10 aa, Homo sapiens
ITVLPVINLT

SEQ ID NO: 16453 - protein, 786 aa, Homo sapiens
IFLYEKIYFKQSKYFFFCWTSMAGFKRGYDGKIAGLYDLDKTLGRGHFAVVKLARHVFTGEKVAVKVIDKTKLDTLATGHLFQEVRCMKLVQHPNIVRLYEVIDTQTKLYLILELGDGGDMFDYIMKHEEGLNEDLAKKYFAQIVHAISYCHKLHVVHRDLKPENVVFFEKQGLVKLTDFGFSNKFQPGKKLTTSCGSLAYSAPEILLGDEYDAPAVDIWSLGVILFMLVCGQPPFQEANDSETLTMIMDCKYTVPSHVSKECKDLITRMLQRDPKRRASLEEIENHPWLQGVDPSPATKYNIPLVSYKNLSEEEHNSIIQRMVLGDIADRDAIVEALETNRYNHITATYFLLAERILREKQEKEIQTRSASPSNIKAQFRQSWPTKIDVPQDLEDDLTATPLSHATVPQSPARAADSVLNGHRSKGLCDSAKKDDLPELAGPALSTVPPASLKPTASGRKCLFRVEEDEEEDEEDKKPMSLSTQVVLRRKPSVTNRLTSRKSAPVLNQIFEEGESDDEFDMDENLPPKLSRLKMNIASPGTVHKRYHRRKSQGRGSSCSSSETSDDDSESRRRLDKDSGFTYSWHRRDSSEGPPGSEGDGGGQSKPSNASGGVDKASPSENNAGGGSPSSGSGGNPTNTSGTTRRCAGPSNSMQLASRSAGELVESLKLMSLCLGSQLHGSTKYIIDPQNGLSFSSVKVQEKSTWKMCISSTGNAGQVPAVGGIKFFSDHMADTTTELERIKSKNLKNNVLQLPLCEKTISVNIQRNPKEGLLCASSPASCCHVI

SEQ ID NO: 16454 - protein, 17 aa, Homo sapiens
RQENGGNPGGGACSEPR

SEQ ID NO: 16455 - protein, 12 aa, Homo sapiens
KLAPRELRQYWL

SEQ ID NO: 16456 - protein, 11 aa, Homo sapiens
MKESSCTHLLP

SEQ ID NO: 16457 - protein, 18 aa, Homo sapiens
VVERALDLVSIRSTELTD

SEQ ID NO: 16458 - protein, 56 aa, Homo sapiens
ILWKVTSGENQLDRRNGAPVLPHPQEAVSRQKLHLLGSVESSGERTVPSCMTTSMS

SEQ ID NO: 16459 - protein, 41 aa, Homo sapiens
ISWTGGMEPQCSLTPRKLCPGRSCTCWALWRAAGRGLCRAA

SEQ ID NO: 16460 - protein, 21 aa, Homo sapiens
ILGASWTPLWGSESPEFLLGW

SEQ ID NO: 16461 - protein, 249 aa, Homo sapiens
VLPSTANMKRPKLKKASKRMTCHKRYKIQKKVREHHRKLRKEAKKRGHKKPRKDPGVPNSAPFKEALLREAELRKQRLEELKQQQKLDRQKELEKKRKLETNPDIKPSNVEPMEKEFGLCKTENKAKSGKQNSKKLYCQELKKVIEASDVVLEVLDARDPLGCRCPQVEEAIVQSGQKKLVLILNKSDLVPKENLESWLNYLKKELPTVVFRASTKPKDKGKITKVSFISGKKCDSFRFWLKYDECTKS

SEQ ID NO: 16462 - protein, 67 aa, Homo sapiens
IIPFLEPLSEDTIAGLSVHVLCRTRLKEYEQCIDILLERCPEAVIPYANHELKEENRIDSVVEKTVA

SEQ ID NO: 16463 - protein, 32 aa, Homo sapiens
MNKAPQSTGPPPAPSPGLPQLGFLPHLGFPSC

SEQ ID NO: 16464 - protein, 12 aa, Homo sapiens
IAAKCCVVVPPA

SEQ ID NO: 16465 - protein, 13 aa, Homo sapiens
LIYQAECKLCDEF

SEQ ID NO: 16466 - protein, 27 aa, Homo sapiens
KMVLISCPHDPDPPASASQSAGITDEF

SEQ ID NO: 16467 - protein, 7 aa, Homo sapiens
LDSLFDK

SEQ ID NO: 16468 - protein, 19 aa, Homo sapiens
MPGCAVKKMSRQLMCTFSV

SEQ ID NO: 16469 - protein, 15 aa, Homo sapiens
LIFSKRRNMTVSWKR

SEQ ID NO: 16470 - protein, 28 aa, Homo sapiens
VKLTKSKWPRECLVLCRTKGQSTNLSLT

SEQ ID NO: 16471 - protein, 49 aa, Homo sapiens
LPWARGTEHTSGFLLEVFMERVVHGGMSIFLKKMSHSLSSWSLMKIKPN

SEQ ID NO: 16472 - protein, 32 aa, Homo sapiens
IDQREPCTVRNMVWTSSDTLMQQTQLFTALTK

SEQ ID NO: 16473 - protein, 17 aa, Homo sapiens
RRRRLDRRLEISKKGLS

SEQ ID NO: 16474 - protein, 26 aa, Homo sapiens
KPLVQHKELVCMKDLTGCQMSFQNVK

SEQ ID NO: 16475 - protein, 7 aa, Homo sapiens
MPCEILC

SEQ ID NO: 16476 - protein, 22 aa, Homo sapiens
IVYFLWGDCLYSSLPVSACSAA

SEQ ID NO: 16477 - protein, 20 aa, Homo sapiens
ICIHMCEELSLFLTPTGTIE

SEQ ID NO: 16478 - protein, 7 aa, Homo sapiens
TCTLPTS

SEQ ID NO: 16479 - protein, 8 aa, Homo sapiens
IVFSKLQE

SEQ ID NO: 16480 - protein, 27 aa, Homo sapiens
KMQNMDSIPSIKGEYLSLRKMTEFLFL

SEQ ID NO: 16481 - protein, 17 aa, Homo sapiens
MPVMFFSTLIVSGVETS

SEQ ID NO: 16482 - protein, 30 aa, Homo sapiens
RLAASIEAHRPATAARSHERQRRAELRRAG

SEQ ID NO: 16483 - protein, 8 aa, Homo sapiens
MAITVMWR

SEQ ID NO: 16484 - protein, 9 aa, Homo sapiens
LILRSFPVG

SEQ ID NO: 16485 - protein, 113 aa, Homo sapiens
RKKPPEGTISLCVNMTSKLAVALLAAFLISAALCEGAVLPRSAKELRCQCIKTYSKPFHPKFIKELRVIESGPHCANTEIIVKLSDGRELCLDPKENWVQRVVEKFLKRAENS

SEQ ID NO: 16486 - protein, 10 aa, Homo sapiens
KMPPSAGKRS

SEQ ID NO: 16487 - protein, 312 aa, Homo sapiens
ISFCLRRETKPHTKERGMMAKKPPKPAPRRIFQERLKITALPLYFEGFLLIKRSGYREYEHYWTELRGTTLFFYTDKKSIIYVDKLDIVDLTCLTEQNSTEKNCAKFTLVLPKEEVQLKTENTESGEEWRGFILTVTELSVPQNVSLLPGQVIKLHEVLEREKKRRIETEQSTSVEKEKEPTEDYVDVLNPMPACFYTVSRKEATEMLQKNPSLGNMILRPGSDSRNYSITIRQEIDIPRIKHYKVMSVGQNYTIELEKPVTLPNLFSVIDYFVKETRGNLRPFICSTDENTGQEPSMEGRSEKLKKNPHIA

SEQ ID NO: 16488 - protein, 11 aa, Homo sapiens
MIAGRWPACLG

SEQ ID NO: 16489 - protein, 39 aa, Homo sapiens
IFEGFCQAFCKSAFDWKRDRHSDGSKTSLPKKSGRTLHL

SEQ ID NO: 16490 - protein, 240 aa, Homo sapiens
VFSLLVQSCKQVYRSIAMKFVPCLLLVTLSCLGTLGQAPRQKQGSTGEEFHFQTGGRDSCTMRPSSLGQGAGEVWLRVDCRNTDQTYWCEYRGQPSMCQAFAADPKPYWNQALQELRRLHHACQGAPVLRPSVCREAGPQAHMQQVTSSLKGSPEPNQQPEAGTPSLRPKATVKLTEATQLGKDSMEELGKAKPTTRPTAKPTQPGPRPGGNEEAKKKAWEHCWKPFQALCAFLISFFRG

SEQ ID NO: 16491 - protein, 28 aa, Homo sapiens
MCLFAETVNAFLALTAVKISGAMTIKTT

SEQ ID NO: 16492 - protein, 24 aa, Homo sapiens
VAVGAQRSRGAAARPGAALLQKSL

SEQ ID NO: 16493 - protein, 9 aa, Homo sapiens
MNKFRKQEA

SEQ ID NO: 16494 - protein, 10 aa, Homo sapiens
KKVRRWHIFT

SEQ ID NO: 16495 - protein, 7 aa, Homo sapiens
MDIRVET

SEQ ID NO: 16496 - protein, 16 aa, Homo sapiens
VFGEMEDHVCKGEVEV

SEQ ID NO: 16497 - protein, 15 aa, Homo sapiens
KPEVSSLLQSCFTFP

SEQ ID NO: 16498 - protein, 30 aa, Homo sapiens
LKAGNSDLGVQKSTATETGFEKPKIWQFPD

SEQ ID NO: 16499 - protein, 43 aa, Homo sapiens
LATLTSVSKNRQPLRPALRSRRFGSFQTEQDKVKAGWRRVQDI

SEQ ID NO: 16500 - protein, 13 aa, Homo sapiens
VETEQRKIQLPAQ

SEQ ID NO: 16501 - protein, 53 aa, Homo sapiens
ISYTLAHTSTLSLYLSQNDNSRYNFWHGFFFTSSRFWRKWLCSKWRLGRCRTG

SEQ ID NO: 16502 - protein, 33 aa, Homo sapiens
VCYGKKGLSLSYGPVSPIIRRLWNIFVRNQEKI

SEQ ID NO: 16503 - protein, 24 aa, Homo sapiens
RTSCLALGLQTARCPLHFLSNLES

SEQ ID NO: 16504 - protein, 29 aa, Homo sapiens
MNHGWININQKLSMNLLCIKRKLKKSKPG

SEQ ID NO: 16505 - protein, 39 aa, Homo sapiens
LREQAKTYQSVNNLKPIGYPSKMMHPKQNIKRTKRKKST

SEQ ID NO: 16506 - protein, 10 aa, Homo sapiens
KKTVKFEPYK

SEQ ID NO: 16507 - protein, 22 aa, Homo sapiens
MISCWLSFKQPQNSINMSRCST

SEQ ID NO: 16508 - protein, 23 aa, Homo sapiens
KTWSVQEMPKARRIPVRVTQGAP

SEQ ID NO: 16509 - protein, 11 aa, Homo sapiens
RCLPRYSLWRS

SEQ ID NO: 16510 - protein, 13 aa, Homo sapiens
ILSLSCRFSPANS

SEQ ID NO: 16511 - protein, 11 aa, Homo sapiens
MSVKKLLEEMK

SEQ ID NO: 16512 - protein, 8 aa, Homo sapiens
IVHLGPIL

SEQ ID NO: 16513 - protein, 16 aa, Homo sapiens
VGLVSIFFSQRNTSTG

SEQ ID NO: 16514 - protein, 15 aa, Homo sapiens
TWRSSAAMAEYIKQW

SEQ ID NO: 16515 - protein, 26 aa, Homo sapiens
IRMFQFLHLTDMKSILRGAASGSGSN

SEQ ID NO: 16516 - protein, 12 aa, Homo sapiens
IQIPTGSSCQRR

SEQ ID NO: 16517 - protein, 17 aa, Homo sapiens
KAAPGRLRLTADRNGFL

SEQ ID NO: 16518 - protein, 108 aa, Homo sapiens
VRPSLRRLPLRVGTSGPRGVIGGEEPPRLGLACRKRARSSPWRRRAPPRTDMRPSPKASRRPGLARAPRRGLEARPRRPRAGIRTAPRATRSTPARTRRTREKCSLVA

SEQ ID NO: 16519 - protein, 27 aa, Homo sapiens
IPPLHLRTSARSKVQAWDGEGPSETRA

SEQ ID NO: 16520 - protein, 15 aa, Homo sapiens
TQGARLALGAMEEAG

SEQ ID NO: 16521 - protein, 17 aa, Homo sapiens
RGPRGQGATHSHSPTTG

SEQ ID NO: 16522 - protein, 10 aa, Homo sapiens
ICILETRRKI

SEQ ID NO: 16523 - protein, 14 aa, Homo sapiens
LWQMWLPCQAQEKV

SEQ ID NO: 16524 - protein, 15 aa, Homo sapiens
LTISRSSTIRTVRRQ

SEQ ID NO: 16525 - protein, 7 aa, Homo sapiens
RKETTIF

SEQ ID NO: 16526 - protein, 26 aa, Homo sapiens
LPLLPTRDQSALVNGQTLRTELNPSP

SEQ ID NO: 16527 - protein, 14 aa, Homo sapiens
LQKLVVMSKEERMN

SEQ ID NO: 16528 - protein, 490 aa, Homo sapiens
RKKYIISGTRERRKTGTMGRKKIQITRIMDERNRQVTFTKRKFGLMKKAYELSVLCDCEIALIIFNSTNKLFQYASTDMDKVLLKYTEYNEPHESRTNSDIVETLRKKGLNGCDSPDPDADDSVGHSPESEDKYRKINEDIDLMISRQRLCAVPPPNFEMPVSIPVSSHNSLVYSNPVSSLGNPNLLPLAHPSLQRNSMSPGVTHRPPSAGNTGGLMGGDLTSGAGTSAGNGYGNPRNSPGLLVSPGNLNKNMQAKSPPPMNLGMNNRKPDLRVLIPPGSKNTMPSVSEDVDLLLNQRINNSQSAQSLATPVVSVATPTLPGQGMGGYPSAISTTYGTEYSLSSADLSSLSGFNTASALHLGSVTGWQQQHLHNMPPSALSQLGACTSTHLSQSSNLSLPSTQSLNIKSEPVSPPRDRTTTPSRYPQHTRHEAGRSPVDSLSSCSSSYDGSDREDHRNEFHSPIGLTRPSPDERESPSVKRMRLSEGWAT

SEQ ID NO: 16529 - protein, 25 aa, Homo sapiens
MLEEGCLSTARQAFPGQPPSALLTL

SEQ ID NO: 16530 - protein, 16 aa, Homo sapiens
KHHLSQLQLHGPAAAV

SEQ ID NO: 16531 - protein, 27 aa, Homo sapiens
MDPSVLLEARMARPCYGISTKANTFTR

SEQ ID NO: 16532 - protein, 10 aa, Homo sapiens
LGFRGKDHCR

SEQ ID NO: 16533 - protein, 22 aa, Homo sapiens
LAHARSLWQSFTNKKKTGFSDF

SEQ ID NO: 16534 - protein, 21 aa, Homo sapiens
ISLCVNDWYSVTAYLEKRLGA

SEQ ID NO: 16535 - protein, 55 aa, Homo sapiens
RMLSRRYEGEIPKNICKRKKTVHQVTALFQAYRKFGYEHGVVLIIIQMENIWLDS

SEQ ID NO: 16536 - protein, 484 aa, Homo sapiens
ILGPTAALSSESRASAEQSGRRTPGAGADGTRGMNLEGGGRGGEFGMSAVSCGNGKLRQWLIDQIDSGKYPGLVWENEEKSIFRIPWKHAGKQDYNREEDAALFKAWALFKGKFREGIDKPDPPTWKTRLRCALNKSNDFEELVERSQLDISDPYKVYRIVPEGAKKGAKQLTLEDPQMSMSHPYTMTTPYPSLPAQQVHNYMMPPLDRSWRDYVPDQPHPEIPYQCPMTFGPRGHHWQGPACENGCQVTGTFYACAPPESQAPGVPTEPSIRSAEALAFSDCRLHICLYYREILVKELTTSSPEGCRISHGHTYDASNLDQVLFPYPEDNGQRKNIEKLLSHLERGVVLWMAPDGLYAKRLCQSRIYWDGPLALCNDRPNKLERDQTCKLFDTQQFLSELQAFAHHGRSLPRFQVTLCFGEEFPDPQRQRKLITAHVEPLLARQLYYFAQQNSGHFLRGYDLPEHISNPEDYHRSIRHSSIQE

SEQ ID NO: 16537 - protein, 15 aa, Homo sapiens
LWSLGAKMKQFTFMT

SEQ ID NO: 16538 - protein, 19 aa, Homo sapiens
MQVCPQVMGRRREGVLDAF

SEQ ID NO: 16539 - protein, 8 aa, Homo sapiens
RMENTARS

SEQ ID NO: 16540 - protein, 42 aa, Homo sapiens
TTSSLSISSTRMPPQKRRRISVRRPKRRPKAEPPSPQASQFP

SEQ ID NO: 16541 - protein, 25 aa, Homo sapiens
RRRRRMARSVNAAARRATPYTFTRC

SEQ ID NO: 16542 - protein, 11 aa, Homo sapiens
ICVQTQTMPEL

SEQ ID NO: 16543 - protein, 18 aa, Homo sapiens
VEPELGADSPRHRGTQRR

SEQ ID NO: 16544 - protein, 28 aa, Homo sapiens
LLPLAMACRVSGKLPLPGVCHLQPTFQA

SEQ ID NO: 16545 - protein, 10 aa, Homo sapiens
IYPRGKCSKV

SEQ ID NO: 16546 - protein, 8 aa, Homo sapiens
IVKPCYEP

SEQ ID NO: 16547 - protein, 9 aa, Homo sapiens
LSDCNVWTW

SEQ ID NO: 16548 - protein, 8 aa, Homo sapiens
TTRSSTNC

SEQ ID NO: 16549 - protein, 32 aa, Homo sapiens
MRSPLSRAMRMRLAWKKSIRLGVHSWKTCALV

SEQ ID NO: 16550 - protein, 14 aa, Homo sapiens
TRRHAEFLKCFWRM

SEQ ID NO: 16551 - protein, 46 aa, Homo sapiens
VGPHLGSPGLTLPSWMEPWPQPSCCCCCCGHRVASQAPLLTVYTQK

SEQ ID NO: 16552 - protein, 21 aa, Homo sapiens
KTARSASAAARRAIPSMCTRF

SEQ ID NO: 16553 - protein, 9 aa, Homo sapiens
LRGLPGGAL

SEQ ID NO: 16554 - protein, 7 aa, Homo sapiens
IRSRLSC

SEQ ID NO: 16555 - protein, 8 aa, Homo sapiens
IPRGDNSF

SEQ ID NO: 16556 - protein, 7 aa, Homo sapiens
LSWLCWP

SEQ ID NO: 16557 - protein, 15 aa, Homo sapiens
LNLMKIKNGKLQCCR

SEQ ID NO: 16558 - protein, 24 aa, Homo sapiens
MPAKGDWPLAPSRGSEMRWFQGRR

SEQ ID NO: 16559 - protein, 14 aa, Homo sapiens
LWPWAAPSITRANV

SEQ ID NO: 16560 - protein, 15 aa, Homo sapiens
LPITPMHANSKFDRI

SEQ ID NO: 16561 - protein, 16 aa, Homo sapiens
LPITPMHANTLKFSPS

SEQ ID NO: 16562 - protein, 11 aa, Homo sapiens
MQSKFYRRKQS

SEQ ID NO: 16563 - protein, 20 aa, Homo sapiens
RLFLCASHGLFPLNPVRAWF

SEQ ID NO: 16564 - protein, 8 aa, Homo sapiens
MCVSECFS

SEQ ID NO: 16565 - protein, 159 aa, Homo sapiens
IDQRVLKQRNVKQILARSKALQWTKSYVLPEFPYDVKCMLAEQKCPDHSMRIRIIEFLQADMTKYLEGSLYPSTQQYNDVVNALLQAHPFLDEDGCGFFLWKRALKDRFKYVRRPIEDDEQVIRNKCKFGHRRGQTRKSLADIRFDEIKLVQIKVRLNS

SEQ ID NO: 16566 - protein, 53 aa, Homo sapiens
LCSMAGNFWQSSHYLQWILDKQDLLKERQKDLKFLSEEEYWKLQIFFTNGKLF

SEQ ID NO: 16567 - protein, 12 aa, Homo sapiens
LKTSFGTKLMSP

SEQ ID NO: 16568 - protein, 11 aa, Homo sapiens
LNDKARRKHAF

SEQ ID NO: 16569 - protein, 10 aa, Homo sapiens
ITWCERHVCG

SEQ ID NO: 16570 - protein, 11 aa, Homo sapiens
MTSGKRIFSVT

SEQ ID NO: 16571 - protein, 8 aa, Homo sapiens
KERFPDDD

SEQ ID NO: 16572 - protein, 7 aa, Homo sapiens
RNGRTTE

SEQ ID NO: 16573 - protein, 20 aa, Homo sapiens
KIMRSFILMSEMVLSRLWKK

SEQ ID NO: 16574 - protein, 26 aa, Homo sapiens
LKMQRYTKKLPEHLGEYLMENRLVKT

SEQ ID NO: 16575 - protein, 16 aa, Homo sapiens
IRFFWGFGDRLESIAI

SEQ ID NO: 16576 - protein, 105 aa, Homo sapiens
MNRTKELRCYRCYHFCGCYPTPGPSLKLLLQCGQMTCKTTHSCTQCTARMGVPVWDSLRPTTRTSFSSSTFPRTLGCLACPNLLTGLRNREMLLPFYLTKSSASG

SEQ ID NO: 16577 - protein, 38 aa, Homo sapiens
KVTKYLNRRGLRRDLNSSCPTNSISAFLLTSCENYSSG

SEQ ID NO: 16578 - protein, 109 aa, Homo sapiens
IIDAPGHRDFIKNMITGTSQADCAVLIVAAGVGEFEAGISKNGQTREHALLAYTLGVKQLIVGVNKMDSTEPPYSQKRYEEIVKEVSTYIKKIGYNPDTVAFVLNEYYP

SEQ ID NO: 16579 - protein, 11 aa, Homo sapiens
MPQDTETLSKT

SEQ ID NO: 16580 - protein, 33 aa, Homo sapiens
LRQLSCEGLRCRISSRLPFVTSRASGISFCKGT

SEQ ID NO: 16581 - protein, 7 aa, Homo sapiens
RNMLPSS

SEQ ID NO: 16582 - protein, 9 aa, Homo sapiens
MVNTWIKIM

SEQ ID NO: 16583 - protein, 10 aa, Homo sapiens
MNTSLFFLFP

SEQ ID NO: 16584 - protein, 9 aa, Homo sapiens
LSPPTTALD

SEQ ID NO: 16585 - protein, 9 aa, Homo sapiens
VSVGQSWIR

SEQ ID NO: 16586 - protein, 15 aa, Homo sapiens
LRRFKGPNTCTTTTV

SEQ ID NO: 16587 - protein, 36 aa, Homo sapiens
LEHTFVFLRNFSLMLLRYIGKKRRATRFWDPRRGTP

SEQ ID NO: 16588 - protein, 8 aa, Homo sapiens
IQLQMVWY

SEQ ID NO: 16589 - protein, 7 aa, Homo sapiens
LENQGLM

SEQ ID NO: 16590 - protein, 462 aa, Homo sapiens
MQQKAFEESRYPWQESFENVAVCLPLRCPRCGDHTRFRSLSSLRAHLEFSHSYEERTLLTKCSLFPSLKDTDLVTSSELLKPGKLQSSGNVVKQKPSYVNLYSISHEHSKDRKPFEVVAERPVSYVQTYTAMDLHADSLDGTRSGPGLPTSDTKASFEAHVREKFNRMVEAVDRTIEKRIDKLTKELAQKTAELLEVRAAFVQLTQKKQEVQRRERALNRQVDVAVEMIAVLRQRLTESEEELLRKEEEVVTFNHFLEAAAEKEVQGKARLQDFIENLLQRVELAEKQLEYYQSQQASGFVRDLSGHVSWKGAGEARLVCQNDLELEIFGHINHHLSGLKDSHCLVFLQAPPVPWIILASFLWILGNPWTSSTATAGFSQIWVLFPFCGGTFHHNEKDVLGLQDFERESVSTSQSRNISLLTLGQLQNCVIGKLTIIDLLTEHLLGVRHGVICFPWGLPSSS

SEQ ID NO: 16591 - protein, 24 aa, Homo sapiens
IPQFHFLKPQVRSRCTTLCRTPES

SEQ ID NO: 16592 - protein, 37 aa, Homo sapiens
MLLCTLTSMVPTTRQLLELSCFLEKVPRCGWHLSFYS

SEQ ID NO: 16593 - protein, 15 aa, Homo sapiens
IALGSAFASWLRRAC

SEQ ID NO: 16594 - protein, 12 aa, Homo sapiens
LNSYGTLVRKEK

SEQ ID NO: 16595 - protein, 46 aa, Homo sapiens
RMEFVKCLGHPEEFYNLVRFRIGGKRKVMPKMDQITSHEGRFWNEV

SEQ ID NO: 16596 - protein, 16 aa, Homo sapiens
KTMFRLENTDPKFVHS

SEQ ID NO: 16597 - protein, 25 aa, Homo sapiens
INFFPGERCLIRGRKIFHASRAIVF

SEQ ID NO: 16598 - protein, 23 aa, Homo sapiens
TPTKASELLSLRHLHLGPTSWAG

SEQ ID NO: 16599 - protein, 76 aa, Homo sapiens
KMAEYDLTTRIAHFLDRHLVFPLLEFLSVKEIYNEKELLQGKLDLLSDTNMVDFAMDVYKNLYSDDIPHVLFCIFN

SEQ ID NO: 16600 - protein, 18 aa, Homo sapiens
MAHSLVSVCFLQSPQRSR

SEQ ID NO: 16601 - protein, 16 aa, Homo sapiens
KNTTTKKRKFPEKKLT

SEQ ID NO: 16602 - protein, 23 aa, Homo sapiens
TAGTAQHSPLVGPGIPARTHAIR

SEQ ID NO: 16603 - protein, 30 aa, Homo sapiens
VGVSQPAELSKLRKEPLERALSTGIFWTQR

SEQ ID NO: 16604 - protein, 15 aa, Homo sapiens
VRSALGFSGLNDDSE

SEQ ID NO: 16605 - protein, 17 aa, Homo sapiens
MYPLQGRVSSTRMRWGL

SEQ ID NO: 16606 - protein, 17 aa, Homo sapiens
LANLRGGTAIPSIVGCW

SEQ ID NO: 16607 - protein, 7 aa, Homo sapiens
RRICVLC

SEQ ID NO: 16608 - protein, 12 aa, Homo sapiens
LCPMLRGIIMKY

SEQ ID NO: 16609 - protein, 19 aa, Homo sapiens
LTGRADCMTAKGRPNSCSC

SEQ ID NO: 16610 - protein, 21 aa, Homo sapiens
LEYQHRHLLMHRCWPRDRGKS

SEQ ID NO: 16611 - protein, 34 aa, Homo sapiens
RWHEQHEPDDRTDQHDLSDLRAYVRAVLHGSRAG

SEQ ID NO: 16612 - protein, 20 aa, Homo sapiens
RRETQHGNIADTAEASCFFS

SEQ ID NO: 16613 - protein, 20 aa, Homo sapiens
RFSSVFIASQNNVLRTFCSQ

SEQ ID NO: 16614 - protein, 31 aa, Homo sapiens
LQVFFCFHSQPEQCSTHILFSVKEGLWPKFG

SEQ ID NO: 16615 - protein, 18 aa, Homo sapiens
MPLLYLKNFMTLISHCLT

SEQ ID NO: 16616 - protein, 11 aa, Homo sapiens
TVSEAGNRNKM

SEQ ID NO: 16617 - protein, 12 aa, Homo sapiens
LTSTWTLLTRRR

SEQ ID NO: 16618 - protein, 37 aa, Homo sapiens
LYLCCTFGASTLVRRFSYIHLSSEEGGKNPTFLGPKV

SEQ ID NO: 16619 - protein, 11 aa, Homo sapiens
VSSRWTGSSSS

SEQ ID NO: 16620 - protein, 51 aa, Homo sapiens
KNGFRSSRPPSRSTNRTAKPSRLLVAPSARMRTPASLQTCLSRAPALWSLW

SEQ ID NO: 16621 - protein, 35 aa, Homo sapiens
KTLMIALQQPTHGDCANLLLSYNAGPVIGLSEDHG

SEQ ID NO: 16622 - protein, 32 aa, Homo sapiens
VNGGHWPNLEGFLKEPSPWRKMGLDPTSKPPL

SEQ ID NO: 16623 - protein, 19 aa, Homo sapiens
MRSVWPQKLLLTLWVKNGR

SEQ ID NO: 16624 - protein, 14 aa, Homo sapiens
TAAYCSEEAAYQEK

SEQ ID NO: 16625 - protein, 17 aa, Homo sapiens
VALPEQGHLHAAGPEQP

SEQ ID NO: 16626 - protein, 11 aa, Homo sapiens
KMCPKAPQAGT

SEQ ID NO: 16627 - protein, 9 aa, Homo sapiens
MRIWDPTAT

SEQ ID NO: 16628 - protein, 7 aa, Homo sapiens
LTFKAKI

SEQ ID NO: 16629 - protein, 49 aa, Homo sapiens
MWVALARTFLRQTYKISSADLEKFRMWRSSHGKMTKETHRKFLHISTSV

SEQ ID NO: 16630 - protein, 64 aa, Homo sapiens
LHTCPSGPGAGAGAIRGRDALESLWKRSRCMGTCIIYRQDGCLKTQSQTSRIQLLEALPGLQRR

SEQ ID NO: 16631 - protein, 57 aa, Homo sapiens
RTAVSRPRARPAGSNSWRPCQGCRGGDVLYQPAAAASSGSDPRSWNPRQVLGGGAGL

SEQ ID NO: 16632 - protein, 25 aa, Homo sapiens
KSRLSLQEGSEPGLPQCLGRCSDCP

SEQ ID NO: 16633 - protein, 16 aa, Homo sapiens
KSFSTRQQVKVFFQVT

SEQ ID NO: 16634 - protein, 47 aa, Homo sapiens
LVLPATLGSFCQMMTPKRVYGWRLGKLWTTTCSEMGTLWSTGRNRDP

SEQ ID NO: 16635 - protein, 13 aa, Homo sapiens
ISRPALRLVRGAL

SEQ ID NO: 16636 - protein, 12 aa, Homo sapiens
TSCILPSIWDLG

SEQ ID NO: 16637 - protein, 30 aa, Homo sapiens
VRAWTWDGSGRLSVVGTGSHTHSSGRTHLS

SEQ ID NO: 16638 - protein, 132 aa, Homo sapiens
IMNDTVTIRTRKFMTNRLLQRKQMVIDVLHPGKATVPKTEIREKLAKMYKTTPDVIFVFGFRTHFGGGKTTGFGMIYDSLDYAKKNEPKHRLARHGLYEKKKTSRKQRKERKNRMKKVRGTAKANVGAGKKQ

SEQ ID NO: 16639 - protein, 7 aa, Homo sapiens
LVLAKRR

SEQ ID NO: 16640 - protein, 25 aa, Homo sapiens
MLTMRLWHVLTLNAKWNLCKKRLPF

SEQ ID NO: 16641 - protein, 20 aa, Homo sapiens
IAHTQCSNILPARIKKKSIS

SEQ ID NO: 16642 - protein, 32 aa, Homo sapiens
LLKPMWMLITTSRMSSQQELVLHASLVTTGPS

SEQ ID NO: 16643 - protein, 13 aa, Homo sapiens
TRLRRPVGLGNLR

SEQ ID NO: 16644 - protein, 14 aa, Homo sapiens
KARSGVSVKHLVNN

SEQ ID NO: 16645 - protein, 9 aa, Homo sapiens
RTNVRTTSR

SEQ ID NO: 16646 - protein, 26 aa, Homo sapiens
KTAHLRILTIRTHISLQEASWPSQTT

SEQ ID NO: 16647 - protein, 16 aa, Homo sapiens
VPLLQFPCGTHSPAAP

SEQ ID NO: 16648 - protein, 11 aa, Homo sapiens
LGPAGPEVELG

SEQ ID NO: 16649 - protein, 26 aa, Homo sapiens
KAKTFLPIGIHPMSLHNPSLKINMVT

SEQ ID NO: 16650 - protein, 12 aa, Homo sapiens
KRVTLYALYRKL

SEQ ID NO: 16651 - protein, 20 aa, Homo sapiens
ISASRDTGLYTEVLLRASAK

SEQ ID NO: 16652 - protein, 27 aa, Homo sapiens
KNNLENQKNKNFLVRSREQTTEVMKPK

SEQ ID NO: 16653 - protein, 21 aa, Homo sapiens
VVLCTSCLTTSTRWRTSPPRR

SEQ ID NO: 16654 - protein, 14 aa, Homo sapiens
MKKREKKKSLNLKK

SEQ ID NO: 16655 - protein, 12 aa, Homo sapiens
TPSLTSSTRIPM

SEQ ID NO: 16656 - protein, 431 aa, Homo sapiens
TEDAMAPKKRPETQKTSEIVLRPRNKRSRSPLELEPEAKKLCAKGSGPSRRCDSDCLWVGLAGPQILPPCRSIVRTLHQHKLGRASWPSVQQGLQQSFLHTLDSYRILQKAAPFDRRATSLAWHPTHPSTVAVGSKGGDIMLWNFGIKDKPTFIKGIGAGGSITGLKFNPLNTNQFYASSMEGTTRLQDFKGNILRVFASSDTINIWFCSLDVSASSRMVVTGDNVGNVILLNMDGKELWNLRMHKKKVTHVALNPCCDWFLATASVDQTVKIWDLRQVRGKASFLYSLPHRHPVNAACFSPDGARLLTTDQKSEIRVYSASQWDCPLGLIPHPHRHFQHLTPIKAAWHPRYNLIVVGRYPDPNFKSCTPYELRTIDVFDGNSGKMMCQLYDPESSGISSLNEFNPMGDTLASAMGYHILIWSQEEARTRK

SEQ ID NO: 16657 - protein, 20 aa, Homo sapiens
TMRQRRTRRTVCSSTSMSVT

SEQ ID NO: 16658 - protein, 25 aa, Homo sapiens
KKSLLEGDQGGKRRCFGPAKSVTLR

SEQ ID NO: 16659 - protein, 23 aa, Homo sapiens
MIRWCPSLGIDVSRGSPWWYRMA

SEQ ID NO: 16660 - protein, 10 aa, Homo sapiens
LAWSWRSWAQ

SEQ ID NO: 16661 - protein, 12 aa, Homo sapiens
LLCVPSTLLSCS

SEQ ID NO: 16662 - protein, 11 aa, Homo sapiens
KSRGKRTTAFL

SEQ ID NO: 16663 - protein, 12 aa, Homo sapiens
RRNPVVAILRGC

SEQ ID NO: 16664 - protein, 8 aa, Homo sapiens
LPASRTCR

SEQ ID NO: 16665 - protein, 22 aa, Homo sapiens
RTSAANTSPSSTPTMRRARMTM

SEQ ID NO: 16666 - protein, 21 aa, Homo sapiens
MKRTKKITTPSAFCPPDHSPF

SEQ ID NO: 16667 - protein, 43 aa, Homo sapiens
MCGAERSYPVSCSSRSPAPSSSSASVPPQRPKTPSTRLMRRPF

SEQ ID NO: 16668 - protein, 19 aa, Homo sapiens
MVLFTELIVATYYSKTFFL

SEQ ID NO: 16669 - protein, 12 aa, Homo sapiens
RTKGSSKTTGTT

SEQ ID NO: 16670 - protein, 20 aa, Homo sapiens
IHNPCKLGFRVRALFPMLFG

SEQ ID NO: 16671 - protein, 158 aa, Homo sapiens
ICTIRSRRPQMVRSVEALCDAYIILANLDATQWKTQRKGINIPADQPITKLKNLEDVVVPTMEIKVDHTGEYGNLVTIQSFKAEFRLAGGVNLPKIIDCVGSDGKERRQLVKGRDDLRQDAVMQQVFQMCNTLLQRNTETRKRKLTICTYKSLSYMGG

SEQ ID NO: 16672 - protein, 8 aa, Homo sapiens
KAEGFWKS

SEQ ID NO: 16673 - protein, 11 aa, Homo sapiens
LSHNQPGSMMA

SEQ ID NO: 16674 - protein, 29 aa, Homo sapiens
ISDKKHSKQATVFKKLNWQVEMFKQFSDL

SEQ ID NO: 16675 - protein, 498 aa, Homo sapiens
IHGRKLLNLSHSKSLSALQESQVERAKRKQKQAEQALQELRDLLTEGKQRQEEAVRTREAELRQAMDIPEEYWPSPEEPLRELMENLQRQLNLMKWTLCHRQNLPDRDVVRWASGGLALQGIYKASHQRGLTEKREELLSVPKEFLLLGPQQGTQMKTKEFTSPQAEFMFTQMVEKLGFRLTTSAKDGNWGFSLEAGLDHSKHPESKETQQSSSENSYFCSTKFSYIPLASCHFPIDQLQLSKPAVQELKCIEELLSQTTNPDRFSLLRHRIINFFHRFGSHVNQGPLHLGGIYWWKAISEGYCTEQLAEVRQQSAEALDIFIRDSYSGFGVKVAAGVNVSDSHSKTATQTKTSQNLQTKVQLSVAQTGGPPEADGLVQWKAGLIASNQTWCVIDRGLQLVPVWDIILSSHRSNFKDPLQVANFLKDSYTALTSITAQIQNGEELLSAGKEARVFLEDVKSWEVSDPEEQLKKLINFMKMLSQKLKSYDTWINICLTD

SEQ ID NO: 16676 - protein, 37 aa, Homo sapiens
MRRHSKRAWPALPAGGLRCTCCASMAIERTQISRRTL

SEQ ID NO: 16677 - protein, 15 aa, Homo sapiens
LVAKRGVSGHSSPPP

SEQ ID NO: 16678 - protein, 11 aa, Homo sapiens
TQRPHLVEVDI

SEQ ID NO: 16679 - protein, 183 aa, Homo sapiens
KGRAEVGNMRLSVAAAISHGRVFRRMGLGPESRIHLLRNLLTGLVRHERIEAPWARVDEMRGYAEKLIDYGKLGDTNERAMRMADFWLTEKDLIPKLFQVLAPRYKDQTGGYTRMLQIPNRSLDRAKMAVIEYKGNCLPPLPLPRRDSHLTLLNQLLQGLRQDLRQSQEASNHSSHTAQTPGI

SEQ ID NO: 16680 - protein, 32 aa, Homo sapiens
RAARWRSCSAGASKPSMTPGRCGTRSWCACSS

SEQ ID NO: 16681 - protein, 20 aa, Homo sapiens
TEASKSVKSPAIADPNPLLD

SEQ ID NO: 16682 - protein, 14 aa, Homo sapiens
LSCCCCCSYCWPLA

SEQ ID NO: 16683 - protein, 35 aa, Homo sapiens
RFSHSWSEIKNSCSFGCIEKGAIRACSSSEKNSPC

SEQ ID NO: 16684 - protein, 45 aa, Homo sapiens
VMDSWIPTGDLKGPQTTGLMVGVKGTNCKFQLAKTLGRWAPLESS

SEQ ID NO: 16685 - protein, 28 aa, Homo sapiens
LGSEQVNLRLVASRSSHYQLYLPFLLSQ

SEQ ID NO: 16686 - protein, 11 aa, Homo sapiens
LGWHLRVSTQG

SEQ ID NO: 16687 - protein, 92 aa, Homo sapiens
MTTASTSQVRQNYHQDSEAAINRQINLELYASYVYLSMSYYFDRDDVALKNFAKYFLHQSHEEREHAEKLMKLQNQRGGRIFLQDIKVNKRS

SEQ ID NO: 16688 - protein, 19 aa, Homo sapiens
VGHLHRTHFRGEKKSNIES

SEQ ID NO: 16689 - protein, 37 aa, Homo sapiens
TILEVEEKLFSLQEVPALARGVWPFLESLWTHPPSIL

SEQ ID NO: 16690 - protein, 32 aa, Homo sapiens
TILEVEEKEVPALARGVWPFLESLWTHPPSIL

SEQ ID NO: 16691 - protein, 20 aa, Homo sapiens
KAFRMQFLICCGHDHKKISQ

SEQ ID NO: 16692 - protein, 18 aa, Homo sapiens
IRGFHQNSRCWQLPSLDV

SEQ ID NO: 16693 - protein, 5891 aa, Homo sapiens
KMEKEETTRELLLPNWQGSGSHGLTIAQRDDGVFVQEVTQNSPAARTGVVKEGDQIVGATIYFDNLQSGEVTQLLNTMGHHTVGLKLHRKGDRSPEPGQTWTREVFSSCSSEVVLSGDDEEYQRIYTTKIKPRLKSEDGVEGDLGETQSRTITVTRRVTAYTVDVTGREGAKDIDISSPEFKIKIPRHELTEISNVDVETQSGKTVIRLPSGSGAASPTGSAVDIRAGAISASGPELQGAGHSKLQVTMPGIKVGGSGVNVNAKGLDLGGRGGVQVPAVDISSSLGGRAVEVQGPSLESGDHGKIKFPTMKVPKFGVSTGREGQTPKAGLRVSAPEVSVGHKGGKPGLTIQAPQLEVSVPSANIEGLEGKLKGPQITGPSLEGDLGLKGAKPQGHIGVDASAPQIGGSITGPSVEVQAPDIDVQGPGSKLNVPKMKVPKFSVSGAKGEETGIDVTLPTGEVTVPGVSGDVSLPEIATGGLEGKMKGTKVKTPEMIIQKPKISMQDVDLSLGSPKLKGDIKVSAPGVQGDVKGPQVALKGSRVDIETPNLEGTLTGPRLGSPSGKTGTCRISMSEVDLNVAAPKVKGGVDVTLPRVEGKVKVPEVDVRGPKVDVSAPDVEAHGPEWNLKMPKMKMPTFSTPGAKGEGPDVHMTLPKGDISISGPKVNVEAPDVNLEGLGGKLKGPDVKLPDMSVKTPKISMPDVDLHVKGTKVKGEYDVTVPKLEGELKGPKVDIDAPDVDVHGPDWHLKMPKMKMPKFSVPGFKAEGPEVDVNLPKADVDISGPKIDVTAPDVSIEEPEGKLKGPKFKMPEMNIKVPKISMPDVDLHLKGPNVKGEYDVTMPKVESEIKVPDVELKSAKMDIDVPDVEVQGPDWHLKMPKMKMPKFSMPGFKAEGPEVDVNLPKADVDISGPKVGVEVPDVNIEGPEGKLKGPKFKMPEMNIKAPKISMPDVDLHMKGPKVKGEYDMTVPKLEGDLKGPKVDVSAPDVEMQGPDWNLKMPKIKMPKFSMPSLKGEGPEFDVNLSKANVDISAPKVDTNAPDLSLEGPEGKLKGPKFKMPEMHFRAPKMSLPDVDLDLKGPKMKGNVDISAPKIEGEMQVPDVDIRGPKVDIKAPDVEGQGLDWSLKIPKMKMPKFSMPSLKGEGPEVDVNLPKADVVVSGPKVDIEAPDVSLEGPEGKLKGPKFKMPEMHFKTPKISMPDVDLHLKGPKVKGDVDVSVPKVEGEMKVPDVEIKGPKMDIDAPDVEVQGPDWHLKMPKMKMPKFSMPGFKGEGREVDVNLPKADIDVSGPKVDVEVPDVSLEGPEGKLKGPKFKMPEMHFKAPKISMPDVDLNLKGPKLKGDVDVSLPEVEGEMKVPDVDIKGPKVDISAPDVDVHGPDWHLKMPKVKMPKFSMPGFKGEGPEVDVKLPKADVDVSGPKMDAEVPDVNIEGPDAKLKGPKFKMPEMSIKPQKISIPDVGLHLKGPKMKGDYDVTVPKVEGEIKAPDVDIKGPKVDINAPDVEVHGPDWHLKMPKVKMPKFSMPGFKGEGPEVDMNLPKADLGVSGPKVDIDVPDVNLEAPEGKLKGPKFKMPSMNIQTHKISMPDVGLNLKAPKLKTDVDVSLPKVEGDLKGPEIDVKAPKMDVNVGDIDIEGPEGKLKGPKFKMPEMHFKAPKISMPDVDLHLKGPKVKGDMDVSVPKVEGEMKVPDVDIKGPKVDIDAPDVEVHDPDWHLKMPKMKMPKFSMPGFKAEGPEVDVNLPKADIDVSGPSVDTDAPDLDIEGPEGKLKGSKFKMPKLNIKAPKVSMPDVDLNLKGPKLKGEIDASVPELEGDLRGPQVDVKGPFVEAEVPDVDLECPDAKLKGPKFKMPEMHFKAPKISMPDVDLHLKGPKVKGDADVSVPKLEGDLTGPSVGVEVPDVELECPDAKLKGPKFKMPDMHFKAPKISMPDVDLHLKGPKVKGDVDVSVPKLEGDLTGPSVGVEVPDVELECPDAKLKGPKFKMPEMHFKTPKISMPDVDLHLKGPKVKGDMDVSVPKVEGEMKVPDVDIKGPKMDIDAPDVDVHGPDWHLKMPKMKMPKFSMPGFKAEGPEVDVNLPKADVVVSGPKVDVEVPDVSLEGPEGKLKGPKLKMPEMHFKAPKISMPDVDLHLKGPKVKGDVDVSLPKLEGDLTGPSVDVEVPDVELECPDAKLKGPKFKMPEMHFKTPKISMPDVNLNLKGPKVKGDMDVSVPKVEGEMKVPDVDIRGPKVDIDAPDVDVHGPDWHLKMPKMKMPKFSMPGFKGEGPEVDVNLPKADVDVSGPKVDVEVPDVSLEGPEGKLKGPKFKMPEMHFKTPKISMPDVDFNLKGPKIKGDVDVSAPKLEGELKGPELDVKGPKLDADMPEVAVEGPNGKWKTPKFKMPDMHFKAPKISMPDLDLHLKSPKAKGEVDVDVPKLEGDLKGPHVDVSGPDIDIEGPEGKLKGPKFKMPDMHFKAPNISMPDVDLNLKGPKIKGDVDVSVPEVEGKLEVPDMNIRGPKVDVNAPDVQAPDWHLKMPKMKMPKFSMPGFKAEGPEVDVNLPKADVDISGPKVDIEGPDVNIEGPEGKLKGPKLKMPEMNIKAPKISMPDFDLHLKGPKVKGDVDVSLPKVEGDLKGPEVDIKGPKVDINAPDVGVQGPDWHLKMPKVKMPKFSMPGFKGEGPDGDVKLPKADIDVSGPKVDIEGPDVNIEGPEGKLKGPKFKMPEMNIKAPKISMPDIDLNLKGPKVKGDVDVSLPKVEGDLKGPEVDIKGPKVDIDAPDVDVHGPDWHLKMPKIKMPKISMPGFKGEGPDVDVNLPKADIDVSGPKVDVECPDVNIEGPEGKWKSPKFKMPEMHFKTPKISMPDIDLNLTGPKIKGDVDVTGPKVEGDLKGPEVDLKGPKVDIDVPDVNVQGPDWHLKMPKMKMPKFSMPGFKAEGPEVDVNLPKADVDVSGPKVDVEGPDVNIEGPEGKLKGPKFKMPEMNIKAPKIPMPDFDLHLKGPKVKGDVDISLPKVEGDLKGPEVDIRGPQVDIDVPDVGVQGPDWHLKMPKVKMPKFSMPGFKGEGPDVDVNLPKADLDVSGPKVDIDVPDVNIEGPEGKLKGPKFKMPEMNIKAPKISMPDIDLNLKGPKVKGDMDVSLPKVEGDMKVPDVDIKGPKVDINAPDVDVQGPDWHLKMPKIKMPKISMPGFKGEGPEVDVNLPKADLDVSGPKVDVDVPDVNIEGPDAKLKGPKFKMPEMNIKAPKISMPDLDLNLKGPKMKGEVDVSLANVEGDLKGPALDIKGPKIDVDAPDIDIHGPDAKLKGPKLKMPDMHVNMPKISMPEIDLNLKGSKLKGDVDVSGPKLEGDIKAPSLDIKGPEVDVSGPKLNIEGKSKKSRFKLPKFNFSGSKVQTPEVDVKGKKPDIDITGPKVDINAPDVEVQGKVKGSKFKMPFLSISSPKVSMPDVELNLKSPKVKGDLDIAGPNLEGDFKGPKVDIKAPEVNLNAPDVDVHGPDWNLKMPKMKMPKFSVSGLKAEGPDVAVDLPKGDINIEGPSMNIEGPDLNVEGPEGGLKGPKFKMPDMNIKAPKISMPDIDLNLKGPKVKGDVDISLPKLEGDLKGPEVDIKGPKVDINAPDVDVHGPDWHLKMPKVKMPKFSMPGFKGEGPEVDVTLPKADIDISGPNVDVDVPDVNIEGPDAKLKGPKFKMPEMNIKAPKISMPDFDLNLKGPKMKGDVVVSLPKVEGDLKGPEVDIKGPKVDIDTPDINIEGSEGKFKGPKFKIPEMHLKAPKISMPDIDLNLKGPKVKGDVDVSLPKMEGDLKGPEVDIKGPKVDINAPDVDVQGPDWHLKMPKVKMPKFSMPGFKGEGPDVDVNLPKADLDVSGPKVDIDVPDVNIEGPEGKLKGPKFKMPEMNIKAPKISMPDIDLNLKGPKVKGDMDVSLPKVEGDMQVPDLDIKGPKVDINAPDVDVRGPDWHLKMPKIKMPKISMPGFKGEGPEVDVNLPKADLDVSGPKVDVDVPDVNIEGPDAKLKGPKFKMPEMNIKAPKISMPDFDLHLKGPKVKGDVDVSLPKMEGDLKAPEVDIKGPKVDIDAPDVDVHGPDWHLKMPKVKMPKFSMPGFKGEGPEVDVNLPKADIDVSGPKVDIDTPDIDIHGPEGKLKGPKFKMPDLHLKAPKISMPEVDLNLKGPKMKGDVDVSLPKVEGDLKGPEVDIKGPKVDIDVPDVDVQGPDWHLKMPKVKMPKFSMPGFKGEGPDVDVNLPKADLDVSGPKVDIDVPDVNIEGPDAKLKGPKFKMPEMNIKAPKISMPDFDLHLKGPKVKGDVDVSLPKVEGDLKGPEVDIKGPKVDIDAPDVDVHGPDWHLKMPKVKMPKFSMPGFKGEGPDVDVTLPKADIEISGPKVDIDAPDVSIEGPDAKLKGPKFKMPEMNIKAPKISMPDIDFNLKGPKVKGDVDVSLPKVEGDLKGPEIDIKGPSLDIDTPDVNIEGPEGKLKGPKFKMPEMNIKAPKISMPDFDLHLKGPKVKGDVDVSLPKVESDLKGPEVDIEGPEGKLKGPKFKMPDVHFKSPQISMSDIDLNLKGPKIKGDMDISVPKLEGDLKGPKVDVKGPKVGIDTPDIDIHGPEGKLKGPKFKMPDLHLKAPKISMPEVDLNLKGPKVKGDMDISLPKVEGDLKGPEVDIRDPKVDIDVPDVDVQGPDWHLKMPKVKMPKFSMPGFKGEGPDVDVNLPKADIDVSGPKVDVDVPDVNIEGPDAKLKGPKFKMPEMSIKAPKISMPDIDLNLKGPKVKGDVDVTLPKVEGDLKGPEADIKGPKVDINTPDVDVHGPDWHLKMPKVKMPKFSMPGFKGEGPDVDVSLPKADIDVSGPKVDVDIPDVNIEGPDAKLKGPKFKMPEINIKAPKISIPDVDLDLKGPKVKGDFDVSVPKVEGTLKGPEVDLKGPRLDFEGPDAKLSGPSLKMPSLEISAPKVTAPDVDLHLKAPKIGFSGPKLEGGEVDLKGPKVEAPSLDVHMDSPDINIEGPDVKIPKFKKPKFGFGAKSPKADIKSPSLDVTVPEAELNLETPEISVGGKGKKSKFKMPKIHMSGPKIKAKKQGFDLNVPGGEIDASLKAPDVDVNIAGPDAALKVDVKSPKTKKTMFGKMYFPDVEFDIKSPKFKAEAPLPSPKLEGELQAPDLELSLPAIHVEGLDIKAKAPKVKMPDVDISVPKIEGDLKGPKVQANLGAPDINIEGLDAKVKTPSFGISAPQVSIPDVNVNLKGPKIKGDVPSVGLEGPDVDLQGPEAKIKFPKFSMPKIGIPGVKMEGGGAEVHAQLPSLEGDLRGPDVKLEGPDVSLKGPGVDLPSVNLSMPKVSGPDLDLNLKGPSLKGDLDASVPSMKVHAPGLNLSGVGGKMQVGGDGVKVPGIDATTKLNVGAPDVTLRGPSLQGDLAVSGDIKCPKVSVGAPDLSLEASEGSIKLPKMKLPQFGISTPGSDLHVNAKGPQVSGELKGPGVDVNLKGPRISAPNVDFNLEGPKVKGSLGATGEIKGPTVGGGLPGIGVQGLEGNLQMPGIKSSGCDVNLPGVNVKLPTGQISGPEIKGGLKGSEVGFHGAAPDISVKGPAFNMASPESDFGINLKGPKIKGGADVSGGVSAPDISLGEGHLSVKGSGGEWKGPQVSSALNLDTSKFAGGLHFSGPKVEGGVKGGQIGLQAPGLSVSGPQGHLESGSGKVTFPKMKIPKFTFSGRELVGREMGVDVHFPKAEASIQAGAGDGEWEESEVKLKKSKIKMPKFNFSKPKGKGGVTGSPEASISGSKGDLKSSKASLGSLEGEAEAEASSPKGKFSLFKSKKPRHRSNSFSDEREFSGPSTPTGTLEFEGGEVSLEGGKVKGKHGKLKFGTFGGLGSKSKGHYEVTGSDDETGKLQGSGVSLASKKSRLSSSSSNDSGNKVGIQLPEVELSVSTKKE

SEQ ID NO: 16694 - protein, 24 aa, Homo sapiens
LGWSRRGTRLWVPPSTLTTCSRVR

SEQ ID NO: 16695 - protein, 16 aa, Homo sapiens
MMRSTSASTPRRSSHG

SEQ ID NO: 16696 - protein, 17 aa, Homo sapiens
RAHLWRVVIMAKLNFPP

SEQ ID NO: 16697 - protein, 9 aa, Homo sapiens
KGPSLRCLR

SEQ ID NO: 16698 - protein, 23 aa, Homo sapiens
RKAEGPQVQDARDEYQGPQDLHA

SEQ ID NO: 16699 - protein, 11 aa, Homo sapiens
RFQMWTSEVPR

SEQ ID NO: 16700 - protein, 15 aa, Homo sapiens
ILMHQMWRFMAQTGT

SEQ ID NO: 16701 - protein, 13 aa, Homo sapiens
RRGPRGGYEPAQG

SEQ ID NO: 16702 - protein, 8 aa, Homo sapiens
ILKVQKGS

SEQ ID NO: 16703 - protein, 11 aa, Homo sapiens
RSRREVEGPQV

SEQ ID NO: 16704 - protein, 15 aa, Homo sapiens
TLMSQDPRWMLKSQM

SEQ ID NO: 16705 - protein, 17 aa, Homo sapiens
ICTLKLPKSLCQTSIYT

SEQ ID NO: 16706 - protein, 17 aa, Homo sapiens
RSQGEGRCGCFSAQSGR

SEQ ID NO: 16707 - protein, 33 aa, Homo sapiens
KWKVTSRAPKLTSRGPKWILMPQMWVFKAQTGT

SEQ ID NO: 16708 - protein, 32 aa, Homo sapiens
LAPEDAQGENAKVQHAWLQRRGPRWGCEAAQG

SEQ ID NO: 16709 - protein, 28 aa, Homo sapiens
LKESGKVQSLRCQRCILRLQRYPCQILT

SEQ ID NO: 16710 - protein, 11 aa, Homo sapiens
LASKERAQMWM

SEQ ID NO: 16711 - protein, 14 aa, Homo sapiens
RPRGKVERSQIQNA

SEQ ID NO: 16712 - protein, 9 aa, Homo sapiens
RSRCETEGP

SEQ ID NO: 16713 - protein, 9 aa, Homo sapiens
IKRSKTEDA

SEQ ID NO: 16714 - protein, 14 aa, Homo sapiens
RPRGKVERSQIQDA

SEQ ID NO: 16715 - protein, 26 aa, Homo sapiens
KLTLMSQDPKWTLTLLILIFMVQKGN

SEQ ID NO: 16716 - protein, 9 aa, Homo sapiens
RSQSGCQRP

SEQ ID NO: 16717 - protein, 14 aa, Homo sapiens
LTLLILTFMVQKGN

SEQ ID NO: 16718 - protein, 14 aa, Homo sapiens
LMSQDPKWTLMFLM

SEQ ID NO: 16719 - protein, 38 aa, Homo sapiens
MLPFLKWKVTSRAQKLTSRAQKWTSTPLMWMFMAQTGT

SEQ ID NO: 16720 - protein, 14 aa, Homo sapiens
KEILMCLSLRLKGL

SEQ ID NO: 16721 - protein, 9 aa, Homo sapiens
RSTSGFRRP

SEQ ID NO: 16722 - protein, 12 aa, Homo sapiens
VMSPAWDWKDQM

SEQ ID NO: 16723 - protein, 9 aa, Homo sapiens
KLGGIRRQH

SEQ ID NO: 16724 - protein, 8 aa, Homo sapiens
MGLLLISV

SEQ ID NO: 16725 - protein, 15 aa, Homo sapiens
VCLGLKVTWKVDLEK

SEQ ID NO: 16726 - protein, 13 aa, Homo sapiens
IMIKKISSTLMAN

SEQ ID NO: 16727 - protein, 22 aa, Homo sapiens
LERKSASLCFSEIQPASASKHR

SEQ ID NO: 16728 - protein, 17 aa, Homo sapiens
LVVGEWLCTLPVSISII

SEQ ID NO: 16729 - protein, 40 aa, Homo sapiens
IRRLEAPRGGKRLALPCPTPHHDPPAAAPSAGLSARVLLL

SEQ ID NO: 16730 - protein, 13 aa, Homo sapiens
RSAPSVILFQTLR

SEQ ID NO: 16731 - protein, 100 aa, Homo sapiens
RRKSCGACRALSLQLPQGGGGQHHPHPGGLPKTGACLLPLSQHLRELHYSPGLHPHPADHPRESETWQPQLQSHPLVRALSCVHVTECLFETGRDEDKYG

SEQ ID NO: 16732 - protein, 20 aa, Homo sapiens
TTRTEMGSWTAQKWTKLSYR

SEQ ID NO: 16733 - protein, 37 aa, Homo sapiens
RDNKSLLQESYQKILDSDSTHYIPSCNRKSCYKRMWS

SEQ ID NO: 16734 - protein, 22 aa, Homo sapiens
RLRNLGECTEELRERTRDQGPG

SEQ ID NO: 16735 - protein, 16 aa, Homo sapiens
RSRGGWRSCRTASPAA

SEQ ID NO: 16736 - protein, 57 aa, Homo sapiens
VGVAAEGEGQAVSWPGAHCLRELLQPSCAGGPGVLSEQQVLGGLSWQEILWGSRGGG

SEQ ID NO: 16737 - protein, 14 aa, Homo sapiens
ILLIVNQLRILNCL

SEQ ID NO: 16738 - protein, 27 aa, Homo sapiens
MGHSRPGEIRWTERWLLYPSPVCHHNV

SEQ ID NO: 16739 - protein, 416 aa, Homo sapiens
RMYCLQMGLPPTENWNFYMAFSFFRVAAILQGVYKRSLTGQASSTYAEQTGKLTEFVSNLAWDFAVKEGFRVFKEMPFTNPLTRSYHTWARPQSQWCPTGSRSYSSVPEASPAHTSRGGLVISPESLSPPVRELYHRLKHFMEQRVYPAEPELQSHQASAARWSPSPLIEDLKEKAKAEGLWNLFLPLEADPEKKYGAGLTNVEYAHLCELMGTSLYAPEVCNCSAPDTGNMELLVRYGTEAQKARWLIPLLEGKARSCFAMTEPQVASSDATNIEASIREEDSFYVINGHKWWITGILDPRCQLCVFMGKTDPHAPRHRQQSVLLVPMDTPGIKIIRPLTVYGLEDAPGGHGEVRFEHVRVPKENMVLGPGRGFEIAQGRLGPGRIHHCMRLIGFSERALALMKARVSAFPRTQH

SEQ ID NO: 16740 - protein, 16 aa, Homo sapiens
IALTQEEAFGTKETFP

SEQ ID NO: 16741 - protein, 10 aa, Homo sapiens
LACKRNIPAC

SEQ ID NO: 16742 - protein, 15 aa, Homo sapiens
VSVFWFLRWDSVYNP

SEQ ID NO: 16743 - protein, 9 aa, Homo sapiens
KTRPQVGYL

SEQ ID NO: 16744 - protein, 76 aa, Homo sapiens
KLAVEAVLRLKGSGNLEAIHIIKKLGGSLADSYLDEGFLLDKKIGVNQPKRIENAKILIANTGMDTDKIKVCNSTF

SEQ ID NO: 16745 - protein, 152 aa, Homo sapiens
MTECCSVTQAGVQWHDLGSLQPPPPGFKRFSCLSLPSSWDYRRNLALLPRLECDGMILAHGKLRLPGSSDSPASASRVAGITGMCHHAPLARLVSNTLPQVILPPLGLQAEELPRRQEVEQNTPSLVPIIDNIMTLHVMDQLTPSRSVNWFI

SEQ ID NO: 16746 - protein, 29 aa, Homo sapiens
ITDPACDGSADTIQIGKLVHLILCPPPRN

SEQ ID NO: 16747 - protein, 13 aa, Homo sapiens
IKPSKCFFGSSRE

SEQ ID NO: 16748 - protein, 13 aa, Homo sapiens
ILCALKTLDSSLR

SEQ ID NO: 16749 - protein, 12 aa, Homo sapiens
IPLCGRRALISI

SEQ ID NO: 16750 - protein, 8 aa, Homo sapiens
MECCIPKL

SEQ ID NO: 16751 - protein, 27 aa, Homo sapiens
MECCIPKLIIQPRSSNSLDRKLLWPMS

SEQ ID NO: 16752 - protein, 15 aa, Homo sapiens
MECCIPKLKLLWPMS

SEQ ID NO: 16753 - protein, 18 aa, Homo sapiens
ILAVGRWLHSLTQPTNNN

SEQ ID NO: 16754 - protein, 17 aa, Homo sapiens
IRTSACKGLCKDDQPSQ

SEQ ID NO: 16755 - protein, 30 aa, Homo sapiens
LHAKDCVKMINHLNKSQEQRRDYTSGNTAN

SEQ ID NO: 16756 - protein, 7 aa, Homo sapiens
VGSPIFC

SEQ ID NO: 16757 - protein, 10 aa, Homo sapiens
RHFEELERGE

SEQ ID NO: 16758 - protein, 22 aa, Homo sapiens
LHLRWRQMKRKRRKKSNIPKTP

SEQ ID NO: 16759 - protein, 40 aa, Homo sapiens
TTRTATAASLWKNIEMWSRSCCRETLTSRRSPLAPSPTGP

SEQ ID NO: 16760 - protein, 42 aa, Homo sapiens
RPGRGNLQVPDHVSVGSGLQDAPRKSAAALCRLSPTPAASSG

SEQ ID NO: 16761 - protein, 13 aa, Homo sapiens
IVANEVYPRRDYC

SEQ ID NO: 16762 - protein, 7 aa, Homo sapiens
MWSSSPF

SEQ ID NO: 16763 - protein, 16 aa, Homo sapiens
RVFNVTNSFVLSLRTF

SEQ ID NO: 16764 - protein, 12 aa, Homo sapiens
KHHRLTNNHAQE

SEQ ID NO: 16765 - protein, 9 aa, Homo sapiens
KTMRNICKT

SEQ ID NO: 16766 - protein, 36 aa, Homo sapiens
IFARHRIVLENVQYVMWQISIRKYSVIFRPRIILVL

SEQ ID NO: 16767 - protein, 24 aa, Homo sapiens
KLMSKIMGKIENNIIKCKTSKVLF

SEQ ID NO: 16768 - protein, 54 aa, Homo sapiens
KFAEVEGAEREGVTYKKVLGRRRGDVRAPPEWTIFPSVNGRGRPSLTLTVLPLR

SEQ ID NO: 16769 - protein, 23 aa, Homo sapiens
VLSSNRVVWQDTQQFPLSLGGPS

SEQ ID NO: 16770 - protein, 27 aa, Homo sapiens
MSVQPLGPSPGGECHAMILVCSMASPA

SEQ ID NO: 16771 - protein, 21 aa, Homo sapiens
KARDRGMGVGVTRPELPVSPQ

SEQ ID NO: 16772 - protein, 117 aa, Homo sapiens
KMAGEKVEKPDTKEKKPEAKKVDAGGKVKKGNLKAKKPKKGKPHCSRNPVLVRGIGRYSRSAMYSRKAMYKRKYSAAKSKVEKKKKEKVLATVTKPVGGDKNGGTRVVKLRKMDAEA

SEQ ID NO: 16773 - protein, 81 aa, Homo sapiens
ILVPRSLHKMPGEATETVPATEQELPQPQAETGSGTESDSDESVPELEEQELLESLSGNLRISSLSSQNQMSTRALLQILT

SEQ ID NO: 16774 - protein, 8 aa, Homo sapiens
MEVLSPLP

SEQ ID NO: 16775 - protein, 12 aa, Homo sapiens
LDFVYPSVSPIP

SEQ ID NO: 16776 - protein, 30 aa, Homo sapiens
VDADRLHHLLWLWPVAQRGGVPGCRPSKDS

SEQ ID NO: 16777 - protein, 122 aa, Homo sapiens
ISNGKMSSNVPADMINLRLILVSGKTKEFLFSPNDSASDIAKHVYDNWPMDWEEEQVSSPNILRLIYQGRFLHGNVTLGALKLPFGKTTVMHLVARETLPEPNSQGQRNREKTGESNCCVIL

SEQ ID NO: 16778 - protein, 19 aa, Homo sapiens
TSPCDGAYPDDQGRTSKIT

SEQ ID NO: 16779 - protein, 19 aa, Homo sapiens
KSYFNRSNSKISLRQKWKC

SEQ ID NO: 16780 - protein, 24 aa, Homo sapiens
LSLLTAHIQMNTKLQPLSSIAVSS

SEQ ID NO: 16781 - protein, 10 aa, Homo sapiens
IISFTAGRLS

SEQ ID NO: 16782 - protein, 16 aa, Homo sapiens
IKIHFTNYSGVNGYSV

SEQ ID NO: 16783 - protein, 49 aa, Homo sapiens
LMSEDIVICRRTKSKLQICIDLCMMRCLVIDQMLLNPLIHRFYRKHVLH

SEQ ID NO: 16784 - protein, 8 aa, Homo sapiens
MCKYKEVG

SEQ ID NO: 16785 - protein, 37 aa, Homo sapiens
MLTNVAIILDLSPVIITGFCLSSTQHQDLRQMGLMSS

SEQ ID NO: 16786 - protein, 38 aa, Homo sapiens
IHLDHHQWIYKWQTILLRPLQLLREMTVTSMHITARPG

SEQ ID NO: 16787 - protein, 10 aa, Homo sapiens
TMMMMTSPLQ

SEQ ID NO: 16788 - protein, 9 aa, Homo sapiens
LEMALSFVK

SEQ ID NO: 16789 - protein, 14 aa, Homo sapiens
MSSWSRKALKQIRT

SEQ ID NO: 16790 - protein, 11 aa, Homo sapiens
KKSFSRGSNQM

SEQ ID NO: 16791 - protein, 14 aa, Homo sapiens
LRRCVEVSISRLLL

SEQ ID NO: 16792 - protein, 33 aa, Homo sapiens
RYISVILQVTTVGLKPLQRELNKLSQPASLKKK

SEQ ID NO: 16793 - protein, 12 aa, Homo sapiens
LQPPLLRSHVWA

SEQ ID NO: 16794 - protein, 31 aa, Homo sapiens
KCHCPSWCITERRNTSSLEGSCRPREDLICA

SEQ ID NO: 16795 - protein, 22 aa, Homo sapiens
MWKVNLNEKFKHCLLIVPRHCQ

SEQ ID NO: 16796 - protein, 11 aa, Homo sapiens
LGVSWTPCRYS

SEQ ID NO: 16797 - protein, 14 aa, Homo sapiens
TKCSTCKNRKSSYS

SEQ ID NO: 16798 - protein, 16 aa, Homo sapiens
KMTPRTTSRRPTRWSR

SEQ ID NO: 16799 - protein, 71 aa, Homo sapiens
VTSVASATRTDRGSATTMLTLTWPARRGMKLKTRRLGPHPTTEMRTTGPRKDRMEQSFPITTVTSAWGAPT

SEQ ID NO: 16800 - protein, 40 aa, Homo sapiens
RRGAPGTGVWDSRQERLRLPRTGTFATHQILAPGSRERTG

SEQ ID NO: 16801 - protein, 21 aa, Homo sapiens
RVLGETCLDIQNLFLPDLNPC

SEQ ID NO: 16802 - protein, 20 aa, Homo sapiens
RSAGRKAEKADEDFDLSGTL

SEQ ID NO: 16803 - protein, 17 aa, Homo sapiens
VVRSEPSVLRQDASKYY

SEQ ID NO: 16804 - protein, 42 aa, Homo sapiens
RNYPSSTPHNILKGTERTGTPLRGPGTGWKKTYSMWMRLSGP

SEQ ID NO: 16805 - protein, 52 aa, Homo sapiens
KLPIKKKRMSNKGKKLKRIILAIPPAAPATVAMRPVEAAPSGRQATITKPSL

SEQ ID NO: 16806 - protein, 19 aa, Homo sapiens
LEAAAHRGRGLVPALGHHP

SEQ ID NO: 16807 - protein, 18 aa, Homo sapiens
LASQPPFESLDSSAEQIL

SEQ ID NO: 16808 - protein, 15 aa, Homo sapiens
KEDVNSLDSSAEQIL

SEQ ID NO: 16809 - protein, 7 aa, Homo sapiens
MLWFQSL

SEQ ID NO: 16810 - protein, 28 aa, Homo sapiens
MPRQSHGRSSSTARSVWSASSPSCTRTG

SEQ ID NO: 16811 - protein, 7 aa, Homo sapiens
MPTVPST

SEQ ID NO: 16812 - protein, 11 aa, Homo sapiens
VCACKLTVSTG

SEQ ID NO: 16813 - protein, 25 aa, Homo sapiens
LPPRCSVLPRKLRLRWGEALTSSGD

SEQ ID NO: 16814 - protein, 16 aa, Homo sapiens
LRTDFLSRNRRSSSLG

SEQ ID NO: 16815 - protein, 30 aa, Homo sapiens
VTHLLSPDPTRFVGVACRWVTPVKGNHKIS

SEQ ID NO: 16816 - protein, 11 aa, Homo sapiens
VGACGPSYSGG

SEQ ID NO: 16817 - protein, 39 aa, Homo sapiens
RKTQQGEALVPLPAAQDLVSAHRPSPPQRASQGGEEPAQ

SEQ ID NO: 16818 - protein, 11 aa, Homo sapiens
LTASKTYLAPS

SEQ ID NO: 16819 - protein, 11 aa, Homo sapiens
MATCLYSPMPA

SEQ ID NO: 16820 - protein, 14 aa, Homo sapiens
MALPKFTSQQTAAL

SEQ ID NO: 16821 - protein, 7 aa, Homo sapiens
KAAVNTG

SEQ ID NO: 16822 - protein, 28 aa, Homo sapiens
ICLGHRVLAQPFRAERIYRGSHGSQGRR

SEQ ID NO: 16823 - protein, 22 aa, Homo sapiens
MSPSYTRRKVLVLGSAWQEEQI

SEQ ID NO: 16824 - protein, 27 aa, Homo sapiens
LVETFINTWAQDFKANTDSPSPLIFKN

SEQ ID NO: 16825 - protein, 83 aa, Homo sapiens
RTLGLDILHGSVTQPLKKLRVQTQAVSRKVSREVIQEVDMAASRTAALNLLRVSRNLRANQQVPNPSQSSQKPKRSQPLRRNG

SEQ ID NO: 16826 - protein, 29 aa, Homo sapiens
KTGARELDPARVYRLPSSLFASKTTTPKR

SEQ ID NO: 16827 - protein, 30 aa, Homo sapiens
KIHEDELNDMKDYLSQCQQEQESFIDYKST

SEQ ID NO: 16828 - protein, 17 aa, Homo sapiens
MKANSKASQMNLKNWNS

SEQ ID NO: 16829 - protein, 27 aa, Homo sapiens
MSAESPKSPSGNMGANWDSRGPAVTKN

SEQ ID NO: 16830 - protein, 302 aa, Homo sapiens
KMLEPQENGVIDLPDYEHVEDETFPPFPPPASPERQDGEGTEPDEESGNGAPVRVPPKRTVKRNIPKLDAQRLISERGLPALRHVFDKAKFKGKGHEAEDLKMLIRHMEHWAHRLFPKLQFEDFIDRVEYLGSKKEVQTCLKRIRLDLPILHEDFVSNNDEVAENNEHDVTSTELDPFLTNLSESEMFASELSRSLTEEQQQRIERNKQLALERRQAKLLSNSQTLGNDMLMNTPRAHTVEEVNTDEDQKEESNGLNEDILDNPCNDAIANTLNEEETLLDQSFKNVQQQLDATSRNITEAR

SEQ ID NO: 16831 - protein, 9 aa, Homo sapiens
MTCYWRVLF

SEQ ID NO: 16832 - protein, 9 aa, Homo sapiens
MGTTHLKWH

SEQ ID NO: 16833 - protein, 7 aa, Homo sapiens
IFRHELC

SEQ ID NO: 16834 - protein, 11 aa, Homo sapiens
TTANCPGCGYL

SEQ ID NO: 16835 - protein, 29 aa, Homo sapiens
LTRKDTPYCETGLIFLTDMETIANTYFYF

SEQ ID NO: 16836 - protein, 38 aa, Homo sapiens
LTHSWSTCAAWTLIHHPSQPGTLASSVPLAQLPDQWRR

SEQ ID NO: 16837 - protein, 24 aa, Homo sapiens
IHHPSQPGTLASSVPLAQLPDQWS

SEQ ID NO: 16838 - protein, 9 aa, Homo sapiens
ISGDVEGDD

SEQ ID NO: 16839 - protein, 20 aa, Homo sapiens
LDGATELGSLSSVLLRCWRA

SEQ ID NO: 16840 - protein, 22 aa, Homo sapiens
TPDTDVARTAGLGELGCPTSFK

SEQ ID NO: 16841 - protein, 11 aa, Homo sapiens
KAHFEGGDFQE

SEQ ID NO: 16842 - protein, 14 aa, Homo sapiens
REGSCGRPGGRGEL

SEQ ID NO: 16843 - protein, 12 aa, Homo sapiens
RGWEPWWRLGGF

SEQ ID NO: 16844 - protein, 24 aa, Homo sapiens
MLKILNLPLTPLVSLRNCVPYMMA

SEQ ID NO: 16845 - protein, 24 aa, Homo sapiens
LGTLERVLKPSIRPMRSMFYLLGI

SEQ ID NO: 16846 - protein, 9 aa, Homo sapiens
KKPKQKMRQ

SEQ ID NO: 16847 - protein, 10 aa, Homo sapiens
VAVSQLAALG

SEQ ID NO: 16848 - protein, 31 aa, Homo sapiens
LSGGGGGDSDRGARCLGISQWGGFALGSCSL

SEQ ID NO: 16849 - protein, 13 aa, Homo sapiens
LGARTANGAGARR

SEQ ID NO: 16850 - protein, 30 aa, Homo sapiens
LGARTANGAGARRCLGISQWGGFALGSCSL

SEQ ID NO: 16851 - protein, 23 aa, Homo sapiens
KIIKDLHTAGRNHREAGRGGSCL

SEQ ID NO: 16852 - protein, 26 aa, Homo sapiens
IYTQLEEIIEKPGVVAHAYNPSTFGG

SEQ ID NO: 16853 - protein, 98 aa, Homo sapiens
RLRRADHLRSGVRDQPGALASPNGVALLWAPVPCELPGPAAGGKLWEHEGLAGAHLRLRLHEHLYLRVEDEWSHQLQHRAPPVVPAGFSALRSPHVYP

SEQ ID NO: 16854 - protein, 8 aa, Homo sapiens
RMPEEKGT

SEQ ID NO: 16855 - protein, 18 aa, Homo sapiens
MRCIPVMHDMTCITGIKT

SEQ ID NO: 16856 - protein, 7 aa, Homo sapiens
MSPTLCC

SEQ ID NO: 16857 - protein, 36 aa, Homo sapiens
VHVLLLLSLQMRTRAYPCLGNATSWKAARLADFQKT

SEQ ID NO: 16858 - protein, 30 aa, Homo sapiens
RASVWISKEEFPLKHRNLLLPAPCPTNIQH

SEQ ID NO: 16859 - protein, 18 aa, Homo sapiens
LDVWTRMRPRSVATQPLC

SEQ ID NO: 16860 - protein, 14 aa, Homo sapiens
TGEKEKLKEEEAQV

SEQ ID NO: 16861 - protein, 124 aa, Homo sapiens
IPSFSLERPTMSTTVNVDSLAEYEKSQIKRALELGTVMTVFSFRKSTPERRTVQVIMETRQVAWSKTADKIEGFLDIMEIKEIRPGKNSKDFERAKAVRQKEDCCFTILYGTQFVLSTLSLAVG

SEQ ID NO: 16862 - protein, 40 aa, Homo sapiens
RPAANLCCTPFLHQVLYFPDRWWHATLNLDTSVFISTFLG

SEQ ID NO: 16863 - protein, 55 aa, Homo sapiens
RLAQGFPGHLPPRSWSRAEPRSMEMDAPRPPSLAVPGAASRPGRTVDNGRLSPIH

SEQ ID NO: 16864 - protein, 18 aa, Homo sapiens
IALTSDTSYENCTCSLII

SEQ ID NO: 16865 - protein, 39 aa, Homo sapiens
MIVTGGIAVPTAALTWPTTTTSSPSPSRAVRGVPTSSTQ

SEQ ID NO: 16866 - protein, 11 aa, Homo sapiens
RGRGERGSTLA

SEQ ID NO: 16867 - protein, 283 aa, Homo sapiens
ISAPDCTRAMVGRRALIVLAHSERTSFNYAMKEAAAAALKKKGWEVVESDLYAMNFNPIISRKDITGKLKDPANFQYPAESVLAYKEGHLSPDIVAEQKKLEAADLVIFQFPLQWFGVPAILKGWFERVFIGEFAYTYAAMYDKGPFRSKKAVLSITTGGSGSMYSLQGIHGDMNVILWPIQSGILHFCGFQVLEPQLTYSIGHTPADARIQILEGWKKRLENIWDETPLYFAPSSLFDLNFQAGFLMKKEVQDEEKNKKFGLSVGHHLGKSIPTDNQIKARK

SEQ ID NO: 16868 - protein, 17 aa, Homo sapiens
LNTIVPDYIEKGGPYTV

SEQ ID NO: 16869 - protein, 38 aa, Homo sapiens
LQRDWNYSKGMNRCHGDTEERAVTLPEGWRRFCEGGDV

SEQ ID NO: 16870 - protein, 81 aa, Homo sapiens
LPLCPALKPQLLPNRPETHVSPTGCRPPRPSGGAGQTQDEAVGPAAAEKGARGLPQRQGPIFSAQDPPGIPRTHPAGPGSA

SEQ ID NO: 16871 - protein, 12 aa, Homo sapiens
RRSTRWGKMGFY

SEQ ID NO: 16872 - protein, 28 aa, Homo sapiens
LGPRMFCSEQMQDRGGPRGGIPECAVSL

SEQ ID NO: 16873 - protein, 14 aa, Homo sapiens
LPRRVSCTTQIWSC

SEQ ID NO: 16874 - protein, 38 aa, Homo sapiens
VVVFIPSRADAGAANGRAETEFRHVGQAHLRSLKISST

SEQ ID NO: 16875 - protein, 7 aa, Homo sapiens
KAFLCGI

SEQ ID NO: 16876 - protein, 26 aa, Homo sapiens
TRLQIREESASCLAAEYWSQEPAMRF

SEQ ID NO: 16877 - protein, 18 aa, Homo sapiens
KNSTEKRQEDPYYCPRDR

SEQ ID NO: 16878 - protein, 46 aa, Homo sapiens
IVPESWGRGPCPISRAPGATADLAGCIGQWTLQGPALHGKPLPLGA

SEQ ID NO: 16879 - protein, 7 aa, Homo sapiens
VSILAAV

SEQ ID NO: 16880 - protein, 30 aa, Homo sapiens
MKRRLLIMLLFQHKSSGLSVSLVSGNHRKL

SEQ ID NO: 16881 - protein, 21 aa, Homo sapiens
IMSASQDSRVTGMRLLTALMT

SEQ ID NO: 16882 - protein, 26 aa, Homo sapiens
KAVGPGTRAQGVGAAPERGSHSLPCR

SEQ ID NO: 16883 - protein, 56 aa, Homo sapiens
ISPDAAKPIPITEAMRNDIIARICGEDGQVDPNCFVLAQSIVFSAMEQDTWKKRMQ

SEQ ID NO: 16884 - protein, 15 aa, Homo sapiens
RRRQAKNDSGISANG

SEQ ID NO: 16885 - protein, 14 aa, Homo sapiens
VVLLALDRWKDSEV

SEQ ID NO: 16886 - protein, 26 aa, Homo sapiens
VVLLALDRWKDSEEKDNNLCGFPPDN

SEQ ID NO: 16887 - protein, 33 aa, Homo sapiens
IDFLFSFFRRSRCRSEDVVGPLVRNSGFPWVFR

SEQ ID NO: 16888 - protein, 72 aa, Homo sapiens
MRTSALLQGITETIFYGAFSKSKPGTIGIFSPKGETLDRTALMIITAGLLACPSHPMHPFCQIIRMREWKTS

SEQ ID NO: 16889 - protein, 24 aa, Homo sapiens
LVFCPDISSSCVFTCIWLDDHCVY

SEQ ID NO: 16890 - protein, 49 aa, Homo sapiens
IPGPPYQLTSSSVLQAPLGSSLPWLFLPLPLYRRLSVGALGFIKLGSEC

SEQ ID NO: 16891 - protein, 27 aa, Homo sapiens
ISLQAALGWSLRARGDCQRCPLSVTGP

SEQ ID NO: 16892 - protein, 11 aa, Homo sapiens
VETLLGLKHLP

SEQ ID NO: 16893 - protein, 11 aa, Homo sapiens
LQEPPRPPPLM

SEQ ID NO: 16894 - protein, 32 aa, Homo sapiens
LQEPPRPPPLMTPKAAAAARCSAPSPSACGPR

SEQ ID NO: 16895 - protein, 20 aa, Homo sapiens
RPPPLMTPKAAAAARCSAPR

SEQ ID NO: 16896 - protein, 8 aa, Homo sapiens
MSTGAAPG

SEQ ID NO: 16897 - protein, 24 aa, Homo sapiens
VAGKTWSHLDCREGTPLKQAPETS

SEQ ID NO: 16898 - protein, 9 aa, Homo sapiens
IWTAEKELL

SEQ ID NO: 16899 - protein, 69 aa, Homo sapiens
IGDSSAWTRGTSPRVPGVGIGSRCNDSGHPPAKSCSGKSSSPLRVQAPAPEDSFTPIPATSTNAKKRQG

SEQ ID NO: 16900 - protein, 13 aa, Homo sapiens
VGLIVRLSSSTGG

SEQ ID NO: 16901 - protein, 17 aa, Homo sapiens
RWKTSSLAPNGPPPRPR

SEQ ID NO: 16902 - protein, 9 aa, Homo sapiens
MSLLQPVDR

SEQ ID NO: 16903 - protein, 10 aa, Homo sapiens
MLGKTCKEFA

SEQ ID NO: 16904 - protein, 1602 aa, Homo sapiens
KTVEIVMESRETLSSSRQRGGESDFLPVSSAKPPAAPGCAGEPLLSTPGPGKGIPVGGERMEPEEEDELGSGRDVDSNSNADSEKWVAGDGLEEQEFSIKEANFTEGSLKLKIQTTKRAKKPPKNLENYICPPEIKITIKQSGDQKVSRAGKNSKATKEEERSHSKKKLLTASDLAASDLKGFQPQAYERPQKHSTLHYDTGLPQDFTGDTLKPKHQQKSSSQNHMDWSTNSDSGPVTQNCFISPESGRETASTSKIPALEPVASFAKAQGKKGSAGNTWSQLSNNNKDLLLGGVAPSPSSHSSPAPPSSSAECNGLQPLVDQDGGGTKEPPEPPTVGSKKKSSKKDVISQTIPNPDLDWVKNAQKAFDNTEGKREGYSADSAQEASPARQNVSSASNPENDSSHVRITIPIKAPSLDPTNHKRKKRQSIKAVVEKIMPEKALASGITMSSEVVNRILSNSEGNKKDPRVPKLSKMIENESPSVGLETGGNAEKVIPGGVSKPRKPPMVMTPPTCTDHSPSRKLPEIQHPKFAAKRRWTCSKPKPSTMLREAVMATSDKLMLEPPSAYPITPSSPLYTNTDSLTVITPVKKKRGRPKKQPLLTVETIHEGTSTSPVSPISREFPGTKKRKRRRNLAKLAQLVPGEDKPMSEMKFHKKVGKLGVLDKKTIKTINKMKTLKRKNILNQILSCSSSVALKAKAPPETSPGAAAIESKLGKQINVSKRGTIYIGKKRGRKPRAELPPPSEEPKTAIKHPRPVSSQPDVPAVPSNFQSLVASSPAAMHPLSTQLGGSNGNLSPASTETNFSELKTMPNLQPISALPTKTQKGIHSGTWKLSPPRLMANSPSHLCEIGSLKEITLSPVSESHSEETIPSDSGIGTDNNSTSDQAEKSSESRRRYSFDFCSLDNPEAIPSDTSTKNRHGHRQKHLIVDNFLAHESLKKPKHKRKRKSLQNRDDLQFLADLEELITKFQVFRISHRSYTFYHENPYPSIFRINFDHYYPVPYIQYDPLLYLRRTSDLKSKKKRGRPAKTNDTMTKVPFLQGFSYPIPSGSYYAPYGMPYTSMPMMNLGYYGQYPAPLYLSHTLGAASPFMRPTVPPPQFHTNSHVKMSGAAKHKAKHGVHLQGPVSMGLGDMQPSLNPPKVGSASLSSGRLHKRKHKHKHKHKEDRILGTHDNLSGLFAGKATGFSSHILSERLSSADKELPLVSEKNKHKEKQKHQHSEAGHKASKNNFEVDTLSTLSLSDAQHWTQAKEKGDLSSEPVDSCTKRYSGSGGDGGSTRSENLDVFSEMNPSNDKWDSDVSGSKRRSYEGFGTYREKDIQAFKMNRKERSSYDSSMSPGMPSPHLKVDQTAVHSKNEGSVPTMMTRKKPAAVDSVTIPPAPVLSLLAASAATSDAVGSSLKKRFKRREIEAIQCEVRKMCNYTKILSTKKNLDHVNKILKAKRLQRQSKTGNNFVKKRRGRPRKQPTQFDEDSRDQMPVLEKCIDLPSKRGQKPSLSPLVLEPAASQDTIMATIEAVIHMAREAPPLPPPPPPPLPPPPPPPLPPPPPLPKTPRGGKRKHKPQAPAQPPQQSPPQQPLPQEEEVKAKRQRKSRGSESEVLP

SEQ ID NO: 16905 - protein, 17 aa, Homo sapiens
KFCEKEKTKEKEIQTGQ

SEQ ID NO: 16906 - protein, 24 aa, Homo sapiens
MSQSQTRGFTAATCRPAQEKTKPS

SEQ ID NO: 16907 - protein, 7 aa, Homo sapiens
IMKTTTL

SEQ ID NO: 16908 - protein, 27 aa, Homo sapiens
RITEAGMPLWNCTAPACGLCLISPGCL

SEQ ID NO: 16909 - protein, 23 aa, Homo sapiens
KEKATKVQKTLDNHIAIRSTAPG

SEQ ID NO: 16910 - protein, 11 aa, Homo sapiens
RTGDARTKRTK

SEQ ID NO: 16911 - protein, 31 aa, Homo sapiens
KSPPCTWCCACEVALLSLLSASLPRNTTATR

SEQ ID NO: 16912 - protein, 97 aa, Homo sapiens
IAKMPGPPESLDMGPLTFRDVAIEFSLEEWQCLDTAQQDLYRKVMLENYRNLVFLGIAVSKPDLVTCLEQGKDPWNMKGHSTVVKPPGFLPPSVTAS

SEQ ID NO: 16913 - protein, 9 aa, Homo sapiens
LLRQREGRG

SEQ ID NO: 16914 - protein, 53 aa, Homo sapiens
IFPPFLEGFRCFPKVLDERSSSVGRFWALWLGFCNFSLGTAVEPHPLWIIIAT

SEQ ID NO: 16915 - protein, 19 aa, Homo sapiens
VNYVENRMHDWRPEQRSLV

SEQ ID NO: 16916 - protein, 17 aa, Homo sapiens
MYKYLFSTEKIMFVDEI

SEQ ID NO: 16917 - protein, 64 aa, Homo sapiens
RRQELRSPWKSHHGLLDTADAAALEEFHVSPETAGPAPGRIAVASLPLLHPGGCSPLPPAPGAP

SEQ ID NO: 16918 - protein, 23 aa, Homo sapiens
TWASCSRVSTGTILRTWPPWSAM

SEQ ID NO: 16919 - protein, 37 aa, Homo sapiens
REKLGLLWQSPIPLGADALKRRLKTVEALERTEKHWG

SEQ ID NO: 16920 - protein, 18 aa, Homo sapiens
VSCSASPRTPSTPLLSPP

SEQ ID NO: 16921 - protein, 70 aa, Homo sapiens
VDSGRLERRGGRGGESAEPERGGFGSGGGDGFSFHLEQPCRAQGDGRLRPRGGLPRPLPAWPGSRQHHRG

SEQ ID NO: 16922 - protein, 15 aa, Homo sapiens
RPSWTSTTASWRRQR

SEQ ID NO: 16923 - protein, 15 aa, Homo sapiens
KASTFLAISTETSVS

SEQ ID NO: 16924 - protein, 57 aa, Homo sapiens
MAAPGPRTPRRTSYTARPMRPPTHCKAMPPTTTRQASLDSSTLASTTRAQQGPTPPS

SEQ ID NO: 16925 - protein, 25 aa, Homo sapiens
RVRWETRSQGSKTSRSAAAPALPPF

SEQ ID NO: 16926 - protein, 8 aa, Homo sapiens
MNSALGME

SEQ ID NO: 16927 - protein, 170 aa, Homo sapiens
RHPRQKGLRSSVAMPASWTSPQKSSALAPEDHGSSYEGSVSFRDVAIDFSREEWRHLDLSQRNLYRDVMLETYSHLLSVGYQVPKPEVVMLEQGKEPWALQGERPRHSCPGEKLWDHNQHRKIIGYKPASSQDQKIYSGEKSYECAEFGKSFTWKSQFKASQNSYRRKTI

SEQ ID NO: 16928 - protein, 782 aa, Homo sapiens
RHPRQKGLRSSVAMPASWTSPQKSSALAPEDHGSSYEGSVSFRDVAIDFSREEWRHLDLSQRNLYRDVMLETYSHLLSVGYQVPKPEVVMLEQGKEPWALQGERPRHSCPGEKLWDHNQHRKIIGYKPASSQDQKIYSGEKSYECAEFGKSFTWKSQFKVHLKVPTGEKLYVCIECGRAFVQKPEFITHQKTHMREKPYKCNECGKSFFQVSSLFRHHRIHTGEKLYECSECGKGFPYNSDLSIHEKIHTGERHHECTDCGKAFTQKSTLKIHQKIHTGERSYICIECGQAFIQKTQLIAHRRIHSGEKPYECNNCGKSFISKSQLQVHQRVHTRVKPYICTEYGKVFSNNSNLITHEKIQSREKSSICTECGKAFTYRSELIIHQRIHTGEKPYECSDCGRAFTQKSALTVHQRIHTGEKSYICMKCGLAFIRKAHLITHQIIHTGEKPYKCGHCGKLFTSKSQLHVHKRIHTGEKPYVCNKCGKAFTNRSNLITHQKTHTGEKSYICSKCGKAFTQRSDLITHQRIHTGEKPYECNTCGKAFTQKSNLNIHQKIHTGERQYECHECGKAFNQKSILIVHQKIHTGEKPYVCTECGRAFIRKSNFITHQRIHTGEKPYECSDCGKSFTSKSQLLVHQPVHTGEKPYVCAECGKAFSGRSNLSKHQKTHTGEKPYICSECGKTFRQKSELITHHRIHTGEKPYECSDCGKSFTKKSQLQVHQRIHTGEKPYVCAECGKAFSNRSNLNKHQTTHTGDKPYKCGICGKGFVQKSVFSVHQSSHA

SEQ ID NO: 16929 - protein, 31 aa, Homo sapiens
MCTARDQPGPQPHPQGRGQDPHFRPAGPGLP

SEQ ID NO: 16930 - protein, 11 aa, Homo sapiens
IHATESPSEQG

SEQ ID NO: 16931 - protein, 53 aa, Homo sapiens
TKKSAGQEGRILTPTCSEVSCHFSTPRKRVKQRSLRRRHPIAAERRSPLQRRH

SEQ ID NO: 16932 - protein, 15 aa, Homo sapiens
VIYCQYLKKIFSERT

SEQ ID NO: 16933 - protein, 10 aa, Homo sapiens
RTTWSGKRHG

SEQ ID NO: 16934 - protein, 19 aa, Homo sapiens
TSSNSQTTPGDCPDTATLP

SEQ ID NO: 16935 - protein, 12 aa, Homo sapiens
MTCWPGSMSLCS

SEQ ID NO: 16936 - protein, 13 aa, Homo sapiens
TNSTLVPEERWKF

SEQ ID NO: 16937 - protein, 58 aa, Homo sapiens
MSFSQSQEAEFCEEEQCGLGKMDKLSLTCPRAWGREAASLNKPTSLRKDKPGDIIRES

SEQ ID NO: 16938 - protein, 37 aa, Homo sapiens
MTSARMNPPWMSSRPAWHTRASPKRKSTRCGWLLSSR

SEQ ID NO: 16939 - protein, 14 aa, Homo sapiens
RGRRRLRRSTKMLN

SEQ ID NO: 16940 - protein, 16 aa, Homo sapiens
MASLKLMLSAGPFVGW

SEQ ID NO: 16941 - protein, 92 aa, Homo sapiens
IRGLEASGKGLRQCRTRNARGTKAPQSVAPASSSRKSVSRHWHPGTSGAAELGGRSSCEDPGCPRDEERAPRGNRCHELQSFQDVPLKMDCI

SEQ ID NO: 16942 - protein, 18 aa, Homo sapiens
RPFTTKTSASRRGTRWWS

SEQ ID NO: 16943 - protein, 20 aa, Homo sapiens
REHVGGGLPGRGQRDENSAA

SEQ ID NO: 16944 - protein, 25 aa, Homo sapiens
KSTSTCLTWVASAMNAASGSSASTM

SEQ ID NO: 16945 - protein, 14 aa, Homo sapiens
IGESDRSLDGHLPE

SEQ ID NO: 16946 - protein, 11 aa, Homo sapiens
ITLTEADDEFV

SEQ ID NO: 16947 - protein, 38 aa, Homo sapiens
LCCTSDGFAPASALSLLQHSDLHPLRGFHCPRGENAPG

SEQ ID NO: 16948 - protein, 9 aa, Homo sapiens
VIFDPRNQS

SEQ ID NO: 16949 - protein, 20 aa, Homo sapiens
METLNCHRQVMSIKRRKLLP

SEQ ID NO: 16950 - protein, 16 aa, Homo sapiens
KCWDYRHCYFVSVSNP

SEQ ID NO: 16951 - protein, 9 aa, Homo sapiens
KYQNILQNG

SEQ ID NO: 16952 - protein, 17 aa, Homo sapiens
INMHFITVKCSFNSESK

SEQ ID NO: 16953 - protein, 12 aa, Homo sapiens
TYIGKPVSRKPW

SEQ ID NO: 16954 - protein, 12 aa, Homo sapiens
LNPGTCSFCSRD

SEQ ID NO: 16955 - protein, 23 aa, Homo sapiens
LPAEGKGVLHVPLSPSSPFQGHV

SEQ ID NO: 16956 - protein, 11 aa, Homo sapiens
LGLQVCATMPR

SEQ ID NO: 16957 - protein, 9 aa, Homo sapiens
TSLSDCDGR

SEQ ID NO: 16958 - protein, 391 aa, Homo sapiens
KLANMADLEAVLADVSYLMAMEKSKATPAARASKRIVLPEPSIRSVMQKYLAERNEITFDKIFNQKIGFLLFKDFCLNEINEAVPQVKFYEEIKEYEKLDNEEDRLCRSRQIYDAYIMKELLSCSHPFSKQAVEHVQSHLSKKQVTSTLFQPYIEEICESLRGDIFQKFMESDKFTRFCQWKNVELNIHLTMNEFSVHRIIGRGGFGEVYGCRKADTGKMYAMKCLDKKRIKMKQGETLALNERIMLSLVSTGDCPFIVCMTYAFHTPDKLCFILDLMNGGDLHYHLSQHGVFSEKEMRFYATEIILGLEHMHNRFVVYRDLKPANILLDEHGHARISDLGLACDFSKKKPHASVGTHGYMAPEVLQKGTAYDSSADWFSLGCMLFKLLRG

SEQ ID NO: 16959 - protein, 16 aa, Homo sapiens
LASRRTGAPTSTSRRS

SEQ ID NO: 16960 - protein, 15 aa, Homo sapiens
MTFLFQRMMMMMTNR

SEQ ID NO: 16961 - protein, 21 aa, Homo sapiens
LSFPSSLEVLQRCASPSTRPT

SEQ ID NO: 16962 - protein, 17 aa, Homo sapiens
IIDPSFLVGIPSGCATK

SEQ ID NO: 16963 - protein, 50 aa, Homo sapiens
LLLRLECNDAISAHSNLCLLGSSDAVASDSQVAAITGAHHHAQLIFFLYF

SEQ ID NO: 16964 - protein, 16 aa, Homo sapiens
KAEAGESLEPGRRRLR

SEQ ID NO: 16965 - protein, 12 aa, Homo sapiens
RKWLNSFQKTNT

SEQ ID NO: 16966 - protein, 14 aa, Homo sapiens
LQEHRAMAEEGPEV

SEQ ID NO: 16967 - protein, 10 aa, Homo sapiens
LSLSPMSSGT

SEQ ID NO: 16968 - protein, 29 aa, Homo sapiens
ISSVNCQPNLEVKRNVLLINKALAEGKAT

SEQ ID NO: 16969 - protein, 25 aa, Homo sapiens
TASLFRRFTFRPLRWPRTRWWSCGS

SEQ ID NO: 16970 - protein, 20 aa, Homo sapiens
MQLLRTNMCSRKMSSLGNGF

SEQ ID NO: 16971 - protein, 22 aa, Homo sapiens
IHTAQNSWILLSLCQRKIPCQA

SEQ ID NO: 16972 - protein, 13 aa, Homo sapiens
MGSEITETPRLFS

SEQ ID NO: 16973 - protein, 31 aa, Homo sapiens
VVSIYPMPFLTMKTRNPLQSPRNPVLGMTLT

SEQ ID NO: 16974 - protein, 15 aa, Homo sapiens
LPEARMHRSGCCHLK

SEQ ID NO: 16975 - protein, 9 aa, Homo sapiens
MTKHPMNIS

SEQ ID NO: 16976 - protein, 8 aa, Homo sapiens
MGQMCKLY

SEQ ID NO: 16977 - protein, 9 aa, Homo sapiens
LLFPHHCPD

SEQ ID NO: 16978 - protein, 12 aa, Homo sapiens
IRDPPSHCRRLQ

SEQ ID NO: 16979 - protein, 32 aa, Homo sapiens
LAGPEPHFVFYFFLSYVHPPRSWLNMNTWKNK

SEQ ID NO: 16980 - protein, 15 aa, Homo sapiens
LLFVLAVPPEPAWWP

SEQ ID NO: 16981 - protein, 10 aa, Homo sapiens
ISMDIFNSFT

SEQ ID NO: 16982 - protein, 55 aa, Homo sapiens
TATGLAAPELRRLSLLRTWPTFPRTLPISRGPHKTGKGRKGQRRQQLNECLQQKA

SEQ ID NO: 16983 - protein, 185 aa, Homo sapiens
IYEISGNECCLSTGDLIKVTQVRLQKVVCENPKTSQTMELAPNFQGYFTPLNTPQSYETLEELVSATTQSSKQLPTCFMSTHRIVTEGRVVTEDQLLMLEAVVMHLGIRSARCVLGMEGQQVILHLPLSQKGPFWTWEPSAPRTLLQVLQDPALKDLVLTCPTLPWHSLILRPQYEIQAIMHTAE

SEQ ID NO: 16984 - protein, 17 aa, Homo sapiens
IPCPEVGRGEFLLGLRV

SEQ ID NO: 16985 - protein, 20 aa, Homo sapiens
IPCPEVGRGEFLLGLRVLYS

SEQ ID NO: 16986 - protein, 11 aa, Homo sapiens
ILGRGGVGRDA

SEQ ID NO: 16987 - protein, 18 aa, Homo sapiens
LEASRSAASSQGAAGESQ

SEQ ID NO: 16988 - protein, 17 aa, Homo sapiens
TQTTRCPRARTGQGLSP

SEQ ID NO: 16989 - protein, 50 aa, Homo sapiens
MAAQLRRHQGRRGASSPRSQRISFIPLQKRRRGNTRRNAWCRAPIPTSWM

SEQ ID NO: 16990 - protein, 18 aa, Homo sapiens
KSVFKWHYQLYSLQRSMP

SEQ ID NO: 16991 - protein, 19 aa, Homo sapiens
RTSPWAIGRSSARMEMIPC

SEQ ID NO: 16992 - protein, 18 aa, Homo sapiens
RNPYLGTGPGVQCHWRQV

SEQ ID NO: 16993 - protein, 21 aa, Homo sapiens
IHLFKSYFIFKLKLLKNTLIP

SEQ ID NO: 16994 - protein, 15 aa, Homo sapiens
MPLSSSSCHHRLILR

SEQ ID NO: 16995 - protein, 34 aa, Homo sapiens
ICSRIPPFPSKEEGSFPGGNSEEIRSCRRKTQVP

SEQ ID NO: 16996 - protein, 8 aa, Homo sapiens
KLQKKDAR

SEQ ID NO: 16997 - protein, 14 aa, Homo sapiens
KLQKKDASPMKLRS

SEQ ID NO: 16998 - protein, 12 aa, Homo sapiens
IFLQAEVSAGLF

SEQ ID NO: 16999 - protein, 17 aa, Homo sapiens
LLLGKLATLIRWSSAWT

SEQ ID NO: 17000 - protein, 7 aa, Homo sapiens
LSGASSP

SEQ ID NO: 17001 - protein, 7 aa, Homo sapiens
LFRVFQI

SEQ ID NO: 17002 - protein, 39 aa, Homo sapiens
MDVSTPKPQISISRCPWPCSSSSFDTSLSCTWLHHWLPS

SEQ ID NO: 17003 - protein, 21 aa, Homo sapiens
VSMRDSLDLPSGGSAPYCLKH

SEQ ID NO: 17004 - protein, 20 aa, Homo sapiens
IASTLSSLLAALEKAQPHRT

SEQ ID NO: 17005 - protein, 30 aa, Homo sapiens
VNPEEKFNLETSMLPRLLQISSEHVWDPSP

SEQ ID NO: 17006 - protein, 14 aa, Homo sapiens
IFWKMIQMKKRTFF

SEQ ID NO: 17007 - protein, 26 aa, Homo sapiens
VLLSLSFYRRCSALPTTSCLRRQMRG

SEQ ID NO: 17008 - protein, 30 aa, Homo sapiens
LWLPGWCFGSVQRAWSPAAPGRRALLPRRC

SEQ ID NO: 17009 - protein, 26 aa, Homo sapiens
TCAQLRSHRLLNLGEREPRLPGAPSP

SEQ ID NO: 17010 - protein, 25 aa, Homo sapiens
KLRRREKRSVRELKPRVSKLDWVAS

SEQ ID NO: 17011 - protein, 50 aa, Homo sapiens
VASSLVLVPPGSGSQDRLSSDPSAATVAAAGGSEKSKGCWERLVARQGLY

SEQ ID NO: 17012 - protein, 18 aa, Homo sapiens
VGSLYLQLPSLLFSQSSK

SEQ ID NO: 17013 - protein, 8 aa, Homo sapiens
LGRKTASL

SEQ ID NO: 17014 - protein, 7 aa, Homo sapiens
KRLKWNV

SEQ ID NO: 17015 - protein, 9 aa, Homo sapiens
RKYKRRMRR

SEQ ID NO: 17016 - protein, 9 aa, Homo sapiens
LGPHCLYEL

SEQ ID NO: 17017 - protein, 33 aa, Homo sapiens
IITSRCPYLSSGKIILASAAYKSGNQNSTYIRY

SEQ ID NO: 17018 - protein, 12 aa, Homo sapiens
IRQPEFYIYKAK

SEQ ID NO: 17019 - protein, 11 aa, Homo sapiens
LIRVLSTYCTM

SEQ ID NO: 17020 - protein, 11 aa, Homo sapiens
LSHQMNTWRIP

SEQ ID NO: 17021 - protein, 12 aa, Homo sapiens
MSMPSAVGICLA

SEQ ID NO: 17022 - protein, 9 aa, Homo sapiens
ISSFRKQKN

SEQ ID NO: 17023 - protein, 15 aa, Homo sapiens
RQSTIGSLGKEYRYP

SEQ ID NO: 17024 - protein, 7 aa, Homo sapiens
VLEPSKR

SEQ ID NO: 17025 - protein, 37 aa, Homo sapiens
TNGAERSPQSPAGRRADAELLHVHHAGHDLQEPRPRV

SEQ ID NO: 17026 - protein, 10 aa, Homo sapiens
ISPWTGKTSS

SEQ ID NO: 17027 - protein, 8 aa, Homo sapiens
MKSKPSRT

SEQ ID NO: 17028 - protein, 104 aa, Homo sapiens
MTTLRSSSSTVMSTTAGMSTTGTMRTALRGFLSGPASRLWQMSVKPCRRRPSPSGSIPTLPVCPAGSQTCTLTFEMDGCSSSCWRSSLERGCLNPPRDECASTA

SEQ ID NO: 17029 - protein, 21 aa, Homo sapiens
IQGFHCASSWHVEAKLFCLCL

SEQ ID NO: 17030 - protein, 37 aa, Homo sapiens
IKSSKSQRYQASVLKLEKEMKKRGLTLLSFKTVLFKA

SEQ ID NO: 17031 - protein, 34 aa, Homo sapiens
MLLEQNLITVDMQKHSLTFWWLVECWVSVCGLWA

SEQ ID NO: 17032 - protein, 42 aa, Homo sapiens
LKNITSKSITYLMQNQMKMKILKSRLDFSRLASHSLWLDPIS

SEQ ID NO: 17033 - protein, 43 aa, Homo sapiens
TQNHCGHLWRLGCSWRRCLFRKGLYQGRPFSCLCCSLGGKIPC

SEQ ID NO: 17034 - protein, 35 aa, Homo sapiens
LADLKTACTQPFPRVALHSQAQCRIQACMCGGWRS

SEQ ID NO: 17035 - protein, 16 aa, Homo sapiens
ICRKAVCEIKGRRTNG

SEQ ID NO: 17036 - protein, 10 aa, Homo sapiens
IRERLWIWMP

SEQ ID NO: 17037 - protein, 18 aa, Homo sapiens
LALWAMDWSSWSWVTRRN

SEQ ID NO: 17038 - protein, 23 aa, Homo sapiens
LAALLHWDQHRLLHPPGNHQARV

SEQ ID NO: 17039 - protein, 15 aa, Homo sapiens
LLSEPHPLCFPWSQI

SEQ ID NO: 17040 - protein, 18 aa, Homo sapiens
MREHFWLKISLTKSLRMN

SEQ ID NO: 17041 - protein, 31 aa, Homo sapiens
TAREARPENGEEYAVELLCHINKKRKSFKHG

SEQ ID NO: 17042 - protein, 20 aa, Homo sapiens
LSPFSKKKMAMKATCPRGIH

SEQ ID NO: 17043 - protein, 24 aa, Homo sapiens
KVSKCCRKWEVTEWAKWGKGHQAF

SEQ ID NO: 17044 - protein, 13 aa, Homo sapiens
LKSQGIYRYPQKT

SEQ ID NO: 17045 - protein, 8 aa, Homo sapiens
LRSLIQTK

SEQ ID NO: 17046 - protein, 12 aa, Homo sapiens
KAALRRLTSWPR

SEQ ID NO: 17047 - protein, 12 aa, Homo sapiens
LCLKSLSWGEWM

SEQ ID NO: 17048 - protein, 16 aa, Homo sapiens
RLMRSRRFCATSSCAS

SEQ ID NO: 17049 - protein, 41 aa, Homo sapiens
LLFHPPLIVFLFSHPGKPRWVHTSTSRSYGERSSLMSCAFF

SEQ ID NO: 17050 - protein, 19 aa, Homo sapiens
LLEAFSPLQRSELDATVGL

SEQ ID NO: 17051 - protein, 14 aa, Homo sapiens
LFRALQMIMTKRNL

SEQ ID NO: 17052 - protein, 141 aa, Homo sapiens
VSVWSVAGRVEMTVSKFMAIQKALQPDWFQCLSDGEVSCKEATSIKRVRKSVDRSLLFLDNCLRLQEESEVLQKSVIIGVIEGGDVMEERLRSARETAKRPVGGFLLDGFQGNPTTLEARLRLLSSVTAELPEDKPRPVFG

SEQ ID NO: 17053 - protein, 8 aa, Homo sapiens
VGRACPPS

SEQ ID NO: 17054 - protein, 11 aa, Homo sapiens
LSGRGGNPKTQ

SEQ ID NO: 17055 - protein, 14 aa, Homo sapiens
RHPGERLLDGMRKP

SEQ ID NO: 17056 - protein, 11 aa, Homo sapiens
REELQEAREEP

SEQ ID NO: 17057 - protein, 10 aa, Homo sapiens
RNGLPHRLCP

SEQ ID NO: 17058 - protein, 20 aa, Homo sapiens
RNGLPHRLCTAHSIPSLQIL

SEQ ID NO: 17059 - protein, 24 aa, Homo sapiens
MLTVLRSLPLFSRELLFPVLKGMM

SEQ ID NO: 17060 - protein, 12 aa, Homo sapiens
LVTRWHSETALT

SEQ ID NO: 17061 - protein, 40 aa, Homo sapiens
TSRGRADILGSGEWPGRQSRGPRTPGLFSERWAAETDLPP

SEQ ID NO: 17062 - protein, 23 aa, Homo sapiens
VLQNHGMGPSVSALRTCPMGACS

SEQ ID NO: 17063 - protein, 64 aa, Homo sapiens
VVSAVEEVPGAVPKLTRVPVTMRQPVRPAAPPVNAPAFSAPLQRTALGGMSWMSRASRKTLRKS

SEQ ID NO: 17064 - protein, 11 aa, Homo sapiens
LNKNLQRNDEP

SEQ ID NO: 17065 - protein, 26 aa, Homo sapiens
KPGISEGENGNRAPKMKMLLAFAVST

SEQ ID NO: 17066 - protein, 15 aa, Homo sapiens
MSKKLPALQLPFLFF

SEQ ID NO: 17067 - protein, 20 aa, Homo sapiens
IIKQGESRLTLFLKVYPLFN

SEQ ID NO: 17068 - protein, 7 aa, Homo sapiens
LRRAIWF

SEQ ID NO: 17069 - protein, 29 aa, Homo sapiens
IESGWNSSPFNPGWIFSSLQAIITKRSKS

SEQ ID NO: 17070 - protein, 7 aa, Homo sapiens
IEKEGLQ

SEQ ID NO: 17071 - protein, 7 aa, Homo sapiens
VATPSAR

SEQ ID NO: 17072 - protein, 33 aa, Homo sapiens
ISAQFAGGQHHGCDGHGYVPADGACCGHLPEVY

SEQ ID NO: 17073 - protein, 7 aa, Homo sapiens
MQRAACD

SEQ ID NO: 17074 - protein, 13 aa, Homo sapiens
ISGSQSTSRGLVS

SEQ ID NO: 17075 - protein, 8 aa, Homo sapiens
ISPCRCQR

SEQ ID NO: 17076 - protein, 9 aa, Homo sapiens
RLSWGGSNH

SEQ ID NO: 17077 - protein, 33 aa, Homo sapiens
LHYAGSAGLWAAPSNSSVQGVRVCTALWCSGHC

SEQ ID NO: 17078 - protein, 12 aa, Homo sapiens
ISISGQQLGQQS

SEQ ID NO: 17079 - protein, 12 aa, Homo sapiens
ILGCGICRFTFT

SEQ ID NO: 17080 - protein, 21 aa, Homo sapiens
LYPAAFDLWNLLFYRVFQYSL

SEQ ID NO: 17081 - protein, 10 aa, Homo sapiens
ITPALPSLLP

SEQ ID NO: 17082 - protein, 7 aa, Homo sapiens
MKHIQRV

SEQ ID NO: 17083 - protein, 42 aa, Homo sapiens
VQRERAGVCAAREWEAKGAGQGEAQEPLQPRARLPCLVCFAR

SEQ ID NO: 17084 - protein, 12 aa, Homo sapiens
ISFSMAWAPVPG

SEQ ID NO: 17085 - protein, 18 aa, Homo sapiens
LLTLGALVFVNKGIHGEH

SEQ ID NO: 17086 - protein, 13 aa, Homo sapiens
MSVTRWTRICQHG

SEQ ID NO: 17087 - protein, 19 aa, Homo sapiens
MLTHTSSICHQLLLELPFI

SEQ ID NO: 17088 - protein, 28 aa, Homo sapiens
VAFKEYLSLELYAVPASALVINLLIQGL

SEQ ID NO: 17089 - protein, 19 aa, Homo sapiens
LMTFVSLENLKNEDIEKTM

SEQ ID NO: 17090 - protein, 11 aa, Homo sapiens
VAFKFTSRTIC

SEQ ID NO: 17091 - protein, 21 aa, Homo sapiens
LCAQEDAAAGWCHCHVYCKQI

SEQ ID NO: 17092 - protein, 32 aa, Homo sapiens
IPGGASGTSSDLGCPCRHVARDPFSASGLAVR

SEQ ID NO: 17093 - protein, 35 aa, Homo sapiens
ILRPRVCAPNLRWSTRDPLSTNPSPPRGPLFAPTR

SEQ ID NO: 17094 - protein, 15 aa, Homo sapiens
MSCDWSWYHVRGTSA

SEQ ID NO: 17095 - protein, 12 aa, Homo sapiens
MKNVYRYLGMQR

SEQ ID NO: 17096 - protein, 41 aa, Homo sapiens
IIPAIWFRYDLSPITVKYTERRQPLYRFITTVSGLGQWVGP

SEQ ID NO: 17097 - protein, 14 aa, Homo sapiens
LALRKKTCSTVLSL

SEQ ID NO: 17098 - protein, 17 aa, Homo sapiens
LLKQKALFLPQMMPIQK

SEQ ID NO: 17099 - protein, 21 aa, Homo sapiens
LTRSDPFLTRPPWTTTLSWRR

SEQ ID NO: 17100 - protein, 11 aa, Homo sapiens
RRTRASSPTST

SEQ ID NO: 17101 - protein, 19 aa, Homo sapiens
LLKGKGKEREKGEKETQET

SEQ ID NO: 17102 - protein, 32 aa, Homo sapiens
RERGKKGKREKKKHKRLKGQEEEMAIGEEGSS

SEQ ID NO: 17103 - protein, 8 aa, Homo sapiens
TTKKGLKD

SEQ ID NO: 17104 - protein, 21 aa, Homo sapiens
LKPPLRIKSNSPRAWALLDLV

SEQ ID NO: 17105 - protein, 7 aa, Homo sapiens
IAAEVAS

SEQ ID NO: 17106 - protein, 16 aa, Homo sapiens
TWGDACDPAAPQTSLY

SEQ ID NO: 17107 - protein, 29 aa, Homo sapiens
VSKPQCSAWKPGSLLTSKKTAARSEVLAS

SEQ ID NO: 17108 - protein, 27 aa, Homo sapiens
RVWFGGKFFFFRRQNTDVDTYPETAAA

SEQ ID NO: 17109 - protein, 14 aa, Homo sapiens
LALTGASCLGGIVN

SEQ ID NO: 17110 - protein, 15 aa, Homo sapiens
RKPGRQMRDQISFCQ

SEQ ID NO: 17111 - protein, 16 aa, Homo sapiens
KPQQGSRKSLEELGRG

SEQ ID NO: 17112 - protein, 43 aa, Homo sapiens
MKGAAPCQGRSHLCQSMDGDQTEERMMKMMCIRDLCPSQHYFL

SEQ ID NO: 17113 - protein, 10 aa, Homo sapiens
LSGRSEASHG

SEQ ID NO: 17114 - protein, 36 aa, Homo sapiens
MISHSSPMIMEEVEDPIANSMLAMTIRSKADLSLQT

SEQ ID NO: 17115 - protein, 11 aa, Homo sapiens
RRRVTCWTQGW

SEQ ID NO: 17116 - protein, 12 aa, Homo sapiens
RLWEEVQWPWGL

SEQ ID NO: 17117 - protein, 17 aa, Homo sapiens
LQHTGPRGQYRQWAYAP

SEQ ID NO: 17118 - protein, 17 aa, Homo sapiens
RCWSRRVCFDAGPRKRR

SEQ ID NO: 17119 - protein, 39 aa, Homo sapiens
VAHSLSSAAARSRLLFHHAWITSFECRSLLAKRCGNCCP

SEQ ID NO: 17120 - protein, 14 aa, Homo sapiens
RTPIIWSTIFPRVQ

SEQ ID NO: 17121 - protein, 20 aa, Homo sapiens
VSCGLLRGAAAIATCVRYED

SEQ ID NO: 17122 - protein, 38 aa, Homo sapiens
KWSPCARIFHHSCADERSGIMGYQRRTCDHPGRVLSES

SEQ ID NO: 17123 - protein, 24 aa, Homo sapiens
LALARLQEGHPSHHSSTCSLEKGR

SEQ ID NO: 17124 - protein, 11 aa, Homo sapiens
TTRSSTSCWAK

SEQ ID NO: 17125 - protein, 24 aa, Homo sapiens
MYIPWPPPAPQPLALELFKQKLGG

SEQ ID NO: 17126 - protein, 12 aa, Homo sapiens
RAELGTWYPPGS

SEQ ID NO: 17127 - protein, 20 aa, Homo sapiens
MDRACHVGSYGAGSSCLSWH

SEQ ID NO: 17128 - protein, 10 aa, Homo sapiens
IYSRCSINDS

SEQ ID NO: 17129 - protein, 12 aa, Homo sapiens
IGSWGYGQAAAL

SEQ ID NO: 17130 - protein, 8 aa, Homo sapiens
LAPSTELP

SEQ ID NO: 17131 - protein, 39 aa, Homo sapiens
MCLRSSLDMSWQQAVGRILLDKPVWVQEFPTLFQHGAAR

SEQ ID NO: 17132 - protein, 38 aa, Homo sapiens
LLQPLGRIPTFQPATCGEKKLLIFLPHTYLEASKKIKF

SEQ ID NO: 17133 - protein, 737 aa, Homo sapiens
TLLTITYNPFLFKMPEEVHHGEEEVETFAFQAEIAQLMSLIINTFYSNKEIFLRELISNASDALDKIRYESLTDPSKLDSGKELKIDIIPNPQERTLTLVDTGIGMTKADLINNLGTIAKSGTKAFMEALQAGADISMIGQFGVGFYSAYLVAEKVVVITKHNDDEQYAWESSAGGSFTVRADHGEPIGRGTKVILHLKEDQTEYLEERRVKEVVKKHSQFIGYPITLYLEKEREKEISDDEAEEEKGEKEEEDKDDEEKPKIEDVGSDEEDDSGKDKKKKTKKIKEKYIDQEELNKTKPIWTRNPDDITQEEYGEFYKSLTNDWEDHLAVKHFSVEGQLEFRALLFIPRRAPFDLFENKKKKNNIKLYVRRVFIMDSCDELIPEYLNFIRGVVDSEDLPLNISREMLQQSKILKVIRKNIVKKCLELFSELAEDKENYKKFYEAFSKNLKLGIHEDSTNRRRLSELLRYHTSQSGDEMTSLSEYVSRMKETQKSIYYITGESKEQVANSAFVERVRKRGFEVVYMTEPIDEYCVQQLKEFDGKSLVSVTKEGLELPEDEEEKKKMEESKAKFENLCKLMKEILDKKVEKVTISNRLVSSPCCIVTSTYGWTANMERIMKAQALRDNSTMGYMMAKKHLEINPDHPIVETLRQKAEADKNDKAVKDLVVLLFETALLSSGFSLEDPQTHSNRIYRMIKLGLGIDEDEVAAEEPNAAVPDEIPPLEGDEDASRMEEVD

SEQ ID NO: 17134 - protein, 61 aa, Homo sapiens
TGCGRVGNAGAGPAPRKAGLRAAPARLPGPCATPPFPRPQPGCRPRPGSSSLNHVFHLWPK

SEQ ID NO: 17135 - protein, 12 aa, Homo sapiens
LLPPRKRAPRRR

SEQ ID NO: 17136 - protein, 31 aa, Homo sapiens
RQIHAGGDSVWEDSVLVRDGIWFIRKGIESF

SEQ ID NO: 17137 - protein, 13 aa, Homo sapiens
LLSAKRRGPQSQS

SEQ ID NO: 17138 - protein, 608 aa, Homo sapiens
IAQGLTNLGWGVRWAMEQPEDMASLSEFDSLAGSIPATKVEITVSCRNLLDKDMFSKSDPLCVMYTQGMENKQWREFGRTEVIDNTLNPDFVRKFIVDYFFEEKQNLRFDLYDVDSKSPDLSKHDFLGQAFCTLGEIVGSPGSRLEKPLTIGAFSLNSRTGKPMPAVSNGGVPGKKCGTIILSAEELSNCRDVATMQFCANKLDKKDFFGKSDPFLVFYRSNEDGTFTICHKTEVMKNTLNPVWQTFSIPVRALCNGDYDRTIKVEVYDWDRDGSHDFIGEFTTSYRELARGQSQFNIYEVVNPKKKMKKKKYVNSGTVTLLSFAVESECTFLDYIKGGTQINFTVAIDFTASNGNPSQSTSLHYMSPYQLNAYALALTAVGEIIQHYDSDKMFPALGFGAKLPPDGRVSHEFPLNGNQENPSCCGIDGILEAYHRSLRTVQLYGPTNFAPVVTHVARNAAAVQDGSQYSVLLIITDGVISDMAQTKEAIVNAAKLPMSIIIVGVGQAEFDAMVELDGDDVRISSRGKLAERDIVQFVPFRDYVDRTGNHVLSMARLARDVLAEIPDQLVSYMKAQGIRPRPPPAAPTHSPSQSPARTPPASPLHTHI

SEQ ID NO: 17139 - protein, 47 aa, Homo sapiens
RSAVTGRAGSMVAPRAAPPAGAFLSGQAVFHGRELLAELPLFAMDFG

SEQ ID NO: 17140 - protein, 13 aa, Homo sapiens
IPTLASLPRPWAS

SEQ ID NO: 17141 - protein, 10 aa, Homo sapiens
IAESMSLLSP

SEQ ID NO: 17142 - protein, 9 aa, Homo sapiens
IYSRTMQTV

SEQ ID NO: 17143 - protein, 19 aa, Homo sapiens
VIPCVAGLLGLDRQEKPKD

SEQ ID NO: 17144 - protein, 35 aa, Homo sapiens
LNSCSSAAAARAGRTANRKAPLRTSGCRCLQPSPA

SEQ ID NO: 17145 - protein, 20 aa, Homo sapiens
IPAAQQPPPEQDEPPIARHL

SEQ ID NO: 17146 - protein, 8 aa, Homo sapiens
TSRRRCRK

SEQ ID NO: 17147 - protein, 18 aa, Homo sapiens
KTLASPWRTFRSNSLVST

SEQ ID NO: 17148 - protein, 23 aa, Homo sapiens
TEPTLPPCGRLRPSRPPRPSFSP

SEQ ID NO: 17149 - protein, 78 aa, Homo sapiens
VGEAEGRAPRVPWRPPWERAEEQAPEMMTLTSLISLARNGRGEEELLMRTGTVNLKMIYLEKICYLAKRISRICQMKS

SEQ ID NO: 17150 - protein, 29 aa, Homo sapiens
TRPAGIGVAGGLWSRSSRSSPEEAPLGRV

SEQ ID NO: 17151 - protein, 36 aa, Homo sapiens
MGPSPYLTPQMRKGFQCWSPQLLSSMKKRTWMMMSS

SEQ ID NO: 17152 - protein, 16 aa, Homo sapiens
RRSYLMMNYSWSWNQW

SEQ ID NO: 17153 - protein, 30 aa, Homo sapiens
IGGMRRAAREPPWPGRSCVDQASQECGHVF

SEQ ID NO: 17154 - protein, 56 aa, Homo sapiens
LAWAKLCGPSKSGVWPCFLSRLPRGPTLYCPHHQPTMPPLPGCQWQPTPTPHNPSG

SEQ ID NO: 17155 - protein, 599 aa, Homo sapiens
RQKEPMALAGCPDSFLHHPYYQDKVEQTPRSQQDPAGPGLPAQSDRLANHQEDDVDLEALVNDMNASLESLYSACSMQSDTVPLLQNGQHARSQPRASGPPRSIQPQVSPRQRVQRSQPVHILAVRRLQEEDQQFRTSSLPAIPNPFPELCGPGSPPVLTPGSLPPSQAAAKQDVKVFSEDGTSKVVEILADMTARDLCQLLVYKSHCVDDNSWTLVEHHPHLGLERCLEDHELVVQVESTMASESKFLFRKNYAKYEFFKNPMNFFPEQMVTWCQQSNGSQTQLLQNFLNSSSCPEIQGFLHVKELGKKSWKKLYVCLRRSGLYCSTKGTSKEPRHLQLLADLEDSNIFSLIAGRKQYNAPTDHGLCIKPNKVRNETKELRLLCAEDEQTRTCWMTAFRLLKYGMLLYQNYRIPQQRKALLSPFSTPVRSVSENSLVAMDFSGQTGRVIENPAEAQSAALEEGHAWRKRSTRMNILGSQSPLHPSTLSTVIHRTQHWFHGRISREESHRIIKQQGLVDGLFLLRDSQSNPKAFVLTLCHHQKIKNFQILPCEDDGQTFFSLDDGNTKFSDLIQLVDFYQLNKGVLPCKLKHHCIRVAL

SEQ ID NO: 17156 - protein, 14 aa, Homo sapiens
MVIRWRLHSIQKKC

SEQ ID NO: 17157 - protein, 8 aa, Homo sapiens
RKKQLKLC

SEQ ID NO: 17158 - protein, 26 aa, Homo sapiens
RGKVCLCAIWSWASSLYWGKFCLCSN

SEQ ID NO: 17159 - protein, 24 aa, Homo sapiens
LRQKPSSTSSWPPTPTRSMMGIFQ

SEQ ID NO: 17160 - protein, 20 aa, Homo sapiens
RKQAKNHFQYKTVRFIKKML

SEQ ID NO: 17161 - protein, 46 aa, Homo sapiens
MIIVHFSLELPGSRDPPTSASQVADHRAGQAALVCDLQAGRPSSPE

SEQ ID NO: 17162 - protein, 15 aa, Homo sapiens
LAFPVFSQPQSLKTP

SEQ ID NO: 17163 - protein, 14 aa, Homo sapiens
KPSYISIWKRWVFI

SEQ ID NO: 17164 - protein, 16 aa, Homo sapiens
ILLSTPYTTWLHILLH

SEQ ID NO: 17165 - protein, 27 aa, Homo sapiens
RRALPDRGAGVWKERPTRRSPATGLWE

SEQ ID NO: 17166 - protein, 11 aa, Homo sapiens
RKQMTPTCPRP

SEQ ID NO: 17167 - protein, 33 aa, Homo sapiens
VCRELGGHVRTGPRPLVAHCGDLAFPGRERAAA

SEQ ID NO: 17168 - protein, 15 aa, Homo sapiens
LGSPCGSGVLPGPPR

SEQ ID NO: 17169 - protein, 26 aa, Homo sapiens
VVPRRVTSTARWLCTSWPRASLCADR

SEQ ID NO: 17170 - protein, 331 aa, Homo sapiens
TEKGESGSFPARRTFEVEKRTPGTCAQHWDFLDSTMTLNNVTMRQGTVGMQPQQQRWSIPADGRHLMVQKEPHQYSHRNRHSATPEDHCRRSWSSDSTDSVISSESGNTYYRVVLIGEQGVGKSTLANIFAGVHDSMDSDCEVLGEDTYERTLMVDGESATIILLDMWENKGENEWLHDHCMQVGDAYLIVYSITDRASFEKASELRIQLRRARQTEDIPIILVGNKSDLVRCREVSVSEGRACAVVFDCKFIETSAAVQHNVKELFEGIVRQVRLRRDSKEKNERRLAYQKRKESMPRKARRFWGKIVAKNNKNMAFKLKSKSCHDLSVL

SEQ ID NO: 17171 - protein, 106 aa, Homo sapiens
TGGRRRKESAVLSRKHTLLHRRLPLRSARRPAGRPRPLRLLCDREAAGGRGQGRRGSPAGALEDQVCGHFCRRPFLALARPFLQPRRPGFSSLPRAPSRLGSRRPW

SEQ ID NO: 17172 - protein, 49 aa, Homo sapiens
LRAARLGARGRSDCYVTARLREEGDREEEALPREPLRTKFAATSAGVPS

SEQ ID NO: 17173 - protein, 11 aa, Homo sapiens
TGEAGGGLRVR

SEQ ID NO: 17174 - protein, 42 aa, Homo sapiens
LMIGGFHLPTCPWRSSLQKSKTHIHPAWCQVGCCCQNYLVII

SEQ ID NO: 17175 - protein, 23 aa, Homo sapiens
KRTMKDYDELLKYYELHETIGTE

SEQ ID NO: 17176 - protein, 31 aa, Homo sapiens
RRYYHCVRSEGPCCFYSTRRRPFHVYGHTAR

SEQ ID NO: 17177 - protein, 28 aa, Homo sapiens
IPEVVFSVRPLNGPVNNTHCWHLMCSSE

SEQ ID NO: 17178 - protein, 50 aa, Homo sapiens
LPAAQDAGWGTGARVVPPTDQSAAPRWGALQRCSEACTSLATGTCRGDTR

SEQ ID NO: 17179 - protein, 17 aa, Homo sapiens
LFSGVLEAEHIWRRGGL

SEQ ID NO: 17180 - protein, 390 aa, Homo sapiens
TSVCHEPAGLSLRLGAERVRGRAVLRSAARGRRSWGSGRAMIRGFEAPMAENPPPPPPPVIFCHDSPKRVLVSVIRTTPIKPTCGGGGEPEPPPPLIPTSPGFSDFMVYPWRWGENAHNVTLSPGAAGAAASAALPAAAAAEHSGLRGRGAPPPAASASAAASGGEDEEEASSPDSGHLKDGIRRGRPRADTVRDLINEGEHSSSRIRCNICNRVFPREKSLQAHKRTHTGERPYLCDYPDCGKAFVQSGQLKTHQRLHTGEKPFVCSENGCLSRFTHANRHCPKHPYARLKREEPTDTLSKHQAADNKAAAEWLARYWEMREQRTPTLKGKLVQKADQEQQDPLEYLQSDEEDDEKRGAQRRLQEQRERLHGALALIELANLTGAPLRQ

SEQ ID NO: 17181 - protein, 9 aa, Homo sapiens
RPRPVCSWQ

SEQ ID NO: 17182 - protein, 59 aa, Homo sapiens
LSGERRGCCSCRCGRRGIISRVQWLGSGSCLGDGRGPRRASIEERGPLRRPDWRIYHTH

SEQ ID NO: 17183 - protein, 37 aa, Homo sapiens
TGSSKKAGLEDLPYPLTNYGRLYQNRENWRRYLWSCV

SEQ ID NO: 17184 - protein, 14 aa, Homo sapiens
METRKPSIPCQKLG

SEQ ID NO: 17185 - protein, 12 aa, Homo sapiens
MIQPNEFLAKWH

SEQ ID NO: 17186 - protein, 42 aa, Homo sapiens
TAFLTLQVARELGLQVVRGANDDRQGRRQNPSNSQWFCAPAV

SEQ ID NO: 17187 - protein, 10 aa, Homo sapiens
MPNWEAPLTR

SEQ ID NO: 17188 - protein, 21 aa, Homo sapiens
LEEFVKAFCPELLDQCIFPPP

SEQ ID NO: 17189 - protein, 14 aa, Homo sapiens
KEIWVRDETCQSQI

SEQ ID NO: 17190 - protein, 16 aa, Homo sapiens
IKIRGATDIYIKIQES

SEQ ID NO: 17191 - protein, 27 aa, Homo sapiens
ITTQLDMWIKVGTSVLGHLLFTWSLGI

SEQ ID NO: 17192 - protein, 28 aa, Homo sapiens
IKTSRRCEVTRREQRRKTREWEILWPHE

SEQ ID NO: 17193 - protein, 7 aa, Homo sapiens
TGAKEEN

SEQ ID NO: 17194 - protein, 12 aa, Homo sapiens
LGTFEQILWPHE

SEQ ID NO: 17195 - protein, 31 aa, Homo sapiens
MSSSAWGQSLCSWASWAASAPSTRSAACWGW

SEQ ID NO: 17196 - protein, 37 aa, Homo sapiens
MSSSAWGQSLCSWASWAASAPSTRSAACWGCTLLSCS

SEQ ID NO: 17197 - protein, 14 aa, Homo sapiens
VLRLGQLLQLDRQR

SEQ ID NO: 17198 - protein, 14 aa, Homo sapiens
LRGPRQQDPEWQPP

SEQ ID NO: 17199 - protein, 33 aa, Homo sapiens
KRKERCGKLQQATLCPSPRMTRGPMTGRPTLIL

SEQ ID NO: 17200 - protein, 9 aa, Homo sapiens
IRYRQGQSG

SEQ ID NO: 17201 - protein, 108 aa, Homo sapiens
RLGSPRPVGSHLTSVKFLMTSPEIASLSWGQMKVKGSNTTYKDCKVWPGGSRTWDWRETGTEVPSSTVEYLKKHGIDVRVLQTEQAVKEYNALVAQGVRVGGVFHSTC

SEQ ID NO: 17202 - protein, 257 aa, Homo sapiens
TTARRAFPIPFGSKSNMATLKDQLIYNLLKEEQTPQNKITVVGVGAVGMACAISILMKDLADELALVDVIEDKLKGEMMDLQHGSLFLRTPKIVSGKDYNVTANSKLVIITAGARQQEGESRLNLVQRNVNIFKFIIPNVVKYSPNCKLLIVSNPVDILTYVAWKISGFPKNRVIGSGCNLDSARFRYLMGERLGVHPLSCHGWVLGEHGDSSVPVWSGMNVAGVSLKTLHPDLGTDKDKEQWKEVHKQVVERVFTE

SEQ ID NO: 17203 - protein, 9 aa, Homo sapiens
VAKYHQGLQ

SEQ ID NO: 17204 - protein, 8 aa, Homo sapiens
LIDLEAFV

SEQ ID NO: 17205 - protein, 16 aa, Homo sapiens
LGRRCSSPCISSTRSS

SEQ ID NO: 17206 - protein, 11 aa, Homo sapiens
KYWRSIEDRKI

SEQ ID NO: 17207 - protein, 36 aa, Homo sapiens
LRTLFNGPDQDLSGRTNVTLRGISSFMKPFRILNCI

SEQ ID NO: 17208 - protein, 10 aa, Homo sapiens
ILQTIEGASS

SEQ ID NO: 17209 - protein, 40 aa, Homo sapiens
LLEAATRPAPPPWYVESRSLEGLGQSSGDWGMTSHLSCHP

SEQ ID NO: 17210 - protein, 20 aa, Homo sapiens
RLKLQVSKPKCKVDYAKNSQ

SEQ ID NO: 17211 - protein, 13 aa, Homo sapiens
VCQGSKQRAQKWM

SEQ ID NO: 17212 - protein, 10 aa, Homo sapiens
VAKCRWEETV

SEQ ID NO: 17213 - protein, 36 aa, Homo sapiens
VRSHTSRRADQGCCQHLPLRAPLSLGPFRSGWFPIR

SEQ ID NO: 17214 - protein, 13 aa, Homo sapiens
MPVKMPSRQCRPS

SEQ ID NO: 17215 - protein, 26 aa, Homo sapiens
LSGAPSAATTPAPLLGHALRSTDLLH

SEQ ID NO: 17216 - protein, 13 aa, Homo sapiens
VLNTLSLEAILPF

SEQ ID NO: 17217 - protein, 11 aa, Homo sapiens
IQQERDGHGSL

SEQ ID NO: 17218 - protein, 13 aa, Homo sapiens
IRTARGCATGPAA

SEQ ID NO: 17219 - protein, 12 aa, Homo sapiens
IMQRESFYRVLL

SEQ ID NO: 17220 - protein, 43 aa, Homo sapiens
RGKKKRSERKKKRGKNQDLITRATDRLQTPVSMESRGLSPGSS

SEQ ID NO: 17221 - protein, 23 aa, Homo sapiens
LGRVKIPCLYPSSTPWCGLLGAG

SEQ ID NO: 17222 - protein, 16 aa, Homo sapiens
VCGTPRNHGVPFPCTC

SEQ ID NO: 17223 - protein, 37 aa, Homo sapiens
IKGSRIFNCKKDSSTDHHSGLERSHEGCKRGAVEFCS

SEQ ID NO: 17224 - protein, 24 aa, Homo sapiens
TGAETLLEGTPRWLRRESPRSSSK

SEQ ID NO: 17225 - protein, 24 aa, Homo sapiens
RLLLRPESFCRNGAEGHPLGVASW

SEQ ID NO: 17226 - protein, 22 aa, Homo sapiens
MSHLAACTCAWSVSPPVPLLLS

SEQ ID NO: 17227 - protein, 26 aa, Homo sapiens
MAEDLPSLPRVRAFPCVNFVSSLKFP

SEQ ID NO: 17228 - protein, 17 aa, Homo sapiens
RPSTEEAETRGWRTESP

SEQ ID NO: 17229 - protein, 29 aa, Homo sapiens
LGRREATNSSAFNTATSVGHPSPVEPLNN

SEQ ID NO: 17230 - protein, 12 aa, Homo sapiens
LPPPVSKITFLV

SEQ ID NO: 17231 - protein, 278 aa, Homo sapiens
ISVLASPLTSLLSCGDRMDRFLVKGAQGGLLRKQEEQEPTGEEPAVLGGDKESTRKRPRREAPGNGGHSAGPSWRHIRAEGLDCSYTVLFGKAEADEIFQELEKEVEYFTGALARVQVFGKWHSVPRKQATYGDAGLTYTFSGLTLSPKPWIPVLERIRDHVSGVTGQTFNFVLINRYKDGCDHIGEHRDDERELAPGSPIASVSFGACRDFVFRHKDSRGKSPSRRVAVVRLPLAHGSLLMMNHPTNTHWYHSLPVRKKVLAPRVNLTFRKILLTKK

SEQ ID NO: 17232 - protein, 8 aa, Homo sapiens
MDVLLTPP

SEQ ID NO: 17233 - protein, 24 aa, Homo sapiens
VAHQDAAVPLPGPRAAAAALPPAC

SEQ ID NO: 17234 - protein, 10 aa, Homo sapiens
KGQLPGKTRF

SEQ ID NO: 17235 - protein, 8 aa, Homo sapiens
ILVAACLG

SEQ ID NO: 17236 - protein, 374 aa, Homo sapiens
IWSSYNMADIDNKEQSELDQDLDDVEEVEEEETGEETKLKARQLTVQMMQNPQILAALQERLDGLVETPTGYIESLPRVVKRRVNALKNLQVKCAQIEAKFYEEVHDLERKYAVLYQPLFDKRFEIINAIYEPTEEECEWKPDEEDEISEELKEKAKIEDEKKDEEKEDPKGIPEFWLTVFKNVDLLSDMVQEHDEPILKHLKDIKVKFSDAGQPMSFVLEFHFEPNEYFTNEVLTKTYRMRSEPDDSDPFSFDGPEIMGCTGCQIDWKKGKNVTLKTIKKKQKHKGRGTVRTVTKTVSNDSFFNFFAPPEVPESGDLDDDAEAILAADFEIGHFLRERIIPRSVLYFTGEAIEDDDDDYDEEGEEADEVMFTK

SEQ ID NO: 17237 - protein, 40 aa, Homo sapiens
MLFSISLYLISDLKLLMQFMNLRKKNVNGNQMKKMRFRRN

SEQ ID NO: 17238 - protein, 15 aa, Homo sapiens
ISFTGEEQKLSGQLH

SEQ ID NO: 17239 - protein, 13 aa, Homo sapiens
LSVLDKVTKCGIG

SEQ ID NO: 17240 - protein, 7 aa, Homo sapiens
MLYRYRQ

SEQ ID NO: 17241 - protein, 21 aa, Homo sapiens
IPKSLSRNFPSSCLSNSLPSK

SEQ ID NO: 17242 - protein, 22 aa, Homo sapiens
MNFCLVIPLNYQKKISSSTKIK

SEQ ID NO: 17243 - protein, 16 aa, Homo sapiens
TPAEPASLRERSEHAQ

SEQ ID NO: 17244 - protein, 13 aa, Homo sapiens
ISKNSGGRVSTKR

SEQ ID NO: 17245 - protein, 27 aa, Homo sapiens
ISMDSIGFGGYFLYLACSFSSEDLLII

SEQ ID NO: 17246 - protein, 14 aa, Homo sapiens
IWKMMRHPSFLPMP

SEQ ID NO: 17247 - protein, 12 aa, Homo sapiens
VSESETTRKPRH

SEQ ID NO: 17248 - protein, 28 aa, Homo sapiens
LLLVCGILWYRGSAPGLESLRVPLGLAR

SEQ ID NO: 17249 - protein, 10 aa, Homo sapiens
INTNFLRWKM

SEQ ID NO: 17250 - protein, 7 aa, Homo sapiens
MTLLCGT

SEQ ID NO: 17251 - protein, 19 aa, Homo sapiens
MTLSPSPQWNLSRASAAWS

SEQ ID NO: 17252 - protein, 341 aa, Homo sapiens
THRMTTTLVSATIFDLSEVLCKGNKMLNYSAPSAGGCLLDRKAVGTPAGGGFPRRHSVTLPSSKFHQNQLLSSLKGEPAPALSSRDSRFRDRSFSEGGERLLPTQKQPGGGQVNSSRYKTELCRPFEENGACKYGDKCQFAHGIHELRSLTRHPKYKTELCRTFHTIGFCPYGPRCHFIHNAEERRALAGARDLSADRPRLQHSFSFAGFPSAAATAAATGLLDSPTSITPPPILSADDLLGSPTLPDGTNNPFAFSSQELASLFAPSMGLPGGGSPTTFLFRPMSESPHMFDSPPSPQDSLSDQEGYLSSSSSSHSGSDSPTLDNSRRLPIFSRLSISDD

SEQ ID NO: 17253 - protein, 25 aa, Homo sapiens
LLTNLAWVCVGLQEGRLKKRTKILT

SEQ ID NO: 17254 - protein, 12 aa, Homo sapiens
MLSLFGLACLQR

SEQ ID NO: 17255 - protein, 25 aa, Homo sapiens
MLSLFGLACLQRPWPTSTLGASSAM

SEQ ID NO: 17256 - protein, 12 aa, Homo sapiens
IIVKSKGADGTR

SEQ ID NO: 17257 - protein, 27 aa, Homo sapiens
IALSLAGEACENEDGQSVRLLVQLKIL

SEQ ID NO: 17258 - protein, 48 aa, Homo sapiens
LGPQPGPGHPGMRRWACCSWSRCSCCPAPTDCPSTTASTTPTAPTTRT

SEQ ID NO: 17259 - protein, 24 aa, Homo sapiens
ISSSLQRSPSRSAPELSRAHRIQL

SEQ ID NO: 17260 - protein, 18 aa, Homo sapiens
MTSSLLLAISLPVSPSPA

SEQ ID NO: 17261 - protein, 23 aa, Homo sapiens
KGWTAGSRSVTQAGVQWCDLGSS

SEQ ID NO: 17262 - protein, 9 aa, Homo sapiens
LPRTFLMYL

SEQ ID NO: 17263 - protein, 23 aa, Homo sapiens
THVLNVSIVCLMPQRSPGGDFQE

SEQ ID NO: 17264 - protein, 19 aa, Homo sapiens
MPRWTCASSKGTSSCSASS

SEQ ID NO: 17265 - protein, 12 aa, Homo sapiens
LALPRLRLFKSR

SEQ ID NO: 17266 - protein, 57 aa, Homo sapiens
VATSRHNILKFFGYCNDVDRELRKCLKNEYVENRTKSREHGIAMRKKLFNPPEESEK

SEQ ID NO: 17267 - protein, 21 aa, Homo sapiens
VGVPLIVSPSAPPPSFPLDAL

SEQ ID NO: 17268 - protein, 11 aa, Homo sapiens
RWPLLILLHPV

SEQ ID NO: 17269 - protein, 19 aa, Homo sapiens
LGRWCLSWLDATPDAKLSS

SEQ ID NO: 17270 - protein, 12 aa, Homo sapiens
IFFLKDLLAKIS

SEQ ID NO: 17271 - protein, 11 aa, Homo sapiens
KAEKRSKCRSS

SEQ ID NO: 17272 - protein, 14 aa, Homo sapiens
VGKAVDAWSKCRSS

SEQ ID NO: 17273 - protein, 7 aa, Homo sapiens
LCSELDL

SEQ ID NO: 17274 - protein, 19 aa, Homo sapiens
TWVRKVLVRARAQRASSPW

SEQ ID NO: 17275 - protein, 26 aa, Homo sapiens
VMKLRRKEKFRSIKPSLRCLEVGSWN

SEQ ID NO: 17276 - protein, 30 aa, Homo sapiens
TASPAPGSRSRPPLGAPAVRPEGAAGWSGG

SEQ ID NO: 17277 - protein, 7 aa, Homo sapiens
LKISSRI

SEQ ID NO: 17278 - protein, 12 aa, Homo sapiens
MSSLFLISIQKT

SEQ ID NO: 17279 - protein, 32 aa, Homo sapiens
LPRPEGWPRMGIRGTAAPGSRPVRLSVIVCLS

SEQ ID NO: 17280 - protein, 7 aa, Homo sapiens
RDLPEWL

SEQ ID NO: 17281 - protein, 15 aa, Homo sapiens
RPWCGWERQIWGFPS

SEQ ID NO: 17282 - protein, 26 aa, Homo sapiens
MTSSTRNLSCSQILITRDLSLLWWMV

SEQ ID NO: 17283 - protein, 17 aa, Homo sapiens
KKMKRVTTKRKLKRVTP

SEQ ID NO: 17284 - protein, 14 aa, Homo sapiens
KFCLLRVVKESFHE

SEQ ID NO: 17285 - protein, 37 aa, Homo sapiens
RKPSRRWCGTRRPKTKIRKETEKRTRYKDKETNYIGI

SEQ ID NO: 17286 - protein, 13 aa, Homo sapiens
KGSSFEFWCLSKA

SEQ ID NO: 17287 - protein, 14 aa, Homo sapiens
LRHPRDHLQLHHEV

SEQ ID NO: 17288 - protein, 31 aa, Homo sapiens
MIRALLKKRVHTVSSCWFWITLECVSNPKPG

SEQ ID NO: 17289 - protein, 11 aa, Homo sapiens
LISLKMKYSHL

SEQ ID NO: 17290 - protein, 35 aa, Homo sapiens
TSFPPRTSTGTWLTWTSTGASCASSPTWPPRARPK

SEQ ID NO: 17291 - protein, 36 aa, Homo sapiens
TSFPPRTSTGTWLTWTSTGASCASSPTWPPSEARPK

SEQ ID NO: 17292 - protein, 13 aa, Homo sapiens
VALPRTSGAPWSY

SEQ ID NO: 17293 - protein, 39 aa, Homo sapiens
VSTRFRSQWTRRRRRQPRRPPPAVPRAPPKSAANDAAAA

SEQ ID NO: 17294 - protein, 25 aa, Homo sapiens
MSSRRPSPSLTRMEMALSPPRSWGQ

SEQ ID NO: 17295 - protein, 29 aa, Homo sapiens
RSRLQSSRRPSPSLTRMEMALSPPRSWGQ

SEQ ID NO: 17296 - protein, 25 aa, Homo sapiens
VGGARDQWPACFLPAHPPRHQDDTL

SEQ ID NO: 17297 - protein, 24 aa, Homo sapiens
TCPCHPTMEGLSPAQAGAPRDPGA

SEQ ID NO: 17298 - protein, 13 aa, Homo sapiens
LPLRLSLPLHPQP

SEQ ID NO: 17299 - protein, 49 aa, Homo sapiens
RCRSWCLMVEAISWAAWRPSWLNRYCWAGRWWSYAVKASTFLAISTETS

SEQ ID NO: 17300 - protein, 32 aa, Homo sapiens
VARASAPQRMWQPRAMALAVRVVYCIFSSRRS

SEQ ID NO: 17301 - protein, 22 aa, Homo sapiens
KLRRVVMPSPWLDRNSSMPARS

SEQ ID NO: 17302 - protein, 14 aa, Homo sapiens
ISLWREESLDFGRR

SEQ ID NO: 17303 - protein, 15 aa, Homo sapiens
LCLPHGQDWPPVSPG

SEQ ID NO: 17304 - protein, 10 aa, Homo sapiens
LPGGSAWGTD

SEQ ID NO: 17305 - protein, 27 aa, Homo sapiens
LRTRGADPQESTHQDARAASAVTTFSL

SEQ ID NO: 17306 - protein, 270 aa, Homo sapiens
TSEAAGSGAGPPGPLQGRSGSSWAPRPGRRTEERRKGAGGTRPRPAAAMNSNVENLPPHIIRLVYKEVTTLTADPPDGIKVFPNEEDLTDLQVTIEGPEGTPYAGGLFRMKLLLGKDFPASPPKGYFLTKIFHPNVGANGEICVNVLKRDWTAELGIRHVLLTIKCLLIHPNPESALNEEAGRLLLENYEEYAARARLLTEIHGGAGGPSGRAEAGRALASGTEASSTDPGAPGGPGGAEGPMAKKHAGERDKKLAAKKKTDKKRALRRL

SEQ ID NO: 17307 - protein, 49 aa, Homo sapiens
LKKEGGSGERRRETHLVPSTSGHPSWSSTFIPSVAVRRLNQGPEKVEES

SEQ ID NO: 17308 - protein, 14 aa, Homo sapiens
TRPCCQRLPQPLLP

SEQ ID NO: 17309 - protein, 15 aa, Homo sapiens
LSTTTPASTTLRCIS

SEQ ID NO: 17310 - protein, 10 aa, Homo sapiens
LLHKDQKKKR

SEQ ID NO: 17311 - protein, 13 aa, Homo sapiens
KNPGARIKEENRG

SEQ ID NO: 17312 - protein, 11 aa, Homo sapiens
TQVPGSGDKVK

SEQ ID NO: 17313 - protein, 17 aa, Homo sapiens
MIPPAGAGFFASHREAG

SEQ ID NO: 17314 - protein, 39 aa, Homo sapiens
MDRGCVFLALYPSTHQDLLCGNKGRRKVCGGRVICAASG

SEQ ID NO: 17315 - protein, 30 aa, Homo sapiens
LLSVCSRNETWCTLYLLGSPGLRAGRHCHP

SEQ ID NO: 17316 - protein, 9 aa, Homo sapiens
IKLPKQRIS

SEQ ID NO: 17317 - protein, 10 aa, Homo sapiens
MLFCKKPSRY

SEQ ID NO: 17318 - protein, 16 aa, Homo sapiens
IPFSRGQAHYPFSRHS

SEQ ID NO: 17319 - protein, 404 aa, Homo sapiens
TMSGRVGDLSPRQKEALAKFRENVQDVLPALPNPDDYFLLRWLRARSFDLQKSEAMLRKHVEFRKQKDIDNIISWQPPEVIQQYLSGGMCGYDLDGCPVWYDIIGPLDAKGLLFSASKQDLLRTKMRECELLLQECAHQTTKLGRKVETITIIYDCEGLGLKHLWKPAVEAYGEFLCMFEENYPETLKRLFVVKAPKLFPVAYNLIKPFLSEDTRKKIMVLGANWKEVLLKHISPDQVPVEYGGTMTDPDGNPKCKSKINYGGDIPRKYYVRDQVKQQYEHSVQISRGSSHQVEYEILFPGCVLRWQFMSDGADVGFGIFLKTKMGERQRAGEMTEVLPNQRYNSHLVPEDGTLTCSDPGIYVLRFDNTYSFIHAKKVNFTVEVLLPDKASEEKMKQLGAGTPK

SEQ ID NO: 17320 - protein, 11 aa, Homo sapiens
KAAMQSCASWT

SEQ ID NO: 17321 - protein, 24 aa, Homo sapiens
IPDMAAAVAVAGGGRADIGFAYHR

SEQ ID NO: 17322 - protein, 14 aa, Homo sapiens
IHWVCLSQMNKSRR

SEQ ID NO: 17323 - protein, 25 aa, Homo sapiens
LAGAQEIKKHRARVKKKNEPFQSGQ

SEQ ID NO: 17324 - protein, 14 aa, Homo sapiens
LNCPGMRQMLSTKL

SEQ ID NO: 17325 - protein, 15 aa, Homo sapiens
VVVKQRERLQAPPGQ

SEQ ID NO: 17326 - protein, 9 aa, Homo sapiens
IWRSSVMSF

SEQ ID NO: 17327 - protein, 8 aa, Homo sapiens
RCVGPRRS

SEQ ID NO: 17328 - protein, 22 aa, Homo sapiens
LPCTILPMTRGLASYCILRTSS

SEQ ID NO: 17329 - protein, 18 aa, Homo sapiens
LKPAQCPPCSHSHLSSGQ

SEQ ID NO: 17330 - protein, 25 aa, Homo sapiens
MPLNLGLRCSMPASRSLQISNTKAL

SEQ ID NO: 17331 - protein, 459 aa, Homo sapiens
ICPSYTMGRTREAGCVAAGVVIGAGACYCVYRLAWGRDENEKIWDEDEESTDTSEIGVETVKGAKTNAGAGSGAKLQGDSEVKPEVSLGLEDCPGVKEKAHSGSHSGGGLEAKAKALFNTLKEQASAKAGKGARVGTISGNRTLAPSLPCPGGRGGGCHPTRSGSRAGGRASGKSKGKARSKSTRAPATTWPVRRGKFNFPYKIDDILSAPDLQKVLNILERTNDPFIQEVALVTLGNNAAYSFNQNAIRELGGVPIIAKLIKTKDPIIREKTYNALNNLSVNAENQGKIKTYISQVCDDTMVCRLDSAVQMAGLRLLTNMTVTNHYQHLLSYSFPDFFALLFLGNHFTKIQIMKLIINFTENPAMTRELVSCKVPSELISLFNKEWDREILLNILTLFENINDNIKNEGLASSRKEFSRSSLFFLFKESGVCVKKIKALANHNDLVVKVKVLKVLTKL

SEQ ID NO: 17332 - protein, 24 aa, Homo sapiens
TERIAKQTNKNKGSCCLFSLWVGL

SEQ ID NO: 17333 - protein, 87 aa, Homo sapiens
TWIQRDAQIQARQESLLNQNCQERLGIETKPDRRASEMCGHLQVPFHLLCGQHEEQQAEGHPERLEAQPDVLWQKQGDDGGLGSEPI

SEQ ID NO: 17334 - protein, 19 aa, Homo sapiens
IPGLKVGEISQYIIQKRSP

SEQ ID NO: 17335 - protein, 78 aa, Homo sapiens
KRRSSSISNDMAAWKVSKFFPRGDLKEEWLPLWILWTSKVHRKLTTRSTKWVTETYARIIMNQAPSRVLLGDWMIQFP

SEQ ID NO: 17336 - protein, 25 aa, Homo sapiens
LSDSLKRGTNLLSSTRQLSTPSTFL

SEQ ID NO: 17337 - protein, 32 aa, Homo sapiens
ITKSGFSSKNDSAARGKFPKEVKYFRENQAFE

SEQ ID NO: 17338 - protein, 22 aa, Homo sapiens
ITAKETSSLLWPRTLSSMYGTL

SEQ ID NO: 17339 - protein, 22 aa, Homo sapiens
RKVMGQMTADQNLQVTLIHKAS

SEQ ID NO: 17340 - protein, 69 aa, Homo sapiens
IGELLWGQFISAIPTRSLKFLKEAGHGTTKEEITKDAEGLDEIDHAEMELRRGQILWFRGLNRIQTQVL

SEQ ID NO: 17341 - protein, 8 aa, Homo sapiens
VLPNYSSS

SEQ ID NO: 17342 - protein, 23 aa, Homo sapiens
IDGRFELSATKCRKCQMFSGTEN

SEQ ID NO: 17343 - protein, 35 aa, Homo sapiens
VKMSLLKAVPCFQAARLAFLCSRGLQVFLSVAAEL

SEQ ID NO: 17344 - protein, 35 aa, Homo sapiens
MASYPYRQVAPLPMWILRPTPGSSRWTQITVAISP

SEQ ID NO: 17345 - protein, 10 aa, Homo sapiens
IFPWRKFRRN

SEQ ID NO: 17346 - protein, 10 aa, Homo sapiens
ISWGDRRCCL

SEQ ID NO: 17347 - protein, 36 aa, Homo sapiens
MWAGPSLDARTSRTGSRMARCYVSSLMHCTPRGRPQ

SEQ ID NO: 17348 - protein, 22 aa, Homo sapiens
ISGKMAAHKSGPAHVSAERTQQ

SEQ ID NO: 17349 - protein, 7 aa, Homo sapiens
RSSPLAR

SEQ ID NO: 17350 - protein, 27 aa, Homo sapiens
LTCLTVRSQTWKIIEKVFLNYCSKSHT

SEQ ID NO: 17351 - protein, 21 aa, Homo sapiens
LAIKAAPRRALARLVLAWCRC

SEQ ID NO: 17352 - protein, 22 aa, Homo sapiens
MKASRSGAFLSLMIRVFFGRSL

SEQ ID NO: 17353 - protein, 26 aa, Homo sapiens
KTQMEGPRRRKVQSESMGLKGKLSSS

SEQ ID NO: 17354 - protein, 11 aa, Homo sapiens
LVTLAEEREIV

SEQ ID NO: 17355 - protein, 29 aa, Homo sapiens
IRLAIWGRVSQRLLSTSIKLLRLPWLARN

SEQ ID NO: 17356 - protein, 24 aa, Homo sapiens
IETCILKVASHLSTSGIWIMALLE

SEQ ID NO: 17357 - protein, 1758 aa, Homo sapiens
IEANMSGEVRLRQLEQFILDGPAQTNGQCFSVETLLDILICLYDECNNSPLRREKNILEYLEWAKPFTSKVKQMRLHREDFEILKVIGRGAFGEVAVVKLKNADKVFAMKILNKWEMLKRAETACFREERDVLVNGDNKWITTLHYAFQDDNNLYLVMDYYVGGDLLTLLSKFEDRLPEDMARFYLAEMVIAIDSVHQLHYVHRDIKPDNILMDMNGHIRLADFGSCLKLMEDGTVQSSVAVGTPDYISPEILQAMEDGKGRYGPECDWWSLGVCMYEMLYGETPFYAESLVETYGKIMNHKERFQFPAQVTDVSENAKDLIRRLICSREHRLGQNGIEDFKKHPFFSGIDWDNIRNCEAPYIPEVSSPTDTSNFDVDDDCLKNSETMPPPTHTAFSGHHLPFVGFTYTSSCVLSDRSCLRVTAGPTSLDLDVNVQRTLDNNLATEAYERRIKRLEQEKLELSRKLQESTQTVQALQYSTVDGPLTASKDLEIKNLKEEIEKLRKQVTESSHLEQQLEEANAVRQELDDAFRQIKAYEKQIKTLQQEREDLNKELVQASERLKNQSKELKDAHCQRKLAMQEFMEINERLTELHTQKQKLARHVRDKEEEVDLVMQKVESLRQELRRTERAKKELEVHTEALAAEASKDRKLREQSEHYSKQLENELEGLKQKQISYSPGVCSIEHQQEITKLKTDLEKKSIFYEEELSKREGIHANEIKNLKKELHDSEGQQLALNKEIMILKDKLEKTRRESQSEREEFESEFKQQYEREKVLLTEENKKLTSELDKLTTLYENLSIHNQQLEEEVKDLADKKESVAHWEAQITEIIQWVSDEKDARGYLQALASKMTEELEALRNSSLGTRATDMPWKMRRFAKLDMSARLELQSALDAEIRAKQAIQEELNKVKASNIITECKLKDSEKKNLELLSEIEQLIKDTEELRSEKGIEHQDSQHSFLAFLNTPTDALDQFETDPVENTYVWNPSVKFHIQSRSTSPSTSSEAEPVKTVDSTPLSVHTPTLRKKGCPGSTGFPPKRKTHQFFVKSFTTPTKCHQCTSLMVGLIRQGCSCEVCGFSCHITCVNKAPTTCPVPPEQTKGPLGIDPQKGIGTAYEGHVRIPKPAGVKKGWQRALAIVCDFKLFLYDIAEGKASQPSVVISQVIDMRDEEFSVSSVLASDVIHASRKDIPCIFRVTASQLSASNNKCSILMLADTENEKNKWVGVLSELHKILKKNKFRDRSVYVPKEAYDSTLPLIKTTQAAAIIDHERIALGNEEGLFVVHVTKDEIIRVGDNKKIHQIELIPNDQLVAVISGRNRHVRLFPMSALDGRETDFYKLSETKGCQTVTSGKVRHGALTCLCVAMKRQVLCYELFQSKTRHRKFKEIQVPYNVQWMAIFSEQLCVGFQSGFLRYPLNGEGNPYSMLHSNDHTLSFIAHQPMDAICAVEISSKEYLLCFNSIGIYTDCQGRRSRQQELMWPANPSSCCYNAPYLSVYSENAVDIFDVNSMEWIQTLPLKKVRPLNNEGSLNLLGLETIRLIYFKNKMAEGDELVVPETSDNSRKQMVRNINNKRRYSFRVPEEERMQQRREMLRDPEMRNKLISNPTNFNHIAHMGPGDGIQILKDLPMNPRPQESRTVFSGSVSIPSITKSRPEPGRSMSASSGLSARSSAQNGSALKREFSGGSYSAKRQPMPSPSEGSLSSGGMDQGSDAPARDFDGEDSDSPRHSTASNSSNLSSPPSPASPRKTKSLSLESTDRGSWDP

SEQ ID NO: 17358 - protein, 48 aa, Homo sapiens
VQLRTCFSRQRFKISGDGIRNGNAERQGRGGLYPGHPQGWPTGEETTG

SEQ ID NO: 17359 - protein, 8 aa, Homo sapiens
MNLLAEMR

SEQ ID NO: 17360 - protein, 16 aa, Homo sapiens
MNLLAEMRVYTVILLA

SEQ ID NO: 17361 - protein, 26 aa, Homo sapiens
IFSMLAVHFVYSVDPLVTFRYFRATS

SEQ ID NO: 17362 - protein, 21 aa, Homo sapiens
IQNGPGCWTSRARPSGMPGMS

SEQ ID NO: 17363 - protein, 10 aa, Homo sapiens
ISETGDSGPV

SEQ ID NO: 17364 - protein, 26 aa, Homo sapiens
ILTEMSYLKKTVQIPQSKKKRGLPCF

SEQ ID NO: 17365 - protein, 11 aa, Homo sapiens
IPNPCAAVQKT

SEQ ID NO: 17366 - protein, 46 aa, Homo sapiens
IMRCRLSVPPLCKLNLMTCSFLKTAVEEVLGVFIEPNGYHRTRRWL

SEQ ID NO: 17367 - protein, 26 aa, Homo sapiens
LWMRRSSVVMEDCHQTCNLWSRFGEL

SEQ ID NO: 17368 - protein, 96 aa, Homo sapiens
RRRLGARCGAKVTRSQQLPRSPEAGASSTHSSAVSAGMMGRPCLLTAGRPCLWRRMAPSLRPQSNTCSLRPRPRTQTRSAWSSTWTRPWCTAPSSQ

SEQ ID NO: 17369 - protein, 14 aa, Homo sapiens
TQEKKTKWQSNLLM

SEQ ID NO: 17370 - protein, 33 aa, Homo sapiens
LHCSSSASLLAAAASAARLLRRRGLRQLYRQSP

SEQ ID NO: 17371 - protein, 29 aa, Homo sapiens
LSSCRVTGGTEEKPRCMLVTWELALAKES

SEQ ID NO: 17372 - protein, 19 aa, Homo sapiens
RGPVHCEVETVGEIARAEL

SEQ ID NO: 17373 - protein, 16 aa, Homo sapiens
TLRAAWHPGRRSSERE

SEQ ID NO: 17374 - protein, 20 aa, Homo sapiens
LSFWRSVLPAAGTFEQWQPC

SEQ ID NO: 17375 - protein, 20 aa, Homo sapiens
IWNIFNDTITRKTRSSFGSG

SEQ ID NO: 17376 - protein, 14 aa, Homo sapiens
MLLEQALDQKEWIK

SEQ ID NO: 17377 - protein, 32 aa, Homo sapiens
LSLTRRRRPVSPSARLAAAPQKCFGYPQSFAR

SEQ ID NO: 17378 - protein, 32 aa, Homo sapiens
LGQGFLMSITCWMRLCSSPPLSEWSVSINWTP

SEQ ID NO: 17379 - protein, 45 aa, Homo sapiens
LKLILILSHQMWNLWKRSLGFAKLRTKPSRANRIQRSCTAKNLKR

SEQ ID NO: 17380 - protein, 27 aa, Homo sapiens
LPASSASHAGASELAAHADGLQGPEAS

SEQ ID NO: 17381 - protein, 29 aa, Homo sapiens
LASRRPAGNGTSKRNYVWKAVVQGHFCWL

SEQ ID NO: 17382 - protein, 42 aa, Homo sapiens
VFTPEMKQNSIWARDALMYIKQRTTQSLLAANQTKPESSGEK

SEQ ID NO: 17383 - protein, 44 aa, Homo sapiens
TPLCVRVLWGPAHEAAGGCQQPAWIRGGLQSLSPDEEASLLNLA

SEQ ID NO: 17384 - protein, 39 aa, Homo sapiens
IHCIPYQDGLPVISMIVLKRYMKEQWPSFRLKLKRLNYG

SEQ ID NO: 17385 - protein, 73 aa, Homo sapiens
RSGERFSCIIGPNGSGKSNVIDSMLFVFGYRAQKIRSKKLSVLIHNSDEHKDIQSCTVEVHFQKIIDKNGLQR

SEQ ID NO: 17386 - protein, 37 aa, Homo sapiens
IIFMSCRNELLKWKLKRKKFMKIPKKLMRRAIYYQMK

SEQ ID NO: 17387 - protein, 13 aa, Homo sapiens
KRLSSGSLRRMTS

SEQ ID NO: 17388 - protein, 55 aa, Homo sapiens
VAKVSFWTRLRQEGRRVHFRQPHLPPAFLESLKEEEVGFKAKDGQGKMPEKVLSR

SEQ ID NO: 17389 - protein, 40 aa, Homo sapiens
VASHGHMQRTLCPLLLHAASLAVRSATVMMLYLLPTWPLQ

SEQ ID NO: 17390 - protein, 28 aa, Homo sapiens
TPGPTGRFSSFLMRNASRLSFPRGILGR

SEQ ID NO: 17391 - protein, 39 aa, Homo sapiens
IWFWNHREELGHSNTRCYHAGHPPLQTPVTAPRKNPKCL

SEQ ID NO: 17392 - protein, 15 aa, Homo sapiens
LKSYFRISVNFKRLG

SEQ ID NO: 17393 - protein, 37 aa, Homo sapiens
LSCRLVAMSRLLVLTMEKSASTTIVPMIGSLPLGSSH

SEQ ID NO: 17394 - protein, 27 aa, Homo sapiens
RHGVQADRTGRGCSALGHPEEPASHEL

SEQ ID NO: 17395 - protein, 30 aa, Homo sapiens
MKKKMLTITQRPMSQNQKGVVEVSAMGLLL

SEQ ID NO: 17396 - protein, 29 aa, Homo sapiens
ISKRVSFPTCLLGLRLSHAASFTGELETA

SEQ ID NO: 17397 - protein, 44 aa, Homo sapiens
KILGTIFCIDSYTTKEYTSIFIKFIMSFRLHLEWKLNMHILWRL

SEQ ID NO: 17398 - protein, 13 aa, Homo sapiens
LDFSLESCFCVIM

SEQ ID NO: 17399 - protein, 45 aa, Homo sapiens
LPKNKKILIRKFKKSKKGRELCSNIILPTMENIKVQDQKMTSNLV

SEQ ID NO: 17400 - protein, 32 aa, Homo sapiens
IFKMGAQRHRPGLGRCQGELSVVSASSPGAAV

SEQ ID NO: 17401 - protein, 71 aa, Homo sapiens
RIWLSGAASSSARTRGRLPALFAGRALGRHKTKEWPPRPREAARLSQPALRGPASRKSPSKGTSLQGSQHL

SEQ ID NO: 17402 - protein, 55 aa, Homo sapiens
KFLVFKKLCGGTVTEEVPARRKYPAGGCVRKARARGARGAGRRENVFSRRRSWRL

SEQ ID NO: 17403 - protein, 48 aa, Homo sapiens
VRKEKRQRGKRRCPGRATRRHPRPGGGGGSRYSRLKQLRNGSGGGRTN

SEQ ID NO: 17404 - protein, 18 aa, Homo sapiens
RRMEGSEEEKVQKINYIL

SEQ ID NO: 17405 - protein, 21 aa, Homo sapiens
INGYPLMMRVECVCVLRQLFC

SEQ ID NO: 17406 - protein, 12 aa, Homo sapiens
TSQRLAPGKRWL

SEQ ID NO: 17407 - protein, 11 aa, Homo sapiens
ISSLQTAKLKV

SEQ ID NO: 17408 - protein, 29 aa, Homo sapiens
LLFVEMKNWILSSRLQLLVVVSFHTSTNL

SEQ ID NO: 17409 - protein, 135 aa, Homo sapiens
LLWERLRRGSHSRNLVLFVPQLGKRHMSLAAPDANPVVGFLAYSRPSVLPGWHRPHRTSRVGLSGSSTAGPRNSRFGAAPSRLGHTGARCRSPVLRHLVWNFRLAVSSRSGALCGVVWWKNGPCVGLTPSVCVSE

SEQ ID NO: 17410 - protein, 15 aa, Homo sapiens
TQSQVSTSWKRERQI

SEQ ID NO: 17411 - protein, 41 aa, Homo sapiens
LQAAHIGQGPSSVPLLVARSPVRLQVSFRASWPGATAASRV

SEQ ID NO: 17412 - protein, 13 aa, Homo sapiens
TGTRMPPGTGMRP

SEQ ID NO: 17413 - protein, 37 aa, Homo sapiens
ILSTHGGLKSSRDPRGRIQLPMKMTNEQRIRMTVPCL

SEQ ID NO: 17414 - protein, 35 aa, Homo sapiens
MITGKELFLLVLQKMNCGEQSTSMIQLFILTLVRR

SEQ ID NO: 17415 - protein, 9 aa, Homo sapiens
MELWLVISL

SEQ ID NO: 17416 - protein, 35 aa, Homo sapiens
ISVTHRCQKKWKMRRLQFSHVHLNHPNQKQSISWM

SEQ ID NO: 17417 - protein, 49 aa, Homo sapiens
VLRAGDGGGANPAGPPVTLVLHFPACVSMLRRNLILMAPRSSFENMKQH

SEQ ID NO: 17418 - protein, 24 aa, Homo sapiens
TAAARTLLGLQSPSSCIFPRACLC

SEQ ID NO: 17419 - protein, 9 aa, Homo sapiens
TPASGRERR

SEQ ID NO: 17420 - protein, 28 aa, Homo sapiens
TTSCSSTMLRRNLILMAPRSSFENMKQH

SEQ ID NO: 17421 - protein, 40 aa, Homo sapiens
RPQTCCIDFMERTLLMSMGDWIQMESQQMQSTDRKKSTGK

SEQ ID NO: 17422 - protein, 44 aa, Homo sapiens
LFQLLGYHLMLLKYQLHSPVQSLSLNLRFHHKDLSGIKECENNE

SEQ ID NO: 17423 - protein, 24 aa, Homo sapiens
MPHQPYLKLLERLWELSTELQKSL

SEQ ID NO: 17424 - protein, 17 aa, Homo sapiens
KIITLRWIMMKMSTSYL

SEQ ID NO: 17425 - protein, 10 aa, Homo sapiens
TPLRLPSGVL

SEQ ID NO: 17426 - protein, 28 aa, Homo sapiens
VAPSCGASLFRSGPWRRQDGQVSWTSYC

SEQ ID NO: 17427 - protein, 42 aa, Homo sapiens
VALRPTTFRSRPVANVATLPSARESITGVPRLKDEIPPELVE

SEQ ID NO: 17428 - protein, 227 aa, Homo sapiens
VSRARRWPCAPTACTRPSRPSATSTTWLCCAFRRMRTAAARSCRLTFSRCACQAAPRDPPRPRSARWPAGATSSRGRRNMPASCRRRRYRSSPWSAAQPRTCTDPPSSPACSAQGSSRAAPMRARVIPEARWCVRTKLQSAGSPCKASSAGDRAVVTATSQASTPMWPTTWPGSGSTPFPDCSGTHLSLLGDSAVREWLGHGRQDCVPFPQCGQLRARMAQELNKVL

SEQ ID NO: 17429 - protein, 135 aa, Homo sapiens
LCIVGSRPRGLVPVHSAAAPGGGGERGPRGREAKRRAGQRGARREKARAARRAQAETPCSCRRRHRAAAVLTDPPPGPPPCRAAVGRRSPPRRPGLPKQESSFPWGGCCGTSRKATPSTGLEWGHPCTWPPSWNT

SEQ ID NO: 17430 - protein, 31 aa, Homo sapiens
VWSLETTCRNGTSKGEGKEGRTGHQPRTSGG

SEQ ID NO: 17431 - protein, 18 aa, Homo sapiens
MARLCLLATRTTWCECGR

SEQ ID NO: 17432 - protein, 14 aa, Homo sapiens
LGLGIASDLMNLSL

SEQ ID NO: 17433 - protein, 60 aa, Homo sapiens
LSRAGGRGTCAAEWSWSLVATSRSSLGSLYTRSPRLAATTSNGLLWLTSLTMLTLPPCQQ

SEQ ID NO: 17434 - protein, 12 aa, Homo sapiens
KKLNKRTMKLPA

SEQ ID NO: 17435 - protein, 33 aa, Homo sapiens
IADKWNPVLNPNLPKNSLQSVTTTRCALMAAEV

SEQ ID NO: 17436 - protein, 13 aa, Homo sapiens
RTLKQTCVSRAPL

SEQ ID NO: 17437 - protein, 12 aa, Homo sapiens
ISRRVQDKRLCE

SEQ ID NO: 17438 - protein, 18 aa, Homo sapiens
VSCARYVWTWQAGRQSPR

SEQ ID NO: 17439 - protein, 22 aa, Homo sapiens
LRVREDACSRVCAAFTGVSAAG

SEQ ID NO: 17440 - protein, 27 aa, Homo sapiens
ISRHFRSLFHRRPTRRRLCCSHVSSDP

SEQ ID NO: 17441 - protein, 20 aa, Homo sapiens
ILMRPIALTTRPSMISASAL

SEQ ID NO: 17442 - protein, 14 aa, Homo sapiens
THNFILYPTCVKKQ

SEQ ID NO: 17443 - protein, 18 aa, Homo sapiens
RNHVWSRQRRKRLGEGWC

SEQ ID NO: 17444 - protein, 15 aa, Homo sapiens
IRPRASEMITSQIRQ

SEQ ID NO: 17445 - protein, 21 aa, Homo sapiens
KPTLLTITYNPFLFKIFILDA

SEQ ID NO: 17446 - protein, 29 aa, Homo sapiens
MTSPKRSMENSTRASLMTGKTTWQSSTFL

SEQ ID NO: 17447 - protein, 22 aa, Homo sapiens
IVSLCPSWPSLLPPRRRAPRRR

SEQ ID NO: 17448 - protein, 44 aa, Homo sapiens
MKMKRKTRKSLQMMKIKKVKRSHQKRQPKEKNLNRKLLLKVKNL

SEQ ID NO: 17449 - protein, 83 aa, Homo sapiens
VLSAGVKETRGPSSSFRRRRRGAESSRADLIEERGYRTGWVYGRSAGRSAGWCFFIRASCVPWQGTFGRAPTICNGFWINKIC

SEQ ID NO: 17450 - protein, 19 aa, Homo sapiens
IYEDCDLLLNQLLLIMNVS

SEQ ID NO: 17451 - protein, 51 aa, Homo sapiens
KLQPEPCFSLVAQMRPWWSPGSAEAPQSWWLEGVSLSCPASNRSRGSLSTH

SEQ ID NO: 17452 - protein, 21 aa, Homo sapiens
RNRTQPKGFSFCCSPSSSARS

SEQ ID NO: 17453 - protein, 19 aa, Homo sapiens
MRSVRSFHLLEVAFRVAAR

SEQ ID NO: 17454 - protein, 11 aa, Homo sapiens
ILASHPRPWAS

SEQ ID NO: 17455 - protein, 17 aa, Homo sapiens
LSQPSLLPPRRRAPRRQ

SEQ ID NO: 17456 - protein, 10 aa, Homo sapiens
MNKQLPGMSG

SEQ ID NO: 17457 - protein, 13 aa, Homo sapiens
KTSRPIFASRALR

SEQ ID NO: 17458 - protein, 12 aa, Homo sapiens
ISKPTFVSRARR

SEQ ID NO: 17459 - protein, 12 aa, Homo sapiens
LCYSRQACHYYA

SEQ ID NO: 17460 - protein, 14 aa, Homo sapiens
IDQQKIPKNFHEIS

SEQ ID NO: 17461 - protein, 297 aa, Homo sapiens
IRAVGGGVCVDGMGTPGEGLGRCSHALIRGVPESLASGEGAGAGLPALDLAKAQREHGVLGGKLRQRLGLQLLELPPEESLPLGPLLGDTAVIQGDTALITRPWSPARRPEVDGVRKALQDLGLRIVEIGDENATLDGTDVLFTGREFFVGLSKWTNHRGAEIVADTFRDFAVSTVPVSGPSHLRGLCGMGGPRTVVAGSSDAAQKAVRAMAVLTDHPYASLTLPDDAAADCLFLRPGLPGVPPFLLHRGGGDLPNSQEALQKLSDVTLVPVSCSELEKAGAGLSSLCLVLSTRPHS

SEQ ID NO: 17462 - protein, 7 aa, Homo sapiens
TSKACET

SEQ ID NO: 17463 - protein, 23 aa, Homo sapiens
IRKGVGLAPTVAEVGRAEPEAAG

SEQ ID NO: 17464 - protein, 7 aa, Homo sapiens
LSEVPHC

SEQ ID NO: 17465 - protein, 35 aa, Homo sapiens
VTDAQIARPLLELLLCAQREAPRPPASQRQIGFCQ

SEQ ID NO: 17466 - protein, 48 aa, Homo sapiens
LELLLCAQREAPRPPASQRRGAGGQGWGDDQRFRVRALPAGGPRCPGR

SEQ ID NO: 17467 - protein, 45 aa, Homo sapiens
IIALQVCNKKWPPTKLHCKKWEKNRMERVKKLKRQSLKNLSWKKY

SEQ ID NO: 17468 - protein, 36 aa, Homo sapiens
LERLPLQTSVRLQPLSSDGSCLSWRNGGHGSQCRES

SEQ ID NO: 17469 - protein, 23 aa, Homo sapiens
KKKTNWENFFDPKVSKIKPEQER

SEQ ID NO: 17470 - protein, 31 aa, Homo sapiens
MCTHFCKLIMIILEKEEKSFFFADENKGVFG

SEQ ID NO: 17471 - protein, 32 aa, Homo sapiens
LGWSEAPRTSTLLNSCADLSCIFKALAATSLV

SEQ ID NO: 17472 - protein, 29 aa, Homo sapiens
MSTKNISKMMSLMKRDGTTFLRSMMGIFQ

SEQ ID NO: 17473 - protein, 17 aa, Homo sapiens
RIPMWATRPRAREASSP

SEQ ID NO: 17474 - protein, 13 aa, Homo sapiens
MSCVWLPRSTPCC

SEQ ID NO: 17475 - protein, 13 aa, Homo sapiens
TILLKQMVTMFRY

SEQ ID NO: 17476 - protein, 7 aa, Homo sapiens
LKPQKKV

SEQ ID NO: 17477 - protein, 13 aa, Homo sapiens
LPENGHWDGRVFG

SEQ ID NO: 17478 - protein, 21 aa, Homo sapiens
KTSKEEESSGLKRFGAGMLRS

SEQ ID NO: 17479 - protein, 10 aa, Homo sapiens
LKLLKNKNLQ

SEQ ID NO: 17480 - protein, 273 aa, Homo sapiens
TLDFFRVVENQQPPATMPLNVSFTNRNYDLDYDSVQPYFYCDEEENFYQQQQQSELQPPAPSEDIWKKFELLPTPPLSPSRRSGLCSPSYVAVTPFSLRGDNDGGGGSFSTADQLEMVTELLGGDMVNQSFICDPDDETFIKNIIIQDCMWSGFSAAAKLVSEKLASYQAARKDSGSPNPARGHSVCSTSSLYLQDLSAAASECIDPSVVFPYPLNDSSSPKSCASQDSSAFSPSSDSLLSSTESSPQGSPEPLVLHEETPPTTSSDSGGTRR

SEQ ID NO: 17481 - protein, 455 aa, Homo sapiens
TLDFFRVVENQQPPATMPLNVSFTNRNYDLDYDSVQPYFYCDEEENFYQQQQQSELQPPAPSEDIWKKFELLPTPPLSPSRRSGLCSPSYVAVTPFSLRGDNDGGGGSFSTADQLEMVTELLGGDMVNQSFICDPDDETFIKNIIIQDCMWSGFSAAAKLVSEKLASYQAARKDSGSPNPARGHSVCSTSSLYLQDLSAAASECIDPSVVFPYPLNDSSSPKSCASQDSSAFSPSSDSLLSSTESSPQGSPEPLVLHEETPPTTSSDSEEEQEDEEEIDVVSVEKRQAPGKRSESGSPSAGGHSKPPHSPLVLKRCHVSTHQHNYAAPPSTRKDYPAAKRVKLDSVRVLRQISNNRKCTSPRSSDTEENVKRRTHNVLERQRRNELKRSFFALRDQIPELENNEKAPKVVILKKATAYILSVQAEEQKLISEEDLLRKRREQLKHKLEQLRNSCA

SEQ ID NO: 17482 - protein, 14 aa, Homo sapiens
ILLPRGSSWTVSES

SEQ ID NO: 17483 - protein, 21 aa, Homo sapiens
MNAGNSEECLHLYLDLLSSHF

SEQ ID NO: 17484 - protein, 32 aa, Homo sapiens
ICAVDDVLDCFCTLHGSRDRYRHFYLLVPFLL

SEQ ID NO: 17485 - protein, 27 aa, Homo sapiens
LLKSHPFLFEEDAVVRAEDFWSARSCS

SEQ ID NO: 17486 - protein, 21 aa, Homo sapiens
MFKNTSASLPQVSDLSSNYVC

SEQ ID NO: 17487 - protein, 33 aa, Homo sapiens
KVGGRPAPKAGRWWPQRRRKSRWSRSTLGSNSL

SEQ ID NO: 17488 - protein, 48 aa, Homo sapiens
KSFALWEVFPFSFPGHLSGCCWLGAVPLLRQEDGGRKEDEKVAGVDQL

SEQ ID NO: 17489 - protein, 25 aa, Homo sapiens
IPPKKRRRFTRLFGPLSHEFFPHHP

SEQ ID NO: 17490 - protein, 33 aa, Homo sapiens
ITPKVAIILLTSSFISHNILMQFRQCVHTFFAI

SEQ ID NO: 17491 - protein, 16 aa, Homo sapiens
MLPGETCWTPWASRLC

SEQ ID NO: 17492 - protein, 14 aa, Homo sapiens
RHDKSHVEWPRSVC

SEQ ID NO: 17493 - protein, 44 aa, Homo sapiens
LGKSRPRDGKRTVQGRTATRNYNSFLPGHTLSSTCYLRELSSLC

SEQ ID NO: 17494 - protein, 7 aa, Homo sapiens
TCVTMPC

SEQ ID NO: 17495 - protein, 30 aa, Homo sapiens
IFFSRSREPPPGVSSARRCEGRVAVADRGA

SEQ ID NO: 17496 - protein, 33 aa, Homo sapiens
MMNFSNIMNYMKLLGQVALQRSNLPAISLLERW

SEQ ID NO: 17497 - protein, 25 aa, Homo sapiens
TSLSLVTWAIAVDVSKDCLQSWPWD

SEQ ID NO: 17498 - protein, 25 aa, Homo sapiens
KCWNQDSEFSLMDVSKDCLQSWPWD

SEQ ID NO: 17499 - protein, 30 aa, Homo sapiens
KSPQNCHVGMRFAGLVAAAAAGGPAHVKPA

SEQ ID NO: 17500 - protein, 21 aa, Homo sapiens
ISGCWQRGRPNEETTCPSSRS

SEQ ID NO: 17501 - protein, 32 aa, Homo sapiens
RSEWCWEQLGQGALHRRRGAGGLGAGCCEKGG

SEQ ID NO: 17502 - protein, 11 aa, Homo sapiens
IQQEEKIPARW

SEQ ID NO: 17503 - protein, 32 aa, Homo sapiens
LWPSLPSSTLWTFCGLRWGCPWPPCSSWRQPQ

SEQ ID NO: 17504 - protein, 14 aa, Homo sapiens
KQGGPGSMAPAASA

SEQ ID NO: 17505 - protein, 9 aa, Homo sapiens
IPSLKSIPT

SEQ ID NO: 17506 - protein, 30 aa, Homo sapiens
ISSWLHCGCKSERSQLGYCKKRREGYSWTD

SEQ ID NO: 17507 - protein, 37 aa, Homo sapiens
TPDELLLGLLARGAVQAREAPQQQNASTSSRKHKFSC

SEQ ID NO: 17508 - protein, 31 aa, Homo sapiens
LSCWRGPAPRCSWSPSFATAPATPRSNRSAS

SEQ ID NO: 17509 - protein, 19 aa, Homo sapiens
MCLCRIPGYISSLSFFPWI

SEQ ID NO: 17510 - protein, 16 aa, Homo sapiens
ILGFYPSWSVHGFFTC

SEQ ID NO: 17511 - protein, 32 aa, Homo sapiens
IDTLTPRSAAGTSTSFSATTSSSGVCCPTSPK

SEQ ID NO: 17512 - protein, 9 aa, Homo sapiens
IERHRNYPH

SEQ ID NO: 17513 - protein, 25 aa, Homo sapiens
ISCYRGFLTNLTSAENGQVFSMTEI

SEQ ID NO: 17514 - protein, 93 aa, Homo sapiens
LLAGPREATAEGGEGRPGPAAPGPGRSGPPGRAGQWADRVRGIQSLPALITVLFPGAHFVPGTRLGASRPLSLRSLLWTWRPFQRCLPEVPKI

SEQ ID NO: 17515 - protein, 13 aa, Homo sapiens
IKGRNCTLKDISG

SEQ ID NO: 17516 - protein, 17 aa, Homo sapiens
KGDMRLSTRNILSVAWM

SEQ ID NO: 17517 - protein, 22 aa, Homo sapiens
KMVEDEVGIEIDQEVGHKRSFD

SEQ ID NO: 17518 - protein, 10 aa, Homo sapiens
IRFIKEAEAE

SEQ ID NO: 17519 - protein, 12 aa, Homo sapiens
TAAGKFTPKAPT

SEQ ID NO: 17520 - protein, 9 aa, Homo sapiens
LKNVASGNS

SEQ ID NO: 17521 - protein, 30 aa, Homo sapiens
TERAAVGGRRWGPGAQMALRWFRALFKLQH

SEQ ID NO: 17522 - protein, 16 aa, Homo sapiens
VVPSPEKLMRFLWNTS

SEQ ID NO: 17523 - protein, 73 aa, Homo sapiens
ITTPAVHDAADATRCSQKERKCIFKAPPFGIPTVSNLRRPRKSCGLPGHPRKVFILGQAPVFLAHQVILSMQK

SEQ ID NO: 17524 - protein, 64 aa, Homo sapiens
VVRQVALRAGSSQWKSCKFASGLPLRIIPGLPLRIILNLLFRKCGPRDAWLLSKGAGSTVPTFP

SEQ ID NO: 17525 - protein, 9 aa, Homo sapiens
MSKHMMKNF

SEQ ID NO: 17526 - protein, 34 aa, Homo sapiens
LLKTRLGLLPSLMWCDRATTKFWERESSQSSLSS

SEQ ID NO: 17527 - protein, 20 aa, Homo sapiens
VCVSSQKEKTLTTVMPENPV

SEQ ID NO: 17528 - protein, 68 aa, Homo sapiens
IMMIFQLQNKVRPLVLFSRTESPSPLQRPLVPVAAMIPFRIHGALFHIWIKRVQQKSWVKNLAYKLRS

SEQ ID NO: 17529 - protein, 248 aa, Homo sapiens
TEDAMAPKKRPETQKTSEIVLRPRNKRSRSPLELEPEAKKLCAKGSGPSRRCDSDCLWVGLAGPQILPPCRSIVRTLHQHKLGRASWPSVQQGLQQSFLHTLDSYRILQKAAPFDRRATSLAWHPTHPSTVAVGSKGGDIMLWNFGIKDKPTFIKGIGAGGSITGLKFNPLNTNQFYASSMEGTTRLQDFKGNILRVFASSDTINIWFCSLDVSASSRMVVTGDNVGNVILLNMDGKELVSVPMEPGS

SEQ ID NO: 17530 - protein, 21 aa, Homo sapiens
IRIIKTSLIHLACYMNRIWQK

SEQ ID NO: 17531 - protein, 16 aa, Homo sapiens
LETKSEQSEKQPFESF

SEQ ID NO: 17532 - protein, 13 aa, Homo sapiens
TARTQRSLRTSGP

SEQ ID NO: 17533 - protein, 15 aa, Homo sapiens
TMVVERRFCGLGPNG

SEQ ID NO: 17534 - protein, 8 aa, Homo sapiens
RFLKHDGG

SEQ ID NO: 17535 - protein, 56 aa, Homo sapiens
TQTKMERLIGSGRMKQFGEDRSLKWKTGRQKYGKAKKRIEKIGKLEDKNILLEEKR

SEQ ID NO: 17536 - protein, 33 aa, Homo sapiens
LKSRKQKKKDKLGNKKLRAKCTNLEENWKIETR

SEQ ID NO: 17537 - protein, 551 aa, Homo sapiens
KMWKASAGHAVSIAQDDAGADDWETDPDFVNDVSEKEQRWGAKTVQGSGHQEHINIHKLRENVFQEHQTLKEKELETGPKASHGYGGKFGVEQDRMDKSAVGHEYQSKLSKHCSQVDSVRGFGGKFGVQMDRVDQSAVGFEYQGKTEKHASQKDYSSGFGGKYGVQADRVDKSAVGFDYQGKTEKHESQRDYSKGFGGKYGIDKDKVDKSAVGFEYQGKTEKHESQKDYVKGFGGKFGVQTDRQDKCALGWDHQEKLQLHESQKDYKTGFGGKFGVQSERQDSAAVGFDYKEKLAKHESQQDYSKGFGGKYGVQKDRMDKNASTFEDVTQVSSAYQKTVPVEAVTSKTSNIRANFENLAKEKEQEDRRKAEAERAQRMAKERQEQEEARRKLEEQARAKTQTPPVSPAPQPTEERLPSSPVYEDAASFKAELSYRGPVSGTEPEPVYSMEAADYREASSQQGLAYATEAVYESAEAPGHYPAEDSTYDEYENDLGITAVALYDYQAAGDDEISFDPDDIITNIEMIDDGWWRGVCKGRYGLFPANYVELRQ

SEQ ID NO: 17538 - protein, 17 aa, Homo sapiens
IRPPWWQRGAWWPQCKA

SEQ ID NO: 17539 - protein, 92 aa, Homo sapiens
KMAVQISKKRKFVADGIFKAELNEFLTRELAEDGYSGVEVRVTPTRTEIIILATRTQNVLGEKGRRIRELTAVVQKRFGFPEGSVEHCGTQR

SEQ ID NO: 17540 - protein, 33 aa, Homo sapiens
RVGSQSRLPCPSQSPQHNRVSLAAVFWSLDVAL

SEQ ID NO: 17541 - protein, 9 aa, Homo sapiens
TSPPTCWLP

SEQ ID NO: 17542 - protein, 33 aa, Homo sapiens
ISLPRAPDDRPTCIPDSFWFQVQYGNSKGSADL

SEQ ID NO: 17543 - protein, 9 aa, Homo sapiens
LALGEWKWL

SEQ ID NO: 17544 - protein, 15 aa, Homo sapiens
IRLFKCPTAYLELWD

SEQ ID NO: 17545 - protein, 8 aa, Homo sapiens
MRLLPWEI

SEQ ID NO: 17546 - protein, 10 aa, Homo sapiens
LEMYTKGMHL

SEQ ID NO: 17547 - protein, 29 aa, Homo sapiens
TSCMLQTDLSVLHEHTCGRQMTVLYPVLL

SEQ ID NO: 17548 - protein, 22 aa, Homo sapiens
LGFLWLPSLLEPGLHPSTEKSR

SEQ ID NO: 17549 - protein, 13 aa, Homo sapiens
RNRLLYLHYPCPI

SEQ ID NO: 17550 - protein, 23 aa, Homo sapiens
LTWSSSFQGQHLLSKAQEEFEEN

SEQ ID NO: 17551 - protein, 49 aa, Homo sapiens
LLEAATRPAPPPCFEISMTMMSLFGAPRAGFIKLNMQWKLLNKVQPQLV

SEQ ID NO: 17552 - protein, 21 aa, Homo sapiens
KRDASCRTGPDYKECFHWNCW

SEQ ID NO: 17553 - protein, 19 aa, Homo sapiens
RCNPERFTWCCTSTFCDRQ

SEQ ID NO: 17554 - protein, 7 aa, Homo sapiens
MAQRLGL

SEQ ID NO: 17555 - protein, 11 aa, Homo sapiens
RSRREAEGSQV

SEQ ID NO: 17556 - protein, 8 aa, Homo sapiens
ILKVQTQN

SEQ ID NO: 17557 - protein, 19 aa, Homo sapiens
RDPKSKEMLMFLPQSWRES

SEQ ID NO: 17558 - protein, 16 aa, Homo sapiens
LTCTSRHRRSLCLKLT

SEQ ID NO: 17559 - protein, 35 aa, Homo sapiens
LEGLQGSHRCSVQRGSGPRALRTTPLPFWPNQPHP

SEQ ID NO: 17560 - protein, 11 aa, Homo sapiens
REMGMYTIIKE

SEQ ID NO: 17561 - protein, 9 aa, Homo sapiens
KTRPQHDQS

SEQ ID NO: 17562 - protein, 18 aa, Homo sapiens
KTRPQSSRRPSSCLTEQR

SEQ ID NO: 17563 - protein, 15 aa, Homo sapiens
TPRCSRSWGTPRVMR

SEQ ID NO: 17564 - protein, 10 aa, Homo sapiens
LCSCANCKGL

SEQ ID NO: 17565 - protein, 13 aa, Homo sapiens
IRLNSPMCTLFHG

SEQ ID NO: 17566 - protein, 11 aa, Homo sapiens
VSPLPTCQWWT

SEQ ID NO: 17567 - protein, 41 aa, Homo sapiens
IRDLVALVFQVERCATWERKPSGQLTVLLQRMRRSMLWRRC

SEQ ID NO: 17568 - protein, 100 aa, Homo sapiens
ISVPHVRLGQRRPHHSGRISKCKVVEELLSGNPHIEKESARSIADGAMMEAASVCMGQMEPDQVYEGITFEDFLKIWQGIDIETKMHVRFLNMETMALCH

SEQ ID NO: 17569 - protein, 32 aa, Homo sapiens
LGEARSEVKGGPGGARLTEKDGYYDAECAESV

SEQ ID NO: 17570 - protein, 28 aa, Homo sapiens
KKSYLVTVSEYAWEDTMSSRPLCAQLFT

SEQ ID NO: 17571 - protein, 37 aa, Homo sapiens
RSSWANSLAGSGRGWRRAWAPRPPARRAVRRRIWMHF

SEQ ID NO: 17572 - protein, 24 aa, Homo sapiens
VRSAYACPEGRLVGTPPSPAARPP

SEQ ID NO: 17573 - protein, 11 aa, Homo sapiens
LPGVLPGRWLQ

SEQ ID NO: 17574 - protein, 9 aa, Homo sapiens
LRDQSRRLV

SEQ ID NO: 17575 - protein, 50 aa, Homo sapiens
THAADFVFSARLLQRSPEPSLSCAKWQLLRKNSLHQLRKKRQQFQTIRSL

SEQ ID NO: 17576 - protein, 20 aa, Homo sapiens
TTVTEVSRAFSLLVGFGSGP

SEQ ID NO: 17577 - protein, 30 aa, Homo sapiens
RAPGKQPSSGETAASYPGECGLCVHQGGPH

SEQ ID NO: 17578 - protein, 16 aa, Homo sapiens
VHQSKFLLVLRLWAES

SEQ ID NO: 17579 - protein, 56 aa, Homo sapiens
MGAVAVLRAEEECVLFWELLHRIQKRASFLFPSFRNARRSHRNRPCYRAGVAAAPG

SEQ ID NO: 17580 - protein, 42 aa, Homo sapiens
IAYHLVQAKSNQQLDRKRMALKQISSNKCFGGLQKVFEHDRR

SEQ ID NO: 17581 - protein, 27 aa, Homo sapiens
ILVLNLHIRMVNVTLMRKILLIWTWTR

SEQ ID NO: 17582 - protein, 29 aa, Homo sapiens
IESQTFWISTSNVELSPIIIQSQMEGLLT

SEQ ID NO: 17583 - protein, 23 aa, Homo sapiens
ISEMLTVLSRFKIDKKLLTGFLV

SEQ ID NO: 17584 - protein, 35 aa, Homo sapiens
MRDGFSSWRTLEIRRFRTTARSCLNTRRSTAVLRS

SEQ ID NO: 17585 - protein, 164 aa, Homo sapiens
RGSREVPDAGGEALALKGIDYETVPINLIKDGGQQFSKDFQALNPMKQVPTLKIDGITIHQSNLSVLKQVGEEMQLTWAQNAITCGFNALEQILQSTAGIYCVGDEVTMADLCLVPQVANAERFKVDLTPYPTISSINKRLLVLEAFQVSHPCRQPDTPTELRA

SEQ ID NO: 17586 - protein, 26 aa, Homo sapiens
LQSFMSSLLLQTEDTKKLQSKISSSY

SEQ ID NO: 17587 - protein, 39 aa, Homo sapiens
TFEGSHEPFPECVKKLAGYGVHHSHGEHAAELPRPHFSL

SEQ ID NO: 17588 - protein, 56 aa, Homo sapiens
TLEGGSGPMATKNARLRTSSQARLTHSGLSSWRKRHSAKQNLGCLHHILPVDTGRI

SEQ ID NO: 17589 - protein, 20 aa, Homo sapiens
TLEGGSGCLHHILPVDTGRI

SEQ ID NO: 17590 - protein, 13 aa, Homo sapiens
KVAQVPWQLKTPG

SEQ ID NO: 17591 - protein, 20 aa, Homo sapiens
KVAQDVFITFCQSTQEGYKY

SEQ ID NO: 17592 - protein, 17 aa, Homo sapiens
IFCTDYKVKGQRPNGAD

SEQ ID NO: 17593 - protein, 333 aa, Homo sapiens
RRPPTPCAALLAGPVRKRVVELRTTPAGSRRQIPSPESCEKLSLVPDAAAARVPWQPQVSEPRATLPAPRLRARVDRSLSGCTLGIPDLDSAGEMPLGHIMRLDLEKIALEYIVPCLHEVGFCYLDNFLGEVVGDCVLERVKQLHCTGALRDGQLAGPRAGVSKRHLRGDQITWIGGNEEGCEAISFLLSLIDRLVLYCGSRLGKYYVKERSKAMVACYPGNGTGYVRHVDNPNGDGRCITCIYYLNKNWDAKLHGGILRIFPEGKSFIADVEPIFDRLLFFWSDRRNPHEVQPSYATRYAMTVWYFDAEERAEAKKKFRNLTRKTESALTED

SEQ ID NO: 17594 - protein, 19 aa, Homo sapiens
LSYLSVQEKLRTMRLIGTI

SEQ ID NO: 17595 - protein, 20 aa, Homo sapiens
MGPRLKRQGFAMLLRLVPSS

SEQ ID NO: 17596 - protein, 40 aa, Homo sapiens
RQWAPLLVGASLGGTQSPCPAPSSTRTSSSAASRVSQPPL

SEQ ID NO: 17597 - protein, 21 aa, Homo sapiens
LLCSRMWGMAYSPSLDIFEIS

SEQ ID NO: 17598 - protein, 31 aa, Homo sapiens
LKQHGQAVWGAPERGSPQTGGGLQTESFPGG

SEQ ID NO: 17599 - protein, 13 aa, Homo sapiens
ISSCKRTPSMWLT

SEQ ID NO: 17600 - protein, 20 aa, Homo sapiens
LCGTTGFMFLSLWDLSLDVI

SEQ ID NO: 17601 - protein, 13 aa, Homo sapiens
LKYRTFLRKPSPS

SEQ ID NO: 17602 - protein, 34 aa, Homo sapiens
LLRARWVTSSCTGATRENSARVLALVVSVQTGTV

SEQ ID NO: 17603 - protein, 57 aa, Homo sapiens
KMGHQQLYWSHPRKFGQGSRSCRVCSNRHGLIRKYGLNMCRQCFRQYAKDIGFIKLD

SEQ ID NO: 17604 - protein, 16 aa, Homo sapiens
IWRILTQELILKLRVM

SEQ ID NO: 17605 - protein, 21 aa, Homo sapiens
KTLFTSQTMLIPVPKSEKWKL

SEQ ID NO: 17606 - protein, 8 aa, Homo sapiens
KFVSSPQL

SEQ ID NO: 17607 - protein, 492 aa, Homo sapiens
KERIADVKKMWEEYPDVYGVRRSNRSRQEPSRFNIKEEASSGSESGSPKRRGQRQLKKQEKWKQEPSEDEQEQGTSAESEPEQKKVKARRPVPRRTVPKPRVKKQPKTQRGKRKKQDSSDEDDDDDEAPKRQTRRRAAKNVSYKEDDDFETDSDDLIEMTGEGVDEQQDNSETIEKVLDSRLGKKGATGASTTVYAIEANGDPSGDFDTEKDEGEIQYLIKWKGWSYIHSTWESEESLQQQKVKGLKKLENFKKKEDEIKQWLGKVSPEDVEYFNCQQELASELNKQYQIVERVIAVKTSKSTLGQTDFPAHSRKPAPSNEPEYLCKWMGLPYSECSWEDEALIGKKFQNCIDSFHSRNNSKTIPTRECKALKQRPRFVALKKQPAYLGGENLELRDYQLEGLNWLAHSWCKNNSVILADEMGLGKTIQTISFLSYLFHQHQLYGPFLIVVPLSTLTSWQREFEIWAPEINVVVYIGDLMSRNTVCKQKELG

SEQ ID NO: 17608 - protein, 16 aa, Homo sapiens
LGNILQQARYRCLGIA

SEQ ID NO: 17609 - protein, 16 aa, Homo sapiens
KMLWGEPGDLFLILEL

SEQ ID NO: 17610 - protein, 53 aa, Homo sapiens
MVNLTPNLSQQWALISGKKEWCTEPVGRMEPLAEARESTCSYGTQQGRRGFVA

SEQ ID NO: 17611 - protein, 27 aa, Homo sapiens
KQREKHVLCNLITQMMKKNRTFSFIFE

SEQ ID NO: 17612 - protein, 47 aa, Homo sapiens
LEGLALSHRLECSGVILAHRNLHLPGSSDSHASASRVAGITGGDFQE

SEQ ID NO: 17613 - protein, 13 aa, Homo sapiens
LLRLMLGQPRSQM

SEQ ID NO: 17614 - protein, 50 aa, Homo sapiens
LPSASRSRTRTPRRCSRARLCLSLCCSSRTRGRRCPWKYPFTAASPTSTS

SEQ ID NO: 17615 - protein, 21 aa, Homo sapiens
KVFDCSQQPGPQQPEAPHSPQ

SEQ ID NO: 17616 - protein, 36 aa, Homo sapiens
TLFICPAACFPLDRELLLLLASKWTPTAPARLVRDT

SEQ ID NO: 17617 - protein, 26 aa, Homo sapiens
LRVFLLIGNSCFSLPRNGPQLLLLAW

SEQ ID NO: 17618 - protein, 71 aa, Homo sapiens
MGEAGPRREWNGRGRLDAAEATRDGGSFSGGDLRSWSLSAKQDWSYSSSTSSSRKGGCATAAICGWNSGSK

SEQ ID NO: 17619 - protein, 56 aa, Homo sapiens
LGSGRRRRDPRKGLWCGLVDLGRTTSALTPTPTCPQAGSPQQSRQTSALNRTALQM

SEQ ID NO: 17620 - protein, 11 aa, Homo sapiens
VEVTMAKINPP

SEQ ID NO: 17621 - protein, 78 aa, Homo sapiens
IRCVAYNNQSNRLAVSRTDGTVEIYNLSANYFQEKLWCFCSFSQVMSLGLQKLCAGQKDSDSLVLGSMARLWSMIYRR

SEQ ID NO: 17622 - protein, 43 aa, Homo sapiens
LACSSRRHGRCRGRIPRREGAGYHYPQLQSGQDLPHRGGPGAF

SEQ ID NO: 17623 - protein, 42 aa, Homo sapiens
KPTAHSPDEDLLGDGAGFTGPRLQRSLQMLLPVQGPWLHYSS

SEQ ID NO: 17624 - protein, 24 aa, Homo sapiens
KMAAVQAAEVKVDGSEPKLSKKWW

SEQ ID NO: 17625 - protein, 77 aa, Homo sapiens
KMAAVQAAEVKVDGSEPKLSKNELKRRLKAEKKVAEKEAKQKELSEKQLSQATAAATNHTTDNGVGPEEESVDPNKL

SEQ ID NO: 17626 - protein, 25 aa, Homo sapiens
IRCLWLVASTGFMKLDASSGMRGLI

SEQ ID NO: 17627 - protein, 11 aa, Homo sapiens
MPSTSDHSQAP

SEQ ID NO: 17628 - protein, 16 aa, Homo sapiens
KWFLQCYTYWSRWNAN

SEQ ID NO: 17629 - protein, 46 aa, Homo sapiens
ITPCALPSRPLSAIFPRRHNGAHECPGRCSQEYQQCRKERQTPGAY

SEQ ID NO: 17630 - protein, 31 aa, Homo sapiens
MLSRVSTMPKREANARCLLGRAPKSSSGFSL

SEQ ID NO: 17631 - protein, 1372 aa, Homo sapiens
VAASASSTNLIHLSSKGHISPAKDTSLQQRTPAEMSPVLHFYVRPSGHEGAAPGHTRRKLQGKLPELQGVETELCYNVNWTAEALPSAEETKKLMWLFGCPLLLDDVARESWLLPGSNDLLLEVGPRLNFSTPTSTNIVSVCRATGLGPVDRVETTRRYRLSFAHPPSAEVEAIALATLHDRMTEQHFPHPIQSFSPESMPEPLNGPINILGEGRLALEKANQELGLALDSWDLDFYTKRFQELQRNPSTVEAFDLAQSNSEHSRHWFFKGQLHVDGQKLVHSLFESIMSTQESSNPNNVLKFCDNSSAIQGKEVRFLRPEDPTRPSRFQQQQGLRHVVFTAETHNFPTGVCPFSGATTGTGGRIRDVQCTGRGAHVVAGTAGYCFGNLHIPGYNLPWEDPSFQYPGNFARPLEVAIEASNGASDYGNKFGEPVLAGFARSLGLQLPDGQRREWIKPIMFSGGIGSMEADHISKEAPEPGMEVVKVGGPVYRIGVGGGAASSVQVQGDNTSDLDFGAVQRGDPEMEQKMNRVIRACVEAPKGNPICSLHDQGAGGNGNVLKELSDPAGAIIYTSRFQLGDPTLNALEIWGAEYQESNALLLRSPNRDFLTHVSARERCPACFVGTITGDRRIVLVDDRECPVRRNGQGDAPPTPLPTPVDLELEWVLGKMPRKEFFLQRKPPMLQPLALPPGLSVHQALERVLRLPAVASKRYLTNKVDRSVGGLVAQQQCVGPLQTPLADVAVVALSHEELIGAATALGEQPVKSLLDPKVAARLAVAEALTNLVFALVTDLRDVKCSGNWMWAAKLPGEGAALADACEAMVAVMAALGVAVDGGKDSLSMAARVGTETVRAPGSLVISAYAVCPDITATVTPDLKHPEGRGHLLYVALSPGQHRLGGTALAQCFSQLGEHPPDLDLPENLVRAFSITQGLLKDRLLCSGHDVSDGGLVTCLLEMAFAGNCGLQVDVPVPRVDVLSVLFAEEPGLVLEVQEPDLAQVLKRYRDAGLHCLELGHTGEAGPHAMVRVSVNGAVVLEEPVGELRALWEETSFQLDRLQAEPRCVAEEERGLRERMGPSYCLPPTFPKASVPREPGGPSPRVAILREEGSNGDREMADAFHLAGFEVWDVTMQDLCSGAIGLDTFRGVAFVGGFSYADVLGSAKGWAAAVTFHPRAGAELRRFRKRPDTFSLGVCNGCQLLALLGWVGGDPNEDAAEMGPDSQPARPGLLLRHNLSGRYESRWASVRVGPGPALMLRGMEGAVLPVWSAHGEGYVAFSSPELQAQIEARGLAPLHWADDDGNPTEQYPLNPNGSPGGVAGICSCDGRHLAVMPHPERAVRPWQWAWRPPPFDTLTTSPWLQLFINARNWTLEGSC

SEQ ID NO: 17632 - protein, 26 aa, Homo sapiens
LGAGGVHSRLGKPRSFHWDHYHGRAV

SEQ ID NO: 17633 - protein, 12 aa, Homo sapiens
LAALWALNPLLT

SEQ ID NO: 17634 - protein, 8 aa, Homo sapiens
LDWLRTIS

SEQ ID NO: 17635 - protein, 60 aa, Homo sapiens
TEDTGRAEGFFLVSGVFDLEPIVYTSQNVALQLTLPCVKESGKPHLKSSTMWTTLKLLRI

SEQ ID NO: 17636 - protein, 14 aa, Homo sapiens
VFLLLQGAGRLGAR

SEQ ID NO: 17637 - protein, 64 aa, Homo sapiens
LQRKPTIRRKNLRKLRRKCAVPSSSWLPWIEASGRSCLVPEWLHHFQGLFPGATSLPVGPLAMS

SEQ ID NO: 17638 - protein, 40 aa, Homo sapiens
KGLAHIRATSARAWSLRRPGPGSPAHSGGVQTRENWVANS

SEQ ID NO: 17639 - protein, 45 aa, Homo sapiens
VAEAHGSLFCGRATSARAWSLRRPGPGSPAHSGGVQTRENWVANS

SEQ ID NO: 17640 - protein, 35 aa, Homo sapiens
ICQSLESAKAGTRFPGPQWGCANPRELGSAVRSDN

SEQ ID NO: 17641 - protein, 57 aa, Homo sapiens
IAYPLQSAEDGVATRLQIREESASCLAAEYWSQEPAMRLYSQRMSVPRTSSCHQFGF

SEQ ID NO: 17642 - protein, 361 aa, Homo sapiens
IMPKFKQRRRKLKAKAERLFKKKEASHFQSKLITPPPPPPSPERVGISSIDISQSRSWLTSSWNFNFPNIRDAIKLWTNRVWSIYSWCQNCITQSLEVLKDTIFPSRICHRELYSVKQQFCILESKLCKLQEALKTISESSSCPSCGQTCHMSGKLTNVPACVLITPGDSKAVLPPTLPQPASHFPPPPPPPPLPPPPPPLAPVLLRKPSLAKALQAGPLKKDGPMQITVKDLLTVKLKKTQSLDEKRKLIPSPKARNPLVTVSDLQHVTLKPNSKVLSTRVTNVLITPGKSQMDLRKLLRKVDVERSPGGTPLTNKENMETGTGLTPVMTQALRRKFQLAHPRSPTPTLPLSTSSFDEQN

SEQ ID NO: 17643 - protein, 12 aa, Homo sapiens
IAESTESTSYRL

SEQ ID NO: 17644 - protein, 16 aa, Homo sapiens
IKARVRLLTRVMRTGV

SEQ ID NO: 17645 - protein, 50 aa, Homo sapiens
RGARTWACRTPELGQSSSQRRPERFGDAGGSDGRELGAAAAEARGRKVCV

SEQ ID NO: 17646 - protein, 107 aa, Homo sapiens
TGSSQCVRASWNRSLLKWQMTWTSRQEMQGPQPPSQCSAQHYVRMALWCSKAGHVRSSRCLLRRLASTATPRSIWLVLTSLLGRNMKISARQLIIWMSPTSKGMTSS

SEQ ID NO: 17647 - protein, 99 aa, Homo sapiens
IRWNRSLLKWQMTWTSRQEMQGPQPPSQCSAQHYVRMALWCSKAGHVRSSRCLLRRLASTATPRSIWLVLTSLLGRNMKISARQLIIWMSPTSKGMTSS

SEQ ID NO: 17648 - protein, 48 aa, Homo sapiens
VETSAYKLAGPWPTWSAPSSPSSRTACSAAWWARSSSASSRRDSASWP

SEQ ID NO: 17649 - protein, 18 aa, Homo sapiens
IRLMLTVESHGNTSRWAV

SEQ ID NO: 17650 - protein, 23 aa, Homo sapiens
LSAAPEKQVGALGTRGRGRLTPA

SEQ ID NO: 17651 - protein, 9 aa, Homo sapiens
KSLPGDVAR

SEQ ID NO: 17652 - protein, 14 aa, Homo sapiens
KMACFFILKIMQES

SEQ ID NO: 17653 - protein, 35 aa, Homo sapiens
ISFAVQVPVSVQESSPSVQEGIQIQVAIEESPQVS

SEQ ID NO: 17654 - protein, 14 aa, Homo sapiens
MFGDPGLTAAGWGI

SEQ ID NO: 17655 - protein, 84 aa, Homo sapiens
LRRDRPAFWLKMWRVKKLSLSLSPSPQTGKPSMRTPLRELTLQPGALTNSGKRSPACSSLTPSLCKLGLQQISVSIMWTQRRKL

SEQ ID NO: 17656 - protein, 83 aa, Homo sapiens
LRRDRPAFWLKMWRVKKLSLSLSPSPQTGKPSMRTPLRELTLQPGALTNSGKRSPACSSLTPSLCKLGLQISVSIMWTQRRKL

SEQ ID NO: 17657 - protein, 39 aa, Homo sapiens
KHPKRVVWTLMMFVAICHRILVFGSTHLRFLTKLVKRDQ

SEQ ID NO: 17658 - protein, 370 aa, Homo sapiens
IQLFAGGRESSSALDPSSPPPFSLRMAQKENSYPWPYGRQTAPSGLSTLPQRVLRKEPVTPSALVLMSRSNVQPTAAPGQKVMENSSGTPDILTRRHFTIDDFEIGRPLGKGKFGNVYLAREKKSHFIVALKVLFKSQIEKEGVEHQLRREIEIQAHLHHPNILRLYNYFYDRRRIYLILEYAPRGELYKELQKSCTFDEQRTATIMEELADALMYCHGKKVIHRDIKPENLLLGLKGELKIADFGWSVHAPSLRRKTMCGTLDYLPPEMIEGRMHNEKVDLWCIGVLCYELLVGNPPFESASHNETYRRIVKVDLKFPASVPMGAQDLISKLLRHNPSERLPLAQVSAHPWVRANSRRVLPPSALQSVA

SEQ ID NO: 17659 - protein, 369 aa, Homo sapiens
IQLFAGGRESSSALDPSSPPPFSLRMAQKENSYPWPYGRQTAPSGLSTLPQRVLRKEPVTPSALVLMSRSNVQPTAAPGQKVMENSSGTPDILTRHFTIDDFEIGRPLGKGKFGNVYLAREKKSHFIVALKVLFKSQIEKEGVEHQLRREIEIQAHLHHPNILRLYNYFYDRRRIYLILEYAPRGELYKELQKSCTFDEQRTATIMEELADALMYCHGKKVIHRDIKPENLLLGLKGELKIADFGWSVHAPSLRRKTMCGTLDYLPPEMIEGRMHNEKVDLWCIGVLCYELLVGNPPFESASHNETYRRIVKVDLKFPASVPMGAQDLISKLLRHNPSERLPLAQVSAHPWVRANSRRVLPPSALQSVA

SEQ ID NO: 17660 - protein, 38 aa, Homo sapiens
MTLRLGVLWAKASLETCTWLGRRKAISSWRSRSSSSPR

SEQ ID NO: 17661 - protein, 19 aa, Homo sapiens
TSCRMKVPPVCHADARAAV

SEQ ID NO: 17662 - protein, 746 aa, Homo sapiens
TMEVMNLMEQPIKVTEWQQTYTYDSGIHSGANTCVPSVSSKGIMEEDEACGRQYTLKKTTTYTQGVPPSQGDLEYQMSTTARAKRVREAMCPGVSGEDSSLLLATQVEGQATNLQRLAEPSQLLKSAIVHLINYQDDAELATRALPELTKLLNDEDPVVVTKAAMIVNQLSKKEASRRALMGSPQLVAAVVRTMQNTSDLDTARCTTSILHNLSHHREGLLAIFKSGGIPALVRMLSSPVESVLFYAITTLHNLLLYQEGAKMAVRLADGLQKMVPLLNKNNPKFLAITTDCLQLLAYGNQESKLIILANGGPQALVQIMRNYSYEKLLWTTSRVLKVLSVCPSNKPAIVEAGGMQALGKHLTSNSPRLVQNCLWTLRNLSDVATKQEGLESVLKILVNQLSVDDVNVLTCATGTLSNLTCNNSKNKTLVTQNSGVEALIHAILRAGDKDDITEPAVCALRHLTSRHPEAEMAQNSVRLNYGIPAIVKLLNQPNQWPLVKATIGLIRNLALCPANHAPLQEAAVIPRLVQLLVKAHQDAQRHVAAGTQQPYTDGVRMEEIVEGCTGALHILARDPMNRMEIFRLNTIPLFVQLLYSSVENIQRVAAGVLCELAQDKEAADAIDAEGASAPLMELLHSRNEGTATYAAAVLFRISEDKNPDYRKRVSVELTNSLFKHDPAAWEAAQSMIPINEPYGDDMDATYRPMYSSDVPLDPLEMHMDMDGDYPIDTYSDGLRPPYPTADHMLA

SEQ ID NO: 17663 - protein, 35 aa, Homo sapiens
MKMLRKDCLLKESIKRKHNWNIFCSAQTPTLVLWN

SEQ ID NO: 17664 - protein, 28 aa, Homo sapiens
MEKIIHVSPFSLICLSLKCKAWTKILLH

SEQ ID NO: 17665 - protein, 19 aa, Homo sapiens
ISSRLWVFSTRKTMKMKIH

SEQ ID NO: 17666 - protein, 28 aa, Homo sapiens
RILLVHDTSLQCSALWLDCYFHQKMITR

SEQ ID NO: 17667 - protein, 27 aa, Homo sapiens
KQRQKRKIKRKLRMKILKEALKKMVWN

SEQ ID NO: 17668 - protein, 24 aa, Homo sapiens
LVPGASSEGNSLPTCGHQILGAPG

SEQ ID NO: 17669 - protein, 27 aa, Homo sapiens
LWTPDPGSSWLASEISGMSVRLVEDQR

SEQ ID NO: 17670 - protein, 35 aa, Homo sapiens
LRLFLGQRKRRGGRRSGLKLRRWVKENGPNQADCS

SEQ ID NO: 17671 - protein, 53 aa, Homo sapiens
ILLTESRLTILGFQRRLRYPQLETQRRVAFCSRTDLRGLKDGLVRSGTIMLSC

SEQ ID NO: 17672 - protein, 36 aa, Homo sapiens
LLPDGLERLKGWPRQIWNNYALMLMKRLAILRKPYH

SEQ ID NO: 17673 - protein, 41 aa, Homo sapiens
VVRDGPRPEMFSSPAPAALQAAAAATKTTTATATPKHSFRG

SEQ ID NO: 17674 - protein, 54 aa, Homo sapiens
MRLVAPKPPPPPRLRLGRRRSCSWSPSLCRPRQAQLSCAAASRRAPPCRSTPLL

SEQ ID NO: 17675 - protein, 22 aa, Homo sapiens
KRSSSDGAASMPCPLPVLCGEQ

SEQ ID NO: 17676 - protein, 10 aa, Homo sapiens
RILCAVGPRG

SEQ ID NO: 17677 - protein, 909 aa, Homo sapiens
IKQVEVWSILSKMNISGSSCGSPNSADTSSDFKDLWTKLKECHDREVQGLQVKVTKLKQERILDAQRLEEFFTKNQQLREQQKVLHETIKVLEDRLRAGLCDRCAVTEEHMRKKQQEFENIRQQNLKLITELMNERNTLQEENKKLSEQLQQKIENDQQHQAAELECEEDVIPDSPITAFSFSGVNRLRRKENPHVRYIEQTHTKLEHSVCANEMRKVSKSSTHPQHNPNENEILVADTYDQSQSPMAKAHGTSSYTPDKSSFNLATVVAETLGLGVQEESETQGPMSPLGDELYHCLEGNHKKQPFEESTRNTEDSLRFSDSTSKTPPQEELPTRVSSPVFGATSSIKSGLDLNTSLSPSLLQPGKKKHLKTLPFSNTCISRLEKTRSKSEDSALFTHHSLGSEVNKIIIQSSNKQILINKNISESLGEQNRTEYGKDSNTDKHLEPLKSLGGRTSKRKKTEEESEHEVSCPQASFDKENAFPFPMDNQFSMNGDCVMDKPLDLSDRFSAIQRQEKSQGSETSKNKFRQVTLYEALKTIPKGFSSSRKASDGNCTLPKDSPGEPCSQECIILQPLNKCSPDNKPSLQIKEENAVFKIPLRPRESLETENVLDDIKSAGSHEPIKIQTRSDHGGCELASVLQLNPCRTGKIKSLQNNQDVSFENIQWSIDPGADLSQYKMDVTVIDTKDGSQSKLGGETVDMDCTLVSETVLLKMKKQEQKGEKSSNEERKMNDSLEDMFDRTTHEEYESCLADSFSQAADEEEELSTATKKLHTHGDKQDKVKQKAFVEPYFKGDERETSLQNFPHIEVVRKKEERRKLLGHTCKECEIYYADMPAEEREKKLASCSRHRFRYIPPNTPENFWEVGFPSTQTCMERGYIKEDLDPCPRPKRRQPYNAIFSPKGKEQKT

SEQ ID NO: 17678 - protein, 18 aa, Homo sapiens
VSLEFHPRSGRLGSERPV

SEQ ID NO: 17679 - protein, 24 aa, Homo sapiens
LRPGFSARVRSWWRRQVRGDSSSS

SEQ ID NO: 17680 - protein, 60 aa, Homo sapiens
LGRTRGSRGTPCGEAGAPLSGCGRCPSWRCCLCCGCFSSGRVPRAAPGHCSATELDPWAT

SEQ ID NO: 17681 - protein, 65 aa, Homo sapiens
LPGLERAVRRGQDPGLRPEQPHHAEGAQGAGCEGAGHHEGGRRRGVLGSLQEEEGKRDRFFAGSR

SEQ ID NO: 17682 - protein, 14 aa, Homo sapiens
LMKMTIIELQVLTD

SEQ ID NO: 17683 - protein, 57 aa, Homo sapiens
LAGGLGSQRFLLRAGKGLQDPRGLPEVGLTDIMADPSIAWSHRCRPLVACVFSPSLA

SEQ ID NO: 17684 - protein, 14 aa, Homo sapiens
RVGTRDSRARRLTS

SEQ ID NO: 17685 - protein, 73 aa, Homo sapiens
IPSSRRHHVDPGSDHGREADPHGGLAVQADQGGGAEAEDPGAVPRGARPAEAVLQGQTDGGRPYPLRLRGPPE

SEQ ID NO: 17686 - protein, 19 aa, Homo sapiens
VQPWPYATLWPWASTRATK

SEQ ID NO: 17687 - protein, 23 aa, Homo sapiens
KMSSPAAWTSAARELPRPPGSLK

SEQ ID NO: 17688 - protein, 11 aa, Homo sapiens
ISRPTALSPIT

SEQ ID NO: 17689 - protein, 22 aa, Homo sapiens
RTLAVGEHHGNRYSHNQSPGDP

SEQ ID NO: 17690 - protein, 27 aa, Homo sapiens
LKEIAQPTLLCSPSSHHSCLEPWSVSE

SEQ ID NO: 17691 - protein, 25 aa, Homo sapiens
VPRPCRRPGRPAWRLPPRPWRRTRG

SEQ ID NO: 17692 - protein, 31 aa, Homo sapiens
LTYSNSVCLLTGGGEGKVEHIANRSSPRMAS

SEQ ID NO: 17693 - protein, 34 aa, Homo sapiens
MLGDRVSPYWPGWSRTPDFVICPPRLPKVLRLQA

SEQ ID NO: 17694 - protein, 43 aa, Homo sapiens
LGFGSWAKFPTLRVSRTPRSLSQGHGEPEAAGNGAKRGGGDRC

SEQ ID NO: 17695 - protein, 39 aa, Homo sapiens
TSCERAGKAVGEEKPTLSHPHQDIPAGVQPSSLLWQLGD

SEQ ID NO: 17696 - protein, 55 aa, Homo sapiens
IPVPPAAWHRVLNPLSPLPHCPPGSHRSRTSRYWMGLRMQRVRRKRRRKRRKRMT

SEQ ID NO: 17697 - protein, 244 aa, Homo sapiens
LRWDPCPLLGYPRGHHAWFCTGPGPAVHMERSWASVADPSLPQLKSFLRECKVANYCRQVQQLLGKVQENSAYICSRRQRVSFGVSEQQAVEAWEKLTREEGTPLTLYYSHWRKLRDREIQLEISGKERLEDLNFPEIKRRKMADRKDEDRKQFKDLFDLNSSEEDDTEGFSERGILRPLSTRHGVEDDEEDEEEGEEDSSNSEGEWSWDGDPDAEAGLAPGELQQLAQGPEDELEDLQLSEDD

SEQ ID NO: 17698 - protein, 267 aa, Homo sapiens
LGPEVGCTLRVGVMAAAGSRKRRLAELTVDEFLASGFDSESESESENSPQAETREAREAARSPDKPGGSPSASRRKGRASEHKDQLSRLKDRDPEFYKFLQENDQSLLNFSDSDSSEEEEGPFHSLPDVLEEASEEEDGAEEGEDGDRVPRGLKGKKNSVPVTVAMVERWKQAAKQRLTPKLFHEVVQAFRAAVATTRGDQESAEANKFQVTDSAAFNALVTFCIRDLIGCLQKLLFGKVAKDSSSKCGPKETSLRQLVVPGRPQRC

SEQ ID NO: 17699 - protein, 679 aa, Homo sapiens
IRFSVATRAGLAGGGASGCLMQGSSLWLSLTFRSARVLSRARFFEWQSPGLPNTAAMENGTGPYGEERPREVQETTVTEGAAKIAFPSANEVFYNPVQEFNRDLTCAVITEFARIQLGAKGIQIKVPGEKDTQKVVVDLSEQEEEKVELKESENLASGDQPRTAAVGEICEEGLHVLEGLAASGLRSIRFALEVPGLRSVVANDASTRAVDLIRRNVQLNDVAHLVQPSQADARMLMYQHQRVSERFDVIDLDPYGSPATFLDAAVQAVSEGGLLCVTCTDMAVLAGNSGETCYSKYGAMALKSRACHEMALRIVLHSLDLRANCYQRFVVPLLSISADFYVRVFVRVFTGQAKVKASASKQALVFQCVGCGAFHLQRLGKASGVPSGRAKFSAACGPPVTPECEHCGQRHQLGGPMWAEPIHDLDFVGRVLEAVSANPGRFHTSERIRGVLSVITEELPDVPLYYTLDQLSSTIHCNTPSLLQLRSALLHADFRVSLSHACKNAVKTDAPASALWDIMRCWEKECPVKRERLSETSPAFRILSVEPRLQANFTIREDANPSSRQRGLKRFQANPEANWGPRPRARPGGKAADEAMEERRRLLQNKRKEPPEDVAQRAARLKTFPCKRFKEGTCQRGDQCCYSHSPPTPRVSADAAPDCPETSNQTPPGPGAAAGPGID

SEQ ID NO: 17700 - protein, 28 aa, Homo sapiens
RRAHQDCGELAPGTRRRELPTEEPHRAL

SEQ ID NO: 17701 - protein, 17 aa, Homo sapiens
LRAVDLCILMVTVPTWG

SEQ ID NO: 17702 - protein, 50 aa, Homo sapiens
MASLKLMLSAGPFVGWVSQMIPFSDWPRPMASSQRTFDWRESQMWNICHK

SEQ ID NO: 17703 - protein, 51 aa, Homo sapiens
LLRKVVQILGKTCSSALSGRQCHKLKALIPMMPPRISSIFHPWMMKEILKT

SEQ ID NO: 17704 - protein, 34 aa, Homo sapiens
IFCDQDLQRPTDSCTANQTPCTGCDLQKYSRAGG

SEQ ID NO: 17705 - protein, 13 aa, Homo sapiens
LNLSAWRLTEEVL

SEQ ID NO: 17706 - protein, 41 aa, Homo sapiens
KAAMTWARNPSTRKPPPMSSTREACLWALAWTLAGREARGF

SEQ ID NO: 17707 - protein, 15 aa, Homo sapiens
MAATTGSVLCLLQET

SEQ ID NO: 17708 - protein, 7 aa, Homo sapiens
KWNCMST

SEQ ID NO: 17709 - protein, 86 aa, Homo sapiens
MLADLGQSSSLTQVSAGRRDVRPLALRLLKPKPARLSSFPPACSGVVATPPPCSRRAWSRAPSSRRCWRHSRTSSTRPAGILAPAV

SEQ ID NO: 17710 - protein, 12 aa, Homo sapiens
KHQTRRKFQTMK

SEQ ID NO: 17711 - protein, 10 aa, Homo sapiens
VDPLGISRGL

SEQ ID NO: 17712 - protein, 24 aa, Homo sapiens
VDPLGISRVTRRNWVLRHSRACER

SEQ ID NO: 17713 - protein, 18 aa, Homo sapiens
ISVTRRNWVLRHSRACER

SEQ ID NO: 17714 - protein, 144 aa, Homo sapiens
TAELLEDLGPWVAGGSRRVGRPWGISQWRTRTAGTRGGWSEWRSVKSPVGSSVPECPWRCLVPAQRLCIRSWAPRRPVGYCLLLITARGSHSIAQARVRGYLIRNFSEGRARWLMPVIPAFSEAEAGVQWCDLSSLQPLLPGFK

SEQ ID NO: 17715 - protein, 47 aa, Homo sapiens
LRPSPLRPFPSRVPPACLTNCPTKSPTSAWLPGDARPWTLLRTRCRA

SEQ ID NO: 17716 - protein, 37 aa, Homo sapiens
VRAAVGTFRQTMWGSTWMSTTPRTRGRMKSTSAAMEL

SEQ ID NO: 17717 - protein, 72 aa, Homo sapiens
VTTCNIRWFQFLGGKNLKLHFLSIKNRSNYSLNKMMTLKFPPMKTSSGMKRRMKSIQEMTVMGQSLLRSAHG

SEQ ID NO: 17718 - protein, 75 aa, Homo sapiens
IFFNLMKTLYSLCVTPIGQSMSSMYTTIPRSNYSLNKMMTLKFPPMKTSSGMKRRMKSIQEMTVMGQSLLRSAHG

SEQ ID NO: 17719 - protein, 45 aa, Homo sapiens
KTFFFWPMKNLTSIFHCLLRVQMKMMKSSSDPLDIKKDVLLPAWN

SEQ ID NO: 17720 - protein, 19 aa, Homo sapiens
LESAFECEARWLLTLRGEK

SEQ ID NO: 17721 - protein, 18 aa, Homo sapiens
LESAFECEARWLLTLRVR

SEQ ID NO: 17722 - protein, 29 aa, Homo sapiens
LESAFECEARWLLTLRVSSSSKVRSWDTE

SEQ ID NO: 17723 - protein, 429 aa, Homo sapiens
RQARSGEVGAMWPGNAWRAALFWVPRGRRAQSALAQLRGILEGELEGIRGAGTWKSERVITSRQGPHIRVDGVSGGILNFCANNYLGLSSHPEVIQAGLQALEEFGAGLSSVRFICGTQSIHKNLEAKIARFHQREDAILYPSCYDANAGLFEALLTPEDAVLSDELNHASIIDGIRLCKAHKYRYRHLDMADLEAKLQEAQKHRLRLVATDGAFSMDGDIAPLQEICCLASRYGALVFMDECHATGFLGPTGRGTDELLGVMDQVTIINSTLGKALGGASGGYTTGPGPLVSLLRQRARPYLFSNSLPPAVVGCASKALDLLMGSNTIVQSMAAKTQRFRSKMEAAGFTISGASHPICPVMLGDARLASRMADDMLKRGIFVIGFSYPVVPKGKARIRVQISAVHSEEDIDRCVEAFVEVGRLHGALP

SEQ ID NO: 17724 - protein, 78 aa, Homo sapiens
LLLSRRLTSLHTPCARRNAPGPELSPPTLSRLRTRCRPSSVWWWEMGPWARPAFSSATPPTPFPESTSPPCLTTIQPM

SEQ ID NO: 17725 - protein, 29 aa, Homo sapiens
RCHPNECQRLGGGLGDGGGLVLKRRVCLG

SEQ ID NO: 17726 - protein, 25 aa, Homo sapiens
KIQPGTKCCWMDWFSRVCTSCWSPE

SEQ ID NO: 17727 - protein, 10 aa, Homo sapiens
LWRQRDAVMI

SEQ ID NO: 17728 - protein, 45 aa, Homo sapiens
RHQGLQPMPWRILSASRLLAAGPPAPTSRALERESSCLLRLYYAW

SEQ ID NO: 17729 - protein, 29 aa, Homo sapiens
MHSVSLFIHPLQTAEWHSLLVDGPAPPRL

SEQ ID NO: 17730 - protein, 91 aa, Homo sapiens
LRRPLLHDLPAPPLSPRPGGTVPGEIQFWLPVYRLCLGDLLRGPRRPLQTLDRLLLEVPPSTEDARSCQFPEEERGERSAEEKGRLGDLWV

SEQ ID NO: 17731 - protein, 21 aa, Homo sapiens
LYLMTAPPGIYWLASSLSQGS

SEQ ID NO: 17732 - protein, 47 aa, Homo sapiens
MIFPRKRTLYSTRARATMTTTMKRATSPPGLMGSPSLPARPGLSASQ

SEQ ID NO: 17733 - protein, 99 aa, Homo sapiens
ISHAQAEERLFPFGVPLKILVSPWAAAPPVVTGIVRTSRTQSLASAEVSLMPRFAFLTWGGKRQKWMSFRFVATWCQMNMSSCPLKPWRLPEFVPISTW

SEQ ID NO: 17734 - protein, 32 aa, Homo sapiens
KGPRLRMSMQMVVYVWTYFRTVGVQPMMCLPF

SEQ ID NO: 17735 - protein, 27 aa, Homo sapiens
RRRRRVAAGLGFGSLRSWRRRDPGNRH

SEQ ID NO: 17736 - protein, 15 aa, Homo sapiens
TSPGASPAAAKLMAG

SEQ ID NO: 17737 - protein, 17 aa, Homo sapiens
INSWRTQRSVMPITVEL

SEQ ID NO: 17738 - protein, 33 aa, Homo sapiens
IAGEGEKCPRSFQDIWFFGRDTNRGEGRERKIP

SEQ ID NO: 17739 - protein, 28 aa, Homo sapiens
LTPTLTLMQEHSLLMSMVRFLCWMMVGK

SEQ ID NO: 17740 - protein, 22 aa, Homo sapiens
IGMKTNTEMVCLRNFKRCRPPD

SEQ ID NO: 17741 - protein, 18 aa, Homo sapiens
LSTAQFEGPRQKKSWRRV

SEQ ID NO: 17742 - protein, 514 aa, Homo sapiens
TSGVMAADSDDGAVSAPAASDGGVSKSTTSGEELVVQVPVVDVQSNNFKEMWPSLLLAIKTANFVAVDTELSGLGDRKSLLNQCIEERYKAVCHAARTRSILSLGLACFKRQPDKGEHSYLAQVFNLTLLCMEEYVIEPKSVQFLIQHGFNFNQQYAQGIPYHKGNDKGDESQSQSVRTLFLELIRARRPLVLHNGLIDLVFLYQNFYAHLPESLGTFTADLCEMFPAGIYDTKYAAEFHARFVASYLEYAFRKCERENGKQRAAGSPHLTLEFCNYPSSMRDHIDYRCCLPPATHRPHPTSICDNFSAYGWCPLGPQCPQSHDIDLIIDTDEAAAEDKRRRRRRREKRKRALLNLPGTQTSGEAKDGPPKKQVCGDSIKPEETEQEVAADETRNLPHSKQGNKNDLEMGIKAARPEIADRATSEVPGSQASPNPVPGDGLHRAGFDAFMTGYVMAYVEVSQGPQPCSSGPWLPECHNKVYLSGKAVPLTVAKSQFSRSSKAHNQKMKLTWGSS

SEQ ID NO: 17743 - protein, 15 aa, Homo sapiens
LALRGPALRSDELIR

SEQ ID NO: 17744 - protein, 12 aa, Homo sapiens
KPSTRATMGERP

SEQ ID NO: 17745 - protein, 37 aa, Homo sapiens
IGPQPLSPRDRGGVRRHCSSVHTVSYDITVFKKTPWR

SEQ ID NO: 17746 - protein, 592 aa, Homo sapiens
IRSGTDEESMDLMNGQASSVNIAATASEKSSSSESLSDKGSELKKSFDAVVFDVLKVTPEEYAGQITLMDVPVFKAIQPDELSSCGWNKKEKYSSAPNAVAFTRRFNHVSFWVVREILHAQTLKIRAEVLSHYIKTAKKLYELNNLHALMAVVSGLQSAPIFRLTKTWALLSRKDKTTFEKLEYVMSKEDNYKRLRDYISSLKMTPCIPYLGIYLSDLTYIDSAYPSTGSILENEQRSNLMNNILRIISDLQQSCEYDIPMLPHVQKYLNSVQYIEELQKFVEDDNYKLSLKIEPGTSTPRSAASREDLVGPEVGASPQSGRKSVAAEGALLPQTPPSPRNLIPHGHRKCHSLGYNFIHKMNTAEFKSATFPNAGPRHLLDDSVMEPHAPSRGQAESSTLSSGISIGSSDGSELSEETSWPAFERNRLYHSLGPVTRVARNGYRSHMKASSSAESEDLAVHLYPGAVTIQGVLRRKTLLKEGKKPTVASWTKYWAALCGTQLFYYAAKSLKATERKHFKSTSNKNVSVIGWMVMMADDPEHPDLFLLTDSEKGNSYKFQAGNRMNAMLWFKHLSAACQSNKQQVPTNLMTFE

SEQ ID NO: 17747 - protein, 22 aa, Homo sapiens
MLLPGSRRSWSTMPLEASITGV

SEQ ID NO: 17748 - protein, 13 aa, Homo sapiens
MMLTSWKHVSTAC

SEQ ID NO: 17749 - protein, 32 aa, Homo sapiens
RNLKVVFSIIWKTIGFNMRKLLQKKGKKSCCS

SEQ ID NO: 17750 - protein, 26 aa, Homo sapiens
VLAAPLSSASLQEEKQGLQKVNGLLM

SEQ ID NO: 17751 - protein, 18 aa, Homo sapiens
LLPELAVFLSAAGTVDIM

SEQ ID NO: 17752 - protein, 27 aa, Homo sapiens
RIFIKKRAARGKFPKEVKYFRENQAFE

SEQ ID NO: 17753 - protein, 12 aa, Homo sapiens
LGPRWTTFGQWW

SEQ ID NO: 17754 - protein, 11 aa, Homo sapiens
LSQPRRRMITT

SEQ ID NO: 17755 - protein, 50 aa, Homo sapiens
KKVFEAAPLACPLSQSFASRLRRMTWRWSCLQLQTPASSFQFLFGGNHVL

SEQ ID NO: 17756 - protein, 24 aa, Homo sapiens
RSRGNSWSSEKKKINQRKGWTQRE

SEQ ID NO: 17757 - protein, 11 aa, Homo sapiens
LLLLPWQTPEN

SEQ ID NO: 17758 - protein, 9 aa, Homo sapiens
ISHSRYGTP

SEQ ID NO: 17759 - protein, 29 aa, Homo sapiens
LEILFQRSARTTPAKKTVLVPPACSGPPP

SEQ ID NO: 17760 - protein, 59 aa, Homo sapiens
TDCSLKEPASAIETKLTEELVTLLFFPERSLARDFCPSWARASGAIPAGGPLWLTCKIW

SEQ ID NO: 17761 - protein, 25 aa, Homo sapiens
MAGLPAVVGLSPGEQEYHRGGVGVL

SEQ ID NO: 17762 - protein, 10 aa, Homo sapiens
KAGSRLVVRT

SEQ ID NO: 17763 - protein, 25 aa, Homo sapiens
RVKVQRAAFDFWGNQLGLDWSKRSA

SEQ ID NO: 17764 - protein, 14 aa, Homo sapiens
ICPFWELCGLRWPG

SEQ ID NO: 17765 - protein, 162 aa, Homo sapiens
LGRVSGRPEGAGRCGRRARGPAERVRAPGNAIRAGVNPGRGPASPFWDLSVRPSATPPASGAWEPRGASCVGSKVLLVGWGGGGRREARVAAGPDAPVPARPRLLKALPPDLNGHLCSSSPGTCGRRPQTMLLGRLTSQLLRAVPWAASDAHRGNLRGSGQE

SEQ ID NO: 17766 - protein, 54 aa, Homo sapiens
MLLGRLTSQLLRAVPWAGRKPRGGGWEDAHLVRSAGLSSSAGAGPVATHTLFPL

SEQ ID NO: 17767 - protein, 10 aa, Homo sapiens
RQTPHLVTIL

SEQ ID NO: 17768 - protein, 12 aa, Homo sapiens
RCQGRGYRPKRC

SEQ ID NO: 17769 - protein, 27 aa, Homo sapiens
LFLCCPLLLDLVQSRDKRPEEWEERRF

SEQ ID NO: 17770 - protein, 8 aa, Homo sapiens
LLLKPKGI

SEQ ID NO: 17771 - protein, 10 aa, Homo sapiens
ITLMTLFVHT

SEQ ID NO: 17772 - protein, 14 aa, Homo sapiens
LLQWRDPLERQDAD

SEQ ID NO: 17773 - protein, 10 aa, Homo sapiens
ILPKEKMLCL

SEQ ID NO: 17774 - protein, 16 aa, Homo sapiens
RTPAVSYGPIWDLCTV

SEQ ID NO: 17775 - protein, 1572 aa, Homo sapiens
ILEPWRHRETMSVRLPQSIDRLSSLSSLGDSAPERKSPSHHRQPSDASETTGLVQRCVIIQKDQHGFGFTVSGDRIVLVQSVRPGGAAMKAGVKEGDRIIKVNGTMVTNSSHLEVVKLIKSGAYVALTLLGSSPSSMGISGLQQDPSPAGAPRITSVIPSPPPPPPLPPPQRITGPKPLQDPEVQKHATQILRNMLRQEEKELQRICEVYSRNPASLLEEQIEGARRRVTQLQLKIQQETGGSVDILPLYGDTSQRPSEGRLSLDSQEGDSGLDSGTERFPSLSESLMNRNSVLSDPGLDSPRTSPVIMARVAQHHRRQGSDAAVPSTGDQGVDQSPKPLIIGPEEDYDPGYFNNESDIIFQDLEKLKSRPAHLGVFLRYIFSQADPSPLLFYLCAEVYQQASPKDSRSLGKDIWNIFLEKNAPLRVKIPEMLQAEIDSRLRNSEDARGVLCEAQEAAMPEIQEQIHDYRTKRTLGLGSLYGENDLLDLDGDPLRERQVAEKQLAALGDILSKYEEDRSAPMDFALNTYMSHAGIRLREARPSNTAEKAQSAPDKDKWLPFFPKTKKSSNSKKEKDALEDKKRNPILKYIGKPKSSSQSTFHIPLSPVEVKPGNVRNIIQHFENNQQYDAPEPGTQRLSTGSFPEDLLESDSSRSEIRLGRSESLKGREEMKRSRKAENVPRSRSDVDMDAAAEATRLHQSASSSTSSLSTRSLENPTPPFTPKMGRRSIESPSLGFCTDTLLPHLLEDDLGQLSDLEPEPDAQNWQHTVGKDVVAGLTQREIDRQEVINELFVTEASHLRTLRVLDLIFYQRMKKENLMPREELARLFPNLPELIEIHNSWCEAMKKLREEGPIIKEISDLMLARFDGPAREELQQVAAQFCSYQSIALELIKTKQRKESRFQLFMQEAESHPQCRRLQLRDLIISEMQRLTKYPLLLESIIKHTEGGTSEHEKLCRARDQCREILKYVNEAVKQTENRHRLEGYQKRLDATALERASNPLAAEFKSLDLTTRKMIHEGPLTWRISKDKTLDLHVLLLEDLLVLLQKQDEKLLLKCHSKTAVGSSDSKQTFSPVLKLNAVLIRSVATDKRAFFIICTSKLGPPQIYELVALTSSDKNTWMELLEEAVRNATRHPGAAPMPVHPPPPGPREPAQQGPTPSRVELDDSDVFHGEPEPEELPGGTGSQQRVQGKHQVLLEDPEQEGSAEEEELGVLPCPSTSLDGENRGIRTRNPIHLAFPGPLFMEGLADSALEDVENLRHLILWSLLPGHTMETQAAQEPEDDLTPTPSVISVTSHPWDPGSPGQAPPGGEGDNTQLAGLEGERPEQEDMGLCSLEHLPPRTRNSGIWESPELDRNLAEDASSTEAAGGYKVVRKAEVAGSKVVPALPESGQSEPGPPEVEGGTKATGNCFYVSMPSGPPDSSTDHSEAPMSPPQPDSLPAGQTEPQPQLQGGNDDPRRPSRSPPSLALRDVGMIFHTIEQLTLKLNRLKDMELAHRELLKSLGGESSGGTTPVGSFHTEAARWTDGSLSPPAKEPLASDSRNSHELGPCPEDGSDAPLEDSTADAAASPGP

SEQ ID NO: 17776 - protein, 56 aa, Homo sapiens
LEAAERKPGNFSRLEPHHGCNPKEAGDRWGWCLWEDLPPHRLQQGSVSGGLRPYCL

SEQ ID NO: 17777 - protein, 51 aa, Homo sapiens
LQPGNFSRLEPHHGCNPKEAGDRWGWCLWEDLPPHRLQQGSVSGGLRPYCL

SEQ ID NO: 17778 - protein, 47 aa, Homo sapiens
VREAAKPHHGCNPKEAGDRWGWCLWEDLPPHRLQQGSVSGGLRPYCL

SEQ ID NO: 17779 - protein, 31 aa, Homo sapiens
ILNERRNSEEGGLRGEKRKRDAEDDGEEEDD

SEQ ID NO: 17780 - protein, 18 aa, Homo sapiens
IFRLLLKISVERNKSVIS

SEQ ID NO: 17781 - protein, 20 aa, Homo sapiens
LASSWPSSTSTPAGRVTSTP

SEQ ID NO: 17782 - protein, 11 aa, Homo sapiens
RVTSSSSTSQN

SEQ ID NO: 17783 - protein, 604 aa, Homo sapiens
VQMQLEALNLLHTLVWARSLCRAGAVQTQERLSGSASPEQVPAGECCALQEYEAAVEQLKSEQIRAQAEERRKTLSEETRQHQARAQYQDKLARQRYEDQLKQQQLLNEENLRKQEESVQKQEAMRRATVEREMELRHKNEMLRVETEARARAKAERENADIIREQIRLKASEHRQTVLESIRTAGTLFGEGFRAFVTDRDKVTATVAGLTLLAVGVYSAKNATAVTGRFIEARLGKPSLVRETSRITVLEALRHPIQVSRRLLSRPQDVLEGVVLSPSLEARVRDIAIATRNTKKNRGLYRHILLYGPPGTGKTLFAKKLALHSGMDYAIMTGGDVAPMGREGVTAMHKLFDWANTSRRGLLLFMDEADAFLRKRATEEISKDLRATLNAFLYHMGQHSNKFMLVLASNLPEQFDCAINSRIDVMVHFDLPQQEERERLVRLHFDNCVLKPATEGKRRLKLAQFDYGRKCSEVARLTEGMSGREIAQLAVSWQATAYASKDGVLTEAMMDACVQDAVQQYRQKMRWLKAEGPGRGVEHPLSGVQGETLTSWSLATDPSYPCLAGPCTFRICSWMGTGLCPGPLSPRMSCGGGRPFCPPGHPLL

SEQ ID NO: 17784 - protein, 14 aa, Homo sapiens
LSSPPPLCPSRLRI

SEQ ID NO: 17785 - protein, 9 aa, Homo sapiens
MRIPMNQAE

SEQ ID NO: 17786 - protein, 13 aa, Homo sapiens
VTMVWMERIAALH

SEQ ID NO: 17787 - protein, 1211 aa, Homo sapiens
TKLLRPSQGRVRQDRRAASEDHIAMPFGLKLRRTRRYNVLSKNCFVTRIRLLDSNVIECTLSVESTGQECLEAVAQRLELRETHYFGLWFLSKSQQARWVELEKPLKKHLDKFANEPLLFFGVMFYVPNVSWLQQEATRYQYYLQVKKDVLEGRLRCTLDQVIRLAGLAVQADFGDYNQFDSQDFLREYVLFPMDLALEEAVLEELTQKVAQEHKAHSGILPAEAELMYINEVERLDGFGQEIFPVKDNHGNCVHLGIFFMGIFVRNRIGRQAVIYRWNDMGNITHNKSTILVELINKEETALFHTDDIENAKYISRLFATRHKFYKQNKICTEQSNSPPPIRRQPTWSRSSLPRQQPYILPPVHVQCGEHYSETHTSQDSIFHGNEEALYCNSHNSLDLNYLNGTVTNGSVCSVHSVNSLNCSQSFIQASPVSSNLSIPGSDIMRADYIPSHRHSAIIVPSYRPTPDYETVMRQMKRGILHTDSQSQSLRNLNIINTHAYNQPEDLVYSQPEMRERHPYTVPYGPQGVYSNKLVSPSDQRNPKNNVVPSKPGASAISHTVSTPELANMQLQGSHNYSTAHMLKNYLFRPPPPYPRPRPATSTPDLASHRHKYVSGSSPDLVTRKVQLSVKTFQEDSSPVVHQSLQEVSEPLTATKHHGTVNKRHSLEVMNSMVRGMEAMTLKSLHLPMARRNTLREQGPPEEGSGSHEVPQLPQYHHKKTFSDATMLIHSSESEEEEEEAPESVPQIPMLREKMEYSAQLQAALARIPNKPPPEYPGPRKSVSNGALRQDQASLPPAMARARVLRHGPAKAISMSRTDPPAVNGASLGPSISEPDLTSVKERVKKEPVKERPVSEMFSLEDSIIEREMMIRNLEKQKMAGLEAQKRPLMLAALNGLSVARVSGREENRVDATRVPMDERFRTLKKKLEEGMVFTEYEQIPKKKANGIFSTAALPENAERSRIREVVPYEENRVELIPTKENNTGYINASHIKVVVGGAEWHYIATQGPLPHTCHDFWQMVWEQGVNVIAMVTAEEEGGRTKSHRYWPKLGSKHSSATYGKFKVTTKFRTDSVCYATTGLKVKHLLSGQERTVWHLQYTDWPDHGCPEDVQGFLSYLEEIQSVRRHTNSMLEGTKNRHPPIVVHCSAGVGRTGVLILSELMIYCLEHNEKVEVPMMLRLLREQRMFMIQTIAQYKFVYQVLIQFLQNSRLI

SEQ ID NO: 17788 - protein, 51 aa, Homo sapiens
MLSSARCRWKAQGKNAWRLWPRGWSCERRTTLAFGFSARASKHDGWSWRNL

SEQ ID NO: 17789 - protein, 17 aa, Homo sapiens
KSKKMCLKGDYDVHWTR

SEQ ID NO: 17790 - protein, 22 aa, Homo sapiens
ISSESMCYFLWIWPWKRLFWRS

SEQ ID NO: 17791 - protein, 12 aa, Homo sapiens
TTQVLQTKQNLH

SEQ ID NO: 17792 - protein, 15 aa, Homo sapiens
RRDLCLKCFPWKTAL

SEQ ID NO: 17793 - protein, 29 aa, Homo sapiens
MGSRWLESQGGKRIELMPPGFPWTRGSEP

SEQ ID NO: 17794 - protein, 8 aa, Homo sapiens
LFAMQPRA

SEQ ID NO: 17795 - protein, 13 aa, Homo sapiens
RQFNLWTRMVWIS

SEQ ID NO: 17796 - protein, 191 aa, Homo sapiens
VSRLTRPPIQAPYGMGVGQLPVFRPPPHGVGSAALAASLGNSFPRRLKLAQFDYGRKCSEVARLTEGMSGREIAQLAVSWQATAYASKDGVLTEAMMDACVQDAVQQYRQKMRWLKAEGPGRGVEHPLSGVQGETLTSWSLATDPSYPCLAGPCTFRICSWMGTGLCPGPLSPRMSCGGGRPFCPPGHPLL

SEQ ID NO: 17797 - protein, 569 aa, Homo sapiens
LALAAPRRCRQPLPGRDCAPGAPPAGAVSRAGRIGLFPSPVCTSAAVRSGSGYAKDALNLAQMQEQTLQLEQQSKLKEYEAAVEQLKSEQIRAQAEERRKTLSEETRQHQARAQYQDKLARQRYEDQLKQQQLLNEENLRKQEESVQKQEAMRRATVEREMELRHKNEMLRVEAEARARAKAERENADIIREQIRLKAAEHRQTVLESIRTAGTLFGEGFRAFVTDWDKVTATVAGLTLLAVGVYSAKNATLVAGRFIEARLGKPSLVRETSRITVLEALRHPIQVSRRLLSRPQDALEGVVLSPSLEARVRDIAIATRNTKKNRSLYRNILMYGPPGTGKTLFAKKLALHSGMDYAIMTGGDVAPMGREGVTAMHKLFDWANTSRRGLLLFVDEADAFLRKRATEKISEDLRATLNAFLYRTGQHSNKFMLVLASNQPEQFDWAINDRINEMVHFDLPGQEERERLVRMYFDKYVLKPATEGKQRLKLAQFDYGRKCSEVARLTEGMSGREIAQLAVSWQATAYASEDGVLTEAMMDTRVQDAVQQHQQKMCWLKAEGPGRGDEPSPS

SEQ ID NO: 17798 - protein, 7 aa, Homo sapiens
LGLFSVF

SEQ ID NO: 17799 - protein, 19 aa, Homo sapiens
RTSGCCRPSCRPKRKSFRA

SEQ ID NO: 17800 - protein, 31 aa, Homo sapiens
LIQTFSTTMDIMGTLMVLQQHCVKLGLLKNC

SEQ ID NO: 17801 - protein, 19 aa, Homo sapiens
MSAFPLKKGKRIFFMFLKM

SEQ ID NO: 17802 - protein, 22 aa, Homo sapiens
MASKLPWKTYILKCIVFLLTLT

SEQ ID NO: 17803 - protein, 10 aa, Homo sapiens
ILLPWMLTSK

SEQ ID NO: 17804 - protein, 17 aa, Homo sapiens
MCATDARSSWLSFTMPP

SEQ ID NO: 17805 - protein, 17 aa, Homo sapiens
LTTEERSTGQHRLLMAS

SEQ ID NO: 17806 - protein, 7 aa, Homo sapiens
MMTWTAQ

SEQ ID NO: 17807 - protein, 28 aa, Homo sapiens
TCHLLEVGSVLAAILKQERTASFSSWNM

SEQ ID NO: 17808 - protein, 7 aa, Homo sapiens
MESSTGI

SEQ ID NO: 17809 - protein, 16 aa, Homo sapiens
KVTASWLTSGCARKGF

SEQ ID NO: 17810 - protein, 12 aa, Homo sapiens
MAPPWTGGPWGC

SEQ ID NO: 17811 - protein, 18 aa, Homo sapiens
LRFRPSAPEAAVQSSAVS

SEQ ID NO: 17812 - protein, 878 aa, Homo sapiens
TSQRATATMTADKEKKRSSSERRKEKSRDAARCRRSKETEVFYELAHELPLPHSVSSHLDKASIMRLAISFLRTHKLLSSVCSENESEAEADQQMDNLYLKALEGFIAVVTQDGDMIFLSENISKFMGLTQVELTGHSIFDFTHPCDHEEIRENLSLKNGSGFGKKSKDMSTERDFFMRMKCTVTNRGRTVNLKSATWKVLHCTGQVKVYNNCPPHNSLCGYKEPLLSCLIIMCEPIQHPSHMDIPLDSKTFLSRHSMDMKFTYCDDRITELIGYHPEELLGRSAYEFYHALDSENMTKSHQNLCTKGQVVSGQYRMLAKHGGYVWLETQGTVIYNPRNLQPQCIMCVNYVLSEIEKNDVVFSMDQTESLFKPHLMAMNSIFDSSGKGAVSEKSNFLFTKLKEEPEELAQLAPTPGDAIISLDFGNQNFEESSAYGKAILPPSQPWATELRSHSTQSEAGSLPAFTVPQAAAPGSTTPSATSSSSSCSTPNSPEDYYTSLDNDLKIEVIEKLFAMDTEAKDQCSTQTDFNELDLETLAPYIPMDGEDFQLSPICPEERLLAENPQSTPQHCFSAMTNIFQPLAPVAPHSPFLLDKFQQQLESKKTEPEHRPMSSIFFDAGSKASLPPCCGQASTPLSSMGGRSNTQWPPDPPLHFGPTKWAVGDQRTEFLGAAPLGPPVSPPHVSTFKTRSAKGFGARGPDVLSPAMVALSNKLKLKRQLEYEEQAFQDLSGGDPPGGSTSHLMWKRMKNLRGGSCPLMPDKPLSANVPNDKFTQNPMRGLGHPLRHLPLPQPPSAISPGENSKSRFPPQCYATQYQDYSLSSAHKVSGMASRLLGPSFESYLLPELTRYDCEVNVPVLGSSTLLQGGDLLRALDQAT

SEQ ID NO: 17813 - protein, 26 aa, Homo sapiens
MLRGAGGARRRRCSMSWPMSCLCPTV

SEQ ID NO: 17814 - protein, 15 aa, Homo sapiens
LTSLIPATMRRFVRT

SEQ ID NO: 17815 - protein, 18 aa, Homo sapiens
IAVARGLCLRRVTSYSPS

SEQ ID NO: 17816 - protein, 19 aa, Homo sapiens
RSGSWRRTHSPPPSTASVP

SEQ ID NO: 17817 - protein, 20 aa, Homo sapiens
MSPPSRQGLQRVLGLEAQTC

SEQ ID NO: 17818 - protein, 24 aa, Homo sapiens
RPRRAESGHGSPLQQAEAEATAGV

SEQ ID NO: 17819 - protein, 26 aa, Homo sapiens
VETDEEPQGWELPFDAGQATERKCTQ

SEQ ID NO: 17820 - protein, 51 aa, Homo sapiens
MAKDGVLLLLPKLECNGAIFAYCNLCFLGSSDSPASASRVAGITGVMLPPL

SEQ ID NO: 17821 - protein, 19 aa, Homo sapiens
LQPPPPSFKRFSCLSLPSS

SEQ ID NO: 17822 - protein, 37 aa, Homo sapiens
IMKKLKTMITTTLTTPPTFALDYRQHNRMVTLQKPKD

SEQ ID NO: 17823 - protein, 12 aa, Homo sapiens
LIPTPIQKMKVE

SEQ ID NO: 17824 - protein, 19 aa, Homo sapiens
RTSDQQIVKYVWTVYIRTN

SEQ ID NO: 17825 - protein, 38 aa, Homo sapiens
VSFPSLRVGCLLKSSIRLKKHLIQMRRRCCSFCAGMLL

SEQ ID NO: 17826 - protein, 25 aa, Homo sapiens
INFPHEGLHGPRQDKQGEEFLGPCG

SEQ ID NO: 17827 - protein, 53 aa, Homo sapiens
LQKAFDFKLHNSDSNTWERQEVNTKTHPYSSCWFLLRQNVIVACIWQLVSAYY

SEQ ID NO: 17828 - protein, 7 aa, Homo sapiens
IKSPSFG

SEQ ID NO: 17829 - protein, 30 aa, Homo sapiens
IQNQDTMSLCYMTLKIFRHPRIPLCIKLAC

SEQ ID NO: 17830 - protein, 16 aa, Homo sapiens
LAAVTLQTSSMTSSGV

SEQ ID NO: 17831 - protein, 16 aa, Homo sapiens
REKGAMLISGSTKGPS

SEQ ID NO: 17832 - protein, 17 aa, Homo sapiens
RKHKGTFLALTEPRSYS

SEQ ID NO: 17833 - protein, 73 aa, Homo sapiens
ISPYPARSLACPIARPARAPRRRLPSPTRAPSPPATRGPQLGRRRRFLRASLSATLLRASEPASRRPAEQNGK

SEQ ID NO: 17834 - protein, 24 aa, Homo sapiens
VQILVVVANFQMRTLKAEVEKGSM

SEQ ID NO: 17835 - protein, 16 aa, Homo sapiens
LWRKRTRASSSRGTPT

SEQ ID NO: 17836 - protein, 13 aa, Homo sapiens
LCSLTTQRRIIPK

SEQ ID NO: 17837 - protein, 11 aa, Homo sapiens
LKARLKRWLNH

SEQ ID NO: 17838 - protein, 17 aa, Homo sapiens
IFTLKMILQTQPLDKTP

SEQ ID NO: 17839 - protein, 50 aa, Homo sapiens
IRHPEMDMPNVKPSRPFVAAASGKRTSPLLINHESVSAFANGFLVSSSVG

SEQ ID NO: 17840 - protein, 16 aa, Homo sapiens
MNQCPPLLTASLFPHL

SEQ ID NO: 17841 - protein, 51 aa, Homo sapiens
IGKLAGLRELSLESGCWLEWARIWCGEGGGTQACLRSIVLHNGRGRTGTFR

SEQ ID NO: 17842 - protein, 24 aa, Homo sapiens
RILRKNILGRRKLFLLLIKRMQRG

SEQ ID NO: 17843 - protein, 11 aa, Homo sapiens
MQPYSNGAAIR

SEQ ID NO: 17844 - protein, 18 aa, Homo sapiens
RKTFSFADQGRTGSKIES

SEQ ID NO: 17845 - protein, 35 aa, Homo sapiens
LNYKWRESLKTMKTWLKIFLIGQEIAKTSLYLWSV

SEQ ID NO: 17846 - protein, 18 aa, Homo sapiens
ICTFQKPTELSFGEKRNS

SEQ ID NO: 17847 - protein, 9 aa, Homo sapiens
ISNTFVVMM

SEQ ID NO: 17848 - protein, 9 aa, Homo sapiens
KWISRQKDQ

SEQ ID NO: 17849 - protein, 14 aa, Homo sapiens
IPHAESPCAAGRGL

SEQ ID NO: 17850 - protein, 26 aa, Homo sapiens
IHACNVSYARSLLATVCTYADDSGSC

SEQ ID NO: 17851 - protein, 31 aa, Homo sapiens
MLAPERMRVLSSLLKSFTPLVLKPNCASLVW

SEQ ID NO: 17852 - protein, 26 aa, Homo sapiens
IVLNKKSFLIFPTCLILGEPIRLEKD

SEQ ID NO: 17853 - protein, 15 aa, Homo sapiens
RLLEAGPVTESLRLS

SEQ ID NO: 17854 - protein, 22 aa, Homo sapiens
RKLSVLCAFIRESRKGWGHGNP

SEQ ID NO: 17855 - protein, 28 aa, Homo sapiens
LSRNSVALGTSRRNYCRTLLAWPKGTLS

SEQ ID NO: 17856 - protein, 12 aa, Homo sapiens
LSHKSLKSTRET

SEQ ID NO: 17857 - protein, 9 aa, Homo sapiens
LEMTIFVLV

SEQ ID NO: 17858 - protein, 32 aa, Homo sapiens
TAREEESRHCVPVGWFHQLQEGQFPGSASFCV

SEQ ID NO: 17859 - protein, 7 aa, Homo sapiens
RGKTRQH

SEQ ID NO: 17860 - protein, 15 aa, Homo sapiens
RQAAAWTSGSLRLPL

SEQ ID NO: 17861 - protein, 10 aa, Homo sapiens
LGEGLCMTGP

SEQ ID NO: 17862 - protein, 7 aa, Homo sapiens
VSVVRLV

SEQ ID NO: 17863 - protein, 16 aa, Homo sapiens
RREGRSRRNWTGWSGW

SEQ ID NO: 17864 - protein, 19 aa, Homo sapiens
RERWSTWRTWRNWEECECH

SEQ ID NO: 17865 - protein, 11 aa, Homo sapiens
TRQNRSTGKKG

SEQ ID NO: 17866 - protein, 18 aa, Homo sapiens
TQRQKRRKRIPWIPRTKG

SEQ ID NO: 17867 - protein, 17 aa, Homo sapiens
LCSTRPLSPWTMPACHL

SEQ ID NO: 17868 - protein, 13 aa, Homo sapiens
RATSSWSWALAGR

SEQ ID NO: 17869 - protein, 19 aa, Homo sapiens
KFQYKEISAPTSTASKVSF

SEQ ID NO: 17870 - protein, 9 aa, Homo sapiens
IQKRTFQWT

SEQ ID NO: 17871 - protein, 12 aa, Homo sapiens
IPGITPLNAQMK

SEQ ID NO: 17872 - protein, 27 aa, Homo sapiens
IRMMKMISTRLITLPMKMWSGEKTGTQ

SEQ ID NO: 17873 - protein, 7 aa, Homo sapiens
MNKSTMR

SEQ ID NO: 17874 - protein, 11 aa, Homo sapiens
KEFTDTPRRLN

SEQ ID NO: 17875 - protein, 31 aa, Homo sapiens
ISLDLCLCRSSVFSQALIKDDFLVCSRNSPF

SEQ ID NO: 17876 - protein, 21 aa, Homo sapiens
IKQARKAKKEKEEKQNGSTWK

SEQ ID NO: 17877 - protein, 84 aa, Homo sapiens
MVSLTNQVMKVMPSKFLCEFVLLQKDLGQLMESRTYAYLCCPPRVSGCTPTLSPRPSRLIMLQMWIPLRNLYSQLWLKALWSLA

SEQ ID NO: 17878 - protein, 15 aa, Homo sapiens
TVHLGLWRMMKTGPS

SEQ ID NO: 17879 - protein, 23 aa, Homo sapiens
KRRLIQEIEDRSLHRPAEVPRQP

SEQ ID NO: 17880 - protein, 48 aa, Homo sapiens
ILILSHQMWNLWKRSLGFAKLRTKPSRANRIQRSCTAKNLKRYLSLGD

SEQ ID NO: 17881 - protein, 11 aa, Homo sapiens
RSLGQGLKIVQ

SEQ ID NO: 17882 - protein, 11 aa, Homo sapiens
LPRELLRCRGG

SEQ ID NO: 17883 - protein, 15 aa, Homo sapiens
LPWVPQPQCRPKLGE

SEQ ID NO: 17884 - protein, 12 aa, Homo sapiens
MRTGSAWTSTSV

SEQ ID NO: 17885 - protein, 16 aa, Homo sapiens
LCEHTGLLPLLQGTHL

SEQ ID NO: 17886 - protein, 19 aa, Homo sapiens
LRISSALAPRQPSRGTPSP

SEQ ID NO: 17887 - protein, 21 aa, Homo sapiens
LAAIFGWNISSKNNNLPSSSK

SEQ ID NO: 17888 - protein, 144 aa, Homo sapiens
IPNLKPIAMFWQLQACILKISFGAIQSVFPATSWSWTISKLKCLLKYLIISTVPQSLSRDRKQSLISQLQEKSWEYRSWKTLLIATSQIPRVPMYSVLLKREWLKKKKMKKGMKNQPSLMGQGSQMHFPSSKQKIVITCFPRWT

SEQ ID NO: 17889 - protein, 26 aa, Homo sapiens
METVAWFVPNSEAIFLLRPLDTESEW

SEQ ID NO: 17890 - protein, 25 aa, Homo sapiens
METVAWFVPNSEAIFLLRPLDTESE

SEQ ID NO: 17891 - protein, 17 aa, Homo sapiens
KEVMGLALACLPTQVKS

SEQ ID NO: 17892 - protein, 99 aa, Homo sapiens
VSTRRPHQGSCPQPSPLGALSPQAWEVAPELFQDPRLLPGQPLQAGAGDVVKVIVSVQRKRQEAEGEATVIEALQAPPDVTTVAVEETIPSFTGRSPNH

SEQ ID NO: 17893 - protein, 45 aa, Homo sapiens
VCSQRKRQEAEGEATVIEALQAPPDVTTVAVEETIPSFTGRSPNH

SEQ ID NO: 17894 - protein, 18 aa, Homo sapiens
IICLRFRIDLLEFTRHTT

SEQ ID NO: 17895 - protein, 917 aa, Homo sapiens
IQIMAENSVLTSTTGRTSLADSSIFDSKVTEISKENLLIGSTSYVEEEMPQIETRVILVQEAGKQEELIKALKTIKIMEVPVIKIKESCPGKSDEKLIKSVINMDIKVGFVKMESVEEFEGLDSPEFENVFVVTDFQDSVFNDLYKADCRVIGPPVVLNCSQKGEPLPFSCRPLYCTSMMNLVLCFTGFRKKEELVRLVTLVHHMGGVIRKDFNSKVTHLVANCTQGEKFRVAVSLGTPIMKPEWIYKAWERRNEQDFYAAVDDFRNEFKVPPFQDCILSFLGFSDEEKTNMEEMTEMQGGKYLPLGDERCTHLVVEENIVKDLPFEPSKKLYVVKQEWFWGSIQMDARAGETMYLYEKANTPELKKSVSMLSLNTPNSNRKRRRLKETLAQLSRETDVSPFPPRKRPSAEHSLSIGSLLDISNTPESSINYGDTPKSCTKSSKSSTPVPSKQSARWQVAKELYQTESNYVNILATIIQLFQVPLEEEGQRGGPILAPEEIKTIFGSIPDIFDVHTKIKDDLEDLIVNWDESKSIGDIFLKYSKDLVKTYPPFVNFFEMSKETIIKCEKQKPRFHAFLKINQAKPECGRQSLVELLIRPVQRLPSVALLLNDLKKHTADENPDKSTLEKAIGSLKEVMTHINEDKRKTEAQKQIFDVVYEVDGCPANLLSSHRSLVQRVETISLGEHPCDRGEQVTLFLFNDCLEIARKRHKVIGTFRSPHGQTRPPASLKHIHLMPLSQIKKVLDIRETEDCHNAFALLVRPPTEQANVLLSFQMTSDELPKENWLKMLCRHVANTICKADAENLIYTADPESFEVNTKDMDSTLSRASRAIKKTSKKVTRAFSFSKTPKRALRRALMTSHGSVEGRSPSSNDKHVMSRLSSTSSLAGIPSPSLVSLPSFFERRSHTLSRSTTHLI

SEQ ID NO: 17896 - protein, 12 aa, Homo sapiens
VLEKMKWGKWCQ

SEQ ID NO: 17897 - protein, 51 aa, Homo sapiens
RACGPGERARGMWRHSRINQKQENGWKSCLVGRTSWNWQDSSGSGYCSGAG

SEQ ID NO: 17898 - protein, 1242 aa, Homo sapiens
LVLAPSRPPAYQAMGASRDRGLAALWCLGLLGGLARVAGTHYRYLWRGCYPCHLGQAGYPVSAGDQRPDVDECRTHNGGCQHRCVNTPGSYLCECKPGFRLHTDSRTCLAINSCALGNGGCQHHCVQLTITRHRCQCRPGFQLQEDGRHCVRRSPCANRNGSCMHRCQVVRGLARCECHVGYQLAADGKACEDVDECAAGLAQCAHGCLNTQGSFKCVCHAGYELGADGRQCYRIEMEIVNSCEANNGGCSHGCSHTSAGPLCTCPRGYELDTDQRTCIDVDDCADSPCCQQVCTNNPGGYECGCYAGYRLSADGCGCEDVDECASSRGGCEHHCTNLAGSFQCSCEAGYRLHEDRRGCSPLEEPMVDLDGELPFVRPLPHIAVLQDELPQLFQDDDVGADEEEAELRGEHTLTEKFVCLDDSFGHDCSLTCDDCRNGGTCLLGLDGCDCPEGWTGLICNETCPPDTFGKNCSFSCSCQNGGTCDSVTGACRCPPGVSGTNCEDGCPKGYYGKHCRKKCNCANRGRCHRLYGACLCDPGLYGRFCHLTCPPWAFGPGCSEECQCVQPHTQSCDKRDGSCSCKAGFRGERCQAECELGYFGPGCWQACTCPVGVACDSVSGECGKRCPAGFQGEDCGQECPVGTFGVNCSSSCSCGGAPCHGVTGQCRCPPGRTGEDCEADCPEGRWGLGCQEICPACQHAARCDPETGACLCLPGFVGSRCQDVCPAGWYGPSCQTRCSCANDGHCHPATGHCSCAPGWTGFSCQRACDTGHWGPDCSHPCNCSAGHGSCDAISGLCLCEAGYVGPRCEQQCPQGHFGPGCEQRCQCQHGAACDHVSGACTCPAGWRGTFCEHACPAGFFGLDCRSACNCTAGAACDAVNGSCLCPAGRRGPRCAEKCLPRDVRAGCRHSGGCLNGGLCDPHTGRCLCPAGWTGDKCQSPCLRGWFGEACAQRCSCPPGAACHHVTGACRCPPGFTGSGCEQGCPPGRYGPGCEQLCGCLNGGSCDAATGACRCPTGFLGTDCNLTCPQGRFGPNCTHVCGCGQGAACDPVTGTCLCPPGRAGVRCERGCPQNRFGVGCEHTCSCRNGGLCHASNGSCSCGLGWTGRHCELACPPGRYGAACHLECSCHNNSTCEPATGTCRCGPGFYGQACEHRRSGATCNLDCRRGQFGPSCTLHCDCGGGADCDPVSGQCHCVDGYMGPTCREGGPLRLPENPSLAQGSAGTLPASSRPTSRSGGPARH

SEQ ID NO: 17899 - protein, 18 aa, Homo sapiens
VPQQYLFTQGNNPRRGTK

SEQ ID NO: 17900 - protein, 9 aa, Homo sapiens
KQRRMKKHS

SEQ ID NO: 17901 - protein, 11 aa, Homo sapiens
LPGQVEAWSSS

SEQ ID NO: 17902 - protein, 19 aa, Homo sapiens
MRSGFSEKGSSTPPRFFFQ

SEQ ID NO: 17903 - protein, 40 aa, Homo sapiens
RKYWWNQNHYLVLLKDDGLHVQFLMVSGIFRLKLFGKNKN

SEQ ID NO: 17904 - protein, 13 aa, Homo sapiens
LRLSNGPDITGDG

SEQ ID NO: 17905 - protein, 54 aa, Homo sapiens
VQPGMMIQGHTTIPRCSPVGASPLRPLNCQEGTGLLFPTSSPSRMSMRSSPEPM

SEQ ID NO: 17906 - protein, 7 aa, Homo sapiens
RKWRRSQ

SEQ ID NO: 17907 - protein, 11 aa, Homo sapiens
MVCPKIKFSIA

SEQ ID NO: 17908 - protein, 9 aa, Homo sapiens
KGENPEALG

SEQ ID NO: 17909 - protein, 17 aa, Homo sapiens
LVLLALKTVCRRESLNL

SEQ ID NO: 17910 - protein, 16 aa, Homo sapiens
LVSSCGLLPSHTAAEK

SEQ ID NO: 17911 - protein, 8 aa, Homo sapiens
VMVPMMLA

SEQ ID NO: 17912 - protein, 14 aa, Homo sapiens
LVPVLLWIFRNIHD

SEQ ID NO: 17913 - protein, 13 aa, Homo sapiens
MNSWENCRRKKKK

SEQ ID NO: 17914 - protein, 10 aa, Homo sapiens
LPLSVCSVTT

SEQ ID NO: 17915 - protein, 26 aa, Homo sapiens
LETLAIRRSKPTERQTVLSGPQRSNS

SEQ ID NO: 17916 - protein, 60 aa, Homo sapiens
LGSSGCVVFSSTTQWSWLFNRTFSRRISSICCSDIWVKQPFGMEQTASKHFEHMDFLEAG

SEQ ID NO: 17917 - protein, 9 aa, Homo sapiens
KLNKKMKLF

SEQ ID NO: 17918 - protein, 31 aa, Homo sapiens
VQPPESRRRKQSKIRKTVWLSFGIRWRFGYR

SEQ ID NO: 17919 - protein, 13 aa, Homo sapiens
LETEAKSVKAWRI

SEQ ID NO: 17920 - protein, 10 aa, Homo sapiens
IKLEKLLMFQ

SEQ ID NO: 17921 - protein, 17 aa, Homo sapiens
RKICHFRIINCHSHRMF

SEQ ID NO: 17922 - protein, 7 aa, Homo sapiens
KNGGSLG

SEQ ID NO: 17923 - protein, 10 aa, Homo sapiens
IRLVGMWPVA

SEQ ID NO: 17924 - protein, 12 aa, Homo sapiens
INCGSDETLSAL

SEQ ID NO: 17925 - protein, 12 aa, Homo sapiens
TILPKLKSRIRR

SEQ ID NO: 17926 - protein, 34 aa, Homo sapiens
VAPVTLGPPTLCSLGQNCFRLAAATWIFLIVLCH

SEQ ID NO: 17927 - protein, 9 aa, Homo sapiens
IESTSEDKT

SEQ ID NO: 17928 - protein, 23 aa, Homo sapiens
VAMLRRNLILMAPRSSFENMKQH

SEQ ID NO: 17929 - protein, 64 aa, Homo sapiens
TPASGRERRSPVCAFGPRFAPCRPLLITVPLAASPPRCLRRPPWRLRPPCRRGWAAALAAPPRR

SEQ ID NO: 17930 - protein, 25 aa, Homo sapiens
RRRREVEAVSKPFFPCDSIPSILKS

SEQ ID NO: 17931 - protein, 29 aa, Homo sapiens
MNITLSFKKKVENMIDYMKNIPAHPRKSK

SEQ ID NO: 17932 - protein, 14 aa, Homo sapiens
LERLMSSNILWPNT

SEQ ID NO: 17933 - protein, 10 aa, Homo sapiens
IPDGTNYVGL

SEQ ID NO: 17934 - protein, 30 aa, Homo sapiens
IMVNGHQLYNITCHILKNLFFQLCSTWLRM

SEQ ID NO: 17935 - protein, 70 aa, Homo sapiens
TQERHISERIQYAMDVAHKRERRRIQGFCSYNVVKTFSNAWPLCGLPSLGSHSGDSDTDHLHDVHEHVYW

SEQ ID NO: 17936 - protein, 17 aa, Homo sapiens
LLHPCVVPCFLRKVPCL

SEQ ID NO: 17937 - protein, 19 aa, Homo sapiens
LLLWPGHGDSRPCDSGGPL

SEQ ID NO: 17938 - protein, 53 aa, Homo sapiens
KVETGEAVRFFSVTSLTGQHGGEVRELWGSRGSVKWFEGYRYSGSRVCWPSSS

SEQ ID NO: 17939 - protein, 22 aa, Homo sapiens
LTQAGRFESWIKIIQNGYSDLC

SEQ ID NO: 17940 - protein, 31 aa, Homo sapiens
KTKSTVEWARMARCCPPRSSRDSWLAMWWPN

SEQ ID NO: 17941 - protein, 22 aa, Homo sapiens
LWAPALASMRLRHMLCPTWRRH

SEQ ID NO: 17942 - protein, 114 aa, Homo sapiens
LLALTTQLLPPLPALARSAPCCVITISGRMTFTSNKSMEIEVLVDADPVVDSSQKRYRAASAFFTYVSLSQEGRSLPVPQLVPETEDEKKRFEEGKGRYLQMKAKRQGHAEPQP

SEQ ID NO: 17943 - protein, 364 aa, Homo sapiens
LQLLEGADRRRGETMLLLRRSLSLNVLRKEVDRACFGEKAKQIMRPDDANVAGNVHGGTILKMIEEAGAIISTRHCNSQNGERCVAALARVERTDFLSPMCIGEVAHVSAEITYTSKHSVEVQVNVMSENILTGAKKLTNKATLWYVPLSLKNVDKVLEVPPVVYSRQEQEEEGRKRYEAQKLERMETKWRNGDIVQPVLNPEPNTVSYSQSSLIHLVGPSDCTLHGFVHGGVTMKLMDEVAGIVAARHCKTNIVTASVDAINFHDKIRKGCVITISGRMTFTSNKSMEIEVLVDADPVVDSSQKRYRAASAFFTYVSLSQEGRSLPVPQLVPETEDEKKRFEEGKGRYLQMKAKRQGHAEPQP

SEQ ID NO: 17944 - protein, 400 aa, Homo sapiens
LGSAGHHTCHWVNSLPTYRRMKLLARALRLCEFGRQASSRRLVAGQGCVGPRRGCCAPVQVVGPRADLPPCGACITGRIMRPDDANVAGNVHGGTILKMIEEAGAIISTRHCNSQNGERCVAALARVERTDFLSPMCIGEVAHVSAEITYTSKHSVEVQVNVMSENILTGAKKLTNKATLWYVPLSLKNVDKVLEVPPVVYSRQEQEEEGRKRYEAQKLERMETKWRNGDIVQPVLNPEPNTVSYSQSSLIHLVGPSDCTLHGFVHGGVTMKLMDEVAGIVAARHCKTNIVTASVDAINFHDKIRKGCVITISGRMTFTSNKSMEIEVLVDADPVVDSSQKRYRAASAFFTYVSLSQEGRSLPVPQLVPETEDEKKRFEEGKGRYLQMKAKRQGHAEPQP

SEQ ID NO: 17945 - protein, 434 aa, Homo sapiens
LPGPPRRQNRTPARALCSLGGLGGGARGGAGAGAGSARGGRVRLPPARRPRLTSPIAPPLPSPFMARPGLIHSAPGLPDTCALLQPPAASAAAAPSMSGPDVETPSAIQICRIMRPDDANVAGNVHGGTILKMIEEAGAIISTRHCNSQNGERCVAALARVERTDFLSPMCIGEVAHVSAEITYTSKHSVEVQVNVMSENILTGAKKLTNKATLWYVPLSLKNVDKVLEVPPVVYSRQEQEEEGRKRYEAQKLERMETKWRNGDIVQPVLNPEPNTVSYSQSSLIHLVGPSDCTLHGFVHGGVTMKLMDEVAGIVAARHCKTNIVTASVDAINFHDKIRKGCVITISGRMTFTSNKSMEIEVLVDADPVVDSSQKRYRAASAFFTYVSLSQEGRSLPVPQLVPETEDEKKRFEEGKGRYLQMKAKRQGHAEPQP

SEQ ID NO: 17946 - protein, 296 aa, Homo sapiens
LQPPAASAAAAPSMSGPDVETPSAIQICRIMRPDDANVAGNVHGGTILKMIEEAGAIISTRHCNSQNGERCVAALARVERTDFLSPMCIGEVAHVSAEITYTSKHSVEVQVNVMSENILTGAKKLTNKATLWYVPLSLKNVDKVLEVPPVVYSRQEQEEEGRKRYEAQKLERMETKWRNGDIVQPVLNPEPNTVSYSQSSLIHLVGPSDCTLHGFVHGGVTMKLMDEVAGIVAARHCKTNIVTASVDAINFHDKIRKAHVMPAGADHTAPSSSPSTGTKCSLLRHHHLGTHDLHEQ

SEQ ID NO: 17947 - protein, 259 aa, Homo sapiens
LQPPAASAAAAPSMSGPDVETPSAIQICRIMRPDDANVAGNVHGGTILKMIEEAGAIISTRHCNSQNGERCVAALARVERTDFLSPMCIGEVAHVSAEITYTSKHSVEVQVNVMSENILTGAKKLTNKATLWYVPLSLKNVDKVLEVPPVVYSRQEQEEEGRKRYEAQKLERMETKWRNGDIVQPVLNPEPNTVSYSQSSLIHLVGPSDCTLHGFVHGGVTMKLMDEVAGIVAARHCKTNIVTASVDAINFHDKIRKAP

SEQ ID NO: 17948 - protein, 62 aa, Homo sapiens
KNMEADIITNLRCRLKEAEEERLKAAQYGLQLVESQNELQNQLDKCRNEMMTMTERLLDLTC

SEQ ID NO: 17949 - protein, 607 aa, Homo sapiens
KNMEADIITNLRCRLKEAEEERLKAAQYGLQLVESQNELQNQLDKCRNEMMTMTESYEQEKYTLQREVELKSRMLESLSCECEAIKQQQKMHLEKLEEQLSRSHGQEVNELKTKIEKLKVELDEARLSEKQLKHQVDHQKELLSCKSEELRVMSERVQESMSSEMLALQIELTEMESMKTTLKEEVNELQYRQEQLELLITNLMRQVDRLKEEKEEREKEAVSYYNALEKARVANQDLQVQLDQALQQALDPNSKGNSLFAEVEDRRAAMERQLISMKVKYQSLKKQNVFNREQMQRMKLQIATLLQMKGSQTEFEQQERLLAMLEQKNGEIKHLLGEIRNLEKFKNLYDSMESKPSVDSGTLEDNTYYTDLLQMKLDNLNKEIESTKGELSIQRMKALFESQRALDIERKLFANERCLQLSESENMKLRAKLDELKLKYEPEETVEVPVLKKRREVLPVDITTAKDACVNNSALGGEVYRLPPQKEETQSCPNSLEDNNLQLEKSVSIYTPVVSLSPHKNLPVDMQLKKEKKCVKLIGVPADAEALSERSGNTPNSPRLAAESKLQTEVKEGKETSSKLEKETCKKLHPILYVSSKSTPETQCPQQ

SEQ ID NO: 17950 - protein, 33 aa, Homo sapiens
LSHKARPSRARQGQRSSTRLLPTLPPRVASRFP

SEQ ID NO: 17951 - protein, 11 aa, Homo sapiens
RPLPLSRAPRT

SEQ ID NO: 17952 - protein, 10 aa, Homo sapiens
ILDWLMLEIR

SEQ ID NO: 17953 - protein, 10 aa, Homo sapiens
LASWLSTFWG

SEQ ID NO: 17954 - protein, 25 aa, Homo sapiens
VLSPDSGQLWHVHVFGAGHLLPLHE

SEQ ID NO: 17955 - protein, 34 aa, Homo sapiens
MQKLAGQKMWELLPLRSIFLLNMLIKQSWKNMMV

SEQ ID NO: 17956 - protein, 17 aa, Homo sapiens
MLLTGLSPALGMDGMPW

SEQ ID NO: 17957 - protein, 18 aa, Homo sapiens
TVCPGSCRRYCCICHRKC

SEQ ID NO: 17958 - protein, 21 aa, Homo sapiens
VILNQGLIQELVWHQMSSLKT

SEQ ID NO: 17959 - protein, 20 aa, Homo sapiens
LEFHLMSCSREDIQTMRFHS

SEQ ID NO: 17960 - protein, 41 aa, Homo sapiens
TRGWPTWILANSGLSSFLVSEGPFCFQGGACEVRVSAGPAF

SEQ ID NO: 17961 - protein, 10 aa, Homo sapiens
VPGHPRLPRS

SEQ ID NO: 17962 - protein, 22 aa, Homo sapiens
MEVQDSKIYFLPFPAELPETSE

SEQ ID NO: 17963 - protein, 11 aa, Homo sapiens
RNPAKPKSPSM

SEQ ID NO: 17964 - protein, 25 aa, Homo sapiens
RHRRRMARSASAAARRAIPCTCTRC

SEQ ID NO: 17965 - protein, 16 aa, Homo sapiens
LTWSTSTPRVLPRCLS

SEQ ID NO: 17966 - protein, 33 aa, Homo sapiens
VSRARSPASPWPPSRKRTALRSGAGAGRASSLR

SEQ ID NO: 17967 - protein, 143 aa, Homo sapiens
LPVALSPEVEQAWQGPDCVILVLWQVRLMQESVRRIIEAEESRMGLIIVNAWYGKFVNDKSRKSEKVKVIDVTVPLQCLVKDSKLILTEASKAGLPGFYDPCVGEEKNLKVLYQFRGVLHQVMVLDSEALRIPKQSHRIDTDG

SEQ ID NO: 17968 - protein, 19 aa, Homo sapiens
LATRLATIRRPASSRATCS

SEQ ID NO: 17969 - protein, 88 aa, Homo sapiens
KINRLGKKRKCSRRRSSSSSNSNSSSKKKSEIPEKAGGRRMWMMMEKRKSSWSVLRSSQCQPVMRRMKYPPQNPAEGRKPRVVMFLQP

SEQ ID NO: 17970 - protein, 16 aa, Homo sapiens
IRRCSTIHKTKAAWSF

SEQ ID NO: 17971 - protein, 27 aa, Homo sapiens
LVTVLVCTVRTSQCFPLAFQTSQVKPW

SEQ ID NO: 17972 - protein, 50 aa, Homo sapiens [sequence omitted]

SEQ ID NO: 17973 - protein, 12 aa, Homo sapiens
LEMEEKEDQRQI

SEQ ID NO: 17974 - protein, 12 aa, Homo sapiens
RDSGDHQGQEKN

SEQ ID NO: 17975 - protein, 9 aa, Homo sapiens
LATDHLRKN

SEQ ID NO: 17976 - protein, 11 aa, Homo sapiens
IRAKKHPKTKE

SEQ ID NO: 17977 - protein, 37 aa, Homo sapiens
IAGSWGCTCGEAYRSGLQLDLGLPAGLRGCHRRPCWG

SEQ ID NO: 17978 - protein, 19 aa, Homo sapiens
MFWRRFHQNGRMYLNIWKI

SEQ ID NO: 17979 - protein, 20 aa, Homo sapiens
LQKPEDQGVESSPAALRSQE

SEQ ID NO: 17980 - protein, 7 aa, Homo sapiens
THEANSS

SEQ ID NO: 17981 - protein, 352 aa, Homo sapiens
RKLEANMESVSCSAAAVRTGDMESQRDLSLVPERLQRREQERQLEVERRKQKRQNQEVEKENSHFFVATFVRERAAVEELLERAESVERLEEAASRLQGLQKLINDSVFFLAAYDLRQGQEALARLQAALAERRRGLQPKKRFAFKTRGKDAASSTKVDAAPGIPPAVESIQDSPLPKKAEGDLGPSWVCGFSNLESQVLEKRASELHQRDVLLTELSNCTVRLYGNPNTLRLTKAHSCKLLCGPVSTSVFLEDCSDCVLAVACQQLRIHSTKDTRIFLQVTSRAIVEDCSGIQFAPYTWSYPEIDKDFESSGLDRSKNNWNDVDDFNWLARDMASPNWSILPEEERNIQWD

SEQ ID NO: 17982 - protein, 14 aa, Homo sapiens
IGSSVLRDQKMLTS

SEQ ID NO: 17983 - protein, 29 aa, Homo sapiens
LGRWPFHSLRAASLTGFYKMAQPIPSLET

SEQ ID NO: 17984 - protein, 15 aa, Homo sapiens
RSTLTPAFRPRPWAS

SEQ ID NO: 17985 - protein, 29 aa, Homo sapiens
RLSLRRRRRMVRSVSAAARRAILSMCTRF

SEQ ID NO: 17986 - protein, 12 aa, Homo sapiens
MEWPYACSCKTP

SEQ ID NO: 17987 - protein, 378 aa, Homo sapiens
LFLPGVSKAVEHINKTIAPALVSKKLNVTEQEKIDKLMIEMDGTENKSKFGANAILGVSLAVCKAGAVEKGVPLYRHIADLAGNSEVILPVPAFNVINGGSHAGNKLAMQEFMILPVGAANFREAMRIGAEVYHNLKNVIKEKYGKDATNVGDEGGFAPNILENKEGLELLKTAIGKAGYTDKVVIGMDVAASEFFRSGKYDLDFKSPDDPSRYISPDQLADLYKSFIKDYPVVSIEDPFDQDDWGAWQKFTASAGIQVVGDDLTVTNPKRIAKAVNEKSCNCLLLKVNQIGSVTESLQACKLAQANGWGVMVSHRSGETEDTFIADLVVGLCTGQIKTGAPCRSERLAKYNQLLRIEEELGSKAKFAGRNFRNPLAK

SEQ ID NO: 17988 - protein, 33 aa, Homo sapiens
KQDTWNCGKVGEEMGRTRVGEDVPAGMKSGGGS

SEQ ID NO: 17989 - protein, 63 aa, Homo sapiens
MSILKIHAREIFDSRGNPTVEVDLFTSKGLFRAAVPSGASTGIYEALELRDNDKTRYMGKGKP

SEQ ID NO: 17990 - protein, 9 aa, Homo sapiens
RRKAAVGGN

SEQ ID NO: 17991 - protein, 11 aa, Homo sapiens
ILMLNHLTFTS

SEQ ID NO: 17992 - protein, 8 aa, Homo sapiens
RAVLERFF

SEQ ID NO: 17993 - protein, 8 aa, Homo sapiens
IVLCPRLH

SEQ ID NO: 17994 - protein, 7 aa, Homo sapiens
TGSFLCC

SEQ ID NO: 17995 - protein, 7 aa, Homo sapiens
VPGSCLV

SEQ ID NO: 17996 - protein, 9 aa, Homo sapiens
IYINRRWWS

SEQ ID NO: 17997 - protein, 21 aa, Homo sapiens
LAPHQARGRADPWTRAGHRGG

SEQ ID NO: 17998 - protein, 18 aa, Homo sapiens
MLLISWTNFQFLGSASVT

SEQ ID NO: 17999 - protein, 128 aa, Homo sapiens
VQVSWACQTHRAAPSYFCPATALPSQLSTCLPEVNFQKQESPEPGRGMNREGAPGKSPEEMYIQQKVRVLLMLRKMGSNLTASEEEFLRTYAGVVNSQLSQLPPHSIDQGAEDVVMAFSRSETEDRRQ

SEQ ID NO: 18000 - protein, 174 aa, Homo sapiens
LWVDSYCIRCCIFPSSGASASFLIFLPFSSSCHCPCLQTGQGLVTHQEFLSRYRFPQAAPSYFCPATALPSQLSTCLPEVNFQKQESPEPGRGMNREGAPGKSPEEMYIQQKVRVLLMLRKMGSNLTASEEEFLRTYAGVVNSQLSQLPPHSIDQGAEDVVMAFSRSETEDRRQ

SEQ ID NO: 18001 - protein, 146 aa, Homo sapiens
LRAGPAAPAGPAGSGGPGTDRLDNGDSTGAAPSYFCPATALPSQLSTCLPEVNFQKQESPEPGRGMNREGAPGKSPEEMYIQQKVRVLLMLRKMGSNLTASEEEFLRTYAGVVNSQLSQLPPHSIDQGAEDVVMAFSRSETEDRRQ

SEQ ID NO: 18002 - protein, 163 aa, Homo sapiens
LRRPLLLLLLPPPQRLLGLSTPRNRPPRAARRTRCPCRPGRVGRPRAAPSYFCPATALPSQLSTCLPEVNFQKQESPEPGRGMNREGAPGKSPEEMYIQQKVRVLLMLRKMGSNLTASEEEFLRTYAGVVNSQLSQLPPHSIDQGAEDVVMAFSRSETEDRRQ

SEQ ID NO: 18003 - protein, 26 aa, Homo sapiens
IFADYPVEGKCLKSKEAGKHPQMAGS

SEQ ID NO: 18004 - protein, 8 aa, Homo sapiens
RRWRSWSS

SEQ ID NO: 18005 - protein, 20 aa, Homo sapiens
VFGCRAKSAVKKTHTPPSSS

SEQ ID NO: 18006 - protein, 8 aa, Homo sapiens
LGKEPWTS

SEQ ID NO: 18007 - protein, 17 aa, Homo sapiens
LLPLMKKRCLSLPSPTF

SEQ ID NO: 18008 - protein, 14 aa, Homo sapiens
RMELRGLQELLCAW

SEQ ID NO: 18009 - protein, 30 aa, Homo sapiens
MWPNSPGLAISLPRNSVHGLFWSVGDLFTH

SEQ ID NO: 18010 - protein, 35 aa, Homo sapiens
IILFKLAPSVSLWSVSPYLRKSSHLTGTHPSGHPA

SEQ ID NO: 18011 - protein, 10 aa, Homo sapiens
KDGVGGQRLR

SEQ ID NO: 18012 - protein, 41 aa, Homo sapiens
MCHFRLLCVSSGHVRGGWVRETGSSDSTTLDNISENLPARG

SEQ ID NO: 18013 - protein, 35 aa, Homo sapiens
MPCSLSLTSLGRLLYSKGMKETTSMSLIKGKWMCT

SEQ ID NO: 18014 - protein, 30 aa, Homo sapiens
KIPSVAARLFLGTCAGMRPACVNTPSEEWS

SEQ ID NO: 18015 - protein, 8 aa, Homo sapiens
VGQQKRNL

SEQ ID NO: 18016 - protein, 10 aa, Homo sapiens
RTLHKDPFYR

SEQ ID NO: 18017 - protein, 8 aa, Homo sapiens
INLESARF

SEQ ID NO: 18018 - protein, 67 aa, Homo sapiens
MPRAAETLTRRGVCLTKAGEGAKRRRSCFWKGKAALAGGPCPGPAQLQGVPRCPVLSAVINLCGPSS

SEQ ID NO: 18019 - protein, 49 aa, Homo sapiens
RAMGWTSLTSRSASSLCPSLPAALRSPTCTTYRRSRACSSPSTGTTTWY

SEQ ID NO: 18020 - protein, 14 aa, Homo sapiens
VALAWKILEAPSRK

SEQ ID NO: 18021 - protein, 20 aa, Homo sapiens
KTLPSSGTRRIFQENKPSPC

SEQ ID NO: 18022 - protein, 15 aa, Homo sapiens
LFETAIPSEGPMAWP

SEQ ID NO: 18023 - protein, 28 aa, Homo sapiens
LVPQRRSENSPPSLDPPMPLEALETAVG

SEQ ID NO: 18024 - protein, 34 aa, Homo sapiens
LDRVGQTQWEKDENNKKQKQTATTTTTKTMHLIK

SEQ ID NO: 18025 - protein, 231 aa, Homo sapiens
LSRGLAGGRRRNPLNGAPPGGARGRAELRTLSARAARRSRRGGKIRPGRAPPPLLGPPAFAQGRPAVMEEEAETEEQQRFSYQQRLKAAVHYTVGCLCEEVALDKEMQFSKQTIAAISELTFRQCENFAKDLEMFARHAKRTTINTEDVKLLARRSNSLHMQEAAGIRKSSLLTFLAWWFEWTSQASAGPLIGEEAREVARRQEGAPPQQSARRDRMPCRNFFWKTFSSCK

SEQ ID NO: 18026 - protein, 14 aa, Homo sapiens
IHQLLLWISPVGGS

SEQ ID NO: 18027 - protein, 117 aa, Homo sapiens
LRTLSARAARRSRRGGKIRPGRAPPPLLGPPAFAQGRPAVMEEEAETEEQQRFSYQQRLKAAVHYTVGCLCEEVALDKEMQFSKQTIAAISELTFRQCENFAKDLEMFASICRKRQE

SEQ ID NO: 18028 - protein, 12 aa, Homo sapiens
VEPWRLHWGRSS

SEQ ID NO: 18029 - protein, 12 aa, Homo sapiens
MLRMGYLPRMDH

SEQ ID NO: 18030 - protein, 26 aa, Homo sapiens
RRSYLMMNYSWSWNQCRRISWGGQVP

SEQ ID NO: 18031 - protein, 29 aa, Homo sapiens
VPSQKCQIAQQLCWALAANSRSFPHCATW

SEQ ID NO: 18032 - protein, 11 aa, Homo sapiens
RTLKSSHCFFV

SEQ ID NO: 18033 - protein, 139 aa, Homo sapiens
VMEEEAETEEQQRFSYQQRLKAAVHYTVGCLCEEVALDKEMQFSKQTIAAISELTFRQCENFAKDLEMFARHAKRTTINTEDVKLLARRSNSLLKYITDKSEEIAQINLERKAQKKKKSEDGSKNSRQPAEAGVVESEN

SEQ ID NO: 18034 - protein, 12 aa, Homo sapiens
TFLFWSPAASWS

SEQ ID NO: 18035 - protein, 11 aa, Homo sapiens
LMPMVSAATGR

SEQ ID NO: 18036 - protein, 26 aa, Homo sapiens
IRGLTPKVYEEKAEAELKRWTRVTPR

SEQ ID NO: 18037 - protein, 48 aa, Homo sapiens
VKLIFLLPRSRARELAARGPCPPARDESCGRSRVQHPPGHRLLQGYSL

SEQ ID NO: 18038 - protein, 43 aa, Homo sapiens
IFLLPRSRARELAARGPCPPARDESCGRSRVQHPPGHRLLQEV

SEQ ID NO: 18039 - protein, 63 aa, Homo sapiens
MASLAPAALLPPAPAGTTVLGPSPTKEQLRFPEVPGLAGGIVDASLTSLCMCPGCCAGRKNGG

SEQ ID NO: 18040 - protein, 19 aa, Homo sapiens
KLHAEPRTPCSRMMLSGIH

SEQ ID NO: 18041 - protein, 31 aa, Homo sapiens
IPEIQVKKQKTSSSSTLVRNILGLLCASLVV

SEQ ID NO: 18042 - protein, 80 aa, Homo sapiens
MTPLHSSVATVRLRLKKKKKKVPPLMCPWPGPQSTNFQEPVQPLTQQQVAQMQLKYYNSDVHRAAFVLPEFARKALNDVS

SEQ ID NO: 18043 - protein, 15 aa, Homo sapiens
RHLSSCAYSSQSKSE

SEQ ID NO: 18044 - protein, 9 aa, Homo sapiens
TTRTVETQT

SEQ ID NO: 18045 - protein, 15 aa, Homo sapiens
TELLCVRKSKENDSF

SEQ ID NO: 18046 - protein, 14 aa, Homo sapiens
IWKRGVSFSVLCRG

SEQ ID NO: 18047 - protein, 14 aa, Homo sapiens
ITTRPTSAPGSWKP

SEQ ID NO: 18048 - protein, 9 aa, Homo sapiens
TCQMVLPGA

SEQ ID NO: 18049 - protein, 12 aa, Homo sapiens
IASRMPLAWKLR

SEQ ID NO: 18050 - protein, 12 aa, Homo sapiens
IWCPVASRESTL

SEQ ID NO: 18051 - protein, 25 aa, Homo sapiens
LQNWDVELEVPPLLGCAGHSHTLHR

SEQ ID NO: 18052 - protein, 8 aa, Homo sapiens
LSLLDCWS

SEQ ID NO: 18053 - protein, 10 aa, Homo sapiens
IKRQPTADCL

SEQ ID NO: 18054 - protein, 50 aa, Homo sapiens
IFGPHAPAPDSPLFALAEEQVGQEARAQQPWIPEKHPWSRRWQFTEFESP

SEQ ID NO: 18055 - protein, 13 aa, Homo sapiens
IVGSLSFLVPRPS

SEQ ID NO: 18056 - protein, 154 aa, Homo sapiens
LSSGPAPQRPRRRRREGAGQTKEADKGGRSPAAVRAPGEAGPLLPVAGRMTTLTRQDLNFGQVVADVLCEFLEVAVHLILYVREVYPVGIFQKRKKYNVPVQMSCHPELNQYIQDTLHCVKPLLEKVRVHWAPQPSHPMLTPVPVCSQSNSGMG

SEQ ID NO: 18057 - protein, 20 aa, Homo sapiens
IASCMLGTTRNLSKTCCQSL

SEQ ID NO: 18058 - protein, 11 aa, Homo sapiens
ILMAWRRLIEP

SEQ ID NO: 18059 - protein, 12 aa, Homo sapiens
KCNDYTPGYVGK

SEQ ID NO: 18060 - protein, 17 aa, Homo sapiens
IPDCLLNHRPSELREGI

SEQ ID NO: 18061 - protein, 16 aa, Homo sapiens
VPRSVCIRRESLCSGV

SEQ ID NO: 18062 - protein, 11 aa, Homo sapiens
RRCAPARRGFR

SEQ ID NO: 18063 - protein, 21 aa, Homo sapiens
MILIHSEIYKGCYPAGFLLFS

SEQ ID NO: 18064 - protein, 64 aa, Homo sapiens
MELDFLERTGCLSPLKTPISRIQHRPAPCLRRSNPHTSSILLQWWGACSGISNTIWTSGGKTCT

SEQ ID NO: 18065 - protein, 88 aa, Homo sapiens
RPTRRCARSTKMSGIVCRRKPSPSGSTSTSSRPRGTSVTCMKTSAMATTSSPCWRSSRGTACPGRRGGCVSTSCRMSRLPWTTSGTAR

SEQ ID NO: 18066 - protein, 1205 aa, Homo sapiens
KRGPELRAYAGPVSEMPVRGDRGFPPRRELSGWLRAPGMEELIWEQYTVTLQKDSKRGFGIAVSGGRDNPHFENGETSIVISDVLPGGPADGLLQENDRVVMVNGTPMEDVLHSFAVQQLRKSGKVAAIVVKRPRKVQVAALQASPPLDQDDRAFEVMDEFDGRSFRSGYSERSRLNSHGGRSRSWEDSPERGRPHERARSRERDLSRDRSRGRSLERGLDQDHARTRDRSRGRSLERGLDHDFGPSRDRDRDRSRGRSIDQDYERAYHRAYDPDYERAYSPEYRRGARHDARSRGPRSRSREHPHSRSPSPEPRGRPGPIGVLLMKSRANEEYGLRLGSQIFVKEMTRTGLATKDGNLHEGDIILKINGTVTENMSLTDARKLIEKSRGKLQLVVLRDSQQTLINIPSLNDSDSEIEDISEIESNRSFSPEERRHQYSDYDYHSSSEKLKERPSSREDTPSRLSRMGATPTPFKSTGDIAGTVVPETNKEPRYQEDPPAPQPKAAPRTFLRPSPEDEAIYGPNTKMVRFKKGDSVGLRLAGGNDVGIFVAGIQEGTSAEQEGLQEGDQILKVNTQDFRGLVREDAVLYLLEIPKGEMVTILAQSRADVYRDILACGRGDSFFIRSHFECEKETPQSLAFTRGEVFRVVDTLYDGKLGNWLAVRIGNELEKGLIPNKSRAEQMASVQNAQRDNAGDRADFWRMRGQRSGVKKNLRKSREDLTAVVSVSTKFPAYERVLLREAGFKRPVVLFGPIADIAMEKLANELPDWFQTAKTEPKDAGSEKSTGVVRLNTVRQIIEQDKHALLDVTPKAVDLLNYTQWFPIVIFFNPDSRQGVKTMRQRLNPTSNKSSRKLFDQANKLKKTCAHLFTATINLNSANDSWFGSLKDTIQHQQGEAVWVSEGKMEGMDDDPEDRMSYLTAMGADYLSCDSRLISDFEDTDGEGGAYTDNELDEPAEEPLVSSITRSSEPVQHEESIRKPSPEPRAQMRRAASSDQLRDNSPPPAFKPEPPKAKTQNKEESYDFSKSYEYKSNPSAVAGNETPGASTKGYPPPVAAKPTFGRSILKPSTPIPPQEGEEVGESSEEQDNAPKSVLGKVKIFEKMDHKARLQRMQELQEAQNARIEIAQKHPDIYAVPIKTHKPDPGTPQHTSSRPPEPQKAPSRPYQDTRGSYGSDAEEEEYRQQLSEHSKRGYYGQSARYRDTEL

SEQ ID NO: 18067 - protein, 25 aa, Homo sapiens
RGAHASESLLLLSMPAPGHLCPLRP

SEQ ID NO: 18068 - protein, 27 aa, Homo sapiens
LHNTSPTSSSKLLARWVLASPRPWAMG

SEQ ID NO: 18069 - protein, 83 aa, Homo sapiens
KSCYPTPVEAVGGKALPCIVDVRDEQQISAAVEKAIKKFGGIDILVNNASAISLTNTLDTPTKRLDLMMNVNTRGTYLALYHC

SEQ ID NO: 18070 - protein, 35 aa, Homo sapiens
MSVFEAVGVARGSETEQSDWPHASVLDAPLHRRPF

SEQ ID NO: 18071 - protein, 9 aa, Homo sapiens
VQRQSGKSR

SEQ ID NO: 18072 - protein, 36 aa, Homo sapiens
MENPPISKPITECIQVNGPFPARGQTALKSSPAQTS

SEQ ID NO: 18073 - protein, 22 aa, Homo sapiens
LRTRGMARIRSAPNAEGKTSSL

SEQ ID NO: 18074 - protein, 145 aa, Homo sapiens
LCSRASALLGDPGVGCGGRLQRLPPVPPEGLQEANSAEAPPVLPGPDLPAQARACGFQTQEELNEKIYIMKADTVIVGTVKAELPEGRGLAGPAEPELEEELEADHTPHYPEQETEPPLGSCSDVMLSVEEEGKEDPLPTAASGK

SEQ ID NO: 18075 - protein, 10 aa, Homo sapiens
MGLPWLTCGI

SEQ ID NO: 18076 - protein, 75 aa, Homo sapiens
VLQPEAETAGWSWGSVQGGGGSPVGNGVLQVSSGGLESITSGQVQWLTPMIPALWEAEAGGSPEVRSSRPAWPTW

SEQ ID NO: 18077 - protein, 43 aa, Homo sapiens
LPATSNPPPAICTLRLHSGVPAAPRLLPCCPRPHHLLSGNFRN

SEQ ID NO: 18078 - protein, 26 aa, Homo sapiens
LQPRASFLAVLGHTISFQGISGTRDD

SEQ ID NO: 18079 - protein, 10 aa, Homo sapiens
MKLSSRAGAG

SEQ ID NO: 18080 - protein, 100 aa, Homo sapiens
LRGGSLEPRSLRLQRAMIAPLHSSLSNRVRPCLLKKKKVRLLGLARFLPTLDPHEDMMERTCPLVDSPGRTSGFLGITGQSREAMNLETLWGLGSLVCVC

SEQ ID NO: 18081 - protein, 38 aa, Homo sapiens
IWSKCVSIYPVCQPLIRIPGPCFCVGTQMLGSPASSTR

SEQ ID NO: 18082 - protein, 438 aa, Homo sapiens
TALLKTASLPQHQHRRRRLQQQQQQVGTFRVMQQKAFEESRYPWQESFENVAVCLPLRCPRCGDHTRFRSLSSLRAHLEFSHSYEERTLLTKCSLFPSLKDTDLVTSSELLKPGKLQSSGNVVKQKPSYVNLYSISHEHSKDRKPFEVVAERPVSYVQTYTAMDLHADSLDGTRSGPGLPTSDTKASFEAHVREKFNRMVEAVDRTIEKRIDKLTKELAQKTAELLEVRAAFVQLTQKKQEVQRRERALNRQVDVAVEMIAVLRQRLTESEEELLRKEEEVVTFNHFLEAAAEKEVQGKARLQDFIENLLQRVELAEKQLEYYQSQQASGFVRDLSGHVLTDISSNRKPKCLSRGHPHSVCNHPDLKAHFHPKGRNHLKKAKDDRASMQPAKAIHEQAESSRDLCRPPKKGELLGFGRKGNIRPKMAKKKPTAIVNII

SEQ ID NO: 18083 - protein, 61 aa, Homo sapiens
TPRSSSCEVRTLLERKWLLHHHPPQLVGSVEVLSLDLVSVSQTLPHHGKPFSPTPKELERC

SEQ ID NO: 18084 - protein, 13 aa, Homo sapiens
VPPEVRTQQRCGG

SEQ ID NO: 18085 - protein, 24 aa, Homo sapiens
MPRDPRRSWNAFQVHSFMCEQDGG

SEQ ID NO: 18086 - protein, 24 aa, Homo sapiens
LRMGWRRVRVRCLALRAAGHGGLD

SEQ ID NO: 18087 - protein, 26 aa, Homo sapiens
IRHRNEKRGDTAKANRGEREKREAKI

SEQ ID NO: 18088 - protein, 21 aa, Homo sapiens
TLTEQAVQFHVPLKYVSPTGS

SEQ ID NO: 18089 - protein, 10 aa, Homo sapiens
LGKVEGSVPK

SEQ ID NO: 18090 - protein, 19 aa, Homo sapiens
MTSLKSQDPWFYTFVSGSI

SEQ ID NO: 18091 - protein, 18 aa, Homo sapiens
KLGTATTKPTKADRRRRT

SEQ ID NO: 18092 - protein, 55 aa, Homo sapiens
LNWRAACVCVCVCVCQARGGGGTDYGLCFDKETASCRKLTSREGKMAQEPAPPEF

SEQ ID NO: 18093 - protein, 142 aa, Homo sapiens
IFQWRQLENLYFREKKFSVEVHDPRRASVTRRTFGHSGIAVHTWYACPALIKSIWAMAISQHQFYLDRKQSKSKIHAARSLSEIAIDLTETGTLKTSKLANMGSKGKIISGSSGSLLSSGSGARRHCILLPGLKRRIVISLL

SEQ ID NO: 18094 - protein, 47 aa, Homo sapiens
TQGFSDKEDVWAQRHCSAHVVCMSGIDQVHLGYGHKPTPVLSGQKAE

SEQ ID NO: 18095 - protein, 16 aa, Homo sapiens
VPGDTAFYSQVGFSGF

SEQ ID NO: 18096 - protein, 34 aa, Homo sapiens
IPSVSKTDEPRVAPDNVLLAECALISGAESPRVF

SEQ ID NO: 18097 - protein, 32 aa, Homo sapiens
LTTSSWQNVRSYPVLSRPGSSEQLEHFWLAAE

SEQ ID NO: 18098 - protein, 80 aa, Homo sapiens
MRLKEAVLPCVCRPGGELLFVLLALPPHPLLHTQLSPAGVWSSPAGSWETHSDTGSVSRVSNNVHSIGKFTPKISKCPRK

SEQ ID NO: 18099 - protein, 32 aa, Homo sapiens
VSPGSQTMFIASGSSLQRFPNAPENDFLTWRE

SEQ ID NO: 18100 - protein, 7 aa, Homo sapiens
MPPKMTF

SEQ ID NO: 18101 - protein, 12 aa, Homo sapiens
MKILWIRIEMCS

SEQ ID NO: 18102 - protein, 9 aa, Homo sapiens
KPEKLDTVK

SEQ ID NO: 18103 - protein, 9 aa, Homo sapiens
IKIFTENFL

SEQ ID NO: 18104 - protein, 17 aa, Homo sapiens
TRPSNKAEGRRSTEEEI

SEQ ID NO: 18105 - protein, 1360 aa, Homo sapiens
IMYSVEDLLISHGYKLSRDPPASREDNPKGRQAARTGTRAGQGLQNGHEDGPAALAHRKTSAGKGHVSDSESRRSTPRGHGEPQSTSASRTSEAGFCNQPPSAWSSHPPTGNDQAYRRRGRQEARSQKPREHENLEARGMAQAHSLPVHVREGPWEVGGRSEHVMKKPVWEEELRMSGPAKWQNVSLESWNQPRKLGRQMSDGDGERLFQDLYPFIQGEHVLNSQNKGKSRSLPRVLSPESLSCTEIPIPLNERHSPKMPPYPPTCAPNLDSTRNSEKSGCSAPFPRPKFGRPLKPPSYSSHQQSRGGADSSDSQDSQQMDAYVPRHELCLSDPGLEPPVYVPPPSYRSPPQNIPNPYLEDTVPINVCGGHSQQQSPTEKAGASGQPPSGPPGTGNEYGVSPRLPQGLPAHPRPVTAYDGFVQYIPFDDPRLRHFKLAQPQGFCEDIKLDDKSYNSSPVTAQEPAHGGMQPDGAIWNPQSLIPPSGDERGLVLADSSPRWLWGQPPGDGENSGLPNQRDRCVARGQWPDVRGSQHGHTGRQVSSPYSQGESTCETQTKLKKFQTGTRTKKSSKKKMNETIFCLVSIPVKSESHLPDRDMDNNDLKPSADQKNGSDKSPALQEQSLLSMSSTDLELQALTGSMGGRTEFQKQDLGEPEEDRQTNDLSFIHLTKHRELKHSGSWPGHRYRDQQTQTSFSEEPQSSQLLPGAKLGGPSRAALSPKCSDPAASEAQTHTAFPTGDHKQRPSARNLKGHRSLSPSSNSAFSRTSLSVDQAPTPKAGRSQPCVDVHGLGAHPGPKREVVKGEPTGPCNSKQLFGQFLLKPVSRRPWDLISQLESFNKELQEEEESSSSSSSSSSSSEESEAEPQQENRAHCRQEDVGFRGNSPEMRVEPQPRMWVPESPVCRSGRGESKSESWSEELQPGHPRAWPPSPGRFRVEEGGGAPFCSADGSTSAEKRHLEVSNGMDELAGSPFPVTRMSSRSSDAKPLPASYPAEPREPQESPKITSAFSSVKPSEAVPRKFDSGGERGAGLPLSLSNKNRGLSAPDLRSVGLTPGQEQGASELEGSLGEASTIEIPPGESLQARAARILGIEVAVESLLPGIRRAGQNQPAEPDASACTPESPQEELLSRPAPADVPRVSTDAFYGRRKCGWTKSPLFVGDRDSARRAPQAFEHSDVDGVVTSTDPVPEPEPSPLESKFFEQKDVETKPPFRSTLFHFVERTPSVAGSEKRLRSPSKVIESLQEKLASPPRRADPDRLMRMKEVSSVSRMRVLSFRNADSQEDAEELKATTRGQAGLPGGLVSPGSGDRAQRLGHSLSVSKDSISREEKEHPAAQKEKSMDQDFWCPDSYDPSRVERV

SEQ ID NO: 18106 - protein, 55 aa, Homo sapiens
MDTSCQETPQHHARITPRGARQRGLGHEQARACRTGMRMALRPSHIVRRPRGKDM

SEQ ID NO: 18107 - protein, 12 aa, Homo sapiens
LESTELNTPVGG

SEQ ID NO: 18108 - protein, 11 aa, Homo sapiens
TRLYFAWFLSQ

SEQ ID NO: 18109 - protein, 23 aa, Homo sapiens
KHGWENGVPKTRSRGTRRRQTNK

SEQ ID NO: 18110 - protein, 28 aa, Homo sapiens
RAESCSIESKMFRPCCLRSSDAHSIPYR

SEQ ID NO: 18111 - protein, 14 aa, Homo sapiens
KSENHQCFQLCETK

SEQ ID NO: 18112 - protein, 15 aa, Homo sapiens
VAAARPGVSSFTGWS

SEQ ID NO: 18113 - protein, 27 aa, Homo sapiens
LPLQAGYEEGEELPAHLLEHVPEPAGK

SEQ ID NO: 18114 - protein, 20 aa, Homo sapiens
VAASLPSTDHHCHYHHCPPG

SEQ ID NO: 18115 - protein, 39 aa, Homo sapiens
LPLPPLPSGLRTSPWGQQGLRMKFPLMFCHRVQIYRHRS

SEQ ID NO: 18116 - protein, 14 aa, Homo sapiens
MVIMKKKVSVLPAT

SEQ ID NO: 18117 - protein, 56 aa, Homo sapiens
RPLGESGPEEAMATSAHSWPQERARLRMIYPLFTDEESEAQRTVMKCDQTLRSPKR

SEQ ID NO: 18118 - protein, 82 aa, Homo sapiens
RPLGESGPEEAMATSAHSWPQAGWSGAAGRLLDRRGVTAAEEEVLRDTRGWTRQGNTRPTTAGDKIAQPHPAVQRLPACAPS

SEQ ID NO: 18119 - protein, 9 aa, Homo sapiens
MDEYCWALP

SEQ ID NO: 18120 - protein, 17 aa, Homo sapiens
VQSPRAFTNISLASLPF

SEQ ID NO: 18121 - protein, 21 aa, Homo sapiens
LITWNPRKNLFEDVMMIKRNF

SEQ ID NO: 18122 - protein, 19 aa, Homo sapiens
LITWNPRKNLFEDVMMIKR

SEQ ID NO: 18123 - protein, 11 aa, Homo sapiens
TILQKGNLGQR

SEQ ID NO: 18124 - protein, 42 aa, Homo sapiens
LEGVLNVTSVSSFLLCQNNIAKLKSMSRRQYYIISVPQIQHK

SEQ ID NO: 18125 - protein, 49 aa, Homo sapiens
IVPSGMKMKVFRMEGSQLNFQEKYVNRSQHVVSQDLASLLTLMRVREYL

SEQ ID NO: 18126 - protein, 16 aa, Homo sapiens
LPRAQRDAPRHVPGKK

SEQ ID NO: 18127 - protein, 14 aa, Homo sapiens
VRICCCFQEKWSRM

SEQ ID NO: 18128 - protein, 15 aa, Homo sapiens
KFNFFHLMKNLIMTM

SEQ ID NO: 18129 - protein, 639 aa, Homo sapiens
VCTAAGVGPRPEKSGKESTSLGMSSLPTSDGFNHPARSSGQSPDVGNPMSLARSVSASVCPIKPSDSDRIEPKAVKALKASAEFQLNSEKKEHLSLQDLSDHASSADHAPTDQSPAMPMQNSSEEITVAGNLEKSAERSTQGLKFHLHTRQEASLSVTSTRMHEPQMFLGEKDWHPENQNLSQVSDPQQHEEPGNEQYEVAQQKASHDQEYLCNIGDLELPEERQQNQHKIVDLEATMKGNGLPQNVDPPSAKKSIPSSECSGCSNSETFMEIDTAQQSLVTLLNSTGRQNANVKNIGALDLTLDNPLMEVETSKCNPSSEILNDSISTQDLQPPETNVEIPGTNKEYGHYSSPSLCGSCQPSVESAEESCPSITAALKELHELLVVSSKPASENTSEEVICQSETIAEGQTSIKDLSERWTQNEHLTQNEQCPQVSFHQAISVSVETEKLTGTSSDTGREAVENVNFRSLGDGLSTDKEGVPKSRESINKNRSVTVTSAKTSNQLHCTLGVEISPKLLAGEEDALNQTSEQTKSLSSNFILVKDLGQGIQNSVTDRPETRENVCPDASRPLLEYEPPTSHPSSSPAILPPLIFPATDIDRILRAGFTLQEALGALHRVGGNADLALLVLLAKNIVVPT

SEQ ID NO: 18130 - protein, 25 aa, Homo sapiens
RSFTAIMASWPMPRSKWASIKMPIK

SEQ ID NO: 18131 - protein, 14 aa, Homo sapiens
KSTADASGSRGHQL

SEQ ID NO: 18132 - protein, 39 aa, Homo sapiens
MPQRRLMPCRWSLQMEPRDLSPTHLFACLLVRFSEKFLA

SEQ ID NO: 18133 - protein, 9 aa, Homo sapiens
LRRDCLSCG

SEQ ID NO: 18134 - protein, 36 aa, Homo sapiens
VSTERCDVSPDTSCCSPVSSPHHCRTRLLNHGGKRG

SEQ ID NO: 18135 - protein, 58 aa, Homo sapiens
MLFTCVLAAPLPHTTPEPWGKTRMRSRPRRGRFLRTLSRHPRAKVPSRPSTFSHDTWT

SEQ ID NO: 18136 - protein, 7 aa, Homo sapiens
IPSSSPR

SEQ ID NO: 18137 - protein, 19 aa, Homo sapiens
VWLSSSIRNFFRTLKKKQA

SEQ ID NO: 18138 - protein, 14 aa, Homo sapiens
TTTSTQRCCCVRRT

SEQ ID NO: 18139 - protein, 18 aa, Homo sapiens
TETEGLHQPGRAFKLFQP

SEQ ID NO: 18140 - protein, 63 aa, Homo sapiens
TLGLQRGAESRTRSPLPRSSSGHLLARSLSRMGTWLETGSGLRGLQTVGQESNNFSRSSSSSS

SEQ ID NO: 18141 - protein, 40 aa, Homo sapiens
LPAGAVLCFPAPDPHCPGDGRGPLLLQHGQAEAGDGRHRD

SEQ ID NO: 18142 - protein, 13 aa, Homo sapiens
MPTSSTTGCCGPC

SEQ ID NO: 18143 - protein, 12 aa, Homo sapiens
VEPGRNDPARFH

SEQ ID NO: 18144 - protein, 13 aa, Homo sapiens
LVVFSFALSPFHL

SEQ ID NO: 18145 - protein, 10 aa, Homo sapiens
LLAHMHVVTL

SEQ ID NO: 18146 - protein, 8 aa, Homo sapiens
REDRREEV

SEQ ID NO: 18147 - protein, 26 aa, Homo sapiens
IVCCYWRISFLFYNVIYCHVLVLVFS

SEQ ID NO: 18148 - protein, 53 aa, Homo sapiens
MEGNLVWNKTEWISQLSATNISRNFPSTARRWTRSVASEASLVSRWTELISLL

SEQ ID NO: 18149 - protein, 14 aa, Homo sapiens
RIRREVWGAEGSDG

SEQ ID NO: 18150 - protein, 20 aa, Homo sapiens
VERTRFKKGMPRTQPWEVPV

SEQ ID NO: 18151 - protein, 35 aa, Homo sapiens
MRSKMTKMKSGIDCKKKKWKKTQADCFFGLLKKIG

SEQ ID NO: 18152 - protein, 78 aa, Homo sapiens
TTSPGSPRLRRRRRCCRRDGSGKIASPGSWATICCAVTACWARRVRTAGRSSSKTNSGKSTAWLVRNSTQTWIKIIPL

SEQ ID NO: 18153 - protein, 19 aa, Homo sapiens
RLCSPCCWFCPCCSRGEER

SEQ ID NO: 18154 - protein, 24 aa, Homo sapiens
MHLEGKVGERENGSQRNANILSNV

SEQ ID NO: 18155 - protein, 29 aa, Homo sapiens
MPSRVVRRLLVMLSGKLSIPSPHPEFAAE

SEQ ID NO: 18156 - protein, 21 aa, Homo sapiens
TTARRAFPVRFLLVPSPIWQL

SEQ ID NO: 18157 - protein, 46 aa, Homo sapiens
IPLKVEHHPTPLGPTLPQGLLHLHLHPAWPGVHLCGSYLGAIELNG

SEQ ID NO: 18158 - protein, 870 aa, Homo sapiens
IYRMENEKENLFCEPHKRGLMKTPLKESTTANIVLAEIQPDFGPLTTPTKPKEGSQGEPWTPTANLKMLISAVSPEIRNRDQKRGLFDNRSGLPEAKDCIHEHLSGDEFEKSQPSRKEKSLGLLCHKFLARYPNYPNPAVNNDICLDEVAEELNVERRRIYDIVNVLESLHMVSRLAKNRYTWHGRHNLNKTLGTLKSIGEENKYAEQIMMIKKKEYEQEFDFIKSYSIEDHIIKSNTGPNGHPDMCFVELPGVEFRAASVNSRKDKSLRVMSQKFVMLFLVSTPQIVSLEVAAKILIGEDHVEDLDKSKFKTKIRRLYDIANVLSSLDLIKKVHVTEERGRKPAFKWTGPEISPNTSGSSPVIHFTPSDLEVRRSSKENCAKNLFSTRGKPNFTRHPSLIKLVKSIESDRRKINSAPSSPIKTNKAESSQNSAPFPSKMAQLAAICKMQLEEQSSESRQKVKVQLARSGPCKPVAPLDPPVNAEMELTAPSLIQPLGMVPLIPSPLSSAVPLILPQAPSGPSYAIYLQPTQAHQSVTPPQGLSPTVCTTHSSKATGSKDSTDATTEKAANDTSKASASTRPGSLLPAPERQGAKSRTREPAGERGSKRASMLEDSGSKKKFKEDLKGLENVSATLFPSGYLIPLTQCSSLGAESILSGKENSSALSPNHRIYSSPIAGVIPVTSSELTAVNFPSFHVTPLKLMVSPTSVAAVPVGNSPALASSHPVPIQNPSSAIVNFTLQHLGLISPNVQLSASPGSGIVPVSPRIESVNVAPENAGTQQGRATNYDSPVPGQSQPNGQSVAVTGAQQPVPVTPKGSQLVAESFFRTPGGPTKPTSSSCMDFEGANKTSLGTLFVPQRKLEVSTEDVH

SEQ ID NO: 18159 - protein, 37 aa, Homo sapiens
VPGRWTGFHWRASSSYCCSPPSSSTTSSWLVTSTAAP

SEQ ID NO: 18160 - protein, 43 aa, Homo sapiens
KLLDKSISLDFIPGKRSSSDSRTASSLACTRQAPPVGLSWWWA

SEQ ID NO: 18161 - protein, 41 aa, Homo sapiens
MKITLRICVDQMLGRLAMPQGRLTAKPRMRGSHSSSPWGPS

SEQ ID NO: 18162 - protein, 34 aa, Homo sapiens
LGAKSGNGVCMIFGACCIGPRPVIKDDNSSQANL

SEQ ID NO: 18163 - protein, 36 aa, Homo sapiens
LAEDTQCGCSQKAHRLKEDRGPCCRGPSCPITSQEP

SEQ ID NO: 18164 - protein, 15 aa, Homo sapiens
LSPAGPSCPITSQEP

SEQ ID NO: 18165 - protein, 29 aa, Homo sapiens
MEDEEVAESWEEAADSGIWPCLPKLVGRH

SEQ ID NO: 18166 - protein, 23 aa, Homo sapiens
MEDEEVAESWEEAADSGVPHVHL

SEQ ID NO: 18167 - protein, 42 aa, Homo sapiens
MEDEEVAESWEEAADSGGWCEQKMNVWGRMLTAIIHYIDIRK

SEQ ID NO: 18168 - protein, 33 aa, Homo sapiens
MEDEEVAESWEEAADSGQEIQISSQSAHCDSGR

SEQ ID NO: 18169 - protein, 929 aa, Homo sapiens
TARRAPCPAATRRHLPEKIKDDQQLKNMSGQWFYEAKAKRHRDKIHGADIIRASMRKKRPQIAAEQSKDRENGAKESWVNNVNKDAFLPPELAGVVEEPEEDAAPASPSSSVVNPASSVIDMSQENTRKPNVSPEKRKNPFNSSKLPEGHSSQQTKNEQSKNGRTGLFQTSKEDELSESKEKSTVADTSIQKLEKSKQTLPGLSNGSQIKAPIPKARKMIYKSTDLNKDDNQSFPRQRTDSLKARGAPRGILKRNSSSSSTDSETLRYNHNFEPKSKIVSPGLTIHERISEKEHSLEDNSSPNSLEPLKHVRFSAVKDELPQSPGLIHGREVGEFSVLESDRLKNGMEDAGDTEEFQSDPKPSQYRKPSLFHQSTSSPYVSKSETHQPMTSGSFPINGLHSHSEVLTARPQSMENSPTINEPKDKSSELTRLESVLPRSPADELSHCVEPEPSQVPGGSSRDRQQGSEEEPSPVLKTLERSAARKMPSKSLEDISSDSSNQAKVDNQPEELVRSAEDDEKPDQKPVTNECVPRISTVPTQPDNPFSHPDKLKRMSKSVPAFLQDESDDRETDTASESSYQLSRHKKSPSSLTNLSSSSGMTSLSSVSGSVMSVYSGDFGNLEVKGNIQFAIEYVESLKELHVFVAQCKDLAAADVKKQRSDPYVKAYLLPDKGKMGKKKTLVVKKTLNPVYNEILRYKIEKQILKTQKLNLSIWHRDTFKRNSFLGEVELDLETWDWDNKQNKQLRWYPLKRKTAPVALEAENRGEMKLALQYVPEPVPGKKLPTTGEVHIWVKECLDLPLLRGSHLNSFVKCTILPDTSRKSRQKTRAVGKTTNPIFNHTMVYDGFRPEDLMEACVELTVWDHYKLTNQFLGGLRIGFGTGKSYGTEVDWMDSTSEEVALWEKMVNSPNTWIEATLPLRMLLIAKISK

SEQ ID NO: 18170 - protein, 54 aa, Homo sapiens
LHLQLASRRTPIHTTTLTWSWRPAPAWREDPPIRVREPPTQTTPLSLSPTLFLR

SEQ ID NO: 18171 - protein, 54 aa, Homo sapiens
TVVFGPVSEQRFLFVRHLDEAAVSAAILRASQCRLRTTRRRRTLESRPRKTKTQ

SEQ ID NO: 18172 - protein, 30 aa, Homo sapiens
LQLLGFLWLPSLLEPGLHPSNHVQGTCSWY

SEQ ID NO: 18173 - protein, 21 aa, Homo sapiens
LPMIRETEPLQAMSPLRTLNG

SEQ ID NO: 18174 - protein, 30 aa, Homo sapiens
TRETEGKRGRRGGLLARHSLLSGILQSGRT

SEQ ID NO: 18175 - protein, 11 aa, Homo sapiens
LNSRSRFQDMN

SEQ ID NO: 18176 - protein, 15 aa, Homo sapiens
ISHHESAEIWCLNRA

SEQ ID NO: 18177 - protein, 14 aa, Homo sapiens
VSQQGVRARHQRQG

SEQ ID NO: 18178 - protein, 13 aa, Homo sapiens
LKSLWGTRAASQA

SEQ ID NO: 18179 - protein, 24 aa, Homo sapiens
RFLLLGCKVMLKALKWHLKAPEWT

SEQ ID NO: 18180 - protein, 11 aa, Homo sapiens
VSRHQRSPCLM

SEQ ID NO: 18181 - protein, 32 aa, Homo sapiens
LALEDAQDENAQIQCARVQSRGPRSGCEPAQG

SEQ ID NO: 18182 - protein, 15 aa, Homo sapiens
MWTSQDPRWVLKFQM

SEQ ID NO: 18183 - protein, 14 aa, Homo sapiens
LLSQDPRWTSKPQM

SEQ ID NO: 18184 - protein, 13 aa, Homo sapiens
LAPEDAQDENAQV

SEQ ID NO: 18185 - protein, 23 aa, Homo sapiens
RAPSLRCLRCTSRPPRSPCLMWT

SEQ ID NO: 18186 - protein, 10 aa, Homo sapiens
REMWMCPCLR

SEQ ID NO: 18187 - protein, 16 aa, Homo sapiens
LTLMSQDPKWMLKFQM

SEQ ID NO: 18188 - protein, 28 aa, Homo sapiens
RSQIQDARNEYKASEDIHTRCWFAFERS

SEQ ID NO: 18189 - protein, 12 aa, Homo sapiens
KHEYTDAQNLYA

SEQ ID NO: 18190 - protein, 16 aa, Homo sapiens
KSKGMRMCRCQNWREI

SEQ ID NO: 18191 - protein, 17 aa, Homo sapiens
RLMLLSQDPRWMLKSQM

SEQ ID NO: 18192 - protein, 11 aa, Homo sapiens
RSRREAEGPQA

SEQ ID NO: 18193 - protein, 11 aa, Homo sapiens
LASKERAQKWM

SEQ ID NO: 18194 - protein, 13 aa, Homo sapiens
RRGPRSGCELAQG

SEQ ID NO: 18195 - protein, 11 aa, Homo sapiens
RSRREAEGPQV

SEQ ID NO: 18196 - protein, 24 aa, Homo sapiens
KGTLKGHMWMSVGQTLTLRDQRAN

SEQ ID NO: 18197 - protein, 13 aa, Homo sapiens
RTQNQGGCGCVCA

SEQ ID NO: 18198 - protein, 11 aa, Homo sapiens
LASKERAQMGM

SEQ ID NO: 18199 - protein, 22 aa, Homo sapiens
MSQDPKWTLKALMLTLKDQRES

SEQ ID NO: 18200 - protein, 9 aa, Homo sapiens
KGLSSRCQR

SEQ ID NO: 18201 - protein, 13 aa, Homo sapiens
MSQDRKWMLNVPM

SEQ ID NO: 18202 - protein, 8 aa, Homo sapiens
RKVEKSKV

SEQ ID NO: 18203 - protein, 13 aa, Homo sapiens
VTWMCLCQKWKVT

SEQ ID NO: 18204 - protein, 27 aa, Homo sapiens
KFLTWILKAPKWILMPQMWMFKAQTGT

SEQ ID NO: 18205 - protein, 12 aa, Homo sapiens
RRGGCFTCKCRR

SEQ ID NO: 18206 - protein, 11 aa, Homo sapiens
RPKDRCRCSRY

SEQ ID NO: 18207 - protein, 50 aa, Homo sapiens
RAQKWTFPVLSLISKASQRNLVLSFPNLIFRALKFRHLKWMSKVKSQILT

SEQ ID NO: 18208 - protein, 8 aa, Homo sapiens
RKSERIQV

SEQ ID NO: 18209 - protein, 10 aa, Homo sapiens
LWIYQKETST

SEQ ID NO: 18210 - protein, 14 aa, Homo sapiens
LRAQISMWKVRREA

SEQ ID NO: 18211 - protein, 10 aa, Homo sapiens
RLERSQIQDA

SEQ ID NO: 18212 - protein, 24 aa, Homo sapiens
RLISKALKWTSMPQMWMFMVQTGI

SEQ ID NO: 18213 - protein, 25 aa, Homo sapiens
LASKEKALKSMLPSLKLTLTFLVPM

SEQ ID NO: 18214 - protein, 14 aa, Homo sapiens
RSRCKAEGPQVQDA

SEQ ID NO: 18215 - protein, 25 aa, Homo sapiens
LKLTSRAPKWTLMLQMLMFKAQTGT

SEQ ID NO: 18216 - protein, 30 aa, Homo sapiens
VTCKFLTWILKAPKWILMPQMWMFEAQTGT

SEQ ID NO: 18217 - protein, 10 aa, Homo sapiens
MWTFKAQTGT

SEQ ID NO: 18218 - protein, 30 aa, Homo sapiens
LAPEDAQGENAQIQHARIQRRGPRCGCYPS

SEQ ID NO: 18219 - protein, 26 aa, Homo sapiens
RSRCKTQGSKVQDARDEHQGPQNLHA

SEQ ID NO: 18220 - protein, 20 aa, Homo sapiens
KAPVWTLTHLMSILKVRKEN

SEQ ID NO: 18221 - protein, 26 aa, Homo sapiens
LKVLKGSSKVPSLRCLMYISKAHKSP

SEQ ID NO: 18222 - protein, 8 aa, Homo sapiens
REAQRSQV

SEQ ID NO: 18223 - protein, 7 aa, Homo sapiens
KPTNLHE

SEQ ID NO: 18224 - protein, 14 aa, Homo sapiens
RSRCETKGPQVQDA

SEQ ID NO: 18225 - protein, 11 aa, Homo sapiens
KPPRSPCLILT

SEQ ID NO: 18226 - protein, 14 aa, Homo sapiens
RSRRKTEGPQVQDA

SEQ ID NO: 18227 - protein, 18 aa, Homo sapiens
KVHVWISKALMPNSVAHL

SEQ ID NO: 18228 - protein, 13 aa, Homo sapiens
ISRHQKLDFQVRS

SEQ ID NO: 18229 - protein, 9 aa, Homo sapiens
IFRSEVRRW

SEQ ID NO: 18230 - protein, 23 aa, Homo sapiens
ICKVQKQKLSSPSFPCPRSASQV

SEQ ID NO: 18231 - protein, 44 aa, Homo sapiens
IWHLYSGVRLARQCQGATGFWRTEGARCGCEPERASDFSTECGL

SEQ ID NO: 18232 - protein, 19 aa, Homo sapiens
VRMFQGVSVPQTSALVKGI

SEQ ID NO: 18233 - protein, 14 aa, Homo sapiens
LGAFISQDQRWKEV

SEQ ID NO: 18234 - protein, 8 aa, Homo sapiens
METPHPGM

SEQ ID NO: 18235 - protein, 217 aa, Homo sapiens
KKSRTAPKELKQDKPKPNLNNLRKEEIPVQEKTPKKRMALDDKLYQRDLEVALALSVKELPTVTTNVQNSQDKSIEKHGSSKIETMNKSPHISNCSVASDYLDLDKITVEDDVGGVQGKRKAASKAAAQQRKILLEGSDGDSANDTEPDFAPGEDSEDDSDFCESEDNDEDFSMRKSKVKEIKKKEVKVKSPVEKKEKKSKSKCNALGKLGPKHLIL

SEQ ID NO: 18236 - protein, 248 aa, Homo sapiens
KVRGIEKHGSSKIETMNKSPHISNCSVASDYLDLDKITVEDDVGGVQGKRKAASKAAAQQRKILLEGSDGDSANDTEPDFAPGEDSEDDSDFCESEDNDEDFSMRKSKVKEIKKKEVKVKSPVEKKEKKSKSKCNALVTSVDSAPAAVKSESQSLPKKVSLSSDTTRKPLEIRSPSAESKKPKWVPPGMAYLSSRTGAWKIITAASGGSRSSSSPLVVVSVKSPNQSLRLGLSRLARVKPLHPNATST

SEQ ID NO: 18237 - protein, 16 aa, Homo sapiens
KTKEEEEQRAFCSIGR

SEQ ID NO: 18238 - protein, 49 aa, Homo sapiens
LELKHCVLLASTLGMPLTPTVQGFQWILRGPDVETSPLGAPRAASHGVG

SEQ ID NO: 18239 - protein, 39 aa, Homo sapiens
RMGATMPWGSLTVATITTRQSRRRRRSLPNREKKMRPKI

SEQ ID NO: 18240 - protein, 7 aa, Homo sapiens
ISYSANH

SEQ ID NO: 18241 - protein, 23 aa, Homo sapiens
RTAPACLGRVWMDICRLWGHVQG

SEQ ID NO: 18242 - protein, 18 aa, Homo sapiens
LFSPSAQPSHIAQTPWGR

SEQ ID NO: 18243 - protein, 34 aa, Homo sapiens
LRDGLRELHRHQRGRGPRPCRSSQRCNRRIRNRR

SEQ ID NO: 18244 - protein, 46 aa, Homo sapiens
LASCALPSRWRALHSQAYQQGSNWRVLNMPRTQIPALLLLVLHGHL

SEQ ID NO: 18245 - protein, 19 aa, Homo sapiens
VYSTACEIGSRMGPIFNIC

SEQ ID NO: 18246 - protein, 100 aa, Homo sapiens
LAAMDLGLRSMSSSLQLRRLPRACWREARTTTSPSSPTMTSKTTSAGSGTCRLRRSGQNECIHPFPHPCHLEEFSQACSAPCPSSLSTAGSLFNTATFPY

SEQ ID NO: 18247 - protein, 24 aa, Homo sapiens
MAKTHSGMWMEAWCLLNGIVGFTV

SEQ ID NO: 18248 - protein, 27 aa, Homo sapiens
LPPFPHAPGEAILLEAKVSAMSRSLLP

SEQ ID NO: 18249 - protein, 16 aa, Homo sapiens
IKISPRKNIKKLYGKQ

SEQ ID NO: 18250 - protein, 7 aa, Homo sapiens
IPTGLLD

SEQ ID NO: 18251 - protein, 31 aa, Homo sapiens
KDWSSWAMAKKSLKILLDLDSHLEGFRKSRN

SEQ ID NO: 18252 - protein, 12 aa, Homo sapiens
RPGRPSRNRSRR

SEQ ID NO: 18253 - protein, 76 aa, Homo sapiens
KIFLKIKMNLHFLCQRASLNLNFIMAQRRTVQLQANSQKKNLLRYKRKITEKKRKEPQRSCSVQSQILLLLLWLIG

SEQ ID NO: 18254 - protein, 35 aa, Homo sapiens
TALSARLEAAAVGGFARLCSGDFGGGASGTSARTR

SEQ ID NO: 18255 - protein, 21 aa, Homo sapiens
LQTAASYPGECGLCVHQGGPH

SEQ ID NO: 18256 - protein, 32 aa, Homo sapiens
MKSNLSSWRRTLRISVKSGRGLTMSWGNTRIF

SEQ ID NO: 18257 - protein, 54 aa, Homo sapiens
TLLLEPKLTKKNKSTPDLDSGHLLKPSFRVDIPTSRTVRILKTTQQKVKKWKIV

SEQ ID NO: 18258 - protein, 30 aa, Homo sapiens
RGRPSRPNPVAPLSPASSRRSSSRNCTSPT

SEQ ID NO: 18259 - protein, 28 aa, Homo sapiens
IFGVLTTWQTLTTKNSLNLIKIWMMLKK

SEQ ID NO: 18260 - protein, 12 aa, Homo sapiens
MLSKTCKLNVHR

SEQ ID NO: 18261 - protein, 14 aa, Homo sapiens
LLQTSKLVTFYVSV

SEQ ID NO: 18262 - protein, 26 aa, Homo sapiens
MRTPLSSLCSGLRGYFAAKFLLRLLD

SEQ ID NO: 18263 - protein, 17 aa, Homo sapiens
IREKIPLKAWTLWARGH

SEQ ID NO: 18264 - protein, 8 aa, Homo sapiens
LVVLASTT

SEQ ID NO: 18265 - protein, 11 aa, Homo sapiens
RRLQLMKVLPN

SEQ ID NO: 18266 - protein, 19 aa, Homo sapiens
IPPETSLLQDRGCPLVRRW

SEQ ID NO: 18267 - protein, 50 aa, Homo sapiens
MKLNEKFSEGWRKPNASWKSSCSKNSSDRDKLSLPHKKLERRKNVQNVRS

SEQ ID NO: 18268 - protein, 1093 aa, Homo sapiens
KITVQKEIALVSSAPPVPNTMHQPPESTAAAAAAADISARKMAHPAMFPRRGSGSGSASALNAAGTGVGSNATSSEDFPPPSLLQPPPPAASSTSGPQPPPPQSLNLLSQAQLQAQPLAPGGTQMKKKSGFQITSVTPAQISASISSNNSIAEDTESYDDLDESHTEDLSSSEILDVSLSRATDLGEPERSSSEETLNNFQEAETPGAVSPNQPHLPQPHLPHLPQQNVVINGNAHPHHLHHHHQIHHGHHLQHGHHHPSHVAVASASITGGPPSSPVSRKLSTTGSSDSITPVAPTSAVSSSGSPASVMTNMRAPSTTGGIGINSVTGTSTVNNVNITAVGSFNPNVTSSMLGNVNISTSNIPSAAGVSVGPGVTSGVNVNILSGMGNGTISSSAAVSSVPNAAAGMTGGSVSSQQQQPTVNTSRFRVVKLDSSSEPFKKGRWTCTEFYEKENAVPATEGVLINKVVETVKQNPIEVTSERESTSGSSVSSSVSTLSHYTESVGSGEMGAPTVVVQQQQQQQQQQQQQPALQGVTLQQMDFGSTGPQSIPAVSIPQSISQSQISQVQLQSQELSYQQKQGLQPVPLQATMSAATGIQPSPVNVVGVTSALGQQPSISSLAQPQLPYSQAAPPVQTPLPGAPPPQQLQYGQQQPMVSTQMAPGHVKSVTQNPASEYVQQQPILQTAMSSGQPSSAGVGAGTTVIPVAQPQGIQLPVQPTAVPAQPAGASVQPVGQAPAAVSAVPTGSQIANIGQQANIPTAVQQPSTQVPPSVIQQGAPPSSQVVPPAQTGIIHQGVQTSAPSLPQQLVIASQSSLLTVPPQPQGVEPVAQGIVSQQLPAVSSLPSASSISVTSQVSSTGPSGMPSAPTNLVPPQNIAQTPATQNGNLVQSVSQPPLIATNTNLPLAQQIPLSSTQFSAQSLAQAIGSQIEDARRAAEPSLVGLPQTISGDSGGMSAVSDGSSSSLAASASLFPLKVLPLTTPLVDGEDESSSGASVVAIDNKIEQAMDLVKSHLMYAVREEVEVLKEQIKELIEKNSQLEQENNLLKTLASPEQLAQFQAQLQTGSPPATTQPQGTTQPPAQPASQGSGPTA

SEQ ID NO: 18269 - protein, 10 aa, Homo sapiens
LCNRWYFRAV

SEQ ID NO: 18270 - protein, 7 aa, Homo sapiens
LNMTVLN

SEQ ID NO: 18271 - protein, 7 aa, Homo sapiens
RLWFCGI

SEQ ID NO: 18272 - protein, 55 aa, Homo sapiens
IQGMQMMLCMSLMEKNSVVKGLLLNMLGLGHEVEEVEDDTLTVLVVADLEMIDGM

SEQ ID NO: 18273 - protein, 58 aa, Homo sapiens
IQGMQMMLCMSLMEKNSVVKGLLLNMLGLGHEVEEVEDDTLTVLVVADLEMIDEMLHL

SEQ ID NO: 18274 - protein, 27 aa, Homo sapiens
ILKSQLAGSQRFHETSWGSNVCGCTPT

SEQ ID NO: 18275 - protein, 22 aa, Homo sapiens
ISCTSIIKRFTIKICIKIKEFK

SEQ ID NO: 18276 - protein, 20 aa, Homo sapiens
KRPKIRQERQKALMEEARLS

SEQ ID NO: 18277 - protein, 49 aa, Homo sapiens
VKFCVLPPARDFVSSRTVTWKSKNPSGGSPRRRGQPWERRVDGTQAGLL

SEQ ID NO: 18278 - protein, 28 aa, Homo sapiens
LMTSTRDLDMVPMMHLSMQSQTHLFWIV

SEQ ID NO: 18279 - protein, 15 aa, Homo sapiens
MNMLLRLLTRVALHQ

SEQ ID NO: 18280 - protein, 62 aa, Homo sapiens
LGLCPRRYIPAWRAWPSGCIGPSVSAEPGSHPILVKVNCSSMGRERRSCQWWCFCSSQKGSL

SEQ ID NO: 18281 - protein, 22 aa, Homo sapiens
KHPDTAAAGPADTRKPSDAARE

SEQ ID NO: 18282 - protein, 30 aa, Homo sapiens
MRRAMTQSQSSRSSQRTSCPMMTVCLEASV

SEQ ID NO: 18283 - protein, 41 aa, Homo sapiens
VEARVVRVPASESAVVVQTECSLLFVWLRFHARRWLRSHGN

SEQ ID NO: 18284 - protein, 11 aa, Homo sapiens
IYFHKVAPGCI

SEQ ID NO: 18285 - protein, 27 aa, Homo sapiens
KDSLTASMSPSPAIFSLKAARPWCMAS

SEQ ID NO: 18286 - protein, 96 aa, Homo sapiens
KSLLLGNPSTDRFSSLSASLSSVHLANESAETLDSTSSSAASTTVTCSPMVSSDSLKRRCSVAETELRVAGSQWLSHVSFSVLGGFIKCSTWLADV

SEQ ID NO: 18287 - protein, 21 aa, Homo sapiens
TVPVSTGTSASSHTASTSSAA

SEQ ID NO: 18288 - protein, 37 aa, Homo sapiens
LAGNFGFGALPAATLIVRSPLPPVVSSLAFWLCHALL

SEQ ID NO: 18289 - protein, 18 aa, Homo sapiens
TTCTVPMITQYHLWRKLL

SEQ ID NO: 18290 - protein, 88 aa, Homo sapiens
RTKAKRRTVRYTAMHRVTQPLKKLRVQTQAVSRKVSREVIQEVDMAASRTAALNLLRVSRNLRANQQVPNPSQSSQKPKRSQPLRRNG

SEQ ID NO: 18291 - protein, 9 aa, Homo sapiens
MCLTPSPLF

SEQ ID NO: 18292 - protein, 16 aa, Homo sapiens
LWSTVQDTSRPGHQQE

SEQ ID NO: 18293 - protein, 29 aa, Homo sapiens
RLICTLFPSHRHGQALIPAFKMELECLLD

SEQ ID NO: 18294 - protein, 70 aa, Homo sapiens
LSSLNSTRAMCNSRITIHLNRAKVGYMESTCGPSAQGWILFCSLIAKHCLIWNKSSWVIPISPYHMSTTS

SEQ ID NO: 18295 - protein, 25 aa, Homo sapiens
MTGLLADFKLSGHPQRQKTQKKKWD

SEQ ID NO: 18296 - protein, 16 aa, Homo sapiens
RSTTTGCRRLPATGGR

SEQ ID NO: 18297 - protein, 15 aa, Homo sapiens
MWIPIRRFHILLRSS

SEQ ID NO: 18298 - protein, 33 aa, Homo sapiens
LQTERWTELGPLAYKRSCFSSITSTSREIESIR

SEQ ID NO: 18299 - protein, 37 aa, Homo sapiens
TVARLGQSPGMAEREDAAGVRAALLDAEQSPVALRPL

SEQ ID NO: 18300 - protein, 7 aa, Homo sapiens
ISFIEES

SEQ ID NO: 18301 - protein, 18 aa, Homo sapiens
LFTPTCAKTTDSPMLSVN

SEQ ID NO: 18302 - protein, 15 aa, Homo sapiens
RRRSLLHKLLNLIIP

SEQ ID NO: 18303 - protein, 103 aa, Homo sapiens
LEKAAWRWAETVRPEEVSQEHIETAYRIWLEPCIRGVCRRNCKGNPNCLVGIGEHIWLGEIDENSFHNIDDPNCERRKKVNHHFLSDCYMLFFVFVFAFVLGL

SEQ ID NO: 18304 - protein, 4412 aa, Homo sapiens
LRAARSGRRGASERESGAGRAMGWRAAGALLLALLLHGRLLAVTHGLRAYDGLSLPEDIETVTASQMRWTHSYLSDDEDMLADSISGDDLGSGDLGSGDFQMVYFRALVNFTRSIEYSPQLEDAGSREFREVSEAVVDTLESEYLKIPGDQVVSVVFIKELDGWVFVELDVGSEGNADGAQIQEMLLRVISSGSVASYVTSPQGFQFRRLGTVPQFPRACTEAEFACHSYNECVALEYRCDRRPDCRDMSDELNCEEPVLGISPTFSLLVETTSLPPRPETTIMRQPPVTHAPQPLLPGSVRPLPCGPQEAACRNGHCIPRDYLCDGQEDCEDGSDELDCGPPPPCEPNEFPCGNGHCALKLWRCDGDFDCEDRTDEANCPTKRPEEVCGPTQFRCVSTNMCIPASFHCDEESDCPDRSDEFGCMPPQVVTPPRESIQASRGQTVTFTCVAIGVPTPIINWRLNWGHIPSHPRVTVTSEGGRGTLIIRDVKESDQGAYTCEAMNARGMVFGIPDGVLELVPQRGPCPDGHFYLEHSAACLPCFCFGITSVCQSTRRFRDQIRLRFDQPDDFKGVNVTMPAQPGTPPLSSTQLQIDPSLHEFQLVDLSRRFLVHDSFWALPEQFLGNKVDSYGGSLRYNVRYELARGMLEPVQRPDVVLMGAGYRLLSRGHTPTQPGALNQRQVQFSEEHWVHESGRPVQRAELLQVLQSLEAVLIQTVYNTKMASVGLSDIAMDTTVTHATSHGRAHSVEECRCPIGYSGLSCESCDAHFTRVPGGPYLGTCSGCNCNGHASSCDPVYGHCLNCQHNTEGPQCNKCKAGFFGDAMKATATSCRPCPCPYIDASRRFSDTCFLDTDGQATCDACAPGYTGRRCESCAPGYEGNPIQPGGKCRPVNQEIVRCDERGSMGTSGEACRCKNNVVGRLCNECADGSFHLSTRNPDGCLKCFCMGVSRHCTSSSWSRAQLHGASEEPGHFSLTNAASTHTTNEGIFSPTPGELGFSSFHRLLSGPYFWSLPSRFLGDKVTSYGGELRFTVTQRSQPGSTPLHGQPLVVLQGNNIILEHHVAQEPSPGQPSTFIVPFREQAWQRPDGQPATREHLLMALAGIDTLLIRASYAQQPAESRVSGISMDVAVPEETGQDPALEVEQCSCPPGYRGPSCQDCDTGYTRTPSGLYLGTCERCSCHGHSEACEPETGACQGCQHHTEGPRCEQCQPGYYGDAQRGTPQDCQLCPCYGDPAAGQAAHTCFLDTDGHPTCDACSPGHSGRHCERCAPGYYGNPSQGQPCQRDSQVPGPIGCNCDPQGSVSSQCDAAGQCQCKAQVEGLTCSHCRPHHFHLSASNPDGCLPCFCMGITQQCASSAYTRHLISTHFAPGDFQGFALVNPQRNSRLTGEFTVEPVPEGAQLSFGNFAQLGHESFYWQLPETYQGDKVAAYGGKLRYTLSYTAGPQGSPLSDPDVQITGNNIMLVASQPALQGPERRSYEIMFREEFWRRPDGQPATREHLLMALADLDELLIRATFSSVPLAASISAVSLEVAQPGPSNRPRALEVEECRCPPGYIGLSCQDCAPGYTRTGSGLYLGHCELCECNGHSDLCHPETGACSQCQHNAAGEFCELCAPGYYGDATAGTPEDCQPCACPLTNPENMFSRTCESLGAGGYRCTACEPGYTGQYCEQCGPGYVGNPSVQGGQCLPETNQAPLVVEVHPARSIVPQGGSHSLRCQVSGSPPHYFYWSREDGRPVPSGTQQRHQGSELHFPSVQPSDAGVYICTCRNLHQSNTSRAELLVTEAPSKPITVTVEEQRSQSVRPGADVTFICTAKSKSPAYTLVWTRLHNGKLPTRAMDFNGILTIRNVQLSDAGTYVCTGSNMFAMDQGTATLHVQASGTLSAPVVSIHPPQLTVQPGQLAEFRCSATGSPTPTLEWTGGPGGQLPAKAQIHGGILRLPAVEPTDQAQYLCRAHSSAGQQVARAVLHVHGGGGPRVQVSPERTQVHAGRTVRLYCRAAGVPSATITWRKEGGSLPPQARSERTDIATLLIPAITTADAGFYLCVATSPAGTAQARIQVVVLSASDASPPPVKIESSSPSVTEGQTLDLNCVVAGSAHAQVTWYRRGGSLPPHTQVHGSRLRLPQVSPADSGEYVCRVENGSGPKEASITVSVLHGTHSGPSYTPVPGSTRPIRIEPSSSHVAEGQTLDLNCVVPGQAHAQVTWHKRGGSLPARHQTHGSLLRLHQVTPADSGEYVCHVVGTSGPLEASVLVTIEASVIPGPIPPVRIESSSSTVAEGQTLDLSCVVAGQAHAQVTWYKRGGSLPARHQVRGSRLYIFQASPADAGQYVCRASNGMEASITVTVTGTQGANLAYPAGSTQPIRIEPSSSQVAEGQTLDLNCVVPGQSHAQVTWHKRGGSLPVRHQTHGSLLRLYQASPADSGEYVCRVLGSSVPLEASVLVTIEPAGSVPALGVTPTVRIESSSSQVAEGQTLDLNCLVAGQAHAQVTWHKRGGSLPARHQVHGSRLRLLQVTPADSGEYVCRVVGSSGTQEASVLVTIQQRLSGSHSQGVAYPVRIESSSASLANGHTLDLNCLVASQAPHTITWYKRGGSLPSRHQIVGSRLRIPQVTPADSGEYVCHVSNGAGSRETSLIVTIQGSGSSHVPSVSPPIRIESSSPTVVEGQTLDLNCVVARQPQAIITWYKRGGSLPSRHQTHGSHLRLHQMSVADSGEYVCRANNNIDALEASIVISVSPSAGSPSAPGSSMPIRIESSSSHVAEGETLDLNCVVPGQAHAQVTWHKRGGSLPSHHQTRGSRLRLHHVSPADSGEYVCRVMGSSGPLEASVLVTIEASGSSAVHVPAPGGAPPIRIEPSSSRVAEGQTLDLKCVVPGQAHAQVTWHKRGGNLPARHQVHGPLLRLNQVSPADSGEYSCQVTGSSGTLEASVLVTIEPSSPGPIPAPGLAQPIYIEASSSHVTEGQTLDLNCVVPGQAHAQVTWYKRGGSLPARHQTHGSQLRLHLVSPADSGEYVCRAASGPGPEQEASFTVTVPPSEGSSYRLRSPVISIDPPSSTVQQGQDASFKCLIHDGAAPISLEWKTRNQELEDNVHISPNGSIITIVGTRPSNHGTYRCVASNAYGVAQSVVNLSVHGPPTVSVLPEGPVWVKVGKAVTLECVSAGEPRSSARWTRISSTPAKLEQRTYGLMDSHAVLQISSAKPSDAGTYVCLAQNALGTAQKQVEVIVDTGAMAPGAPQVQAEEAELTVEAGHTATLRCSATGSPAPTIHWSKLRSPLPWQHRLEGDTLIIPRVAQQDSGQYICNATSPAGHAEATIILHVESPPYATTVPEHASVQAGETVQLQCLAHGTPPLTFQWSRVGSSLPGRATARNELLHFERAAPEDSGRYRCRVTNKVGSAEAFAQLLVQGPPGSLPATSIPAGSTPTVQVTPQLETKSIGASVEFHCAVPSDRGTQLRWFKEGGQLPPGHSVQDGVLRIQNLDQSCQGTYICQAHGPWGKAQASAQLVIQALPSVLINIRTSVQTVVVGHAVEFECLALGDPKPQVTWSKVGGHLRPGIVQSGGVVRIAHVELADAGQYRCTATNAAGTTQSHVLLLVQALPQISMPQEVRVPAGSAAVFPCIASGYPTPDISWSKLDGSLPPDSRLENNMLMLPSVRPQDAGTYVCTATNRQGKVKAFAHLQVPERVVPYFTQTPYSFLPLPTIKDAYRKFEIKITFRPDSADGMLLYNGQKRVPGSPTNLANRQPDFISFGLVGGRPEFRFDAGSGMATIRHPTPLALGHFHTVTLLRSLTQGSLIVGDLAPVNGTSQGKFQGLDLNEELYLGGYPDYGAIPKAGLSSGFIGCVRELRIQGEEIVFHDLNLTAHGISHCPTCRDRPCQNGGQCHDSESSSYVCVCPAGFTGSRCEHSQALHCHPEACGPDATCVNRPDGRGYTCRCHLGRSGLRCEEGVTVTTPSLSGAGSYLALPALTNTHHELRLDVEFKPLAPDGVLLFSGGKSGPVEDFVSLAMVGGHLEFRYELGSGLAVLRSAEPLALGRWHRVSAERLNKDGSLRVNGGRPVLRSSPGKSQGLNLHTLLYLGGVEPSVPLSPATNMSAHFRGCVGEVSVNGKRLDLTYSFLGSQGIGQCYDSSPCERQPCQHGATCMPAGEYEFQCLCRDGFKGDLCEHEENPCQLREPCLHGGTCQGTRCLCLPGFSGPRCQQGSGHGIAESDWHLEGSGGNDAPGQYGAYFHDDGFLAFPGHVFSRSLPEVPETIELEVRTSTASGLLLWQGVEVGEAGQGKDFISLGLQDGHLVFRYQLGSGEARLVSEDPINDGEWHRVTALREGRRGSIQVDGEELVSGRSPGPNVAVNAKGSVYIGGAPDVATLTGGRFSSGITGCVKNLVLHSARPGAPPPQPLDLQHRAQAGANTRPCPS

SEQ ID NO: 18305 - protein, 15 aa, Homo sapiens
MPPCRRRRAPPHCAP

SEQ ID NO: 18306 - protein, 8 aa, Homo sapiens
MQSHIDES

SEQ ID NO: 18307 - protein, 18 aa, Homo sapiens
RREKIMNITMKFQGSSHQ

SEQ ID NO: 18308 - protein, 21 aa, Homo sapiens
TRRGSGSLRLCSVARVGQRRR

SEQ ID NO: 18309 - protein, 10 aa, Homo sapiens
IPGAHVPPGH

SEQ ID NO: 18310 - protein, 14 aa, Homo sapiens
MLESLPAEVQEVLL

SEQ ID NO: 18311 - protein, 18 aa, Homo sapiens
MQSTFGVKTTRQISESIT

SEQ ID NO: 18312 - protein, 9 aa, Homo sapiens
KYECSHALG

SEQ ID NO: 18313 - protein, 43 aa, Homo sapiens
IQGCGRRILFGGVGTPGTSSEEFVSGCDVRKLQKPGLSGSCCL

SEQ ID NO: 18314 - protein, 41 aa, Homo sapiens
KRRLMRMLCHCVCLQISPGLGWVHPTTDKMKWTLRAEQHTT

SEQ ID NO: 18315 - protein, 16 aa, Homo sapiens
KADRVSLCHTGWSAVV

SEQ ID NO: 18316 - protein, 8 aa, Homo sapiens
MSLATYSS

SEQ ID NO: 18317 - protein, 63 aa, Homo sapiens
RPSLSPEAVLARTVGSTSTPRSRCTPRDALDLSDINSEPPRGSFPSFEPRNLLSLFEDTLDPT

SEQ ID NO: 18318 - protein, 123 aa, Homo sapiens
KATRSPIKCAPSHPRMRSCRPWRSSSLTWHQAPSMRPGLDMSSAPRRWWKHPLSCACGRLCREEAADTGDDILPHETGLQPGMVPLKYLLEEGVWGAGVGCGVFPAISTAYDHCNNLSPSEEH

SEQ ID NO: 18319 - protein, 14 aa, Homo sapiens
VTRTPVPEVQLAQP

SEQ ID NO: 18320 - protein, 19 aa, Homo sapiens
RPPPGSRMPLPPPSSWPWP

SEQ ID NO: 18321 - protein, 13 aa, Homo sapiens
LQVQEKQLWVAFE

SEQ ID NO: 18322 - protein, 56 aa, Homo sapiens
KVCSKMKIHAVIVATVINQVLVYKVLCQKEKPFSQKFSKQINFCSMSDSEPIKITF

SEQ ID NO: 18323 - protein, 52 aa, Homo sapiens
MHRALHTRLPQGCSRSRPAHREPSSGQGRPGNHEPSQSAPRTAPEPWSAEEH

SEQ ID NO: 18324 - protein, 122 aa, Homo sapiens
MRELRIRKLCLNICVGESGDRLTRAAKVLEQLTGQTPVFSKARYTVRSFGIRRNEKIAVHCTVRGAKAEEILEKGLKVREYELRKNNFSDTGNFGFGIQEHIDLGIKYDPSIGIYGLDFYVV

SEQ ID NO: 18325 - protein, 165 aa, Homo sapiens [sequence omitted]

SEQ ID NO: 18326 - protein, 7 aa, Homo sapiens
TFGIEAS

SEQ ID NO: 18327 - protein, 47 aa, Homo sapiens
LLAVLVRARAQRASSPCLGKLRKSRTSCSQPDERMPNLSRSRKIRTT

SEQ ID NO: 18328 - protein, 54 aa, Homo sapiens
TWVRKVIWGNPLPGEIWGPQVRVEGVGEEKGSAMGPIFRGRAGKRGSLPAPAPC

SEQ ID NO: 18329 - protein, 23 aa, Homo sapiens
RSASPRPSRSSPSRTILRRKASG

SEQ ID NO: 18330 - protein, 34 aa, Homo sapiens
VSVPSLRSNQMGSSGVLWERLSSVLSRKDSALLV

SEQ ID NO: 18331 - protein, 35 aa, Homo sapiens
VETSAYKLAGTLYMAVILWRVQRRRSACGFTLRNW

SEQ ID NO: 18332 - protein, 56 aa, Homo sapiens
IWRPRRTDRLNGCSCRFFYLRNATTNFSFSGTCFTSPASRFSSAKAWGWALWLAHF

SEQ ID NO: 18333 - protein, 89 aa, Homo sapiens
LFSVGQIYNLGTGTGYSVLQMVQAMEKASGKKIPYKVVARREGDVAACYANPSLAQEELGWTAALGLDRMCEDLWRWQKQNPSGFGTQA

SEQ ID NO: 18334 - protein, 23 aa, Homo sapiens
RPTCTIPTSCVSTTIFMTGGGST

SEQ ID NO: 18335 - protein, 276 aa, Homo sapiens
LAMSPLQYSFMAVIHFAGLKAVGESVQKPLDYYRVNLTGTIQLLEIMKAHGVKNLVFSSSATVYGNPQYLPLDEAHPTGGCTNPYGKSKFFIEEMIRDLCQADKTWNAVLLRYFNPTGAHASGCIGEDPQGIPNNLMPYVSQVAIGRREALNVFGNDYDTEDGTGVRDYIHVVDLAKGHIAALRKLKEQCGCRIYNLGTGTGYSVLQMVQAMEKASGKKIPYKVVARREGDVAACYANPSLAQEELGWTAALGLDRMCEDLWRWQKQNPSGFGTQA

SEQ ID NO: 18336 - protein, 381 aa, Homo sapiens
VGRGNPSRTLQSSVTLDKEVWILRFHLFQLQGAMAEKVLVTGGAGYIGSHTVLELLEAGYLPVVIDNFHNAFRGGGSLPESLRRVQELTGRSVEFEEMDILDQGALQRLFKKYSFMAVIHFAGLKAVGESVQKPLDYYRVNLTGTIQLLEIMKAHGVKNLVFSSSATVYGNPQYLPLDEAHPTGGCTNPYGKSKFFIEEMIRDLCQADKTWNAVLLRYFNPTGAHASGCIGEDPQGIPNNLMPYVSQVAIGRREALNVFGNDYDTEDGTGVRDYIHVVDLAKGHIAALRKLKEQCGCRIYNLGTGTGYSVLQMVQAMEKASGKKIPYKVVARREGDVAACYANPSLAQEELGWTAALGLDRMCEDLWRWQKQNPSGFGTQA

SEQ ID NO: 18337 - protein, 160 aa, Homo sapiens
LFSVGQIYNLGTGTGYSVLQMVQAMEKASGKKVGPPAPPTSPTSPHPALSNRAALALPTHLSGGYLALPSLLSLPSTRCLRASRCSALLLLKDLASSWARAGSAKLQLPPVLQIPYKVVARREGDVAACYANPSLAQEELGWTAALGLDRMCECWPDPCS

SEQ ID NO: 18338 - protein, 19 aa, Homo sapiens
LSILLLNNHHLSRSLLENK

SEQ ID NO: 18339 - protein, 54 aa, Homo sapiens
RERPDGAEDESRILGPASALHLQQQIARKWELARSADRPAGEAHGPGLPAAPRL

SEQ ID NO: 18340 - protein, 14 aa, Homo sapiens
RVGSMGTGTQGRGW

SEQ ID NO: 18341 - protein, 11 aa, Homo sapiens
LDGPGNGVQAH

SEQ ID NO: 18342 - protein, 22 aa, Homo sapiens
RSTLLFLKTSRVLSRASRADRC

SEQ ID NO: 18343 - protein, 11 aa, Homo sapiens
MKVRGPGSGDS

SEQ ID NO: 18344 - protein, 44 aa, Homo sapiens
MLWRGFAFSNPWTVTTSMPRATSQTACTSSTPRAPVCLCPSSVT

SEQ ID NO: 18345 - protein, 16 aa, Homo sapiens
LAGAAEHAPPDTEAEV

SEQ ID NO: 18346 - protein, 217 aa, Homo sapiens
TSGFLSWVAGKAMSKGRAEAAAGAAGILLRYLQEQNRPYSSQDVFGNLQREHGLGKAVVVKTLEQLAQQGKIKEKMYGKQKIYFADQDQFDMVSDADLQVLDGKIVALTAKVQSLQQSCRYMEAEMQKEIQELKKECAGYRERLKNIKAATNHVTPEEKEQVYRERQKYCKEWRKRKRMATELSDAILEGYPKSKKQFFEEVGIETDEDYNVTLPDP

SEQ ID NO: 18347 - protein, 25 aa, Homo sapiens
RPQCLRGRPDLGDGLRAPEVKSIGG

SEQ ID NO: 18348 - protein, 33 aa, Homo sapiens
RPQCLRGRPDLGDGLRAPEGWKGLRRPTTAPCR

SEQ ID NO: 18349 - protein, 72 aa, Homo sapiens
IAEADWHSNEGTVRTEAQVAQMQKLPLVMISASPWQILIYHPKWSQSCAVSLLSVFQEVQSLKGWVMLHLWS

SEQ ID NO: 18350 - protein, 59 aa, Homo sapiens
TASGSGICTAGRQGFWQRRDSWVARMALLIRYWWCPCTAEFPCQRPCSCFKIGTLEQYT

SEQ ID NO: 18351 - protein, 41 aa, Homo sapiens
IASFWSLCCCKPYLHAPVHSAFNLYHCHFCCHQVRLYQNEE

SEQ ID NO: 18352 - protein, 44 aa, Homo sapiens
ICRVKVVVPMECSQVTAPLTSVLSSTVMPLMCLQPMEASMRNLL

SEQ ID NO: 18353 - protein, 46 aa, Homo sapiens
KTRSVWTWTSWRRCFRSWCVSVGRGASGGARLAGPKCFSSPQLLDF

SEQ ID NO: 18354 - protein, 21 aa, Homo sapiens
KDLSLTDPLPGVPTQAKLEHG

SEQ ID NO: 18355 - protein, 32 aa, Homo sapiens
VVSWGPACLVAFRVLEPLHDRHHGSVTIAACK

SEQ ID NO: 18356 - protein, 23 aa, Homo sapiens
ILSITTGPLFCDIVFWRNLSLPL

SEQ ID NO: 18357 - protein, 9 aa, Homo sapiens
KPSCYTFPR

SEQ ID NO: 18358 - protein, 17 aa, Homo sapiens
LDTNDASIATEIGSNRG

SEQ ID NO: 18359 - protein, 67 aa, Homo sapiens
TETAVSAAGDPAASSLLLPDGLEVGVCVLGTLPLEAPERLKGWPRQIWNNYALMLMKRLAILRKPYH

SEQ ID NO: 18360 - protein, 22 aa, Homo sapiens
RRTLDYRISLTTRSTQLQTLSE

SEQ ID NO: 18361 - protein, 11 aa, Homo sapiens
MHLFWFYKKET

SEQ ID NO: 18362 - protein, 56 aa, Homo sapiens
IAAILASGAPASRPPGGELLGLLNPRWRRWLLMREDVAEGLTLGAGVICENGSLFT

SEQ ID NO: 18363 - protein, 7 aa, Homo sapiens
KQALGDL

SEQ ID NO: 18364 - protein, 8 aa, Homo sapiens
LYFPLGDL

SEQ ID NO: 18365 - protein, 42 aa, Homo sapiens
TASVLQSVSLEVTRATAGMVLGFDDSRERTISYHLRRFTKRK

SEQ ID NO: 18366 - protein, 66 aa, Homo sapiens
LPSAPPAAHQAPRGPAARAVRLPAAPSGSPGPSAALPAPVLRRRGVQWVPDRHPRTIQKEKAHFGG

SEQ ID NO: 18367 - protein, 37 aa, Homo sapiens
LRRRGVQVRPHGARPLQQWVPDRHPRTIQKEKAHFGG

SEQ ID NO: 18368 - protein, 19 aa, Homo sapiens
LAAESPFPPSNDTLCIRFC

SEQ ID NO: 18369 - protein, 34 aa, Homo sapiens
LTLSLCPFPRSRRHVCASAMDGRAELLQFPDQEE

SEQ ID NO: 18370 - protein, 24 aa, Homo sapiens
MSESGPSSSSSCGLQEGSLPPAAL

SEQ ID NO: 18371 - protein, 51 aa, Homo sapiens
LPKMAEVQVLVLDGRGHLLGRLAAIVAKQAGRWWSYAVKASTFLAISTETS

SEQ ID NO: 18372 - protein, 27 aa, Homo sapiens
TMRTGSTRELLPQRGTCTSGVALGLAP

SEQ ID NO: 18373 - protein, 21 aa, Homo sapiens
LYQGGAWSTPSDRDAQAVFSG

SEQ ID NO: 18374 - protein, 31 aa, Homo sapiens
MPSTCLTVQGGMPPNASAKLSVPLWSASLTP

SEQ ID NO: 18375 - protein, 68 aa, Homo sapiens
LGRVSKMGILGCHGQYYQAEPILRYPSHQTRKRVRLREETTGNGAAAGLSSRNEDRDEARSTHQLPPA

SEQ ID NO: 18376 - protein, 51 aa, Homo sapiens
MRVSSFVEERKMHWSPRTWSLGNQFMERRESRFRKEMTKLSTEPGTPSAPS

SEQ ID NO: 18377 - protein, 27 aa, Homo sapiens
TGAPAGRVATSLTTVPVFLGLRVRIVK

SEQ ID NO: 18378 - protein, 12 aa, Homo sapiens
VPVRSWLHWTSL

SEQ ID NO: 18379 - protein, 16 aa, Homo sapiens
LYLYGRLHRNLLRGGH

SEQ ID NO: 18380 - protein, 8 aa, Homo sapiens
RCELRSEH

SEQ ID NO: 18381 - protein, 7 aa, Homo sapiens
LHLWSLP

SEQ ID NO: 18382 - protein, 26 aa, Homo sapiens
LSCLPASPSHASMEASAVLARVLGVG

SEQ ID NO: 18383 - protein, 9 aa, Homo sapiens
LLPRCPERR

SEQ ID NO: 18384 - protein, 24 aa, Homo sapiens
ISLTLGCGCEQRGSHFGPAQKWSQ

SEQ ID NO: 18385 - protein, 19 aa, Homo sapiens
LTRTNRNRSRRLQLRPKRT

SEQ ID NO: 18386 - protein, 29 aa, Homo sapiens
RSREGGGILILSEIFPRLQTPTDLLWEPE

SEQ ID NO: 18387 - protein, 17 aa, Homo sapiens
KEPSKVPVSRCCYSTQS

SEQ ID NO: 18388 - protein, 13 aa, Homo sapiens
IHCCTRTKRRNGE

SEQ ID NO: 18389 - protein, 324 aa, Homo sapiens
LTEFWLRQRRRRPERAMDALKSAGRALIRSPSLAKQSWGGGGRHRKLPENWTDTRETLLEGMLFSLKYLGMTLVEQPKGEELSAAAIKRIVATAKASGKKLQKVTLKVSPRGIILTDNLTNQLIENVSIYRISYCTADKMHDKVFAYIAQSQHNQSLECHAFLCTKRKMAQAVTLTVAQAFKVAFEFWQVSKEEKEKRDKASQEGGDVLGARQDCTPSLKSLVATGNLLDLEETAKAPLSTVSANTTNMDEVPRPQALSGSSVVWELDDGLDEAFSRLAQSRTNPQVLDTGLTAQDMHYAQCLSPVDWDKPDSSGTEQDDLFSF

SEQ ID NO: 18390 - protein, 13 aa, Homo sapiens
MRSRTSWTVTTES

SEQ ID NO: 18391 - protein, 236 aa, Homo sapiens
LPENWTDTRETLLEGMLFSLKYLGMTLVEQPKGEELSAAAIKRIVATAKASGKKLQKVTLKVSPRGIILTDNLTNQLIENVSIYRISYCTADKMHDKVFAYIAQSQHNQSLECHAFLCTKRKMAQAVTLTVAQAFKVAFEFWQVSKEEKEKRDKASQEGGDVLGARQDCTPSLKSLVATGNLLDLEETAKAPLSTVSANTTNMDEVPRPQALSGSSVVWVSGCVASRSVILSLTSG

SEQ ID NO: 18392 - protein, 105 aa, Homo sapiens
LQKVTLKVSPRGIILTDNLTNQLIENVSIYRISYCTADKMHDKVFAYIAQSQHNQSLECHAFLCTKRKMVSGEGWGGDRVQWPWQPCSGWGAVWCGRQDPKVTIT

SEQ ID NO: 18393 - protein, 14 aa, Homo sapiens
MGTAVSLPKGACED

SEQ ID NO: 18394 - protein, 138 aa, Homo sapiens [sequence omitted]

SEQ ID NO: 18395 - protein, 48 aa, Homo sapiens
VSQMIPFSDWPRPMASSQSKVGGSHLGRVSGLGLLQRRGLNVVLFPWF

SEQ ID NO: 18396 - protein, 108 aa, Homo sapiens
LTGSLTVVATGNLLDLEETAKAPLSTVSANTTNMDEVPRPQALSGSSVVWLDDGLDEAFSRLAQSRTNPQVLDTGLTAQDMHYAQCLSPVDWDKPDSSGTEQDDLFSF

SEQ ID NO: 18397 - protein, 61 aa, Homo sapiens [sequence omitted]

SEQ ID NO: 18398 - protein, 13 aa, Homo sapiens
VAPEAVLLSGSES

SEQ ID NO: 18399 - protein, 476 aa, Homo sapiens
LKSCVCGPRGPQAVIPIHEASDPFQRMMQFAWQSYKRYAMGKNELRPLTKDGYEGNMFGGLSGATVIDSLDTLYLMELKEEFQEAKAWVGESFHLNVSGEASLFEVNIRYIGGLLSAFYLTGEEVFRIKAIRLGEKLLPAFNTPTGIPKGVVSFKSGNWGWATAGSSSILAEFGSLHLEFLHLTELSGNQVFAEKVRNIRKVLRKIEKPFGLYPNFLSPVSGNWVQHHVSVGGLGDSFYEYLIKSWLMSGKTDMEAKNMYYEALEAIETYLLNVSPGGLTYIAEWRGGILDHKMGHLACFSGGMIALGAEDAKEEKRAHYRELAAQITKTCHESYARSDTKLGPEAFWFNSGREAVATQLSESYYILRPEVVESYMYLWRQTHNPIYREWGWEVVLALEKYCRTEAGFSGIQDVYSSTPNHDNKQQSFFLAETLKYLYLLFSEDDLLSLEDWVFNTEAHPLPVNHSDSSGRAWGRH

SEQ ID NO: 18400 - protein, 15 aa, Homo sapiens
LQLMIQLLSPSDRPC

SEQ ID NO: 18401 - protein, 17 aa, Homo sapiens
LMVYSSQVLPIQSKGPS

SEQ ID NO: 18402 - protein, 485 aa, Homo sapiens
LCWPGWSRTPDLRRSACLGLPKCWDYRHEPLSPAGNTIFLLSPWKFIYILILHFCSIHTLLSTGENRGGLSGATVIDSLDTLYLMELKEEFQEAKAWVGESFHLNVSGEASLFEVNIRYIGGLLSAFYLTGEEVFRIKAIRLGEKLLPAFNTPTGIPKGVVSFKSGNWGWATAGSSSILAEFGSLHLEFLHLTELSGNQVFAEKVRNIRKVLRKIEKPFGLYPNFLSPVSGNWVQHHVSVGGLGDSFYEYLIKSWLMSGKTDMEAKNMYYEALEAIETYLLNVSPGGLTYIAEWRGGILDHKMGHLACFSGGMIALGAEDAKEEKRAHYRELAAQITKTCHESYARSDTKLGPEAFWFNSGREAVATQLSESYYILRPEVVESYMYLWRQTHNPIYREWGWEVVLALEKYCRTEAGFSGIQDVYSSTPNHDNKQQSFFLAETLKYLYLLFSEDDLLSLEDWVFNTEAHPLPVNHSDSSGRAWGRH

SEQ ID NO: 18403 - protein, 40 aa, Homo sapiens
IDQVKLQLCDINFGVSNHVADQHKDGVFGQGHLRPAGHQR

SEQ ID NO: 18404 - protein, 219 aa, Homo sapiens
LQVLFEKLAIETYLLNVSPGGLTYIAEWRGGILDHKMGHLACFSGGMIALGAEDAKEEKRAHYRELAAQITKTCHESYARSDTKLGPEAFWFNSGREAVATQLSESYYILRPEVVESYMYLWRQTHNPIYREWGWEVVLALEKYCRTEAGFSGIQDVYSSTPNHDNKQQSFFLAETLKYLYLLFSEDDLLSLEDWVFNTEAHPLPVNHSDSSGRAWGRH

SEQ ID NO: 18405 - protein, 36 aa, Homo sapiens
MWKRTGLRPQKGLNRRWRPPVPSMATHPGTWQTAPR

SEQ ID NO: 18406 - protein, 24 aa, Homo sapiens
LWNSMGTMQQPRAERARNASTAGS

SEQ ID NO: 18407 - protein, 10 aa, Homo sapiens
KTATPRSARA

SEQ ID NO: 18408 - protein, 12 aa, Homo sapiens
LFFTLAENSGVS

SEQ ID NO: 18409 - protein, 32 aa, Homo sapiens
LVFLGELWQHHCACAGRAGTHFLHRLSLSSSG

SEQ ID NO: 18410 - protein, 16 aa, Homo sapiens
VPVQGEREPTSCTGFL

SEQ ID NO: 18411 - protein, 13 aa, Homo sapiens
LGSGESAWGFSGP

SEQ ID NO: 18412 - protein, 46 aa, Homo sapiens
TAELLEDLGPWVAGGSRRASWTDLKKTAFQDLLRLQLQLEVQNVFS

SEQ ID NO: 18413 - protein, 13 aa, Homo sapiens
KSQPVVATFARSL

SEQ ID NO: 18414 - protein, 13 aa, Homo sapiens
TPPHPISRNLQTS

SEQ ID NO: 18415 - protein, 48 aa, Homo sapiens
ILIFPTLSVRSPPPLDARAPGLVGCAAPRTASHQPAPSLSCSTLICTP

SEQ ID NO: 18416 - protein, 89 aa, Homo sapiens
LIPRFRLTYLMRSVRETKSNLQCTQRPHCPRFRAQSFLLQGNMKTLCGYMTLLLKQQTMLGLLFHLLLRSPTLMVLERRCRNWEKVKGL

SEQ ID NO: 18417 - protein, 12 aa, Homo sapiens
INNNGFSRVICN

SEQ ID NO: 18418 - protein, 9 aa, Homo sapiens
ISTSEKRSG

SEQ ID NO: 18419 - protein, 384 aa, Homo sapiens
LRRRPAGFVSSAAMRRTGPEEEACGVWLDAAALKRRKVQTHLIKPGTKMLTLLPGERKANIYFTQRRAPSTGIHQRSIASFFTLQPGKTNGSDQKSVSSHTESQINKESKKNATQLDHLIPGLAHDCMASPLATSTTADIQEAGLSPQSLQTSGHHRMKTPFSTELSLLQPDTPDCAGDSHTPLAFSFTEDLESSCLLDRKEEKGDSARKWEWLHESKKNYQSMEKHTKLPGDKCCQPLGKTKLERKVSAKENRQAPVLLQTYRESWNGENIESVKQSRSPVSVFSWDNEKNDKDSWSQLFTEDSQGQRVIAHNTRAPFQDVTNNWNWDLGPFPNSPWAQCQEDGPTQNLKPDLLFTQDSEVQALACQQDCCRRSILKRQKHLR

SEQ ID NO: 18420 - protein, 16 aa, Homo sapiens
KRSLRDRFLEIAPGRS

SEQ ID NO: 18421 - protein, 370 aa, Homo sapiens
LRRRPAGFVSSAAMRRTGPEEEACGVWLDAAALKRRKVQTHLIKPGTKMLTLLPGERKANIYFTQRRAPSTGIHQRSIASFFTLQPGKTNGSDQKSVSSHTESQINKESKKNATQLDHLIPGLAHDCMASPLATSTTADIQEAGLSPQSLQTSGHHRMKTPFSTELSLLQPDTPDCAGDSHTPLAFSFTEDLESSCLLDRKEEKGDSARKWEWLHESKKNYQSMEKHTKLPGDKCCQPLGKTKLERKVSAKENRQAPVLLQTYRESWNGENIESVKQSRSPVSVFSWDNEKNDKDSWSQLFTEDSQGQRVIAHNTRAPFQDVTNNWNWDLGPFPNSPWAQCQEDGPTQNLKPDLLFTQDSEGNQVIRHQF

SEQ ID NO: 18422 - protein, 78 aa, Homo sapiens
RQQGDQVLPLTKSLLGIMKRIRTLTFLAVHFPPVKVMVQFSIHIHIRGLACCTSKKPDCCSLLRTGMQQSGRGCLILS

SEQ ID NO: 18423 - protein, 8 aa, Homo sapiens
KKQYKTSC

SEQ ID NO: 18424 - protein, 10 aa, Homo sapiens
MKVLIPTVFP

SEQ ID NO: 18425 - protein, 97 aa, Homo sapiens
VPSLLNFFFQSHEAEVLKQLAEKREHEKEVLQKAIEENNNFSKMAEEKLTHKMEANKENREAQMAAKLERLREKDKHIEEVRKNKESKDPADETEAD

SEQ ID NO: 18426 - protein, 184 aa, Homo sapiens
LSSRPDARTAWVAAGLSLSQLIVQNTLPVACLLFTMASSDIQVKELEKRASGQAFELILSPRSKESVPEFPLSPPKKKDLSLEEIQKKLEAAEERRKSHEAEVLKQLAEKREHEKEVLQKAIEENNNFSKMAEEKLTHKMEANKENREAQMAAKLERLREKDKHIEEVRKNKESKDPADETEAD

SEQ ID NO: 18427 - protein, 193 aa, Homo sapiens
VLPLGRGGHVALQGGVQAAKVWKGLSLSQLIVQNTLPVACLLFTMASSDIQVKELEKRASGQAFELILSPRSKESVPEFPLSPPKKKDLSLEEIQKKLEAAEERRKSHEAEVLKQLAEKREHEKEVLQKAIEENNNFSKMAEEKLTHKMEANKENREAQMAAKLERLREKDKHIEEVRKNKESKDPADETEAD

SEQ ID NO: 18428 - protein, 132 aa, Homo sapiens
VKELEKRASGQAFELILSPRSKESVPEFPLSPPKKKDLSLEEIQKKLEAAEERRKSHEAEVLKQLAEKREHEKEVLQKAIEENNNFSKMAEEKLTHKMEANKENREAQMAAKLERLREKVGFLLCKRVELGV

SEQ ID NO: 18429 - protein, 92 aa, Homo sapiens
MWAPLCSCQSRVSSMEAPSVGSMRSTACPVPTRTIRGRPWKASSSSLVWSPLQVTMNSECVDGWVDGGWQVGRLQGHSWQRLWVCRGPQVPL

SEQ ID NO: 18430 - protein, 18 aa, Homo sapiens
KGALQAESGRSPRDDHGL

SEQ ID NO: 18431 - protein, 42 aa, Homo sapiens
LSRKPWLMETKRNWRKLKLTGRRLRRSWRQFAMMSCLCLTSS

SEQ ID NO: 18432 - protein, 15 aa, Homo sapiens
LMPPRLCLNLRVKMS

SEQ ID NO: 18433 - protein, 19 aa, Homo sapiens
RTRDKLPRMGPSRVWSPAT

SEQ ID NO: 18434 - protein, 22 aa, Homo sapiens
ISNLESAFECEARWLLTLRASC

SEQ ID NO: 18435 - protein, 48 aa, Homo sapiens
LSPPTLSRLRTRCRPSRPWARPAFSSATPPTPFPESTSPPCLTTIQPM

SEQ ID NO: 18436 - protein, 70 aa, Homo sapiens
MASWACTAALAPCSTVPSPRRPSGLECSSSSATTCGMPRDGWTARVGCCAAWALAWPRPWWSCAPWRPSR

SEQ ID NO: 18437 - protein, 25 aa, Homo sapiens
ISKTQKTSSRRSSGPPRSPRLASSS

SEQ ID NO: 18438 - protein, 160 aa, Homo sapiens
LIGPEVLTRVLPALLLAPWPAGLFLAMGRSRRTGAHRAHSLARQMKAKRRRPDLDEIHRELRPQGSARPQPDPNAEFDPDLPGGGLHRCLACARYFIDSTNLKTHFRSKDHKKRLKQLSVEPYSQEEAERAAGMGSYVPPRRLAVPTEVSTEVPEMDTST

SEQ ID NO: 18439 - protein, 169 aa, Homo sapiens
LLLAPWPAGLFLAMGRSRRTGAHRAHSLARQMKAKRRRPDLDEIHRELRPQGSARPQPDPNAEFDPDLPGGGLHRCLACARYFIDSTNLKTHFRSKDHKKRYEGVRRGLMDGCSADRALTWSAPNSCFSFSQAEAAERRALQSGRGGEGSGYGILCAPQAAGSAHGSVH

SEQ ID NO: 18440 - protein, 68 aa, Homo sapiens [sequence omitted]

SEQ ID NO: 18441 - protein, 50 aa, Homo sapiens
ILRQLGSLEGTVKRPSSPAASDSCWLQEPAVPRGQQMAMQDQPGSRKPRS

SEQ ID NO: 18442 - protein, 59 aa, Homo sapiens
RARFCSASQRRTGRTTHSPRASSCFASPAGGSCVPRGIHRPSLLLSSPTSTPSATTAPA

SEQ ID NO: 18443 - protein, 32 aa, Homo sapiens
MSPLKMKVIPSIHPATWPWRQPTSTTISPSSA

SEQ ID NO: 18444 - protein, 12 aa, Homo sapiens
MFFPQDLNCHVL

SEQ ID NO: 18445 - protein, 46 aa, Homo sapiens
RVAVRAWSSVGAACLRAEARQGGAYGRKRKVDYKRDHILLRNGTSS

SEQ ID NO: 18446 - protein, 24 aa, Homo sapiens
VCTLVCYWELVVRCRSFGGFVLES

SEQ ID NO: 18447 - protein, 548 aa, Homo sapiens
LSRCLDPDQRPKPRKAHDHQSNGDMKEESAAQLGCCHRPMALGGTGGSLSPSLDFQLFRGDQVFSACRPLPDMVDAHGPSCASWLCPLPLAPGRSALLACLQDLDLNLCTPQPAPLGTDLQGLQEDALSMKHEPPGLQASSTDDKKFTVKYPQNKDKLGKQPERAGEGAPCPAFSSHNSSSPPPLQNRKSPSPLAFCPCPPVNSISKELPFLLHAFYPGYPLLLPPPHLFTYGALPSDQCPHLLMLPQDPSYPTMAMPSLLMMVNELGHPSARWETLLPYPGAFQASGQALPSQARNPGAGAAPTDSPGLERGGMASPAKRVPLSSQTGTAALPYPLKKKNGKILYECNICGKSFGQLSNLKVHLRVHSGERPFQCALCQKSFTQLAHLQKHHLVHTGERPHKCSIPWVPGRNHWKSFQAWREREVCHKRFSSSSNLKTHLRLHSGARPFQCSVCRSRFTQHIHLKLHHRLHAPQPCGLVHTQLPLASLACLAQWHQGALDLMAVASEKHMGYDIDEVKVSSTSQGKARAVSLSSAGTPLVMGQDQNN

SEQ ID NO: 18448 - protein, 529 aa, Homo sapiens
LSRCLDPDQRPKPRKAHDHQTGNGDMKEESAAQLGCCHRPMALGGTGGSLSPSLDFQLFRGDQVFSACRPLPDMVDAHGPSCASWLCPLPLAPGRSALLACLQDLDLNLCTPQPAPLGTDLQGLQEDALSMKHEPPGLQASSTDDKKFTVKYPQNKDKLGKQPERAGEGAPCPAFSSHNSSSPPPLQNRKSPSPLAFCPCPPVNSISKELPFLLHAFYPGYPLLLPPPHLFTYGALPSDQCPHLLMLPQDPSYPTMAMPSLLMMVNELGHPSARWETLLPYPGAFQASGQALPSQARNPGAGAAPTDSPGLERGGMASPAKRVPLSSQTGTAALPYPLKKKNGKILYECNICGKSFGQLSNLKVHLRVHSGERPFQCALCQKSFTQLAHLQKHHLVHTGERPHKCSVCHKRFSSSSNLKTHLRLHSGARPFQCSVCRSRFTQHIHLKLHHRLHAPQPCGLVHTQLPLASLACLAQWHQGALDLMAVASEKHMGYDIDEVKVSSTSQGKARAVSLSSAGTPLVMGQDQNN

SEQ ID NO: 18449 - protein, 552 aa, Homo sapiens
LRNLSRCLDPDQRPKPRKAHDHQTGNGDMKEESAAQLGCCHRPMALGGTGGSLSPSLDFQLFRGDQVFSACRPLPDMVDAHGPSCASWLCPLPLAPGRSALLACLQDLDLNLCTPQPAPLGTDLQGLQEDALSMKHEPPGLQASSTDDKKFTVKYPQNKDKLGKQPERAGEGAPCPAFSSHNSSSPPPLQNRKSPSPLAFCPCPPVNSISKELPFLLHAFYPGYPLLLPPPHLFTYGALPSDQCPHLLMLPQDPSYPTMAMPSLLMMVNELGHPSARWETLLPYPGAFQASGQALPSQARNPGAGAAPTDSPGLERGGMASPAKRVPLSSQTGTAALPYPLKKKNGKILYECNICGKSFGQLSNLKVHLRVHSGERPFQCALCQKSFTQLAHLQKHHLVHTGERPHKCSIPWVPGRNHWKSFQAWREREVCHKRFSSSSNLKTHLRLHSGARPFQCSVCRSRFTQHIHLKLHHRLHAPQPCGLVHTQLPLASLACLAQWHQGALDLMAVASEKHMGYDIDEVKVSSTSQGKARAVSLSSAGTPLVMGQDQNN

SEQ ID NO: 18450 - protein, 1086 aa, Homo sapiens
IEMRNSEEQPSGGTTVLQRLLQEQLRYGNPSENRSLLAIHQQATGNGPPFPSGSGNPGPQSDVLSPQDHHQQLVAHAARQEPQGQEIQSENLIMEKQLSPRMQNNEELPTYEEAKVQSQYFRGQQHASVGAAFYVTGVTNQKMRTEGRPSVQRLNPGKMHQDEGLRDLKQGHVRSLSERLMQMSLATSGVKAHPPVTSAPLSPPQPNDLYKNPTSSSEFYKAQGPLPNQHSLKGMEHRGPPPEYPFKGMPPQSVVCKPQEPGHFYSEHRLNQPGRTEGQLMRYQHPPEYGAARPAQDISLPLSARNSQPHSPTSSLTSGGSLPLLQSPPSTRLSPARHPLVPNQGDHSAHLPRPQQHFLPNQAHQGDHYRLSQPGLSQQQQQQQQQHHHHHHHQQQQQQQPQQQPGEAYSAMPRAQPSSASYQPVPADPFAIVSRAQQMVEILSDENRNLRQELEGCYEKVARLQKVETEIQRVSEAYENLVKSSSKREALEKAMRNKLEGEIRRMHDFNRDLRERLETANKQLAEKEYEGSEDTRKTISQLFAKNKESQREKEKLEAELATARSTNEDQRRHIEIRDQALSNAQAKVVKLEEELKKKQVYVDKVEKMQQALVQLQAACEKREQLEHRLRTRLERELESLRIQQRQGNCQPTNVSEYNAAALMELLREKEERILALEADMTKWEQKYLEENVMRHFALDAAATVAAQRDTTVISHSPNTSYDTALEARIQKEEEEILMANKRCLDMEGRIKTLHAQIIEKDAMIKVLQQRSRKEPSKTEQLSCMRPAKSLMSISNAGSGLLSHSSTLTGSPIMEEKRDDKSWKGSLGILLGGDYRAEYVPSTPSPVPPSTPLLSAHSKTGSRDCSTQTERGTESNKTAAVAPISVPAPVAAAATAAAITATAATITTTMVAAAPVAVAAAAAPAAAAAPSPATAAATAAAVSPAAAGQIPAAASVASAAAVAPSAAAAAAVQVAPAAPAPVPAPALVPVPAPAAAQASAPAQTQAPTSAPAVAPTPAPTPTPAVAQAEVPASPATGPGPHRLSIPSLTCNPDKTDGPVFHSNTLERKTPIQILGQEPDAEMVEYLI

SEQ ID NO: 18451 - protein, 36 aa, Homo sapiens
VFCQRHVMRKCRPTEAVGTRPAELIRLPGWCLLVLE

SEQ ID NO: 18452 - protein, 13 aa, Homo sapiens
LKGLPGWCLLVLE

SEQ ID NO: 18453 - protein, 12 aa, Homo sapiens
VKLPGWCLLVLE

SEQ ID NO: 18454 - protein, 13 aa, Homo sapiens
LKELPGWCLLVLE

SEQ ID NO: 18455 - protein, 39 aa, Homo sapiens
RWRSTSCTISPSPSSLLCLEGMWFPLSWTTVPPEPAWWP

SEQ ID NO: 18456 - protein, 64 aa, Homo sapiens
LEGLGKMLSAHQLLVLPQACSMKASSGYRVPSSGSQRSVMPSREGRTHWWRAALPMTWTRWPGC

SEQ ID NO: 18457 - protein, 50 aa, Homo sapiens
IAERILLLGVPANKRDRAGIRIWEQNERRPEFRCLCPRKAGFRSALLPDR

SEQ ID NO: 18458 - protein, 10 aa, Homo sapiens
RLTLKVVHYG

SEQ ID NO: 18459 - protein, 33 aa, Homo sapiens
LTCTVGMQTVLQKEQLHMCRHLTRCLLVLWQST

SEQ ID NO: 18460 - protein, 16 aa, Homo sapiens
LTARASQLKRQRKTLK

SEQ ID NO: 18461 - protein, 29 aa, Homo sapiens
IPRGKTLELCTSTNIQTGVWSSFLQNPRN

SEQ ID NO: 18462 - protein, 14 aa, Homo sapiens
IKKIKLNLIMKWTK

SEQ ID NO: 18463 - protein, 20 aa, Homo sapiens
VLSQEAQWAAEELEKDQAKP

SEQ ID NO: 18464 - protein, 12 aa, Homo sapiens
LETGHLQNQPVK

SEQ ID NO: 18465 - protein, 7 aa, Homo sapiens
MKLLSRS

SEQ ID NO: 18466 - protein, 43 aa, Homo sapiens
VSPSPSLGALGWTLHSRRDNGLLALATLLPARDGVLLCCPGWS

SEQ ID NO: 18467 - protein, 59 aa, Homo sapiens
VSPSPSLGALGWTLHSRRDNGLLALATLLPASIGGPEDPPRSKGRGGAGRISYHQVPTS

SEQ ID NO: 18468 - protein, 18 aa, Homo sapiens
IFLCEDKHSKLNKRLEGP

SEQ ID NO: 18469 - protein, 14 aa, Homo sapiens
ILGYLGNFDKTLRC

SEQ ID NO: 18470 - protein, 23 aa, Homo sapiens
KMSSREHFLNQEVTVSLLRSCRS

SEQ ID NO: 18471 - protein, 14 aa, Homo sapiens
MSCNTHWECLQLHS

SEQ ID NO: 18472 - protein, 15 aa, Homo sapiens
IRQPEFYIYKVLILH

SEQ ID NO: 18473 - protein, 18 aa, Homo sapiens
MSSMAVLMLATSWPCRSS

SEQ ID NO: 18474 - protein, 13 aa, Homo sapiens
VHWADQDWCPLPI

SEQ ID NO: 18475 - protein, 9 aa, Homo sapiens
VWCFIRWGR

SEQ ID NO: 18476 - protein, 16 aa, Homo sapiens
MPGFPLRRAWGAARTV

SEQ ID NO: 18477 - protein, 46 aa, Homo sapiens
VEEAQAPVLRSREPQQPLPAPRFLDPESTLQSPSPDSLCCPPLSRE

SEQ ID NO: 18478 - protein, 29 aa, Homo sapiens
IMRCLYFTTEVYKFYANILTLSSNLKCSC

SEQ ID NO: 18479 - protein, 8 aa, Homo sapiens
VLETTPST

SEQ ID NO: 18480 - protein, 333 aa, Homo sapiens
ITGDISRFAGMGNLLKVLTREIENYPHFFLDFENAQPTEGEREIWNQISAVLQDSESILADLQAYKGAGPEIRDAIQNPNDIQLQEKAWNAVCPLVVRLKRFYEFSIRLEKALQSLLESLTCPPYTPTQHLEREQALAKEFAEILHFTLRFDELKMRNPAIQNDFSYYRRTISRNRINNMHLDIENEVNNEMANRMSLFYAEATPMLKTLSNATMHFVSENKTLPIENTTDCLSTMTSVCKVMLETPEYRSRFTSEETLMFCMRVMVGVIILYDHVHPVGAFCKTSKIDMKGCIKVLKEQAPDSVEGLLNALRFTTKHLNDESTSKQIRAMLQ

SEQ ID NO: 18481 - protein, 23 aa, Homo sapiens
LTRKKTGSERLSNLLKMTQLVGG

SEQ ID NO: 18482 - protein, 8 aa, Homo sapiens
LLQKDIGQ

SEQ ID NO: 18483 - protein, 12 aa, Homo sapiens
MDPENIGKKHRS

SEQ ID NO: 18484 - protein, 9 aa, Homo sapiens
LGSASWPYQ

SEQ ID NO: 18485 - protein, 14 aa, Homo sapiens
IVVSFQISLFHKYL

SEQ ID NO: 18486 - protein, 26 aa, Homo sapiens
LERKVKIKTIEVERIALGVVNQKLWF

SEQ ID NO: 18487 - protein, 32 aa, Homo sapiens
MNFLRRLHAVCMLQNRLHKSMRNSSHTSRKEE

SEQ ID NO: 18488 - protein, 21 aa, Homo sapiens
LVCLEILWWFWSCSNTSGSGP

SEQ ID NO: 18489 - protein, 29 aa, Homo sapiens
IIRIIQYAVCRISMTTLKMNFLYSPDILI

SEQ ID NO: 18490 - protein, 14 aa, Homo sapiens
VALIFHEDGIISTQ

SEQ ID NO: 18491 - protein, 21 aa, Homo sapiens
RNICGETPEALSRAVLIQTLR

SEQ ID NO: 18492 - protein, 254 aa, Homo sapiens
LCVPRAMERASLIQKAKLAEQAERYEDMAAFMKGAVEKGEELSCEERNLLSVAYKNVVGGQRAAWRVLSSIEQKSNEEGSEEKGPEVREYREKVETELQGVCDTVLGLLDSHLIKEAGDAESRVFYLKMKGDYYRYLAEVATGDDKKRIIDSARSAYQEAMDISKKEMPPTNPIRLGLALNFSVFHYEIANSPEEAISLAKTTFDEAMADLHTLSEDSYKDSTLIMQLLRDNLTLWTADNAGEEGGEAPQEPQS

SEQ ID NO: 18493 - protein, 51 aa, Homo sapiens
IAPVFWSGFECDSEIRLTELESWLYILPATQPWSLRNFFFSISSHPYFPSR

SEQ ID NO: 18494 - protein, 10 aa, Homo sapiens
VVLNVILRSD

SEQ ID NO: 18495 - protein, 10 aa, Homo sapiens
ISICIYQLSS

SEQ ID NO: 18496 - protein, 17 aa, Homo sapiens
LRKPFLQFKKSNKIFLP

SEQ ID NO: 18497 - protein, 17 aa, Homo sapiens
KGFTTSIPKHTFDFRRK

SEQ ID NO: 18498 - protein, 22 aa, Homo sapiens
MSVHKDILQTFPPQIYQRTESD

SEQ ID NO: 18499 - protein, 19 aa, Homo sapiens
LRVDHTAPTQKLCKYFKKD

SEQ ID NO: 18500 - protein, 13 aa, Homo sapiens
LRVDHTAPTQKLL

SEQ ID NO: 18501 - protein, 57 aa, Homo sapiens
RTRLQQEMQLEKTTWKEKLQSQIKSPVVFFSYYRKQVLKLPSPENVGRQLSLHRSVK

SEQ ID NO: 18502 - protein, 42 aa, Homo sapiens
IQPLTKLGCPEPLVIELFTFIPRRLGKHQNLHVVCAQADFEG

SEQ ID NO: 18503 - protein, 45 aa, Homo sapiens
IQPLTKLGCPEPLVIELFTFIPRRLGKHQNLHVVCAQADFEGFVL

SEQ ID NO: 18504 - protein, 27 aa, Homo sapiens
VTVSATAESVSVAHFVSRALGVKLQLI

SEQ ID NO: 18505 - protein, 40 aa, Homo sapiens
IEPEQKMGRVCMWLQDLCQRMKHSSHELTKSKGEFAEILI

SEQ ID NO: 18506 - protein, 10 aa, Homo sapiens
MYCVLLPTTF

SEQ ID NO: 18507 - protein, 27 aa, Homo sapiens
MQEYSLKFSALCFSDSQQPALIILKTS

SEQ ID NO: 18508 - protein, 36 aa, Homo sapiens
IFHRDKEILTDWKEQYMCEGWRKESNLQKNRPNHYS

SEQ ID NO: 18509 - protein, 84 aa, Homo sapiens
VIPGAQSRPPPTLWLFSSQINKMEWWSRLVSSDPEINTKKINPENSKVSPGWLGELQQEGEGPRCFQSFTDSCHCLPSAVRPGQ

SEQ ID NO: 18510 - protein, 12 aa, Homo sapiens
VSSIGKEPMTLW

SEQ ID NO: 18511 - protein, 19 aa, Homo sapiens
ITSELQRSIIAQGRWILSY

SEQ ID NO: 18512 - protein, 10 aa, Homo sapiens
KKKFKCEFQS

SEQ ID NO: 18513 - protein, 20 aa, Homo sapiens
MTFKLEMKWKVFCKIRFLSN

SEQ ID NO: 18514 - protein, 17 aa, Homo sapiens
LQGEWQEWASCVPGPPA

SEQ ID NO: 18515 - protein, 18 aa, Homo sapiens
TPSPIRSTPSAKLSQPWM

SEQ ID NO: 18516 - protein, 18 aa, Homo sapiens
IPHRGCCLPWSDVHEGGR

SEQ ID NO: 18517 - protein, 8 aa, Homo sapiens
ISTTPNAG

SEQ ID NO: 18518 - protein, 14 aa, Homo sapiens
TAPPSLPWKGHHEH

SEQ ID NO: 18519 - protein, 8 aa, Homo sapiens
MPRCQMNH

SEQ ID NO: 18520 - protein, 43 aa, Homo sapiens
VRQLPCVGLRGKSCSCPSLCDLKNPDFVSAKAPACVCVRVGIM

SEQ ID NO: 18521 - protein, 13 aa, Homo sapiens
TLSLTQSTPNARP

SEQ ID NO: 18522 - protein, 13 aa, Homo sapiens
KGGCIRKRKREVS

SEQ ID NO: 18523 - protein, 34 aa, Homo sapiens
MQEYVQAPRRPVHKRYRGFSRKLLKWMKTTDFCF

SEQ ID NO: 18524 - protein, 22 aa, Homo sapiens
LLFPSSQLCLGRRLCGSPETFG

SEQ ID NO: 18525 - protein, 8 aa, Homo sapiens
VPWATCIH

SEQ ID NO: 18526 - protein, 14 aa, Homo sapiens
KKLITVKWQKTCAR

SEQ ID NO: 18527 - protein, 52 aa, Homo sapiens
LKEVTATSTGTYTRRGRPHSVFSTMTPTTPRLCWNQESVQGSIILTQAQGTT

SEQ ID NO: 18528 - protein, 43 aa, Homo sapiens
LKQNSRRLEHTFVFLRNFSQILLRYIGKKRRATRFWDPRRGTP

SEQ ID NO: 18529 - protein, 24 aa, Homo sapiens
LVVILIPQKSYSVRTKAGMGMMYR

SEQ ID NO: 18530 - protein, 8 aa, Homo sapiens
MSEELTLV

SEQ ID NO: 18531 - protein, 19 aa, Homo sapiens
IDPVLRPSRPVALRAAVPR

SEQ ID NO: 18532 - protein, 28 aa, Homo sapiens
ISGVKLFKTVCSLPLSCDMLWCLMPPGW

SEQ ID NO: 18533 - protein, 14 aa, Homo sapiens
IHSLWLIPTQKGHF

SEQ ID NO: 18534 - protein, 68 aa, Homo sapiens
LIFVQTSTFHQCCQHVLLVWKENAVETNFVDRETVGTALQSILTAHLRILTIRTHISLQEASWPSQTT

SEQ ID NO: 18535 - protein, 11 aa, Homo sapiens
RPVRRRRRSTR

SEQ ID NO: 18536 - protein, 11 aa, Homo sapiens
ISWEMGRTVFP

SEQ ID NO: 18537 - protein, 20 aa, Homo sapiens
IQEEEEHRMFLVRRAGGFGN

SEQ ID NO: 18538 - protein, 23 aa, Homo sapiens
LLTTTLTLLCATCCSDRVCWASR

SEQ ID NO: 18539 - protein, 14 aa, Homo sapiens
IENEKQAKTSIGEV

SEQ ID NO: 18540 - protein, 17 aa, Homo sapiens
KAFGRVRRIWKALNIVA

SEQ ID NO: 18541 - protein, 37 aa, Homo sapiens
RKKDSRKERVQFGDEGSRRLGLATTRRRRAGVVRRGS

SEQ ID NO: 18542 - protein, 9 aa, Homo sapiens
TSARGRKPS

SEQ ID NO: 18543 - protein, 48 aa, Homo sapiens
VRLLLNGRGRERPRSVGSRQRLQRSRLLRLSVPSPFRFRKHGLRCGCL

SEQ ID NO: 18544 - protein, 20 aa, Homo sapiens
ILSMKESTSIPPLPVPDLKN

SEQ ID NO: 18545 - protein, 11 aa, Homo sapiens
RPKSRCQCPRC

SEQ ID NO: 18546 - protein, 13 aa, Homo sapiens
KHQMWKAKAWTGA

SEQ ID NO: 18547 - protein, 18 aa, Homo sapiens
LRCISRPPRSPCLMWTYT

SEQ ID NO: 18548 - protein, 12 aa, Homo sapiens
ILMLLMSRSKEK

SEQ ID NO: 18549 - protein, 8 aa, Homo sapiens
ILKVQMQS

SEQ ID NO: 18550 - protein, 15 aa, Homo sapiens
KRVLWTFHPDGDAGV

SEQ ID NO: 18551 - protein, 17 aa, Homo sapiens
IVPSLLRSWNIISHGSV

SEQ ID NO: 18552 - protein, 15 aa, Homo sapiens
MPFVDVYVGNFVEKL

SEQ ID NO: 18553 - protein, 18 aa, Homo sapiens
MCSRRCGPSHIAQTPWGR

SEQ ID NO: 18554 - protein, 201 aa, Homo sapiens
MGTTALLGGVRLSETIPVKRLARGLARVRDGGWGSPQAGEKALGGPLLTSGSHLPSYVKSYLLPDKQSKRKTAVKKRNLNPVFNETLRYSVPQAELQGRVLSLSVWHRESLGRNIFLGEVEVPLDTWDWGSEPTWLPLQPRVPPSPDDLPSRGLLALSLKYVPAGSEGAGLPPSGELHFWVKEARDLLPLRAGSLDTYVQW

SEQ ID NO: 18555 - protein, 9 aa, Homo sapiens
IRQPCFFML

SEQ ID NO: 18556 - protein, 31 aa, Homo sapiens
LGSSGSRASVSQVAGITDEILLCCPGWSAMA

SEQ ID NO: 18557 - protein, 315 aa, Homo sapiens [sequence omitted]

SEQ ID NO: 18558 - protein, 95 aa, Homo sapiens
ILVPRSLHKMPGEATETVPATEQELPQPQAETGSGTESDSDESVPELEEQDSTQATTQQAQLAAAAEIDEEPVSKAKQSRSEKKMSTRALLQILT

SEQ ID NO: 18559 - protein, 17 aa, Homo sapiens
ISTNTLTDMGSFDRRES

SEQ ID NO: 18560 - protein, 9 aa, Homo sapiens
RTHSNSLSV

SEQ ID NO: 18561 - protein, 22 aa, Homo sapiens
TRQLSHALLSTVVPCLCNSSCC

SEQ ID NO: 18562 - protein, 22 aa, Homo sapiens
LESLVFHLTQFMPNLQTNRKMK

SEQ ID NO: 18563 - protein, 12 aa, Homo sapiens
LIYFLPPLCLHE

SEQ ID NO: 18564 - protein, 15 aa, Homo sapiens
MQWALTGESEMPCVG

SEQ ID NO: 18565 - protein, 11 aa, Homo sapiens
MQKACAYLSGF

SEQ ID NO: 18566 - protein, 14 aa, Homo sapiens
LLQTLQNCQTKPTH

SEQ ID NO: 18567 - protein, 9 aa, Homo sapiens
VVQLRSARL

SEQ ID NO: 18568 - protein, 31 aa, Homo sapiens
ICFWKESTPTALTWAAFLRKCSHSSSCWPFF

SEQ ID NO: 18569 - protein, 17 aa, Homo sapiens
KGHLQESTSRSHTSCPG

SEQ ID NO: 18570 - protein, 11 aa, Homo sapiens
KNRSRPSSLSL

SEQ ID NO: 18571 - protein, 16 aa, Homo sapiens
LISSMIWQTSAAWCKY

SEQ ID NO: 18572 - protein, 20 aa, Homo sapiens
VDAEGAALVPGEVCDQRPNA

SEQ ID NO: 18573 - protein, 10 aa, Homo sapiens
IVCTQSFHHG

SEQ ID NO: 18574 - protein, 16 aa, Homo sapiens
LEYTKTLKIGRSFQSC

SEQ ID NO: 18575 - protein, 12 aa, Homo sapiens
IKKTHRGGEGSG

SEQ ID NO: 18576 - protein, 17 aa, Homo sapiens
LSSSLCLMEIMITSSSF

SEQ ID NO: 18577 - protein, 26 aa, Homo sapiens
LDQVQAKRPECYKMLRSQSKKKWKRI

SEQ ID NO: 18578 - protein, 44 aa, Homo sapiens
ITLRLRQWLLAQQLHAPWLRISSSLQRSPSRSAPEDLSSHVEAP

SEQ ID NO: 18579 - protein, 18 aa, Homo sapiens
LCYSDAGEHDQEAPPHSG

SEQ ID NO: 18580 - protein, 74 aa, Homo sapiens
IFDVPLYHFYKVIEVFIRAEDGLCREVVKHLNQIEEQILDHLAWKPESPLWEKIRDNENRVPTCEEVCENNIFL

SEQ ID NO: 18581 - protein, 10 aa, Homo sapiens
TCCSVQVVTT

SEQ ID NO: 18582 - protein, 30 aa, Homo sapiens
LWRACLCACWSTPGGRGRRAPPWSAGDRST

SEQ ID NO: 18583 - protein, 19 aa, Homo sapiens
KKKNNKESQAEEEARSMKC

SEQ ID NO: 18584 - protein, 9 aa, Homo sapiens
LALVGIEAS

SEQ ID NO: 18585 - protein, 541 aa, Homo sapiens
VRHAPFCSREPGMGCVFCKKLEPVATAKEDAGLEGDFRSYGAADHYGPDPTKARPASSFAHIPNYSNFSSQAINPGFLDSGTIRGVSGIGVTLFIALYDYEARTEDDLTFTKGEKFHILNNTEGDWWEARSLSSGKTGCIPSNYVAPVDSIQAEEWYFGKIGRKDAERQLLSPGNPQGAFLIRESETTKGAYSLSIRDWDQTRGDHVKHYKIRKLDMGGYYITTRVQFNSVQELVQHYMEVNDGLCNLLIAPCTIMKPQTLGLAKDAWEISRSSITLERRLGTGCFGDVWLGTWNGSTKVAVKTLKPGTMSPKAFLEEAQVMKLLRHDKLVQLYAVVSEEPIYIVTEFMCHGSLLDFLKNPEGQDLRLPQLVDMAAQVAEGMAYMERMNYIHRDLRAANILVGERLACKIADFGLARLIKDDEYNPCQGSKFPIKWTAPEAALFGRFTIKSDVWSFGILLTELITKGRIPYPGMNKREVLEQVEQGYHMPCPPGCPASLYEAMEQTWRLDPEERPTFEYLQSFLEDYFTSAEPQYQPGDQT

SEQ ID NO: 18586 - protein, 33 aa, Homo sapiens
LRSTRSAAVHFFRALTQGTLVLVGDGSSFPISA

SEQ ID NO: 18587 - protein, 18 aa, Homo sapiens
KRAGGGSPCHFPGMPVSR

SEQ ID NO: 18588 - protein, 10 aa, Homo sapiens
RQAAHRPRPP

SEQ ID NO: 18589 - protein, 16 aa, Homo sapiens
LFLWKPKEDVMSLPEK

SEQ ID NO: 18590 - protein, 20 aa, Homo sapiens
IQLFKTRQAETKMKTLTQTL

SEQ ID NO: 18591 - protein, 11 aa, Homo sapiens
ILQTCLKHLTS

SEQ ID NO: 18592 - protein, 8 aa, Homo sapiens
RLVKKNAK

SEQ ID NO: 18593 - protein, 19 aa, Homo sapiens
MGRSVRASSTHISRKRRHD

SEQ ID NO: 18594 - protein, 8 aa, Homo sapiens
LQKGDEEV

SEQ ID NO: 18595 - protein, 53 aa, Homo sapiens
TLLALQITCLHFKNNLPETLPVTLALPPNGDGSNGGTNQEGEICGLNSLCLIL

SEQ ID NO: 18596 - protein, 24 aa, Homo sapiens
RCTSATRTSYTCECSNLSLMKTSP

SEQ ID NO: 18597 - protein, 28 aa, Homo sapiens
RHRADRHSPAGHLEGSDPPERPPGVQAL

SEQ ID NO: 18598 - protein, 24 aa, Homo sapiens
LRRRSSSPSGTMIIPFSRAPPRRS

SEQ ID NO: 18599 - protein, 8 aa, Homo sapiens
MSALQGTA

SEQ ID NO: 18600 - protein, 13 aa, Homo sapiens
MDLPGDAHPRHPV

SEQ ID NO: 18601 - protein, 17 aa, Homo sapiens
KLPWPLGDREERSCAVP

SEQ ID NO: 18602 - protein, 16 aa, Homo sapiens
RPPRVKKKNEPFQSGQ

SEQ ID NO: 18603 - protein, 11 aa, Homo sapiens
LLIKLWDIKMG

SEQ ID NO: 18604 - protein, 20 aa, Homo sapiens
LWLVIAMGSPTACKSNLERL

SEQ ID NO: 18605 - protein, 78 aa, Homo sapiens
MRSKPSCTSSQVLGLQQHARLPKPKAKTLPEFIKDGSSTYSKIPAHRKGHRPAKPQRQDLDDDEHDYEEILEQFQKTI

SEQ ID NO: 18606 - protein, 8 aa, Homo sapiens
VPQARLLS

SEQ ID NO: 18607 - protein, 7 aa, Homo sapiens
KSTRLAP

SEQ ID NO: 18608 - protein, 8 aa, Homo sapiens
IWCEKRSA

SEQ ID NO: 18609 - protein, 8 aa, Homo sapiens
RTLVSLTA

SEQ ID NO: 18610 - protein, 16 aa, Homo sapiens
TRWTSKSTVSSCPASP

SEQ ID NO: 18611 - protein, 76 aa, Homo sapiens
LLFLPKSSQVLGLQQHARLPKPKAKTLPEFIKDGSSTYSKIPAHRKGHRPAKPQRQDLDDDEHDYEEILEQFQKTI

SEQ ID NO: 18612 - protein, 12 aa, Homo sapiens
IDLICYVEGWLL

SEQ ID NO: 18613 - protein, 29 aa, Homo sapiens
KTSSVSSIPSTRRRWCWCPGLCAQRPFPL

SEQ ID NO: 18614 - protein, 25 aa, Homo sapiens
RLRSCSRSTRTSRTRSTTTRRTTRR

SEQ ID NO: 18615 - protein, 22 aa, Homo sapiens
LLCAGQRALWQDLYLEGFSEKA

SEQ ID NO: 18616 - protein, 9 aa, Homo sapiens
IFSNLCQQL

SEQ ID NO: 18617 - protein, 26 aa, Homo sapiens
KPSVRCRGASWTPLWGSESPEFLLGW

SEQ ID NO: 18618 - protein, 24 aa, Homo sapiens
LVAPRIITENMAAQREWTPMVSSR

SEQ ID NO: 18619 - protein, 10 aa, Homo sapiens
IRTEISETTV

SEQ ID NO: 18620 - protein, 8 aa, Homo sapiens
VGKMALAE

SEQ ID NO: 18621 - protein, 36 aa, Homo sapiens
TQPLYPFPVQVRGCHGDEHDFKGYRESTFKTSRVFP

SEQ ID NO: 18622 - protein, 7 aa, Homo sapiens
MPSECRC

SEQ ID NO: 18623 - protein, 12 aa, Homo sapiens
LGQARRCTWRRC

SEQ ID NO: 18624 - protein, 21 aa, Homo sapiens
RMVRSASVAARRAIPCTCTRC

SEQ ID NO: 18625 - protein, 8 aa, Homo sapiens
LSSVVGCP

SEQ ID NO: 18626 - protein, 29 aa, Homo sapiens
KCCGITSKASPNRPFGALLGVVGLSEFPV

SEQ ID NO: 18627 - protein, 127 aa, Homo sapiens
KMPEPAKSAPAPKKGSKKAVTKAQKKDGKKRKRSRKESYSVYVYKVLKQVHPDTGISSKAMGIMNSFVNDIFERIAGEASRLAHYNKRSTITSREIQTAVRLLLPGELAKHAVSEGTKAVTKYTSSK

SEQ ID NO: 18628 - protein, 29 aa, Homo sapiens
KTQGRRSVLCSQSFTEESNPEKERGMRCA

SEQ ID NO: 18629 - protein, 12 aa, Homo sapiens
IAETQLKCTTTF

SEQ ID NO: 18630 - protein, 24 aa, Homo sapiens
KCLFMWSHEDLQAERKTRDQSSRF

SEQ ID NO: 18631 - protein, 16 aa, Homo sapiens
RTQRLYQKHDYRDISG

SEQ ID NO: 18632 - protein, 8 aa, Homo sapiens
IKEEKRCC

SEQ ID NO: 18633 - protein, 24 aa, Homo sapiens
LGTVACLLLPSGEMLPQEIPLGHP

SEQ ID NO: 18634 - protein, 19 aa, Homo sapiens
RIWTMPAKMTVFLTMGRLN

SEQ ID NO: 18635 - protein, 24 aa, Homo sapiens
RLNIRYIKTMHVSPNLVLSLGLVL

SEQ ID NO: 18636 - protein, 35 aa, Homo sapiens
RWRASGGLFGGVFRICSSRKRDVEAATQTSQTRAS

SEQ ID NO: 18637 - protein, 11 aa, Homo sapiens
KKTGSAKECDL

SEQ ID NO: 18638 - protein, 40 aa, Homo sapiens
ILDMNLMKAPSSLINSGLSSPIRQKKSPSFPLIPLQVLTA

SEQ ID NO: 18639 - protein, 10 aa, Homo sapiens
IKKLACSWES

SEQ ID NO: 18640 - protein, 23 aa, Homo sapiens
LNMSGETSSLCLCYTWEPCMGSL

SEQ ID NO: 18641 - protein, 31 aa, Homo sapiens
RSSSSVEPPLLQSSAAPTALSDHCQHNGIPE

SEQ ID NO: 18642 - protein, 12 aa, Homo sapiens
IGFLCLFQTFPP

SEQ ID NO: 18643 - protein, 8 aa, Homo sapiens
TDYTQLTV

SEQ ID NO: 18644 - protein, 78 aa, Homo sapiens
KPFHQLASLHPPIPPQRLSILLLCSCNTIENSKNDSVAFQILSQKEEWESRTQHQPRKNPPHLARLLKKEQRMTVGGW

SEQ ID NO: 18645 - protein, 25 aa, Homo sapiens
TRCSRRSRKWLCWGCPTTLLPRCPP

SEQ ID NO: 18646 - protein, 13 aa, Homo sapiens
RTSRRSWTALSVS

SEQ ID NO: 18647 - protein, 25 aa, Homo sapiens
RTSRRSWTAWVSRRTTTGSTRLSVS

SEQ ID NO: 18648 - protein, 12 aa, Homo sapiens
VGHTDESHRHGD

SEQ ID NO: 18649 - protein, 105 aa, Homo sapiens
TTARRAFPIPFGSKSNMATLKDQLIYNLLKEEQTPQNKITVVGVGAVGMACAISILMKDLADELALVDVIEDKLKGEMMDLQHGSLFLRTPKIVSGKDSAPRFRD

SEQ ID NO: 18650 - protein, 11 aa, Homo sapiens
VLEYSKRIYWS

SEQ ID NO: 18651 - protein, 29 aa, Homo sapiens
MHILSPHSYFKNHRSDSAWPEGTLCWWLY

SEQ ID NO: 18652 - protein, 8 aa, Homo sapiens
VLCFPEEI

SEQ ID NO: 18653 - protein, 20 aa, Homo sapiens
MCKILEEDSRERERDQRSQG

SEQ ID NO: 18654 - protein, 39 aa, Homo sapiens
KLLSRGGVFYGSDKDEGNCRSLPWEGYQRCWNYCWSQCT

SEQ ID NO: 18655 - protein, 15 aa, Homo sapiens
KFQQWTFHLLLGVGQ

SEQ ID NO: 18656 - protein, 13 aa, Homo sapiens
VCPLPILRALRGS

SEQ ID NO: 18657 - protein, 13 aa, Homo sapiens
KSPRSPCLMWTYI

SEQ ID NO: 18658 - protein, 9 aa, Homo sapiens
KVPNSRCQK

SEQ ID NO: 18659 - protein, 15 aa, Homo sapiens
IGGRFNRPQCGCGGA

SEQ ID NO: 18660 - protein, 11 aa, Homo sapiens
RSRSGREPAQG

SEQ ID NO: 18661 - protein, 18 aa, Homo sapiens
KLLKYQCLIWTSILKALK

SEQ ID NO: 18662 - protein, 18 aa, Homo sapiens
KAQRVNSRDPNLRYQRCT

SEQ ID NO: 18663 - protein, 24 aa, Homo sapiens
LMPLMSVSKVQMQNSRVQSSRCQR

SEQ ID NO: 18664 - protein, 11 aa, Homo sapiens
RSGRKIEGAQI

SEQ ID NO: 18665 - protein, 17 aa, Homo sapiens
RPTSMSRDPRWTLIFQM

SEQ ID NO: 18666 - protein, 16 aa, Homo sapiens
LTSSHLHWMSLFLRQS

SEQ ID NO: 18667 - protein, 10 aa, Homo sapiens
KPAGRSGCLW

SEQ ID NO: 18668 - protein, 12 aa, Homo sapiens
IWHLLSQILAST

SEQ ID NO: 18669 - protein, 475 aa, Homo sapiens
MQILGWPPGAAGLFVFLSHPGRGQRPAERMLWGSSRPGGERRSSLWPTCTKDRKMSPKRIAKRRSPPADAIPKSKKVKVSHRSHSTEPGLVLTLGQGDVGQLGLGENVMERKKPALVSIPEDVVQAEAGGMHTVCLSKSGQVYSFGCNDEGALGRDTSVEGSEMVPGKVELQEKVVQVSAGDSHTAALTDDGRVFLWGSFRDNNGVIGLLEPMKKSMVPVQVQLDVPVVKVASGNDHLVMLTADGDLYTLGCGEQGQLGRVPELFANRGGRQGLERLLVPKCVMLKSRGSRGHVRFQDAFCGAYFTFAISHEGHVYGFGLSNYHQLGTPGTESCFIPQNLTSFKNSTKSWVGFSGGQHHTVCMDSEGKAYSLGRAEYGRLGLGEGAEEKSIPTLISRLPAVSSVACGASVGYAVTKDGRVFAWGMGTNYQLGTGQDEDAWSPVEMMGKQLENRVVLSVSSGGQHTVLLVKDKEQS

SEQ ID NO: 18670 - protein, 7 aa, Homo sapiens
INFWVQR

SEQ ID NO: 18671 - protein, 30 aa, Homo sapiens
LCSPYCLYRLRPAEARSQDCCGCAELLQSD

SEQ ID NO: 18672 - protein, 462 aa, Homo sapiens
LWPTCTKDRKMSPKRIAKRRSPPADAIPKSKKVKDTRAAASRRVPGARSCQGACGPSPPDQKTRPVSHRSHSTEPGLVLTLGQGDVGQLGLGENVMERKKPALVSIPEDVVQAEAGGMHTVCLSKSGQVYSFGCNDEGALGRDTSVEGSEMVPGKVELQEKVVQVSAGDSHTAALTDDGRVFLWGSFRDNNGVIGLLEPMKKSMVPVQVQLDVPVVKVASGNDHLVMLTADGDLYTLGCGEQGQLGRVPELFANRGGRQGLERLLVPKCVMLKSRGSRGHVRFQDAFCGAYFTFAISHEGHVYGFGLSNYHQLGTPGTESCFIPQNLTSFKNSTKSWVGFSGGQHHTVCMDSEGKAYSLGRAEYGRLGLGEGAEEKSIPTLISRLPAVSSVACGASVGYAVTKDGRVFAWGMGTNYQLGTGQDEDAWSPVEMMGKQLENRVVLSVSSGGQHTVLLVKDKEQS

SEQ ID NO: 18673 - protein, 36 aa, Homo sapiens
TEAEAALAVVVEAILEVVEATMILGITTISLQILDP

SEQ ID NO: 18674 - protein, 150 aa, Homo sapiens
MHTVCLSKSGQVYSFGCNDEGALGRDTSVEGSEMVPGKVELQEKVVQVSAGDSHTAALTDDGRVFLWGSFRDNNGVIGLLEPMKKSMVPVQVQLDVPVVKVASGNDHLVMLTADGDLYTLGCGEQGQLGRVPELFANRGGRQGLGCCEVK

SEQ ID NO: 18675 - protein, 14 aa, Homo sapiens
IDRYKAHSPAPQSG

SEQ ID NO: 18676 - protein, 38 aa, Homo sapiens
ILVADIWSSYNMADIDNTSANCSDDAKSSDSCSPSRKT

SEQ ID NO: 18677 - protein, 26 aa, Homo sapiens
LAFIPAAAMDGFWGNMATQVWLCGVV

SEQ ID NO: 18678 - protein, 26 aa, Homo sapiens
INLVYCNSVLFMETEGCILFIVIFVL

SEQ ID NO: 18679 - protein, 14 aa, Homo sapiens
KIWQKRTRPVMKEK

SEQ ID NO: 18680 - protein, 65 aa, Homo sapiens
LAKAKRFKLNYATYGKQPDNSPEYSLFVGDLTPDVDDGMLYEFFVKVYPSCRGGKVVLDQTGVSK

SEQ ID NO: 18681 - protein, 28 aa, Homo sapiens
KNSLDCGVESAERTLCTVRPCQKVHFTF

SEQ ID NO: 18682 - protein, 68 aa, Homo sapiens
LFFNFQAKRFKLNYATYGKQPDNSPEYSLFVGDLTPDVDDGMLYEFFVKVYPSCRGGKVVLDQTGVSK

SEQ ID NO: 18683 - protein, 23 aa, Homo sapiens
MSPKQGEGARLSVWTLTHRIIQR

SEQ ID NO: 18684 - protein, 8 aa, Homo sapiens
RKEISLHR

SEQ ID NO: 18685 - protein, 643 aa, Homo sapiens
IYATVSCFSTAKAMRERGQDSLAGLVLYVGLFGHPGMLHRAKYSRFRNESITSLDEGSSGGSVGNKGSPQPPHPALAPHLPTEDATLPSQESPTPLCTLIPRMASMKLANPATLLSLKNFCLGTKEVPRLKLQESRDPGSSGPSSPETSLSRSGTAPPPQQDLVGHRATALTPDSCPLPGPGEPTLRSRQDRHFLQHLLGMGMNYCVRYMGCVEVLQSMRSLDFGMRTQVTREAISRLCEAVPGANGAIKKRKPPVKFLSTVLGKSNLQFSGMNIKLTISTCSLTLMNLDNQQIIANHHMQSISFASGGDPDTTDYVAYVAKDPVNQRACHILECHNGMAQDVISTIGQAFELRFKQYLKNPSLNTSCESEEVHIDSHAEEREDHEYYNEIPGKQPPVGGVSDMRIKVQATEQMAYCPIQCEKLCYLPGNSKCSSVYENCLEQSRAIGNVHPRGVQSQRDTSLLKHTCRVDLFDDPCYINTQALQSTPGSAGNQRSAQPLGSPWHCGKAPETVQPGATAQPASSHSLPHIKQQLWSEECYHGKLSRKAAESLLVKDGDFLVRESATSPGQYVLSGLQGGQAKHLLLVDPEGKVRTKDHVFDNVGHLIRYHMDNSLPIISSGSEVSLKQPVRKDNNPALLHSNK

SEQ ID NO: 18686 - protein, 19 aa, Homo sapiens
ITGFWNENPSYKGSNKSPV

SEQ ID NO: 18687 - protein, 9 aa, Homo sapiens
IFCCGVHNE

SEQ ID NO: 18688 - protein, 22 aa, Homo sapiens
RREKGETIMFLRSQPWIRRLLK

SEQ ID NO: 18689 - protein, 19 aa, Homo sapiens
LAGLLTRWPDTAHVPPSLL

SEQ ID NO: 18690 - protein, 16 aa, Homo sapiens
TGEKEKLKEEEAQVRI

SEQ ID NO: 18691 - protein, 11 aa, Homo sapiens
RAPRRGTALGT

SEQ ID NO: 18692 - protein, 62 aa, Homo sapiens
LPPWATSATFDAISKTYSYLTPDLWKETVFTKSPYQEFTDHLVKTHTRVSVQRTQAPAVATT

SEQ ID NO: 18693 - protein, 10 aa, Homo sapiens
TRTRRNTRSW

SEQ ID NO: 18694 - protein, 17 aa, Homo sapiens
LEPWGARATPSWMRWRT

SEQ ID NO: 18695 - protein, 14 aa, Homo sapiens
VIGRSWRKISSRAS

SEQ ID NO: 18696 - protein, 12 aa, Homo sapiens
LRRSTMRSSGTC

SEQ ID NO: 18697 - protein, 13 aa, Homo sapiens
RQAKQVWGDQPQI

SEQ ID NO: 18698 - protein, 32 aa, Homo sapiens
TPEFKSWKDGRNAWRIFGMRHHCILLQAASLT

SEQ ID NO: 18699 - protein, 16 aa, Homo sapiens
MDEENEDFAPAAQKIP

SEQ ID NO: 18700 - protein, 10 aa, Homo sapiens
IKDKIFCESV

SEQ ID NO: 18701 - protein, 29 aa, Homo sapiens
MTFPPTGKTISTESVEVDGLAVKVWLLTW

SEQ ID NO: 18702 - protein, 12 aa, Homo sapiens
LFLVCTKSLMRF

SEQ ID NO: 18703 - protein, 12 aa, Homo sapiens
TSTKPCVTWRTC

SEQ ID NO: 18704 - protein, 33 aa, Homo sapiens
LSQNLCDPAETLREISSRPRAEADRRVWAPEQT

SEQ ID NO: 18705 - protein, 21 aa, Homo sapiens
IPRSTSTSLCALPTGVAARAA

SEQ ID NO: 18706 - protein, 13 aa, Homo sapiens
LPSPSSTSSRRMT

SEQ ID NO: 18707 - protein, 60 aa, Homo sapiens
RTGKSPSIATVNIKILKRNTKRRRRPNTKMEAQKSIKTNIKTETRKNEKRKRFEPLGMQK

SEQ ID NO: 18708 - protein, 101 aa, Homo sapiens
LVKTQTVTISDNANAVKSEIPTKDVPIVHTETKTITYEAAQTDDNSGDLDPGVLLTAQTITSETPSSTTTTQITKVTDQLEPLYGTQGQAKLAATSLQEGP

SEQ ID NO: 18709 - protein, 32 aa, Homo sapiens
RKSCYSQGPSGRKRKRTWNGTWKHLSKAKIIF

SEQ ID NO: 18710 - protein, 7 aa, Homo sapiens
KTGLLGG

SEQ ID NO: 18711 - protein, 30 aa, Homo sapiens
RSCRSSSTRESACAQSWPTRSPSCRWSWTT

SEQ ID NO: 18712 - protein, 416 aa, Homo sapiens
KADRPLPAGFDGVMSHRKFSAPRHGSLGFLPRKRSSRHRGKVKSFPKDDPSKPVHLTAFLGYKAGMTHIVREVDRPGSKVNKKEVVEAVTIVETPPMVVVGIVGYVETPRGLRTFKTVFAEHISDECKRRFYKNWHKSKKKAFTKYCKKWQDEDGKKQLEKDFSSMKKYCQVIRVIAHTQMRLLPLRQKKAHLMEIQVNGGTVAEKLDWARERLEQQVPVNQVFGQDEMIDVIGVTKGKGYKGVTSRWHTKKLPRKTHRGLRKVACIGAWHPARVAFSVARAGQKGYHHRTEINKKIYKIGQGYLIKDGKLIKNNASTDYDLSDKSINPLGGFVHYGEVTNDFVMLKGCVVGTKKRVLTLRKSLLVQTKRRALEKIDLKFIDTTSKFGHGRFQTMEEKKAFMGPLKKDRIAKEEGA

SEQ ID NO: 18713 - protein, 11 aa, Homo sapiens
VEWPQPSPRRR

SEQ ID NO: 18714 - protein, 18 aa, Homo sapiens
LDDRTDCHCCCRVDFLSI

SEQ ID NO: 18715 - protein, 30 aa, Homo sapiens
IDRCVCSSSIHRSPQVERVSPPHHFPEEQT

SEQ ID NO: 18716 - protein, 40 aa, Homo sapiens
KGREKISEKQGQIKPWHFSLLIPPASSEKGTMPPEPAWWP

SEQ ID NO: 18717 - protein, 61 aa, Homo sapiens
LALLASTWAPTARPPQSFTQAIADCRCMLEMGHRAGHDMSCLDIGGGFPGMEGSGPKFEEG

SEQ ID NO: 18718 - protein, 125 aa, Homo sapiens
MLEMGHRAGHDMSCLDIGGGFPGMEGSGPKFEELARVISAALAQDLPEERGVKVIAEPGCFYVESVCMAAVNIIAKRAVLEPGGSRKLVYYLKDGHYGSFRLCYREPVPRVPIVVKVRGPLQPRV

SEQ ID NO: 18719 - protein, 105 aa, Homo sapiens
MLEMGHRAGHDMSCLDIGGGFPGMEGSGPKFEEVLAPLTNECLSSQKINNESSRQRGRKMDLARDGEERTQKDEVVQIGSWIGGRTKGEAAEVDVKDGEKWTAET

SEQ ID NO: 18720 - protein, 63 aa, Homo sapiens
MLEMGHRAGHDMSCLDIGGGFPGMEGSGPKFEELRTTSNNNHTKNLANSDFTSPFRGPGNSSE

SEQ ID NO: 18721 - protein, 23 aa, Homo sapiens
LKIMYDLRRCVWVQLDKGWTYHG

SEQ ID NO: 18722 - protein, 125 aa, Homo sapiens
LDRGGACKYFRACKYFCASGQMDVQFTVCFLSGSRGNCILLCTVRSWRRQAPSLVFLEGNQRSFPFPIMAAAQSQAPDVCFRIQEHLPELGNRSKEISARGFILSSVEMQDVRAPRRVLTCKTLS

SEQ ID NO: 18723 - protein, 81 aa, Homo sapiens
VVLETAQNKVDLDLYRREGAPDSRPQQLSWFTLESDSDKQKEAESDHLSSTCQENRQWQCDQEPCLVDPDMIKAINQGNYG

SEQ ID NO: 18724 - protein, 103 aa, Homo sapiens
LHRSITRDPKPPGLRPSQRPMDDKKKKRSPKPCLAQPAQAPGTLRRVPVPTSHSGSLALGLPHLPSPKQRAKFKRPLRTQSSLRPSPYPQLCGKKARWVTGIT

SEQ ID NO: 18725 - protein, 149 aa, Homo sapiens
LHRSITRDPKPPGLRPSQRPMDDKKKKRSPKPCLAQPAQAPGTLRRVPVPTSHSGSLALGLPHLPSPKQRAKFKRVGKEKCRPVLAGGGSGSAGTPLQHSFLTEVTDVYEMEGGLLNLLNDFHSGRLQAFGEASPAALQPGCVWGGGGR

SEQ ID NO: 18726 - protein, 261 aa, Homo sapiens
LHRSITRDPKPPGLRPSQRPMDDKKKKRSPKPCLAQPAQAPGTLRRVPVPTSHSGSLALGLPHLPSPKQRAKFKRVGKEKCRPVLAGGGSGSAGTPLQHSFLTEVTDVYEMEGGLLNLLNDFHSGRLQAFGKECSFEQLEHVREMQEKLARLHFSLDVCGEEEDDEEEEDGVTEGLPEEQKKTMADRNLDQLLSNLEDLSNSMYPFQGTRLCVCVPERSVSSSPALQEYSHTTNFPTSCSPVRFSHRLPKPRYRNLEFPQN

SEQ ID NO: 18727 - protein, 122 aa, Homo sapiens
LRPSQRPMDDKKKKRSPKPCLAQPAQAPGTLRRVPVPTSHSGSLALGLPHLPSPKQRAKFKRVGKEKCRPVLAGGGSGSAGTPLQHSFLTEVTDVYEMEGGLLNLLNDFHSGRLQAFAGRPQ

SEQ ID NO: 18728 - protein, 15 aa, Homo sapiens
MVSFRVRGIAVGVLG

SEQ ID NO: 18729 - protein, 108 aa, Homo sapiens
MKPILLQGHERSITQIKYNREGDLLFTVAKDPIVNVWYSVNGERLGTYMGHTGAVWCVDADWDTKHVLTGSADNSCRLWDCETAQTLPDSRKAAGPSQDQFGCPDLRF

SEQ ID NO: 18730 - protein, 95 aa, Homo sapiens
MAPSVPAAEPEYPKGIRAVLLGPPGAGKGTQAPRLAENFCVCHLATGDMLRAMVASGSELGKKLKATMDAGKLVGLVVPMSVDIPQNLDLHCPIW

SEQ ID NO: 18731 - protein, 473 aa, Homo sapiens
LPLLPPVSRGLGSATATPPRGVAQVSRSPATPPSSAPGSGPREGGRSLDEVAAFFVADLGAIVRKHFCFLKCLPRVRPFYAVKCNSSPGVLKVLAQLGLGFSCANKAEMELVQHIGIPASKIICANPCKQIAQIKYAAKHGIQLLSFDNEMELAKVVKSHPSAKMVLCIATDDSHSLSCLSLKFGVSLKSCRHLLENAKKHHVEVVGVSFHIGSGCPDPQAYAQSIADARLVFEMGTELGHKMHVLDLGGGFPGTEGAKVRFEEIASVINSALDLYFPEGCGVDIFAELGRYYVTSAFTVAVSIIAKKEVLLDQPGREEENGSTSKTIVYHLDEGVYGIFNSVLFDNICPTPILQKKPSTEQPLYSSSLWGPAVDGCDCVAEGLWLPQLHVGDWLVFDNMGAYTVGMGSPFWGTQACHITYAMSRVAWEALRRQLMAAEQEDDVEGVCKPLSCGWEITDTLCVGPVFTPASIM

SEQ ID NO: 18732 - protein, 415 aa, Homo sapiens
LPLLPPVSRGLGSATATPPRGVAQVSRSPATPPSSAPGSGPREGGRSLAEMELVQHIGIPASKIICANPCKQIAQIKYAAKHGIQLLSFDNEMELAKVVKSHPSAKMVLCIATDDSHSLSCLSLKFGVSLKSCRHLLENAKKHHVEVVGVSFHIGSGCPDPQAYAQSIADARLVFEMGTELGHKMHVLDLGGGFPGTEGAKVRFEEIASVINSALDLYFPEGCGVDIFAELGRYYVTSAFTVAVSIIAKKEVLLDQPGREEENGSTSKTIVYHLDEGVYGIFNSVLFDNICPTPILQKKPSTEQPLYSSSLWGPAVDGCDCVAEGLWLPQLHVGDWLVFDNMGAYTVGMGSPFWGTQACHITYAMSRVAWEALRRQLMAAEQEDDVEGVCKPLSCGWEITDTLCVGPVFTPASIM

SEQ ID NO: 18733 - protein, 485 aa, Homo sapiens
LCVAYFLRRRLQQRLHPARQLLLQGMAGYLSESDFVMVEEGFSTRDLLKELTLGASQATTDEVAAFFVADLGAIVRKHFCFLKCLPRVRPFYAVKCNSSPGVLKVLAQLGLGFSCANKAEMELVQHIGIPASKIICANPCKQIAQIKYAAKHGIQLLSFDNEMELAKVVKSHPSAKMVLCIATDDSHSLSCLSLKFGVSLKSCRHLLENAKKHHVEVVGVSFHIGSGCPDPQAYAQSIADARLVFEMGTELGHKMHVLDLGGGFPGTEGAKVRFEEIASVINSALDLYFPEGCGVDIFAELGRYYVTSAFTVAVSIIAKKEVLLDQPGREEENGSTSKTIVYHLDEGVYGIFNSVLFDNICPTPILQKKPSTEQPLYSSSLWGPAVDGCDCVAEGLWLPQLHVGDWLVFDNMGAYTVGMGSPFWGTQACHITYAMSRVAWEALRRQLMAAEQEDDVEGVCKPLSCGWEITDTLCVGPVFTPASIM

SEQ ID NO: 18734 - protein, 204 aa, Homo sapiens
MAGYLSESDFVMVEEGFSTRDLLKELTLGASQATTDEVAAFFVADLGAIVRKHFCFLKCLPRVRPFYAVKCNSSPGVLKVLAQLGLGFSCANKIASVINSALDLYFPEGCGVDIFAELGRYYVTSAFTVAVSIIAKKEVLLDQPGREEENGSTSKTIVYHLDEGVYGIFNSVLFDNICPTPILQKSKNHSPCYMSLESIHFIAV

SEQ ID NO: 18735 - protein, 385 aa, Homo sapiens
LLNGLDEVAAFFVADLGAIVRKHFCFLKCLPRVRPFYAVKCNSSPGVLKVLAQLGLGFSCANKAEMELVQHIGIPASKIICANPCKQIAQIKYAAKHGIQLLSFDNEMELAKVVKSHPSAKMVLCIATDDSHSLSCLSLKFGVSLKSCRHLLENAKKHHVEVVGVSFHIGSGCPDPQAYAQSIADARLVFEMGTELGHKMHVLDLGGGFPGTEGAKVRFEEIASVINSALDLYFPEGCGVDIFAELGRYYVTSAFTVAVSIIAKKEVLLDQPGREEENGSTSKTIVYHLDEGVYGIFNSVLFDNICPTPILQKKPSTEQPLYSSSLWGPAVDGCDCVAEGLWLPQLHVGDWLVFDNMGAYTVGMGSPFWGTQACHITYAMSRVAW

SEQ ID NO: 18736 - protein, 392 aa, Homo sapiens
MGSHIHPLLVIQDEVAAFFVADLGAIVRKHFCFLKCLPRVRPFYAVKCNSSPGVLKVLAQLGLGFSCANKAEMELVQHIGIPASKIICANPCKQIAQIKYAAKHGIQLLSFDNEMELAKVVKSHPSAKMVLCIATDDSHSLSCLSLKFGVSLKSCRHLLENAKKHHVEVVGVSFHIGSGCPDPQAYAQSIADARLVFEMGTELGHKMHVLDLGGGFPGTEGAKVRFEEIASVINSALDLYFPEGCGVDIFAELGRYYVTSAFTVAVSIIAKKEVLLDQPGREEENGSTSKTIVYHLDEGVYGIFNSVLFDNICPTPILQKKPSTEQPLYSSSLWGPAVDGCDCVAEGLWLPQLHVGDWLVFDNMGAYTVGMGSPFWGTQACHITYAMSRVAW

SEQ ID NO: 18737 - protein, 324 aa, Homo sapiens
VPRFVQQRGTACLIRMVLCIATDDSHSLSCLSLKFGVSLKSCRHLLENAKKHHVEVVGVSFHIGSGCPDPQAYAQSIADARLVFEMGTELGHKMHVLDLGGGFPGTEGAKVRFEEIASVINSALDLYFPEGCGVDIFAELGRYYVTSAFTVAVSIIAKKEVLLDQPGREEENGSTSKTIVYHLDEGVYGIFNSVLFDNICPTPILQKKPSTEQPLYSSSLWGPAVDGCDCVAEGLWLPQLHVGDWLVFDNMGAYTVGMGSPFWGTQACHITYAMSRVAWEALRRQLMAAEQEDDVEGVCKPLSCGWEITDTLCVGPVFTPASIM

SEQ ID NO: 18738 - protein, 20 aa, Homo sapiens
LGEDFAARGRSLCDLIAALS

SEQ ID NO: 18739 - protein, 10 aa, Homo sapiens
VKCDLIAALS

SEQ ID NO: 18740 - protein, 128 aa, Homo sapiens
LPRIVYLSVRASRPMVIQESKSLLRNPFEAIRPGSAQQVKTGSLLNQPKAVLQKLAALSDHNPSAPRNSRNFVFHTLSPVKAEAAKESSKSQVKKRGPSFMTSPSPKHLKTDDSTSGLTRSIFKYLES

SEQ ID NO: 18741 - protein, 308 aa, Homo sapiens
LTVEPLSLTGTARFCSALVSGPQPPPSAMAPRKGSSRVAKTNSLRRRKLASFLKDFDREVEIRIKQIESDRQNLLKEVDNLYNIEILRLPKALREMNWLDYFALGGNKQALEEAATADLDITEINKLTAEAIQTPLKSAKTRKVIQVDEMIVEEEEEEENERKNLQTARVKRCPPSKKRTQSIQGKGKGKRSSRANTVTPAVGRLEVSMVKPTPGLTPRFDSRVFKTPGLRTPAAGERIYNISGNGSPLADSKEIFLTVPVGGGESLRLLASDLQRHSIAQLDPEALGNIKKLSNRLAQICSSIRTHK

SEQ ID NO: 18742 - protein, 332 aa, Homo sapiens
LAQRGFAQPLSRDRRYVPGDFFGWSPSALLVPTQFLASLPHLRRSPQPPPSAMAPRKGSSRVAKTNSLRRRKLASFLKDFDREVEIRIKQIESDRQNLLKEVDNLYNIEILRLPKALREMNWLDYFALGGNKQALEEAATADLDITEINKLTAEAIQTPLKSAKTRKVIQVDEMIVEEEEEEENERKNLQTARVKRCPPSKKRTQSIQGKGKGKRSSRANTVTPAVGRLEVSMVKPTPGLTPRFDSRVFKTPGLRTPAAGERIYNISGNGSPLADSKEIFLTVPVGGGESLRLLASDLQRHSIAQLDPEALGNIKKLSNRLAQICSSIRTHK

SEQ ID NO: 18743 - protein, 35 aa, Homo sapiens
VGAIMVPLGRGEAAAAAVAGSRGDKSLRFHFSQLG

SEQ ID NO: 18744 - protein, 52 aa, Homo sapiens
LLFISHPAVWAKLKLQKASERWQPDTEEEYEDSSGNVVNKKTYEDLKRQGLL

SEQ ID NO: 18745 - protein, 88 aa, Homo sapiens
LNLRFLGFPMPPGGICEPLGIAPPHLPPAGGTVAISITWTGLPCGAPVFLSPGALPALAELWCSLMRNVGTQARWAAGVASGRVGGLN

SEQ ID NO: 18746 - protein, 42 aa, Homo sapiens
MAAAFRKAAKSRQREHRERSQPGFRKHLGLLEKKKDYKLRAE

SEQ ID NO: 18747 - protein, 7633 aa, Homo sapiens
LLPKSQCSLWDPFCLLTFTPFSFRSLLPGLPGPPAAAPAWAMSSSDEETLSERSCRSERSCRSERSYRSERSGSLSPCPPGDTLPWNLPLHEQKKRKSQDSVLDPAERAVVRVADERDRVQKKTFTKWVNKHLMKVRKHINDLYEDLRDGHNLISLLEVLSGIKLEPAGLKTLRLVSMPSWCHTNNEEQAEEDDDDVPREKGRMRFHRLQNVQIALDFLKQRQVKLVNIRNDDITDGNPKLTLGLIWTIILHFQISDIYISGESGDMSAKEKLLLWTQKVTAGYTGIKCTNFSSCWSDGKMFNALIHRYRPDLVDMERVQIQSNRENLEQAFEVAERLGVTRLLDAEDVDVPSPDEKSVITYVSSIYDAFPKVPEGGEGISATEVDSRWQEYQSRVDSLIPWIKQHTILMSDKTFPQNPVELKALYNQYIHFKETEILAKEREKGRIEELYKLLEVWIEFGRIKLPQGYHPNDVEEEWGKLIIEMLEREKSLRPAVERLELLLQIANKIQNGALNCEEKLTLAKNTLQADAAHLESGQPVQCESDVIMYIQECEGLIRQLQVDLQILRDENYYQLEELAFRVMRLQDELVTLRLECTNLYRKGHFTSLELVPPSTLTTTHLKAEPLTKATHSSSTSWFRKPMTRAELVAISSSEDEGNLRFVYELLSWVEEMQMKLERAEWGNDLPSVELQLETQQHIHTSVEELGSSVKEARLYEGKMSQNFHTSYAETLGKLETQYCKLKETSSFRMRHLQSLHKFVSRATAELIWLNEKEEEELAYDWSDNNSNISAKRNYFSELTMELEEKQDVFRSLQDTAELLSLENHPAKQTVEAYSAAVQSQLQWMKQLCLCVEQHVKENTAYFQFFSDARELESFLRNLQDSIKRKYSCDHNTSLSRLEDLLQDSMDEKEQLIQSKSSVASLVGRSKTIVQLKPRSPDHVLKNTISVKAVCDYRQIEITICKNDECVLEDNSQRTKWKVISPTGNEAMVPSVCFLIPPPNKDAIEMASRVEQSYQKVMALWHQLHVNTKSLISWNYLRKDLDLVQTWNLEKLRSSAPGECHQIMKNLQAHYEDFLQDSRDSVLFSVADRLRLEEEVEACKARFQHLMKSMENEDKEETVAKMYISELKNIRLRLEEYEQRVVKRIQSLASSRTDRDAWQDNALRIAEQEHTQEDLQQLRSDLDAVSMKCDSFLHQSPSSSSVPTLRSELNLLVEKMDHVYGLSTVYLNKLKTVDVIVRSIQDAELLVKGYEIKLSQEEVVLADLSALEAHWSTLRHWLSDVKDKNSVFSVLDEEIAKAKVVAEQMSRLTPERNLDLERYQEKGSQLQERWHRVIAQLEIRQSELESIQEVLGDYRACHGTLIKWIEETTAQQEMMKPGQAEDSRVLSEQLSQQTALFAEIERNQTKLDQCQKFSQQYSTIVKDYELQLMTYKAFVESQQKSPGKRRRMLSSSDAITQEFMDLRTRYTALVTLTTQHVKYISDALRRLEEEEKVVEEEKQEHVEKVKELLGWVSTLARNTQGKATSSETKESTDIEKAILEQQVLSEELTTKKEQVSEAIKTSQIFLAKHGHKLSEKEKKQISEQLNALNKAYHDLCDGSANQLQQLQSQLAHQTEQKECRAVAGVIDLGTVEIFPIFKAMQKGLLDQDTGLVLLESQVIMSGLIAPETGENLSLEEGIARNLINPQMYQQLRELQDALALISRLTESRGPLSVVEAIEKRIISETVGLKILEAHLATGGFSLSPSENCINLEEAFHQGLISAWLHSVLESYLRTSKNLIDPNTAEKIGLLDLMQRCIVHQESGFKLLPVKQLAGGMVSLKSGRKVSIFRAVQEGLIDRQVTVRLLEAQLFAGGIVDPRTGHRLTVEEAVRHNLIDQDMACAILIRQLQTGGIIDTVTGQRLTIDEAVSNDLVAAKIALVILESLWSFMGLLWPESGEILPITDALEQGIVSTELAHKILSNRQHIKALFLPATTEILSWKKAIESGILDRDLANNLKSICIPDVMPHMQLADSAEQNINPGAAVLPCSKSHPKATASQSENLLFQLMTHSYINVQNGQRLLLLDKELMETLTSRDEYQTSPPKVVEIGHQRQKTPEGLQESANVKISGTFSSGWTVRLPEFQFSSQNKEYPDREDCTTEKGKKTTVETEDSSVENPEQDLFVEQKERNPNIDALKVINKVKLEVQRQLIGTQREDQTAVSVRENASRGHLLTIPPAEAEGVPLVVDKDVFSVETPKKEHQPLRNTSFTCQNEQAHTLETEYIHDETGGSHIKPQSKKLQVQVKKTLGIKLELKSETDGNVHPLDKKEMLKKTFLAKDDHKESQEAQNIAGGSMMMSEKTDEEDSGREIFLSCSHPLELLEEATLNVLSAQLLDGGIFHEQTGQKLLLNEAISRGIVPSHTAVKLMEKLNMFQGFFDSQTCESLTTEEVINEGLMDEKLLHNVLMADKAISGVLDPRTQTLCSVKDAVTVGLLDKETATRILERQVVTGGIIDLKRGKKVSVTLASTLGLVDVADQPELINLEKASKGRDAEKTVRERLISLQMETTGLIDPDSKAPLTVVQSIDRGLLEREEAVRLLTKQVVDGGIIHHISGMRLSVDNAFRHGLIGEDLAEKLKRVENLNIHQIFNPETKENISLPKAIKLDLITSDLKREIQEVQAFTGNFVDLISGQRLTLAEAKKEGLLTNEAVLSPGMMHGIVDPENCRIVPYSELVKKCKIDIESGQRYLEVIPFSDIKDGVSDKVLTLSQAIQLGKVDFASTLKVLEAQANTGGIIDTATGKRLTLASALEEKLVDENMVRIIASHQVLNGGIVDIFSDQRVTLVEAIEKRLISPELANMIQIDSSEFSDHRAQIEKQEGIEVCALQNEFLGKDMLIACNQTAEMSCNKVEESERLFQVENQSAQEKVKVRVSDGEQAKKSREISLKEFGCKDQRKPRMSSDAKEFISIINPHNLKGKSLGQVSLTHPYSECDFKLKEVARNNMGNDTNEEQEKAVTKIEIISHMKQSTSCLDSEEIRENQGEVILEVQETYCETSGKLPSEQVLQQPMNARVKSKREKREVIVEESIRTCKPAFLSEEKLYQETAIRDEHDSHIKSQPREMTSSEKGKEADTEMGFSITFKIEESSSQVVPQGISVKHLDALTLFSSKQANEGKVNNLSLCLTLKPEENLSREIACGAQSEPFPCMTPRPEGLHYQESDGKAQVTGPSQISKTDKSFQGTTRQETNYQDSWVTSKTKETKHQISSSNECKEKSYQEVSFDPARGLKLEEITVSRPDSKEVRYLEFSDRKDLHHQGSKSDDKLCGTLKSEIATQELTGEKFLEMANPNVAGLEAGSIEDIVTQRGSRVLGSFLPEKLFKGVSQKENTGQQNAIISPTVLETSEEKTVSLTVCSAVKTEKTPQEKLRESPGSEQTPFMTAPEGKGNGGVNPEPFRATQNVFTRQLCLEHDEKLVSYLSLLRNIEMRTKQIQPLELNLAELQDLLCQAKVLERELKDLTTLVSQELECVNQIIISQPQEVPAQLLKALEKDAKNLQKSLSSVSDTWNSRLLHFQNAVEIEKTKVLNQHTQLEGRLQDLRAWVGNKNLILNSKGSNSEIDVDSLNLCLQQYEDLKQPMAERKAQLDALAFDIQFFISEHAQDLSPQQNRQMLRLLNELQRSFQDILEQTAAQVDALQGHLQQMEQEALVKTLQKQQNTCHQQLEDLCSWVGQAERALAGHQGRTTQQDLSALQKNQSDLKDLQDDIQNRATSFATVVKDIEGFMEENQTKLSPRELTALREKLHQAKEQYEALQEETRVAQKELEEAVTSALQQETEKSKAAKELAENKKKIDALLDWVTSVGSSGGQLLTNLPGMEQLSGASLEKGALDTTDGYMGVNQAPEKLDKQCEMMKARHQELLSQQQNFILATQSAQAFLDQHGHNLTPEEQQMLQQKLGELKEQYSTSLAQSEAELKQVQTLQDELQKFLQDHKEFESWLERSEKELENMHKGGSSPETLPSLLKRQGSFSEDVISHKGDLRFVTISGQKVLDMENSFKEGKEPSEIGNLVKDKLKDATERYTALHSKCTRLGSHLNMLLGQYHQFQNSADSLQAWMQACEANVEKLLSDTVASDPGVLQEQLATTKQLQEELAEHQVPVEKLQKVARDIMEIEGEPAPDHRHVQETTDSILSHFQSLSYSLAERSSLLQKAIAQSQSVQESLESLLQSIGEVEQNLEGKQVSSLSSGVIQEALATNMKLKQDIARQKSSLEATREMVTRFMETADSTTAAVLQGKLAEVSQRFEQLCLQQQEKESSLKKLLPQAEMFEHLSGKLQQFMENKSRMLASGNQPDQDITHFFQQIQELNLEMEDQQENLDTLEHLVTELSSCGFALDLCQHQDRVQNLRKDFTELQKTVKEREKDASSCQEQLDEFRKLVRTFQKWLKETEGSIPPTETSMSAKELEKQIEHLKSLLDDWASKGTLVEEINCKGTSLENLIMEITAPDSQGKTGSILPSVGSSVGSVNGYHTCKDLTEIQCDMSDVNLKYEKLGGVLHERQESLQAILNRMEEVHKEANSVLQWLESKEEVLKSMDAMSSPTKTETVKAQAESNKAFLAELEQNSPKIQKVKEALAGLLVTYPNSQEAENWKKIQEELNSRWERATEVTVARQRQLEESASHLACFQAAESQLRPWLMEKELMMGVLGPLSIDPNMLNAQKQQVQFMLKEFEARRQQHEQLNEAAQGILTGPGDVSLSTSQVQKELQSINQKWVELTDKLNSRSSQIDQAIVKSTQYQELLQDLSEKVRAVGQRLSVQSAISTQPEAVKQQLEETSEIRSDLEQLDHEVKEAQTLCDELSVLIGEQYLKDELKKRLETVALPLQGLEDLAADRINRLQAALASTQQFQQMFDELRTWLDDKQSQQAKNCPISAKLERLQSQLQENEEFQKSLNQHSGSYEVIVAEGESLLLSVPPGEEKRTLQNQLVELKNHWEELSKKTADRQSRLKDCMQKAQKYQWHVEDLVPWIEDCKAKMSELRVTLDPVQLESSLLRSKAMLNEVEKRRSLLEILNSAADILINSSEADEDGIRDEKAGINQNMDAVTEELQAKTGSLEEMTQRLREFQESFKNIEKKVEGAKHQLEIFDALGSQACSNKNLEKLRAQQEVLQALEPQVDYLRNFTQGLVEDAPDGSDASQLLHQAEVAQQEFLEVKQRVNSGCVMMENKLEGIGQFHCRVREMFSQLADLDDELDGMGAIGRDTDSLQSQIEDVRLFLNKIHVLKLDIEASEAECRHMLEEEGTLDLLGLKRELEALNKQCGKLTERGKARQEQLELTLGRVEDFYRKLKGLNDATTAAEEAEALQWVVGTEVEIINQQLADFKMFQKEQVDPLQMKLQQVNGLGQGLIQSAGKDCDVQGLEHDMEEINARWNTLNKKVAQRIAQLQEALLHCGKFQDALEPLLSWLADTEELIANQKPPSAEYKVVKAQIQEQKLLQRLLDDRKATVDMLQAEGGRIAQSAELADREKITGQLESLESRWTELLSKAAARQKQLEDILVLAKQFHETAEPISDFLSVTEKKLANSEPVGTQTAKIQQQIIRHKALEEDIENHATDVHQAVKIGQSLSSLTSPAEQGVLSEKIDSLQARYSEIQDRCCRKAALLDQALSNARLFGEDEVEVLNWLAEVEDKLSSVFVKDFKQDVLHRQHADHLALNEEIVNRKKNVDQAIKNGQALLKQTTGEEVLLIQEKLDGIKTRYADITVTSSKALRTLEQARQLATKFQSTYEELTGWLREVEEELATSGGQSPTGEQIPQFQQRQKELKKEVMEHRLVLDTVNEVSRALLELVPWRAREGLDKLVSDANEQYKLVSDTIGQRVDEIDAAIQRSQQYEQAADAELAWVAETKRKLMALGPIRLEQDQTTAQLQVQKAFSIDIIRHKDSMDELFSHRSEIFGTCGEEQKTVLQEKTESLIQQYEAISLLNSERYARLERAQVLVNQFWETYEELSPWIEETRALIAQLPSPAIDHEQLRQQQEEMRQLRESIAEHKPHIDKLLKIGPQLKELNPEEGEMVEEKYQKAENMYAQIKEEVRQRALALDEAVSQSTQFHDKIEPMLETLENLSSRLRMPPLIPAEVDKIRECISDNKSATVELEKLQPSFEALKRRGEELIGRSQGADKDLAAKEIQDKLDQMVFFWEDIKARAEEREIKFLDVLELAEKFWYDMAALLTTIKDTQDIVHDLESPGIDPSIIKQQVEAAETIKEETDGLHEELEFIRILGADLIFACGETEKPEVRKSIDEMNNAWENLNKTWKERLEKLEDAMQAAVQYQDTLQAMFDWLDNTVIKLCTMPPVGTDLNTVKDQLNEMKEFKVEVYQQQIEMEKLNHQGELMLKKATDETDRDIIREPLTELKHLWENLGEKIAHRQHKLEGALLALGQFQHALEELMSWLTHTEELLDAQRPISGDPKVIEVELAKHHVLKNDVLAHQATVETVNKAGNELLESSAGDDASSLRSRLEAMNQCWESVLQKTEEREQQLQSTLQQAQGFHSEIEDFLLELTRMESQLSASKPTGGLPETAREQLDTHMELYSQLKAKEETYNQLLDKGRLMLLSRDDSGSGSKTEQSVALLEQKWHVVSSKMEERKSKLEEALNLATEFQNSLQEFINWLTLAEQSLNIASPPSLILNTVLSQIEEHKVFANEVNAHRDQIIELDQTGNQLKFLSQKQDVVLIKNLLVSVQSRWEKVVQRSIERGRSLDDARKRAKQFHEAWKKLIDWLEDAESHLDSELEISNDPDKIKLQLSKHKEFQKTLGGKQPVYDTTIRTGRALKEKTLLPEDSQKLDNFLGEVRDKWDTVCGKSVERQHKLEEALLFSGQFMDALQALVDWLYKVEPQLAEDQPVHGDLDLVMNLMDAHKVFQKELGKRTGTVQVLKRSGRELIENSRDDTTWVKGQLQELSTRWDTVCKLSVSKQSRLEQALKQAEVFRDTVHMLLEWLSEAEQTLRFRGALPDDTEALQSLIDTHKEFMKKVEEKRVDVNSAVAMGEVILAVCHPDCITTIKHWITIIRARFEEVLTWAKQHQQRLETALSELVANAELLEELLAWIQWAETTLIQRDQEPIPQNIDRVKALIAEHQTFMEEMTRKQPDVDRVTKTYKRKNIEPTHAPFIEKSRSGGRKSLSQPTPPPMPILSQSEAKNPRINQLSARWQQVWLLALERQRKLNDALDRLEELKEFANFDFDVWRKKYMRWMNHKKSRVMDFFRRIDKDQDGKITRQEFIDGILASKFPTTKLEMTAVADIFDRDGDGYIDYYEFVAALHPNKDAYRPTTDADKIEDEVTRQVAQCKCAKRFQVEQIGENKYRFFLGNQFGDSQQLRLVRILRSTVMVRVGGGWMALDEFLVKNDPCRVHHPGSKIKRSDSSSSISSQSPIARGRTNIELREKFILPEGASQGMTPFRSRGRRSKPSSRAASPTRSSSSASQSNHSCTSMPSSPATPASGTKTSLQFSRCYDKPWLVNSKAGTPIRDSHSPDLQLPTPEVIPSSGSKLKRPTPTFHSSRTSLAGDTSNSSSPASTGAKTNRADPKKSASRPGSRAGSRAGSRASSRRGSDASDFDLLETQSACSDTSESSAAGGQGNSRRGLNKPSKIPTMSKKTTTASPRTPGPKR

SEQ ID NO: 18748 - protein, 7415 aa, Homo sapiens
LLTFTPFSFRSLLPGLPGPPAAAPAWAMSSSDEETLSERSCRSERSCRSERSYRSERSGSLSPCPPGDTLPWNLPLHEQKKRKSQDSVLDPAERAVVRVADERDRVQKKTFTKWVNKHLMKVRKHINDLYEDLRDGHNLISLLEVLSGIKLPREKGRMRFHRLQNVQIALDFLKQRQVKLVNIRNDDITDGNPKLTLGLIWTIILHFQISDIYISGESGDMSAKEKLLLWTQKVTAGYTGIKCTNFSSCWSDGKMFNALIHRYRPDLVDMERVQIQSNRENLEQAFEVAERLGVTRLLDAEDVDVPSPDEKSVITYVSSIYDAFPKVPEGGEGISATEVDSRWQEYQSRVDSLIPWIKQHTILMSDKTFPQNPVELKALYNQYIHFKETEILAKEREKGRIEELYKLLEVWIEFGRIKLPQGYHPNDVEEEWGKLIIEMLEREKSLRPAVERLELLLQIANKIQNGALNCEEKLTLAKNTLQADAAHLESGQPVQCESDVIMYIQECEGLIRQLQVDLQILRDENYYQLEELAFRVMRLQDELVTLRLECTNLYRKGHFTSLELVPPSTLTTTHLKAEPLTKATHSSSTSWFRKPMTRAELVAISSSEDEGNLRFVYELLSWVEEMQMKLERAEWGNDLPSVELQLETQQHIHTSVEELGSSVKEARLYEGKMSQNFHTSYAETLGKLETQYCKLKETSSFRMRHLQSLHKFVSRATAELIWLNEKEEEELAYDWSDNNSNISAKRNYFSELTMELEEKQDVFRSLQDTAELLSLENHPAKQTVEAYSAAVQSQLQWMKQLCLCVEQHVKENTAYFQFFSDARELESFLRNLQDSIKRKYSCDHNTSLSRLEDLLQDSMDEKEQLIQSKSSVASLVGRSKTIVQLKPRSPDHVLKNTISVKAVCDYRQIEITICKNDECVLEDNSQRTKWKVISPTGNEAMVPSVCFLIPPPNKDAIEMASRVEQSYQKVMALWHQLHVNTKSLISWNYLRKDLDLVQTWNLEKLRSSAPGECHQIMKNLQAHYEDFLQDSRDSVLFSVADRLRLEEEVEACKARFQHLMKSMENEDKEETVAKMYISELKNIRLRLEEYEQRVVKRIQSLASSRTDRDAWQDNALRIAEQEHTQEDLQQLRSDLDAVSMKCDSFLHQSPSSSSVPTLRSELNLLVEKMDHVYGLSTVYLNKLKTVDVIVRSIQDAELLVKGYEIKLSQEEVVLADLSALEAHWSTLRHWLSDVKDKNSVFSVLDEEIAKAKVVAEQMSRLTPERNLDLERYQEKGSQLQERWHRVIAQLEIRQSELESIQEVLGDYRACHGTLIKWIEETTAQQEMMKPGQAEDSRVLSEQLSQQTALFAEIERNQTKLDQCQKFSQQYSTIVKDYELQLMTYKAFVESQQKSPGKRRRMLSSSDAITQEFMDLRTRYTALVTLTTQHVKYISDALRRLEEEEKVVEEEKQEHVEKVKELLGWVSTLARNTQGKATSSETKESTDIEKAILEQQVLSEELTTKKEQVSEAIKTSQIFLAKHGHKLSEKEKKQISEQLNALNKAYHDLCDGSANQLQQLQSQLAHQTEQKECRAVAGVIDLGTVEIFPIFKAMQKGLLDQDTGLVLLESQVIMSGLIAPETGENLSLEEGIARNLINPQMYQQLRELQDALALISRLTESRGPLSVVEAIEKRIISETVGLKILEAHLATGGFSLSPSENCINLEEAFHQGLISAWLHSVLESYLRTSKNLIDPNTAEKIGLLDLMQRCIVHQESGFKLLPVKQLAGGMVSLKSGRKVSIFRAVQEGLIDRQVTVRLLEAQLFAGGIVDPRTGHRLTVEEAVRHNLIDQDMACAILIRQLQTGGIIDTVTGQRLTIDEAVSNDLVAAKIALVILESLWSFMGLLWPESGEILPITDALEQGIVSTELAHKILSNRQHIKALFLPATTEILSWKKAIESGILDRDLANNLKSICIPDVMPHMQLADSAEQNINPGAAVLPCSKSHPKATASQSENLLFQLMTHSYINVQNGQRLLLLDKELMETLTSRDEYQTSPPKVVEIGHQRQKTPEGLQESANVKISGTFSSGWTVRLPEFQFSSQNKEYPDREDCTTEKGKKTTVETEDSSVENPEQDLFVEQKERNPNIDALKVINKVKLEVQRQLIGTQREDQTAVSVRENASRGHLLTIPPAEAEGVPLVVDKDVFSVETPKKEHQPLRNTSFTCQNEQAHTLETEYIHDETGGSHIKPQSKKLQVQVKKTLGIKLELKSETDGNVHPLDKKEMLKKTFLAKDDHKESQEAQNIAGGSMMMSEKTDEEDSGREIFLSCSHPLELLEEATLNVLSAQLLDGGIFHEQTGQKLLLNEAISRGIVPSHTAVKLMEKLNMFQGFFDSQTCESLTTEEVINEGLMDEKLLHNVLMADKAISGVLDPRTQTLCSVKDAVTVGLLDKETATRILERQVVTGGIIDLKRGKKVSVTLASTLGLVDVADQPELINLEKASKGRDAEKTVRERLISLQMETTGLIDPDSKAPLTVVQSIDRGLLEREEAVRLLTKQVVDGGIIHHISGMRLSVDNAFRHGLIGEDLAEKLKRVENLNIHQIFNPETKENISLPKAIKLDLITSDLKREIQEVQAFTGNFVDLISGQRLTLAEAKKEGLLTNEAVLSPGMMHGIVDPENCRIVPYSELVKKCKIDIESGQRYLEVIPFSDIKDGVSDKVLTLSQAIQLGKVDFASTLKVLEAQANTGGIIDTATGKRLTLASALEEKLVDENMVRIIASHQVLNGGIVDIFSDQRVTLVEAIEKRLISPELANMIQIDSSEFSDHRAQIEKQEGIEVCALQNEFLGKDMLIACNQTAEMSCNKVEESERLFQVENQSAQEKVKVRVSDGEQAKKSREISLKEFGCKDQRKPRMSSDAKEFISIINPHNLKGKSLGQVSLTHPYSECDFKLKEVARNNMGNDTNEEQEKAVTKIEIISHMKQSTSCLDSEEIRENQGEVILEVQETYCETSGKLPSEQVLQQPMNARVKSKREKREVIVEESIRTCKPAFLSEEKLYQETAIRDEHDSHIKSQPREMTSSEKGKEADTEMGFSITFKIEESSSQVVPQGISVKHLDALTLFSSKQANEGKVNNLSLCLTLKPEENLSREIACGAQSEPFPCMTPRPEGLHYQESDGKAQVTGPSQISKTDKSFQGTTRQETNYQDSWVTSKTKETKHQISSSNECKEKSYQEVSFDPARGLKLEEITVSRPDSKEVRYLEFSDRKDLHHQGSKSDDKLCGTLKSEIATQELTGEKFLEMANPNVAGLEAGSIEDIVTQRGSRVLGSFLPEKLFKGVSQKENTGQQNAIISPTVLETSEEKTVSLTVCSAVKTEKTPQEKLRESPGSEQTPFMTAPEGKGNGGVNPEPFRATQNVFTRQLCLEHDEKLVSYLSLLRNIEMRTKQIQPLELNLAELQDLLCQAKVLERELKDLTTLVSQELECVNQIIISQPQEVPAQLLKALEKDAKNLQKSLSSVSDTWNSRLLHFQNAVEIEKTKVLNQHTQLEGRLQDLRAWVGNKNLILNSKGSNSEIDVDSLNLCLQQYEDLKQPMAERKAQLDALAFDIQFFISEHAQDLSPQQNRQMLRLLNELQRSFQDILEQTAAQVDALQGHLQQMEQEALVKTLQKQQNTCHQQLEDLCSWVGQAERALAGHQGRTTQQDLSALQKNQSDLKDLQDDIQNRATSFATVVKDIEGFMEENQTKLSPRELTALREKLHQAKEQYEALQEETRVAQKELEEAVTSALQQETEKSKAAKELAENKKKIDALLDWVTSVGSSGGQLLTNLPGMEQLSGASLEKGALDTTDGYMGVNQAPEKLDKQCEMMKARHQELLSQQQNFILATQSAQAFLDQHGHNLTPEEQQMLQQKLGELKEQYSTSLAQSEAELKQVQTLQDELQKFLQDHKEFESWLERSEKELENMHKGGSSPETLPSLLKRQGSFSEDVISHKGDLRFVTISGQKVLDMENSFKEGKEPSEIGNLVKDKLKDATERYTALHSKCTRLGSHLNMLLGQYHQFQNSADSLQAWMQACEANVEKLLSDTVASDPGVLQEQLATTKQLQEELAEHQVPVEKLQKVARDIMEIEGEPAPDHRHVQETTDSILSHFQSLSYSLAERSSLLQKAIAQSQSVQESLESLLQSIGEVEQNLEGKQVSSLSSGVIQEALATNMKLKQDIARQKSSLEATREMVTRFMETADSTTAAVLQGKLAEVSQRFEQLCLQQQEKESSLKKLLPQAEMFEHLSGKLQQFMENKSRMLASGNQPDQDITHFFQQIQELNLEMEDQQENLDTLEHLVTELSSCGFALDLCQHQDRVQNLRKDFTELQKTVKEREKDASSCQEQLDEFRKLVRTFQKWLKETEGSIPPTETSMSAKELEKQIEHLKSLLDDWASKGTLVEEINCKGTSLENLIMEITAPDSQGKTGSILPSVGSSVGSVNGYHTCKDLTEIQCDMSDVNLKYEKLGGVLHERQESLQAILNRMEEVHKEANSVLQWLESKEEVLKSMDAMSSPTKTETVKAQAESNKAFLAELEQNSPKIQKVKEALAGLLVTYPNSQEAENWKKIQEELNSRWERATEVTVARQRQLEESASHLACFQAAESQLRPWLMEKELMMGVLGPLSIDPNMLNAQKQQVQFMLKEFEARRQQHEQLNEAAQGILTGPGDVSLSTSQVQKELQSINQKWVELTDKLNSRSSQIDQAIVKSTQYQELLQDLSEKVRAVGQRLSVQSAISTQPEAVKQQLEETSEIRSDLEQLDHEVKEAQTLCDELSVLIGEQYLKDELKKRLETVALPLQGLEDLAADRINRLQAALASTQQFQQMFDELRTWLDDKQSQQAKNCPISAKLERLQSQLQENEEFQKSLNQHSGSYEVIVAEGESLLLSVPPGEEKRTLQNQLVELKNHWEELSKKTADRQSRLKDCMQKAQKYQWHVEDLVPWIEDCKAKMSELRVTLDPVQLESSLLRSKAMLNEVEKRRSLLEILNSAADILINSSEADEDGIRDEKAGINQNMDAVTEELQAKTGSLEEMTQRLREFQESFKNIEKKVEGAKHQLEIFDALGSQACSNKNLEKLRAQQEVLQALEPQVDYLRNFTQGLVEDAPDGSDASQLLHQAEVAQQEFLEVKQRVNSGCVMMENKLEGIGQFHCRVREMFSQLADLDDELDGMGAIGRDTDSLQSQIEDVRLFLNKIHVLKLDIEASEAECRHMLEEEGTLDLLGLKRELEALNKQCGKLTERGKARQEQLELTLGRVEDFYRKLKGLNDATTAAEEAEALQWVVGTEVEIINQQLADFKMFQKEQVDPLQMKLQQVNGLGQGLIQSAGKDCDVQGLEHDMEEINARWNTLNKKVAQRIAQLQEALLHCGKFQDALEPLLSWLADTEELIANQKPPSAEYKVVKAQIQEQKLLQRLLDDRKATVDMLQAEGGRIAQSAELADREKITGQLESLESRWTELLSKAAARQKQLEDILVLAKQFHETAEPISDFLSVTEKKLANSEPVGTQTAKIQQQIIRHKALNEEIVNRKKNVDQAIKNGQALLKQTTGEEVLLIQEKLDGIKTRYADITVTSSKALRTLEQARQLATKFQSTYEELTGWLREVEEELATSGGQSPTGEQIPQFQQRQKELKKEVMEHRLVLDTVNEVSRALLELVPWRAREGLDKLVSDANEQYKLVSDTIGQRVDEIDAAIQRSQQYEQAADAELAWVAETKRKLMALGPIRLEQDQTTAQLQVQKAFSIDIIRHKDSMDELFSHRSEIFGTCGEEQKTVLQEKTESLIQQYEAISLLNSERYARLERAQVLVNQFWETYEELSPWIEETRALIAQLPSPAIDHEQLRQQQEEMRQLRESIAEHKPHIDKLLKIGPQLKELNPEEGEMVEEKYQKAENMYAQIKEEVRQRALALDEAVSQSTQITEFHDKIEPMLETLENLSSRLRMPPLIPAEVDKIRECISDNKSATVELEKLQPSFEALKRRGEELIGRSQGADKDLAAKEIQDKLDQMVFFWEDIKARAEEREIKFLDVLELAEKFWYDMAALLTTIKDTQDIVHDLESPGIDPSIIKQQVEAAETIKEETDGLHEELEFIRILGADLIFACGETEKPEVRKSIDEMNNAWENLNKTWKERLEKLEDAMQAAVQYQDTLQAMFDWLDNTVIKLCTMPPVGTDLNTVKDQLNEMKEFKVEVYQQQIEMEKLNHQGELMLKKATDETDRDIIREPLTELKHLWENLGEKIAHRQHKLEGALLALGQFQHALEELMSWLTHTEELLDAQRPISGDPKVIEVELAKHHVLKNDVLAHQATVETVNKAGNELLESSAGDDASSLRSRLEAMNQCWESVLQKTEEREQQLQSTLQQAQGFHSEIEDFLLELTRMESQLSASKPTGGLPETAREQLDTHMELYSQLKAKEETYNQLLDKGRLMLLSRDDSGSGSKTEQSVALLEQKWHVVSSKMEERKSKLEEALNLATEFQNSLQEFINWLTLAEQSLNIASPPSLILNTVLSQIEEHKVFANEVNAHRDQIIELDQTGNQLKFLSQKQDVVLIKNLLVSVQSRWEKVVQRSIERGRSLDDARKRAKQFHEAWKKLIDWLEDAESHLDSELEISNDPDKIKLQLSKHKEFQKTLGGKQPVYDTTIRTGRALKEKTLLPEDSQKLDNFLGEVRDKWDTVCGKSVERQHKLEEALLFSGQFMDALQALVDWLYKVEPQLAEDQPVHGDLDLVMNLMDAHKVFQKELGKRTGTVQVLKRSGRELIENSRDDTTWVKGQLQELSTRWDTVCKLSVSKQSRLEQALKQAEVFRDTVHMLLEWLSEAEQTLRFRGALPDDTEALQSLIDTHKEFMKKVEEKRVDVNSAVAMGEVILAVCHPDCITTIKHWITIIRARFEEVLTWAKQHQQRLETALSELVANAELLEELLAWIQWAETTLIQRDQEPIPQNIDRVKALIAEHQTFMEEMTRKQPDVDRVTKTYKRKNIEPTHAPFIEKSRSGGRKSLSQPTPPPMPILSQSEAKNPRINQLSARWQQVWLLALERQRKLNDALDRLEELKEFANFDFDVWRKKYMRWMNHKKSRVMDFFRRIDKDQDGKITRQEFIDGILASKFPTTKLEMTAVADIFDRDGDGYIDYYEFVAALHPNKDAYRPTTDADKIEDEVTRQVAQCKCAKRFQVEQIGENKYRFGDSQQLRLVRILRSTVMVRVGGGWMALDEFLVKNDPCRARGRTNIELREKFILPEGASQGMTPFRSRGRRSKPSSRAASPTRSSSSASQSNHSCTSMPSSPATPASGTKVIPSSGSKLKRPTPTFHSSRTSLAGDTSNSSSPASTGAKTNRADPKKSASRPGSRAGSRAGSRASSRRGSDASDFDLLETQSACSDTSESSAAGGQGNSRRGLNKPSKIPTMSKKTTTASPRTPGPKR

SEQ ID NO: 18749 - protein, 124 aa, Homo sapiens
LLDFYRPDLVDMERVQIQSNRENLEQAFEVAERLGVTRLLDAEDVDVPSPDEKSVITYVSSIYDAFPKVPEGGEGISATEVDSRWQEYQSRVDSLIPWIKQHTILMSDKTFPQNPVELKVKSRT

SEQ ID NO: 18750 - protein, 171 aa, Homo sapiens
VGQWKFSHCYSLFLSQDAAHLESGQPVQCESDVIMYIQECEGLIRQLQVDLQILRDENYYQLEELAFRVMRLQDELVTLRLECTNLYRKGHFTSLELVPPSTLTTTHLKAEPLTKATHSSSTSWFRKPMTRAELVAISSSEDEGNLRFVYELLSWVEEMQVGAYPKAYAVH

SEQ ID NO: 18751 - protein, 1458 aa, Homo sapiens
VLEDNSQRTKWKVISPTGNEAMVPSVCFLIPPPNKDAIEMASRVEQSYQKVMALWHQLHVNTKSLISWNYLRKDLDLVQTWNLEKLRSSAPGECHQIMKNLQAHYEDFLQDSRDSVLFSVADRLRLEEEVEACKARFQHLMKSMENEDKEETVAKMYISELKNIRLRLEEYEQRVVKRIQSLASSRTDRDAWQDNALRIAEQEHTQEDLQQLRSDLDAVSMKCDSFLHQSPSSSSVPTLRSELNLLVEKMDHVYGLSTVYLNKLKTVDVIVRSIQDAELLVKGYEIKLSQEEVVLADLSALEAHWSTLRHWLSDVKDKNSVFSVLDEEIAKAKVVAEQMSRLTPERNLDLERYQEKGSQLQERWHRVIAQLEIRQSELESIQEVLGDYRACHGTLIKWIEETTAQQEMMKPGQAEDSRVLSEQLSQQTALFAEIERNQTKLDQCQKFSQQYSTIVKDYELQLMTYKAFVESQQKSPGKRRRMLSSSDAITQEFMDLRTRYTALVTLTTQHVKYISDALRRLEEEEKVVEEEKQEHVEKVKELLGWVSTLARNTQGKATSSETKESTDIEKAILEQQVLSEELTTKKEQVSEAIKTSQIFLAKHGHKLSEKEKKQISEQLNALNKAYHDLCDGSANQLQQLQSQLAHQTEQKTLQKQQNTCHQQLEDLCSWVGQAERALAGHQGRTTQQDLSALQKNQSDLKDLQDDIQNRATSFATVVKDIEGFMEENQTKLSPRELTALREKLHQAKEQYEALQEETRVAQKELEEAVTSALQQETEKSKAAKELAENKKKIDALLDWVTSVGSSGGQLLTNLPGMEQLSGASLEKGALDTTDGYMGVNQAPEKLDKQCEMMKARHQELLSQQQNFILATQSAQAFLDQHGHNLTPEEQQMLQQKLGELKEQYSTSLAQSEAELKQVQTLQDELQKFLQDHKEFESWLERSEKELENMHKGGSSPETLPSLLKRQGSFSEDVISHKGDLRFVTISGQKVLDMENSFKEGKEPSEIGNLVKDKLKDATERYTALHSKCTRLGSHLNMLLGQYHQFQNSADSLQAWMQACEANVEKLLSDTVASDPGVLQEQLATTKQLQEELAEHQVPVEKLQKVARDIMEIEGEPAPDHRHVQETTDSILSHFQSLSYSLAERSSLLQKAIAQSQSVQESLESLLQSIGEVEQNLEGKQVSSLSSGVIQEALATNMKLKQDIARQKSSLEATREMVTRFMETADSTTAAVLQGKLAEVSQRFEQLCLQQQEKESSLKKLLPQAEMFEHLSGKLQQFMENKSRMLASGNQPDQDITHFFQQIQELNLEMEDQQENLDTLEHLVTELSSCGFALDLCQHQDRVQNLRKDFTELQKTVKEREKDASSCQEQLDEFRKLVRTFQKWLKETEGSIPPTETSMSAKELEKQIEHLKSLLDDWASKGTLVEEINCKGTSLENLIMEITAPDSQGKTGEYRLFKI

SEQ ID NO: 18752 - protein, 5953 aa, Homo sapiens
VIDLGTVEIFPIFKAMQKGLLDQDTGLVLLESQVIMSGLIAPETGENLSLEEGIARNLINPQMYQQLRELQDALALISRLTESRGPLSVVEAIEKRIISETVGLKILEAHLATGGFSLSPSENCINLEEAFHQGLISAWLHSVLESYLRTSKNLIDPNTAEKIGLLDLMQRCIVHQESGFKLLPVKQLAGGMVSLKSGRKVSIFRAVQEGLIDRQVTVRLLEAQLFAGGIVDPRTGHRLTVEEAVRHNLIDQDMACAILIRQLQTGGIIDTVTGQRLTIDEAVSNDLVAAKIALVILESLWSFMGLLWPESGEILPITDALEQGIVSTELAHKILSNRQHIKALFLPATTEILSWKKAIESGILDRDLANNLKSICIPDVMPHMQLADSAEQNINPGAAVLPCSKSHPKATASQSENLLFQLMTHSYINVQNGQRLLLLDKELMETLTSRDEYQTSPPKVVEIGHQRQKTPEGLQESANVKISGTFSSGWTVRLPEFQFSSQNKEYPDREDCTTEKGKKTTVETEDSSVENPEQDLFVEQKERNPNIDALKVINKVKLEVQRQLIGTQREDQTAVSVRENASRGHLLTIPPAEAEGVPLVVDKDVFSVETPKKEHQPLRNTSFTCQNEQAHTLETEYIHDETGGSHIKPQSKKLQVQVKKTLGIKLELKSETDGNVHPLDKKEMLKKTFLAKDDHKESQEAQNIAGGSMMMSEKTDEEDSGREIFLSCSHPLELLEEATLNVLSAQLLDGGIFHEQTGQKLLLNEAISRGIVPSHTAVKLMEKLNMFQGFFDSQTCESLTTEEVINEGLMDEKLLHNVLMADKAISGVLDPRTQTLCSVKDAVTVGLLDKETATRILERQVVTGGIIDLKRGKKVSVTLASTLGLVDVADQPELINLEKASKGRDAEKTVRERLISLQMETTGLIDPDSKAPLTVVQSIDRGLLEREEAVRLLTKQVVDGGIIHHISGMRLSVDNAFRHGLIGEDLAEKLKRVENLNIHQIFNPETKENISLPKAIKLDLITSDLKREIQEVQAFTGNFVDLISGQRLTLAEAKKEGLLTNEAVLSPGMMHGIVDPENCRIVPYSELVKKCKIDIESGQRYLEVIPFSDIKDGVSDKVLTLSQAIQLGKVDFASTLKVLEAQANTGGIIDTATGKRLTLASALEEKLVDENMVRIIASHQVLNGGIVDIFSDQRVTLVEAIEKRLISPELANMIQIDSSEFSDHRAQIEKQEGIEVCALQNEFLGKDMLIACNQTAEMSCNKVEESERLFQVENQSAQEKVKVRVSDGEQAKKSREISLKEFGCKDQRKPRMSSDAKEFISIINPHNLKGKSLGQVSLTHPYSECDFKLKEVARNNMGNDTNEEQEKAVTKIEIISHMKQSTSCLDSEEIRENQGEVILEVQETYCETSGKLPSEQVLQQPMNARVKSKREKREVIVEESIRTCKPAFLSEEKLYQETAIRDEHDSHIKSQPREMTSSEKGKEADTEMGFSITFKIEESSSQVVPQGISVKHLDALTLFSSKQANEGKVNNLSLCLTLKPEENLSREIACGAQSEPFPCMTPRPEGLHYQESDGKAQVTGPSQISKTDKSFQGTTRQETNYQDSWVTSKTKETKHQISSSNECKEKSYQEVSFDPARGLKLEEITVSRPDSKEVRYLEFSDRKDLHHQGSKSDDKLCGTLKSEIATQELTGEKFLEMANPNVAGLEAGSIEDIVTQRGSRVLGSFLPEKLFKGVSQKENTGQQNAIISPTVLETSEEKTVSLTVCSAVKTEKTPQEKLRESPGSEQTPFMTAPEGKGNGGVNPEPFRATQNVFTRQLCLEHDEKLVSYLSLLRNIEMRTKQIQPLELNLAELQDLLCQAKVLERELKDLTTLVSQELECVNQIIISQPQEVPAQLLKALEKDAKNLQKSLSSVSDTWNSRLLHFQNAVEIEKTKVLNQHTQLEGRLQDLRAWVGNKNLILNSKGSNSEIDVDSLNLCLQQYEDLKQPMAERKAQLDALAFDIQFFISEHAQDLSPQQNRQMLRLLNELQRSFQDILEQTAAQVDALQGHLQQMEQEALVKTLQKQQNTCHQQLEDLCSWVGQAERALAGHQGRTTQQDLSALQKNQSDLKDLQDDIQNRATSFATVVKDIEGFMEENQTKLSPRELTALREKLHQAKEQYEALQEETRVAQKELEEAVTSALQQETEKSKAAKELAENKKKIDALLDWVTSVGSSGGQLLTNLPGMEQLSGASLEKGALDTTDGYMGVNQAPEKLDKQCEMMKARHQELLSQQQNFILATQSAQAFLDQHGHNLTPEEQQMLQQKLGELKEQYSTSLAQSEAELKQVQTLQDELQKFLQDHKEFESWLERSEKELENMHKGGSSPETLPSLLKRQGSFSEDVISHKGDLRFVTISGQKVLDMENSFKEGKEPSEIGNLVKDKLKDATERYTALHSKCTRLGSHLNMLLGQYHQFQNSADSLQAWMQACEANVEKLLSDTVASDPGVLQEQLATTKQLQEELAEHQVPVEKLQKVARDIMEIEGEPAPDHRHVQETTDSILSHFQSLSYSLAERSSLLQKAIAQSQSVQESLESLLQSIGEVEQNLEGKQVSSLSSGVIQEALATNMKLKQDIARQKSSLEATREMVTRFMETADSTTAAVLQGKLAEVSQRFEQLCLQQQEKESSLKKLLPQAEMFEHLSGKLQQFMENKSRMLASGNQPDQDITHFFQQIQELNLEMEDQQENLDTLEHLVTELSSCGFALDLCQHQDRVQNLRKDFTELQKTVKEREKDASSCQEQLDEFRKLVRTFQKWLKETEGSIPPTETSMSAKELEKQIEHLKSLLDDWASKGTLVEEINCKGTSLENLIMEITAPDSQGKTGSILPSVGSSVGSVNGYHTCKDLTEIQCDMSDVNLKYEKLGGVLHERQESLQAILNRMEEVHKEANSVLQWLESKEEVLKSMDAMSSPTKTETVKAQAESNKAFLAELEQNSPKIQKVKEALAGLLVTYPNSQEAENWKKIQEELNSRWERATEVTVARQRQLEESASHLACFQAAESQLRPWLMEKELMMGVLGPLSIDPNMLNAQKQQVQFMLKEFEARRQQHEQLNEAAQGILTGPGDVSLSTSQVQKELQSINQKWVELTDKLNSRSSQIDQAIVKSTQYQELLQDLSEKVRAVGQRLSVQSAISTQPEAVKQQLEETSEIRSDLEQLDHEVKEAQTLCDELSVLIGEQYLKDELKKRLETVALPLQGLEDLAADRINRLQAALASTQQFQQMFDELRTWLDDKQSQQAKNCPISAKLERLQSQLQENEEFQKSLNQHSGSYEVIVAEGESLLLSVPPGEEKRTLQNQLVELKNHWEELSKKTADRQSRLKDCMQKAQKYQWHVEDLVPWIEDCKAKMSELRVTLDPVQLESSLLRSKAMLNEVEKRRSLLEILNSAADILINSSEADEDGIRDEKAGINQNMDAVTEELQAKTGSLEEMTQRLREFQESFKNIEKKVEGAKHQLEIFDALGSQACSNKNLEKLRAQQEVLQALEPQVDYLRNFTQGLVEDAPDGSDASQLLHQAEVAQQEFLEVKQRVNSGCVMMENKLEGIGQFHCRVREMFSQLADLDDELDGMGAIGRDTDSLQSQIEDVRLFLNKIHVLKLDIEASEAECRHMLEEEGTLDLLGLKRELEALNKQCGKLTERGKARQEQLELTLGRVEDFYRKLKGLNDATTAAEEAEALQWVVGTEVEIINQQLADFKMFQKEQVDPLQMKLQQVNGLGQGLIQSAGKDCDVQGLEHDMEEINARWNTLNKKVAQRIAQLQEALLHCGKFQDALEPLLSWLADTEELIANQKPPSAEYKVVKAQIQEQKLLQRLLDDRKATVDMLQAEGGRIAQSAELADREKITGQLESLESRWTELLSKAAARQKQLEDILVLAKQFHETAEPISDFLSVTEKKLANSEPVGTQTAKIQQQIIRHKALEEDIENHATDVHQAVKIGQSLSSLTSPAEQGVLSEKIDSLQARYSEIQDRCCRKAALLDQALSNARLFGEDEVEVLNWLAEVEDKLSSVFVKDFKQDVLHRQHADHLALNEEIVNRKKNVDQAIKNGQALLKQTTGEEVLLIQEKLDGIKTRYADITVTSSKALRTLEQARQLATKFQSTYEELTGWLREVEEELATSGGQSPTGEQIPQFQQRQKELKKEVMEHRLVLDTVNEVSRALLELVPWRAREGLDKLVSDANEQYKLVSDTIGQRVDEIDAAIQRSQQYEQAADAELAWVAETKRKLMALGPIRLEQDQTTAQLQVQKAFSIDIIRHKDSMDELFSHRSEIFGTCGEEQKTVLQEKTESLIQQYEAISLLNSERYARLERAQVLVNQFWETYEELSPWIEETRALIAQLPSPAIDHEQLRQQQEEMRQLRESIAEHKPHIDKLLKIGPQLKELNPEEGEMVEEKYQKAENMYAQIKEEVRQRALALDEAVSQSTQITEFHDKIEPMLETLENLSSRLRMPPLIPAEVDKIRECISDNKSATVELEKLQPSFEALKRRGEELIGRSQGADKDLAAKEIQDKLDQMVFFWEDIKARAEEREIKFLDVLELAEKFWYDMAALLTTIKDTQDIVHDLESPGIDPSIIKQQVEAAETIKEETDGLHEELEFIRILGADLIFACGETEKPEVRKSIDEMNNAWENLNKTWKERLEKLEDAMQAAVQYQDTLQAMFDWLDNTVIKLCTMPPVGTDLNTVKDQLNEMKEFKVEVYQQQIEMEKLNHQGELMLKKATDETDRDIIREPLTELKHLWENLGEKIAHRQHKLEGALLALGQFQHALEELMSWLTHTEELLDAQRPISGDPKVIEVELAKHHVLKNDVLAHQATVETVNKAGNELLESSAGDDASSLRSRLEAMNQCWESVLQKTEEREQQLQSTLQQAQGFHSEIEDFLLELTRMESQLSASKPTGGLPETAREQLDTHMELYSQLKAKEETYNQLLDKGRLMLLSRDDSGSGSKTEQSVALLEQKWHVVSSKMEERKSKLEEALNLATEFQNSLQEFINWLTLAEQSLNIASPPSLILNTVLSQIEEHKVFANEVNAHRDQIIELDQTGNQLKFLSQKQDVVLIKNLLVSVQSRWEKVVQRSIERGRSLDDARKRAKQFHEAWKKLIDWLEDAESHLDSELEISNDPDKIKLQLSKHKEFQKTLGGKQPVYDTTIRTGRALKEKTLLPEDSQKLDNFLGEVRDKWDTVCGKSVERQHKLEEALLFSGQFMDALQALVDWLYKVEPQLAEDQPVHGDLDLVMNLMDAHKVFQKELGKRTGTVQVLKRSGRELIENSRDDTTWVKGQLQELSTRWDTVCKLSVSKQSRLEQALKQAEVFRDTVHMLLEWLSEAEQTLRFRGALPDDTEALQSLIDTHKEFMKKVEEKRVDVNSAVAMGEVILAVCHPDCITTIKHWITIIRARFEEVLTWAKQHQQRLETALSELVANAELLEELLAWIQWAETTLIQRDQEPIPQNIDRVKALIAEHQTFMEEMTRKQPDVDRVTKTYKRKNIEPTHAPFIEKSRSGGRKSLSQPTPPPMPILSQSEAKNPRINQLSARWQQVWLLALERQRKLNDALDRLEELKEFANFDFDVWRKKYMRWMNHKKSRVMDFFRRIDKDQDGKITRQEFIDGILASKFPTTKLEMTAVADIFDRDGDGYIDYYEFVAALHPNKDAYRPTTDADKIEDEVTRQVAQCKCAKRFQVEQIGENKYRFFLGNQFGDSQQLRLVRILRSTVMVRVGGGWMALDEFLVKNDPCRARGRTNIELREKFILPEGASQGMTPFRSRGRRSKPSSRAASPTRSSSSASQSNHSCTSMPSSPATPASGTKVIPSSGSKLKRPTPTFHSSRTSLAGDTSNSSSPASTGAKTNRADPKKSASRPGSRAGSRAGSRASSRRGSDASDFDLLETQSACSDTSESSAAGGQGNSRRGLNKPSKIPTMSKKTTTASPRTPGPKR

SEQ ID NO: 18753 - protein, 85 aa, Homo sapiens
MRQLRESIAEHKPHIDKLLKIGPQLKELNPEEGEMVEEKYQKAENMYAQIKEEVRQRALALDEAVSQSTQVCVCLTLITLNCLLF

SEQ ID NO: 18754 - protein, 52 aa, Homo sapiens
MEEMTRKQPDVDRVTKTYKRKNIEPTHAPFIEKSRSGGSMFPAPCVRMLHSC

SEQ ID NO: 18755 - protein, 192 aa, Homo sapiens
MPILSQSEAKNPRINQLSARWQQVWLLALERQRKLNDALDRLEELKEFANFDFDVWRKKYMRWMNHKKSRVMDFFRRIDKDQDGKITRQEFIDGILASKFPTTKLEMTAVADIFDRDGDGYIDYYEFVAALHPNKDAYRPTTDADKIEDEVTRQVAQCKCAKRFQVEQIGENKYRVRKRKSSPLLWWFLICG

SEQ ID NO: 18756 - protein, 160 aa, Homo sapiens
VAQCKCAKRFQVEQIGENKYRFGDSQQLRLVRILRSTVMVRVGGGWMALDEFLVKNDPCRARGRTNIELREKFILPEGASQGMTPFRSRGRRSKPSSRAASPTRSSSSASQSNHSCTSMPSSPATPASGTKVCTDLHYALLPQSHPHRCSLFTVASERLQ

SEQ ID NO: 18757 - protein, 224 aa, Homo sapiens
LILQFGDSQQLRLVRILRSTVMVRVGGGWMALDEFLVKNDPCRARGRTNIELREKFILPEGASQGMTPFRSRGRRSKPSSRAASPTRSSSSASQSNHSCTSMPSSPATPASGTKTSLQFSRCYDKPWLVNSKAGTPIRDSHSPDLQLPTPEVIPSSGSKLKRPTPTFHSSRTSLAGDTSNSSSPASTGAKTNRAGKYLPRDLQARLRIWKQQPMWNVSLLPRSG

SEQ ID NO: 18758 - protein, 171 aa, Homo sapiens
LRSTVMVRVGGGWMALDEFLVKNDPCRARGRTNIELREKFILPEGASQGMTPFRSRGRRSKPSSRAASPTRSSSSASQSNHSCTSMPSSPATPASGTKVIPSSGSKLKRPTPTFHSSRTSLAGDTSNSSSPASTGAKTNRAGKYLPRDLQARLRIWKQQPMWNVSLLPRSG

SEQ ID NO: 18759 - protein, 192 aa, Homo sapiens
LAPTGNAPASRGLPTTTQRVGSECPDRLAMDFGGAGAAQQGLTDSCQSGGVPTAVQNLAPRAAVAAAAPRAVAPYKYASSVRSPHPAIQPLQAPQPAVHVQGQEPLTASMLAAAPPQEQKQMLGERLFPLIQTMHSNLAGKITGMLLEIDNSELLHMLESPESLRSKVDEAVAVLQAHHAKKEAAQKDSKAK

SEQ ID NO: 18760 - protein, 140 aa, Homo sapiens
LTNQYMQRVAGMRALPANAILNQFQPAAGGYFVPAVPQAQGRPPYYTPNQLAQMRPNPRWQQGGRPQGFQGMPSAIRQSGPRPTLRHLAPTGSECPDRLAMDFGGAGAAQQGLTDSCQSGGGIGCTQKGERWDLTGLCPD

SEQ ID NO: 18761 - protein, 119 aa, Homo sapiens
VDDESLKELFSQFGKTLSVKVMRDPNGKSKGFGFVSYEKHEDANKAVEEMNGKEISGKIIFVGRAQKKVERQAELKRKFEQLKQERISRYQVRWSWPSLAMGFAVKYLQNTPMFSGLSF

SEQ ID NO: 18762 - protein, 119 aa, Homo sapiens
LRKKREKDKKNLKTLQNPEKKKGKEKTNPRRTRGEVTFVRFRPAPRPPPQRLASVGLRPSVRGFAPGPRRSAKSRGGPYCAESLLSAVLRPWEPAPASRFRPVSKPADSSSSSPRRCHL

SEQ ID NO: 18763 - protein, 78 aa, Homo sapiens
VSVLPFAARPGLAESAPTKIWFPSAPAVVILNRRSPRPIFIEKRVSPRPPWAASGRLLKDFYPSEGDSPFNFFPTLIF

SEQ ID NO: 18764 - protein, 260 aa, Homo sapiens
LESTAAGPRASLGSRGPPRLGAIQRPGDRPQAAATEEPTPGQETPHLSPGPWVQRRRQSRLLIPSSGPAMGKTNSKLAPEVLEDLVQNTEFSEQELKQWYKGFLKDCPSGILNLEEFQQLYIKFFPYGDASKFAQHAFRTFDKNGDGTIDFREFICALSVTSRGSFEQKLNWAFEMYDLDGDGRITRLEMLEIIEAIYKMVGTVIMMRMNQDGLTPQQRVDKIFKKMDQDKDDQITLEEFKEAAKSDPSIVLLLQCDMQK

SEQ ID NO: 18765 - protein, 165 aa, Homo sapiens
VIQELEGGSGADLGEHSCRPASQPRFPRPAEARSHPATRRPASGPAMGKTNSKLAPEVLEDLVQNTEFSEQELKQWYKGFLKDCPSGILNLEEFQQLYIKAIYKMVGTVIMMRMNQDGLTPQQRVDKIFKKMDQDKDDQITLEEFKEAAKSDPSIVLLLQCDMQK

SEQ ID NO: 18766 - protein, 272 aa, Homo sapiens
LKPRLPLRSRGANSRATCPGWGGAYANSVAFGRHIVIQELEGGSGADLGEHSCRPASQPRFPRPAEARSHPATRRPASGPAMGKTNSKLAPEVLEDLVQNTEFSEQELKQWYKGFLKDCPSGILNLEEFQQLYIKFFPYGDASKFAQHAFRTFDKNGDGTIDFREFICALSVTSRGSFEQKLNWAFEMYDLDGDGRITRLEMLEIIEAIYKMVGTVIMMRMNQDGLTPQQRVDKIFKKMDQDKDDQITLEEFKEAAKSDPSIVLLLQCDMQK

SEQ ID NO: 18767 - protein, 29 aa, Homo sapiens
MRNGVFWPVLGCSEFKRMREWTVALRIFI

SEQ ID NO: 18768 - protein, 700 aa, Homo sapiens
LGHRLGRKQRGRHATTRPASNLRRHSSAEAAQRSCPAPAHSRPRPAPRPPGPARPPTSACAQPRARLRERLPGACGRGCSLAVRGSARVAGPALSLTGGSEAGRRSKSKMKYILVTGGVISGIGKGIIASSVGTILKSCGLHVTSIKIDPYINIDAGTFSPYEHGEVFVLDDGGEVDLDLGNYERFLDIRLTKDNNLTTGKIYQYVINKERKGDYLGKTVQVVPHITDAIQEWVMRQALIPVDEDGLEPQVCVIELGGTVGDIESMPFIEAFRQFQFKVKRENFCNIHVSLVPQPSSTGEQKTKPTQNSVRELRGLGLSPDLVVCRCSNPLDTSVKEKISMFCHVEPEQVICVHDVSSIYRVPLLLEEQGVVDYFLRRLDLPIERQPRKMLMKWKEMADRYDRLLETCSIALVGKYTKFSDSYASVIKALEHSALAINHKLEIKYIDSADLEPITSQEEPVRYHEAWQKLCSAHGVLVPGGFGVRGTEGKIQAIAWARNQKKPFLGVCLGMQLAVVEFSRNVLGWQDANSTEFDPTTSHPVVVDMPEHNPGQMGGTMRLGKRRTLFQTKNSVMRKLYGDADYLEERHRHRFEVNPVWKKCLEEQGLKFVGQDVEGERMEIVELEDHPFFVGVQYHPEFLSRPIKPSPPYFGLLLASVGRLSHYLQKGCRLSPRDTYSDRSGSSSPDSEITELKFPSINHD

SEQ ID NO: 18769 - protein, 26 aa, Homo sapiens
MRSGLFTGCPGLRARRRPSSVADGRI

SEQ ID NO: 18770 - protein, 112 aa, Homo sapiens [sequence omitted]

SEQ ID NO: 18771 - protein, 630 aa, Homo sapiens
MLLPPREGSRRGSKSSKEGNLTKHMKSKAHSKKCQETGVLEELEAEEGTSDDLFQDSEGREGSEAVEEHQFSDLEDSDSDSDLDEDEDEDEEESQDELSRPSSEAPPPGPPHALRADSSPILGPQPPDAPASGTEATRGSSVSEAERLTASSCSMSSQSMPGLPWLGPAPLGSVEKDTGSALSYKPVSPRRPWSPSKEAGSRPPLARKHSLTKNDSSPQRCSPAREPQASAPSPPGLHVDPGRGMGALPCGSPRLQLSPLTLCPLGRELAPRAHVLSKLEGTTDPGLPRYSPTRRWSPGQAESPPRSAPPGKWALAGPGSPSAGEHGPGLGLDPRVLFPPAPLPHKLLSRSPETCASPWQKAESRSPSCSPGPAHPLSSRPFSALHDFHGHILARTEENIFSHLPLHSQHLTRAPCPLIPIGGIQMVQARPGAHPTLLPGPTAAWVSGFSGGGSDLTGAREAQERGRWSPTESSSASVSPVAKVSKFTLSSELEGGDYPKERERTGGGPGRPPDWTPHGTGAPAEPTPTHSPCTPPDTLPRPPQGRRAAQSWSPRLESPRAPTNPEPSATPPLDRSSSVGCLAEASARFPARTRNLSGEPRTRQDSPKPSGSGEPRAHPHQPEDRVPPNA

SEQ ID NO: 18772 - protein, 106 aa, Homo sapiens
LYNPNLPGVSTKAALSLLRSKQKVSKETYTMATAPHPEAGRLVPSSSRKPRMTEVHLPSLVSPEGQKDLARVEKEEERRGEPEEDAPASQRGEPARIKIFEGGESD

SEQ ID NO: 18773 - protein, 11 aa, Homo sapiens
LMTCSESTHSQ

SEQ ID NO: 18774 - protein, 21 aa, Homo sapiens
MEEPRGVLAKQARPSGGKSGA

SEQ ID NO: 18775 - protein, 21 aa, Homo sapiens
LTMRPRLVFGRIRGTNPAAST

SEQ ID NO: 18776 - protein, 32 aa, Homo sapiens
MKKGLDPWVREHRTSLPSQGRRIRGTNPAAST

SEQ ID NO: 18777 - protein, 38 aa, Homo sapiens
MKKGLDPWVREHRTSLPSQGRRPPSNTVLQALEISDTS

SEQ ID NO: 18778 - protein, 24 aa, Homo sapiens
LHCGDSVPSWCFDWMCERKYGLWH

SEQ ID NO: 18779 - protein, 23 aa, Homo sapiens
LARSVCLLVSSLMPFSSPLPNPS

SEQ ID NO: 18780 - protein, 33 aa, Homo sapiens
LHWISSSYLEAIPHGTLAISYPPLSMLFPFQLW

SEQ ID NO: 18781 - protein, 35 aa, Homo sapiens
LQLDTMRRDLPSCTGFHHHTWRPFLMGLWPSHIHL

SEQ ID NO: 18782 - protein, 66 aa, Homo sapiens
MGRKEVLKAQIPIPCQRLRTLVLEGKLAHSGAPRRAGAGGMRPTKGRSTSHDQEPFTSSGNPSRTH

SEQ ID NO: 18783 - protein, 28 aa, Homo sapiens
METFELNSSSSFPTLFPVEDPALRDALL

SEQ ID NO: 18784 - protein, 60 aa, Homo sapiens [sequence omitted]

SEQ ID NO: 18785 - protein, 47 aa, Homo sapiens
MPWPGWLPALPPAARHPGIPSRLPPPRPGAQVFMKKMHKILPGRNNS

SEQ ID NO: 18786 - protein, 342 aa, Homo sapiens
VCSEGAAHRLRRPERLPLPSRALRPRPAHTPILGPAPRACPGAPRASDSPTCAAAAATAWPRTRAVERKGCQVAAAAGVRGTGCPSRADLEKDSWNDTKEDVFVHQTAIKKNNPRKYLRSVGDGETVEFDVVEGEKGAEAANVTGPGGVPVQGSKYAADRNHYRRYPRRRGPPRNYQQNYQNSESGEKNEGSESAPEGQAQQRRPYRRRRFPPYYMRRPYGRRPQYSNPPVQGEVMEGADNQGAGEQGRPVRQNMYRGYRPRFRRGPPRQRQPREDGNEEDKENQGDETQGQQPPQRRYRRNFNYRRRRPENPKPQDGKETKAADPPAENSSAPEAEQGGAE

SEQ ID NO: 18787 - protein, 221 aa, Homo sapiens
LAVKRNVRPPPSPHYTFCPTILSYRQAQAAVLAVLPRLHQLKVPTKRPTDYFAEMAKSDLQMQKIRQKLQTKQAAMERSEKAKQLRALRKYGKKVQTEVLQKRQQEKAHMMNAIKKYQKGFSDKLDFLEGDQKPLAQRKKAGAKGQQMRKGPSAKRRYKNQKFGFGGKKKGSKWNTRESYDDVSSFRAKTAHGRGLKRPGKKGSNKRPGKRTREKMKNRTH

SEQ ID NO: 18788 - protein, 137 aa, Homo sapiens
MDTPPLSDSESESDESLVTDRELQDAFSRGLLKPGLNVVLEGPKKAVNDVNGLKQCLAEFKRDLEWVERLDVTLGPVPEIGGSEAPAPQNKDQKAVDPEDDFQREMSLYVCFQMLEKLRILVQESGKEGKLVSLHSE

SEQ ID NO: 18789 - protein, 19 aa, Homo sapiens
LLALERFGGTWSHGVGVGG

SEQ ID NO: 18790 - protein, 47 aa, Homo sapiens
LHLRASLDASVTTKGSLSPVTLQPHDLFIAAESSPRRGCCGYRPSTL

SEQ ID NO: 18791 - protein, 25 aa, Homo sapiens
MAEGDTHRLKADCDSPYPHKAILTP

SEQ ID NO: 18792 - protein, 188 aa, Homo sapiens
LSQGGPRCIPPPKLCLMESMFSSPAEAALQRETGVPGLLTPLPDLDGVYELERVAGFVRDLGCERVALQFPDQLLGDAVAVAARLEETTGSKMFILGDTAYGSCCVDVLGAEQAGAQALIHFGPACLSPPARPLPVAFVLRQRSVALELCVKAFEAQNPDPKAPVVLLSEPACAHALGKGFCLCMHKG

SEQ ID NO: 18793 - protein, 248 aa, Homo sapiens
LSQGGPRCIPPPKLCLMESMFSSPAEAALQRETGVPGLLTPLPDLDGVYELERVAGFVRDLGCERVALQFPDQLLGDAVAVAARLEETTGSKMFILGDTAYGSCCVDVLGAEQAGAQALIHFGPACLSPPARPLPVAFVLRQRSVALELCVKAFEAQNPDPKAPVVLLSEPACAHALGKGFCLCMHKGGFGYSPAPTVPGPASLQPSFSPTSGFPESRAYAPRAFWAPLPPCPREASRRVWCLLCRGL

SEQ ID NO: 18794 - protein, 505 aa, Homo sapiens
LSQGGPRCIPPPKLCLMESMFSSPAEAALQRETGVPGLLTPLPDLDGVYELERVAGFVRDLGCERVALQFPDQLLGDAVAVAARLEETTGSKMFILGDTAYGSCCVDVLGAEQAGAQALIHFGPACLSPPARPLPVAFVLRQRSVALELCVKAFEAQNPDPKAPVVLLSEPACAHALEALATLLRPRYLDLLVSSPAFPQPVGSLSPEPMPLERFGRRFPLAPGRRLEEYGAFYVGGSKASPDPDLDPDLSRLLLGWAPGQPFSSCCPDTGKTQDEGARAGRLRARRRYLVERARDARVVGLLAGTLGVAQHREALAHLRNLTQAAGKRSYVLALGRPTPAKLANFPEVDVFVLLACPLGALAPQLSGSFFQPILAPCELEAACNPAWPPPGLAPHLTHYADLLPGSPFHVALPPPESELWETPDVSLITGDLRPPPAWKSSNDHGSLALTPRPQLELAESSPAASFLSSRSWQGLEPRLGQTPVTEAVSGRRGIAIAYEDEGSG

SEQ ID NO: 18795 - protein, 277 aa, Homo sapiens
LSQGGPRCIPPPKLCLMESMFSSPAEAALQRETGVPGLLTPLPDLDGVYELERVAGFVRDLGCERVALQFPDQLLGDAVAVAARLEETTGSKMFILGDTAYGSCCVDVLGAEQAGAQALIHFGPACLSPPARPLPVAFVLRQRSVALELCVKAFEAQNPDPKAPVVLLSEPACAHALGSPFHVALPPPESELWETPDVSLITGDLRPPPAWKSSNDHGSLALTPRPQLELAESSPAASFLSSRSWQGLEPRLGQTPVTEAVSGRRGIAIAYEDEGSG

SEQ ID NO: 18796 - protein, 407 aa, Homo sapiens
LPRRRCSERPGCQDCLLLFRTWTECTSWSESLDLSATWGVNELPCSSLTSYWEMLWLWLHDWRRRQGQRCSFWVTQPTAEALATLLRPRYLDLLVSSPAFPQPVGSLSPEPMPLERFGRRFPLAPGRRLEEYGAFYVGGSKASPDPDLDPDLSRLLLGWAPGQPFSSCCPDTGKTQDEGARAGRLRARRRYLVERARDARVVGLLAGTLGVAQHREALAHLRNLTQAAGKRSYVLALGRPTPAKLANFPEVDVFVLLACPLGALAPQLSGSFFQPILAPCELEAACNPAWPPPGLAPHLTHYADLLPGSPFHVALPPPESELWETPDVSLITGDLRPPPAWKSSNDHGSLALTPRPQLELAESSPAASFLSSRSWQGLEPRLGQTPVTEAVSGRRGIAIAYEDEGSG

SEQ ID NO: 18797 - protein, 28 aa, Homo sapiens
LKSCCILGMGRVTRPNRVLSYAAEECAL

SEQ ID NO: 18798 - protein, 72 aa, Homo sapiens
VCPLTCIVYLPLPSSTSRNCEGWSFLQEWDNAGKVARSHILDKFIETNQGKTAPELEQEFSQGASLFLVYDP

SEQ ID NO: 18799 - protein, 24 aa, Homo sapiens
LPSSTSRNCEGWRCTIHSRIFGKV

SEQ ID NO: 18800 - protein, 61 aa, Homo sapiens
LIMTSIKEQAAISRLLSFLQEWDNAGKVARSHILDKFIETNQGKTAPELEQEFSQGASLFL

SEQ ID NO: 18801 - protein, 83 aa, Homo sapiens
LIMTSIKEQAAISRLLSFLQEWDNAGKVARSHILDKFIETNQGKTAPELEQEFSQGASLFLTRGLAMLPKLVSNSWPHAIFPP

SEQ ID NO: 18802 - protein, 309 aa, Homo sapiens
LIMTSIKEQAAISRLLSFLQEWDNAGKVARSHILDKFIETNQGKTAPELEQEFSQGASLFLVRLTTSLRITYMTDSCLEKLLRSIGIFLSAVSSNRYLIEFLEVGGVLTLLEILGLEKIKEEAKKESVKLLQVIANSGRTYKELICESYGVRSIAEFLAKSKSEETQEEVQVLLDSLVHGNPKYQNQVYKGLIALLPCESPKAQQLSLQTLRTAQPIIGTTHPSIVDCVLKVLGTMHLEVQYEAIELIKDLVGYDVRQALLKGLVALLIPSVKEISKLQAKILSDPSVLQLTPSLPMFLQQAAAAKAIG

SEQ ID NO: 18803 - protein, 442 aa, Homo sapiens
LIMTSIKEQAAISRLLSFLQEWDNAGKVARSHILDKFIETNQGKTAPELEQEFSQGASLFLVRLTTSLRITYMTDSCLEKLLRSIGIFLSAVSSNRYLIEFLEVGGVLTLLEILGLEKIKEEAKKESVKLLQVIANSGRTYKELICESYGVRSIAEFLAKSKSEETQEEVQVLLDSLVHGNPKYQNQVYKGLIALLPCESPKAQQLSLQTLRTAQPIIGTTHPSIVDCVLKVLGTMHLEVQYEAIELIKDLVGYDVRQALLKGLVALLIPSVKEISKLQAKILSDPSVLQLTPSLPMFLQQAAAAKAIGVLARNDMSIAEELLYLRVVRGLMAAMGNTDHSNSQRLASLTLECFVQMFPLVAEHVRKCMGEELYQLFLSNAEDLYMKIDSIQADILAANTVNVTKALCLHGSSYSMNTLYGSRDSAQMAYLTHFEEDVESKE

SEQ ID NO: 18804 - protein, 32 aa, Homo sapiens
LSSRKDPALPSSMKPGFLQGEGPPLWGLSLQR

SEQ ID NO: 18805 - protein, 13 aa, Homo sapiens
MCARRCSRASWRC

SEQ ID NO: 18806 - protein, 29 aa, Homo sapiens
VGSCSKPGLALPAGPGSAPCAGWAGVCAG

SEQ ID NO: 18807 - protein, 82 aa, Homo sapiens
LARNDMSIAEELLYLRVVRGLMAAMGNTDHSNSQRLASLTLEMFPLVAEHVRKCMGEELYQLFLVSAPFLPRRNEQMAARTV

SEQ ID NO: 18808 - protein, 105 aa, Homo sapiens
LARNDMSIAEELLYLRVVRGLMAAMGNTDHSNSQRLASLTLECFVQMFPLVAEHVRKCMGEELYQLFLAADPPPTCNIPLPSPTPSPDCPGTPAGSPLLLSSEQR

SEQ ID NO: 18809 - protein, 19 aa, Homo sapiens
LFPGLAIKIQRSNGEERGP

SEQ ID NO: 18810 - protein, 62 aa, Homo sapiens
MIDFDDVAAINPELLQLLPLHPKDNLPLQENVTIQKQKRRSVNSKIPAPKERIWEVGEPLSW

SEQ ID NO: 18811 - protein, 72 aa, Homo sapiens
MGISRDNWHKRRKTGGKRKPYHKKRKYELGRPAANTKIGPRRIHTVRVRGGNKKYRALRLDVGNFSWGSECE

SEQ ID NO: 18812 - protein, 70 aa, Homo sapiens
LHRAHRQHTVPTVTPEEEEILNKKRSKKIQKKYDERKKNAKISSLLEEQFQQGKLLGEKAVVLEVGSRRD

SEQ ID NO: 18813 - protein, 150 aa, Homo sapiens
LPPHSRTVHYNPTSTKHFSFSVGAVPRALQPQLGILRYFASYMEQHLMKGGDLPSVEEVEVPAPPLLLQWVKTDQALLMLFSDGTVQVNFYGDHTKLILSGWEPLLVTFVARNRSACTYLASHLRQLGCSPDLRQRLRYALRLLRDRSPA

SEQ ID NO: 18814 - protein, 264 aa, Homo sapiens
LRCCSERENGKQRAAGSPHLTLEFCNYPSSMRDHIDYRCCLPPATHRPHPTSICDNFSAYGWCPLGPQCPQSHDIDLIIDTDEAAAEDKRRRRRRREKRKRALLNLPGTQTSGEAKDGPPKKQVCGDSIKPEETEQEVAADETRNLPHSKQGNKNDLEMGIKAARPEIADRATSEVPGSQASPNPVPGDGLHRAGFDAFMTGYVMAYVEVSQGPQPCSSGPWLPECHNKVYLSGKAVPLTVAKSQFSRSSKAHNQKMKLTWGSS

SEQ ID NO: 18815 - protein, 149 aa, Homo sapiens
LPQDMNTSLSWFEQLDVLLNATDGNVVRNKQWLYPLGVSTELIGLCICFFCSSGCIFLGSPPQNSTAVTPAVLWEESEIMQKELKLLQYQLSQHQELLLKQLAEGRQAQVGSWKIPRGAPFLTWSPASFSSMPRVLSKRTYSFGAPKCS

SEQ ID NO: 18816 - protein, 122 aa, Homo sapiens
LPQDMNTSLSWFEQLDVLLNATDGNVVRNKQWLYPLGVSTELIGLCICFFCSSGCIFLGSPPQNSTAVTPAVLWEESEIMQKELKLLQYQLSQHQELLLKQLAEGRQAQVGSWKLLIQSSGQ

SEQ ID NO: 18817 - protein, 121 aa, Homo sapiens
LPQDMNTSLSWFEQLDVLLNATDGNVVRNKWLYPLGVSTELIGLCICFFCSSGCIFLGSPPQNSTAVTPAVLWEESEIMQKELKLLQYQLSQHQELLLKQLAEGRQAQVGSWKDLHSCCPI

SEQ ID NO: 18818 - protein, 168 aa, Homo sapiens
LPQDMNTSLSWFEQLDVLLNATDGNVVRNKQWLYPLGVSTELIGLCICFFCSSGCIFLGSPPQNSTAVTPAVLWEESEIMQKELKLLQYQLSQHQELLLKQLAEGRQAQVGSWKVGLGSDLSLHISLWRTFPFSVYPVLQGGQDTLSCPCLHSSLPCADSLSLQSSSF

SEQ ID NO: 18819 - protein, 101 aa, Homo sapiens
LPQDMNTSLSWFEQLDVLLNATDGNVVRNKQWLYPLGVSTELIGLCICFFCSSGCIFLGSPPQNSTAVTPAVLWEESEIMQKELKLLQYQPAPGAAAETAG

SEQ ID NO: 18820 - protein, 81 aa, Homo sapiens
VETVLPPSSVFHPLQVLPREAAKAVHPARDPLCPAPAPPSGWNFPLTARLKLRIVGSLAGCRTEPRPQYPIHALCLCQGFK

SEQ ID NO: 18821 - protein, 83 aa, Homo sapiens
VETVLPPSSVFHPLQVLPREAAKAVHPARDPLCPAPAPPSGWNFPLTARLKLRIVGSLAGCRTEPRPQYPIHALCLCQGKSSC

SEQ ID NO: 18822 - protein, 51 aa, Homo sapiens
LVFDFTFSPEEMKQLNALNKNWRYIVPMLTVDGKRVPRDAGHPLYPFNDPY

SEQ ID NO: 18823 - protein, 65 aa, Homo sapiens
LLTKLAFLNPTLHPQVFDFTFSPEEMKQLNALNKNWRYIVPMLTVDGKRVPRDAGHPLYPFNDPY

SEQ ID NO: 18824 - protein, 73 aa, Homo sapiens
LFFSQALFRSLVRHLRGTMAMESTATAAVAAELVSADKMSGRARWLTPVIQHFGRPRWADHEVRRSRPSWLTR

SEQ ID NO: 18825 - protein, 74 aa, Homo sapiens
LFFSQALFRSLVRHLRGTMAMESTATAAVAAELVSADKIEDVPAPSTSADKVERDEVSSRCPGWGSSHLLTSAT

SEQ ID NO: 18826 - protein, 56 aa, Homo sapiens
LFFSQALFRSLVRHLRGTMAMESTATAAVAAELVSADKIEDVPAPSTSADKVESNH

SEQ ID NO: 18827 - protein, 55 aa, Homo sapiens
LFFSQALFRSLVRHLRGTMAMESTATAAVAAELVSADKIEDVPAPSTSADKVERN

SEQ ID NO: 18828 - protein, 12 aa, Homo sapiens
VPLLLLVLNLEP

SEQ ID NO: 18829 - protein, 112 aa, Homo sapiens
LIPCKVHTQELCSREMIVHSVDDFSSALKALQCHICSKDSLDCGKLLSLRVHITSRESLDSVEFDLHWAAVTLANNFKCTPVKPIPIIPTALARNLSSNLNISQVQGTYKYG

SEQ ID NO: 18830 - protein, 11 aa, Homo sapiens
LSVSDAIMQPG

SEQ ID NO: 18831 - protein, 866 aa, Homo sapiens
LEPEAMAHYPTRLKTRKTYSWVGRPLLDRKLHYQTYREMCVKTEGCSTEIHIQIGQFVLIEGDDDENPYVAKLLELFEDDSDPPPKKRARVQWFVRFCEVPACKRHLLGRKPGAQEIFWYDYPACDSNINAETIIGLVRVIPLAPKDVVPTNLKNEKTLFVKLSWNEKKFRPLSSELFAELNKPQESAAKCQKPVRAKSKSAESPSWTPAEHVAKRIESRHSASKSRQTPTHPLTPRARKRLELGNLGNPQMSQQTSCASLDSPGRIKRKVAFSEITSPSKRSQPDKLQTLSPALKAPEKTRETGLSYTEDDKKASPEHRIILRTRIAASKTIDIREERTLTPISGGQRSSVVPSVILKPENIKKRDAKEAKAQNEATSTPHRIRRKSSVLTMNRIRQQLRFLGNSKSDQEEKEILPAAEISDSSSDEEEASTPPLPRRAPRTVSRNLRSSLKSSLHTLTKVPKKSLKPRTPRCAAPQIRSRSLAAQEPASVLEEARLRLHVSAVPESLPCREQEFQDIYNFVESKLLDHTGGCMYISGVPGTGKTATVHEVIRCLQQAAQANDVPPFQYIEVNGMKLTEPHQVYVQILQKLTGQKATANHAAELLAKQFCTRGSPQETTVLLVDELDLLWTHKQDIMYNLFDWPTHKEARLVVLAIANTMDLPERIMMNRVSSRLGLTRMCFQPYTYSQLQQILRSRLKHLKAFEDDAIQLVARKVAALSGDARRCLDICRRATEICEFSQQKPDSPGLVTIAHSMEAVDEMFSSSYITAIKNSSVLEQSFLRAILAEFRRSGLEEATFQQIYSQHVALCRMEGLPYPTMSETMAVCSHLGSCRLLLVEPSRNDLLLRVRLNVSQDDVLYALKDE

SEQ ID NO: 18832 - protein, 865 aa, Homo sapiens
LEPAMAHYPTRLKTRKTYSWVGRPLLDRKLHYQTYREMCVKTEGCSTEIHIQIGQFVLIEGDDDENPYVAKLLELFEDDSDPPPKKRARVQWFVRFCEVPACKRHLLGRKPGAQEIFWYDYPACDSNINAETIIGLVRVIPLAPKDVVPTNLKNEKTLFVKLSWNEKKFRPLSSELFAELNKPQESAAKCQKPVRAKSKSAESPSWTPAEHVAKRIESRHSASKSRQTPTHPLTPRARKRLELGNLGNPQMSQQTSCASLDSPGRIKRKVAFSEITSPSKRSQPDKLQTLSPALKAPEKTRETGLSYTEDDKKASPEHRIILRTRIAASKTIDIREERTLTPISGGQRSSVVPSVILKPENIKKRDAKEAKAQNEATSTPHRIRRKSSVLTMNRIRQQLRFLGNSKSDQEEKEILPAAEISDSSSDEEEASTPPLPRRAPRTVSRNLRSSLKSSLHTLTKVPKKSLKPRTPRCAAPQIRSRSLAAQEPASVLEEARLRLHVSAVPESLPCREQEFQDIYNFVESKLLDHTGGCMYISGVPGTGKTATVHEVIRCLQQAAQANDVPPFQYIEVNGMKLTEPHQVYVQILQKLTGQKATANHAAELLAKQFCTRGSPQETTVLLVDELDLLWTHKQDIMYNLFDWPTHKEARLVVLAIANTMDLPERIMMNRVSSRLGLTRMCFQPYTYSQLQQILRSRLKHLKAFEDDAIQLVARKVAALSGDARRCLDICRRATEICEFSQQKPDSPGLVTIAHSMEAVDEMFSSSYITAIKNSSVLEQSFLRAILAEFRRSGLEEATFQQIYSQHVALCRMEGLPYPTMSETMAVCSHLGSCRLLLVEPSRNDLLLRVRLNVSQDDVLYALKDE

SEQ ID NO: 18833 - protein, 240 aa, Homo sapiens
VTVFGPARTMAGMVDFQDEEQVKSFLENMEVECNYHCYHEKDPDGCYRLVDYLEGIRKNFDEAAKVLKFNCEENQHSDSCYKLGAYYVTGKGGLTQDLKAAARCFLMACEKPGKKSIAACHNVGLLAHDGQVNEDGQPDLGKARDYYTRACDGGYTSSCFNLSAMFLQGAPGFPKDMDLACKYSMKACDLGHIWACANASRMYKLGDGVDKDEAKAEVLKNRAQQLHKEQQKGVQPLTFG

SEQ ID NO: 18834 - protein, 38 aa, Homo sapiens
MWAPGWGEGMDSSQLCVLFSISEILSSTIKPYNVSLLL

SEQ ID NO: 18835 - protein, 45 aa, Homo sapiens
VRLPPTENYMPQPAPRREEVRRPRFALTLAMVEFPSSRQPRRRSS

SEQ ID NO: 18836 - protein, 8 aa, Homo sapiens
MAGSRWRS

SEQ ID NO: 18837 - protein, 131 aa, Homo sapiens
MALASGPARRALAGSGQLGLGGFGAPRRGAYEWGVRSTRKSEPPPLDRVYEIPGLEPITFAGKMHFVPWLARPIFPPWDRGYKDPRFYRSPPLHEHPLYKDQACYIFHHRCRLLEVSSPSSPWFWWSPTEH

SEQ ID NO: 18838 - protein, 419 aa, Homo sapiens
LQTMFAKGKGSAVPSDGQAREKLALYVYEYLLHVGAQKSAQTFLSEIRWEKNITLGEPPGFLHSWWCVFWDLYCAAPERRDTCEHSSEAKAFHDYSAAAAPSPVLGNIPPNDGMPGGPIPPGFFQPFMSPRYAGGPRPPIRMGNQPPGGVPGTQPLLPNSMDPTRQQGHPNMGGSMQRMNPPRGMGPMGPGPQNYGSGMRPPPNSLGPAMPGINMGPGAGRPWPNPNSANSIPYSSSSPGTYVGPPGGGGPPGTPIMPSPADSTNSSDNIYTMINPVPPGGSRSNFPMGPGSDGPMGGMGGMEPHHMNGSLGSGDIDGLPKNSPNNISGISNPPGTPRDDGELGGNFLHSFQNDNYSPSMTMSVSPLLRDAERAGIAGGKMPEIMQEVRCHYPGAGGEGISLLPSTPSHPIHAPYLSQF

SEQ ID NO: 18839 - protein, 357 aa, Homo sapiens
LCLGWERLRGGGGLVWQTAPIRQLESASACVAICPRRLAPGRLLLPTEGPALFCSTRARGLAGRGRHSSILPLFIPISFAAPALGSCQSAAAAPSPVLGNIPPNDGMPGGPIPPGFFQPFMSPRYAGGPRPPIRMGNQPPGGVPGTQPLLPNSMDPTRQQGHPNMGGSMQRMNPPRGMGPMGPGPQNYGSGMRPPPNSLGPAMPGINMGPGAGRPWPNPNSANSIPYSSSSPGTYVGPPGGGGPPGTPIMPSPADSTNSSDNIYTMINPVPPGGSRSNFPMGPGSDGPMGGMGGMEPHHMNGSLGSGDIDGLPKNSPNNISGISNPPGTPRDDGELGGNFLHSFQNDNYSPSMTMSV

SEQ ID NO: 18840 - protein, 391 aa, Homo sapiens
LQTMFAKGKGSAVPSDGQAREKLALYVYEYLLHVGAQKSAQTFLSEIRWEKNITLGEPPGFLHSWWCVFWDLYCAAPERRDTCEHSSEAKAFHDYSAAAAPSPVLGNIPPNDGMPGGPIPPGFFQGPPGSQPSPHAQPPPHNPSSMMGPHSQPFMSPRYAGGPRPPIRMGNQPPGGVPGTQPLLPNSMDPTRQQGHPNMGGSMQRMNPPRGMGPMGPGPQNYGSGMRPPPNSLGPAMPGINMGPGAGRPWPNPNSANSIPYSSSSPGTYVGPPGGGGPPGTPIMPSPADSTNSSDNIYTMINPVPPGGSRSNFPMGPGSDGPMGGMGGMEPHHMNGSLGSGDIDGLPKNSPNNISGISNPPGTPRDDGELGGNFLHSFQNDNYSPSMTMSV

SEQ ID NO: 18841 - protein, 371 aa, Homo sapiens
LQTMFAKGKGSAVPSDGQAREKLALYVYEYLLHVGAQKSAQTFLSEIRWEKNITLGEPPGFLHSWWCVFWDLYCAAPERRDTCEHSSEAKAFHDYSAAAAPSPVLGNIPPNDGMPGGPIPPGFFQGPPGSQPSPHAQPPPHNPSSMMGPHSQPPGGVPGTQPLLPNSMDPTRQQGHPNMGGSMQRMNPPRGMGPMGPGPQNYGSGMRPPPNSLGPAMPGINMGPGAGRPWPNPNSANSIPYSSSSPGTYVGPPGGGGPPGTPIMPSPADSTNSSDNIYTMINPVPPGGSRSNFPMGPGSDGPMGGMGGMEPHHMNGSLGSGDIDGLPKNSPNNISGISNPPGTPRDDGELGGNFLHSFQNDNYSPSMTMSV

SEQ ID NO: 18842 - protein, 23 aa, Homo sapiens
LRSLERAGEEGAAGTTASGCVRS

SEQ ID NO: 18843 - protein, 21 aa, Homo sapiens
LLWEVSSPADSEEPLRTKSAQ

SEQ ID NO: 18844 - protein, 169 aa, Homo sapiens
LPRASACGSRAGVSGVSREPGLQPPPGGEPCCPGAVDSGGKQRYPRARRGKSASGCSSKELSRLGGPETSGRVPEPTFASLSCVLGFSTAVKTRRRRRATQEKKDVRSASLAPVVELGRARAAAAGRPLPLAAEEGTSRRSPGGQDPPPAGHCRVRTDPLRGESRCSGK

SEQ ID NO: 18845 - protein, 772 aa, Homo sapiens
VSCAGRAWYRAFLGASRSWTPAPGGEPVGGSVKVSAASSTAAPAMEETQPPPQPKLPLCDSLMIWLQTFNTASPCQDVKQLTSGVAMAQVLHQIDAAWFNESWLSRIKEDVGDNWRIKASNVKKVLQGIMSYYHEFLGQQISEALIPDLNQITECSDPVELGRLLQLILGCAINCEKKQEHIQNIMTLEESVQHVVMTAIQELMSKEILSSPPNDAVGELEQQLKRALEELQEALAEKEELRQRCEELDMQVTTLQDEKNSLVSENEMMNEKLDQLDGSFDDPNTVVAKKYFHAQLQLEQLQEENFRLEAAKDDYRVHCEELEKQLIEFQHRNDELTSLAEETRALKDEIDVLRATSDKANKLESTVEIYRQKLQDLNDLRKQVKTLQETNMMYMHNTVSLEEELKKANAARTQLETYKRQVQDLHVKLSSESKRADTLAFEMKRLEEKHEALLKEKERLIEQRDTLKETNEELRCSQVQQDHLNQTDASATKSYENLAAEIMPVEYREVFIRLQHENKMLRLQQEGSENERIEELQEQLEQKHRKMNELETEQRLSKERIRELQQQIEDLQKSLQEQGSKSEGESSSKLKQKLEAHMEKLTEVHEELQKKQELIEDLQPDINQNVQKINELEAALQKKDEDMKAMEERYKMYLEKARNVIKTLDPKLNPASAEIMLLRKQLAEKERRIEILESECKVAKFRDYEEKLIVSAWYNKSLAFQKLGMESRLVSGGGACSDTGACTPARSFLAQQRHITNTRRNLSVKVPATTSD

SEQ ID NO: 18846 - protein, 544 aa, Homo sapiens
LRVDGQLQTFNTASPCQDVKQLTSGVAMAQVLHQIDAAWFNESWLSRIKEDVGDNWRIKASNVKKVLQGIMSYYHEFLGQQISEALIPDLNQITECSDPVELGRLLQLILGCAINCEKKQEHIQNIMTLEESVQHVVMTAIQELMSKEILSSPPNDAVGELEQQLKRALEELQEALAEKEELRQRCEELDMQVTTLQDEKNSLVSENEMMNEKLDQLDGSFDDPNTVVAKKYFHAQLQLEQLQEENFRLEAAKDDYRVHCEELEKQLIEFQHRNDELTSLAEETRALKDEIDVLRATSDKANKLESTVEIYRQKLQDLNDLRKQVKTLQETNMMYMHNTVSLEEELKKANAARTQLETYKRQVQDLHVKLSSESKRADTLAFEMKRLEEKHEALLKEKERLIEQRDTLKETNEELRCSQVQQDHLNQTDASATKSYENLAAEIMPVEYREVFIRLQHENKMLRLQQEGSENERIEELQEQLEQKHRKMNELETEQRLSKERIRELQQQIEDLQKSLQEQGSKSEGESYKRSMNLKLLFRRKMKI

SEQ ID NO: 18847 - protein, 181 aa, Homo sapiens [sequence omitted]

SEQ ID NO: 18848 - protein, 1582 aa, Homo sapiens
MPENPATDKLQVLQVLDRLKMKLQEKGDTSQNEKLSMFYETLKSPLFNQILTLQQSIKQLKGQLNHIPSDCSANFDFSRKGLLVFTDGSITNGNVHRPSNNSTVSGLFPWTPKLGNEDFNSVIQQMAQGRQIEYIDIERPSTGGLGFSVVALRSQNLGKVDIFVKDVQPGSVADRDQRLKENDQILAINHTPLDQNISHQQAIALLQQTTGSLRLIVAREPVHTKSSTSSSLNDTTLPETVCWGHVEEVELINDGSGLGFGIVGGKTSGVVVRTIVPGGLADRDGRLQTGDHILKIGGTNVQGMTSEQVAQVLRNCGNSVRMLVARDPAGDISVTPPAPAALPVALPTVASKGPGSDSSLFETYNVELVRKDGQSLGIRIVGYVGTSHTGEASGIYVKSIIPGSAAYHNGHIQVNDKIVAVDGVNIQGFANHDVVEVLRNAGQVVHLTLVRRKTSSSTSPLEPPSDRGTVVEPLKPPALFLTGAVETETNVDGEDEEIKERIDTLKNDNIQALEKLEKVPDSPENELKSRWENLLGPDYEVMVATLDTQIADDAELQKYSKLLPIHTLRLGVEVDSFDGHHYISSIVSGGPVDTLGLLQPEDELLEVNGMQLYGKSRREAVSFLKEVPPPFTLVCCRRLFDDEASVDEPRRTETSLPETEVDHNMDVNTEEDDDGELALWSPEVKIVELVKDCKGLGFSILDYQDPLDPTRSVIVIRSLVADGVAERSGGLLPGDRLVSVNEYCLDNTSLAEAVEILKAVPPGLVHLGICKPLVEDNEEESCYILHSSSNEDKTEFSGTIHDINSSLILEAPKGFRDEPYFKEELVDEPFLDLGKSFHSQQKEIEQSKEAWEMHEFLTPRLQEMDEEREILVDEEYELYQDPSPSMELYPLSHIQEATPVPSVNELHFGTQWLHDNEPSESQEARTGRTVYSQEAQPYGYCPENVMKENFVMESLPSVPSTEGNSQQGRFDDLENLNSLAKTSLDLGMIPNDVQGPSLLIDLPVVAQRREQEDLPLYQHQATRVISKASAYTGMLSSRYATDTCELPEREEGEGEETPNFSHWGPPRIVEIFREPNVSLGISIVGGQTVIKRLKNGEELKGIFIKQVLEDSPAGKTNALKTGDKILEVSGVDLQNASHSEAVEAIKNAGNPVVFIVQSLSSTPRVIPNVHNKANKITGNQNQDTQEKKEKRQGTAPPPMKLPPPYKALTDDSDENEEEDAFTDQKIRQRYADLPGELHIIELEKDKNGLGLSLAGNKDRSRMSIFVVGINPEGPAAADGRMRIGDELLEINNQILYGRSHQNASAIIKTAPSKVKLVFIRNEDAVNQMAVTPFPVPSSSPSSIEDQSGTEPISSEEDGSVEVGIKQLPESESFKLAVSQMKQQKYPTKVSFSSQEIPLAPASSYHSTDADFTGYGGFQAPLSVDPATCPIVPGQEMIIEISKGRSGLGLSIVGGKDTPLFWRLGSPRAWSQHLVRAFMLHHPVTEVEGQNAIVIHEVYEEGAAARDGRLWAGDQILEVNGVDLRNSSHEEAITALRQTPQKVRLVVYRDEAHYRDEENLEIFPVDLQKKAGRGLGLSIVGKR

SEQ ID NO: 18849 - protein, 1524 aa, Homo sapiens
MPENPATDKLQVLQVLDRLKMKLQEKGDTSQNEKLSMFYETLKSPLFNQILTLQQSIKQLKGQLNHIPSDCSANFDFSRKGLLVFTDGSITNGNVHRPSNNSTVSGLFPWTPKLGNEDFNSVIQQMAQGRQIEYIDIERPSTGGLGFSVVALRSQNLGKVDIFVKDVQPGSVADRDQRLKENDQILAINHTPLDQNISHQQAIALLQQTTGSLRLIVAREPVHTKSSTSSSLNDTTLPETVCWGHVEEVELINDGSGLGFGIVGGKTSGVVVRTIVPGGLADRDGRLQTGDHILKIGGTNVQGMTSEQVAQVLRNCGNSVRMLVARDPAGDISVTPPAPAALPVALPTVASKGPGSDSSLFETYNVELVRKDGQSLGIRIVGYVGTSHTGEASGIYVKSIIPGSAAYHNGHIQVNDKIVAVDGVNIQGFANHDVVEVLRNAGQVVHLTLVRRKTSSSTSPLEPPSDRGTVVEPLKPPALFLTGAVETETNVDGEDEEIKERIDTLKNDNIQALEKLEKVPDSPENELKSRWENLLGPDYEVMVATLDTQIADDAELQKYSKLLPIHTLRLGVEVDSFDGHHYISSIVSGGPVDTLGLLQPEDELLEVNGMQLYGKSRREAVSFLKEVPPPFTLVCCRRLFDDEASVDEPRRTETSLPETEVDHNMDVNTEEDDDGELALWSPEVKIVELVKDCKGLGFSILDYQDPLDPTRSVIVIRSLVADGVAERSGGLLPGDRLVSVNEYCLDNTSLAEAVEILKAVPPGLVHLGICKPLVEDNEEESCYILHSSSNEDKTEFSGTIHDINSSLILEAPKGFRDEPYFKEELVDEPFLDLGKSFHSQQKEIEQSKEAWEMHEFLTPRLQEMDEEREILVDEEYELYQDPSPSMELYPLSHIQEATPVPSVNELHFGTQWLHDNEPSESQEARTGRTVYSQEAQPYGYCPENVMKENFVMESLPSVPSTEGNSQQGRFDDLENLNSLAKTSLDLGMIPNDVQGPSLLIDLPVVAQRREQEDLPLYQHQATRVISKASAYTGMLSSRYATDTCELPEREEGEGEETPNFSHWGPPRIVEIFREPNVSLGISIVGGQTVIKRLKNGEELKGIFIKQVLEDSPAGKTNALKTGDKILEVSGVDLQNASHSEAVEAIKNAGNPVVFIVQSLSSTPRVIPNVHNKANKITGNQNQDTQEKKEKRQGTAPPPMKLPPPYKALTDDSDENEEEDAFTDQKIRQRYADLPGELHIIELEKDKNGLGLSLAGNKDRSRMSIFVVGINPEGPAAADGRMRIGDELLEINNQILYGRSHQNASAIIKTAPSKVKLVFIRNEDAVNQMAVTPFPVPSSSPSSIEDQSGTEPISSEEDGSVEVGIKQLPESESFKLAVSQMKQQKYPTKVSFSSQEIPLAPASSYHSTDADFTGYGGFQAPLSVDPATCPIVPGQEMIIEISKGRSGLGLSIVGGKDTPLVNGVDLRNSSHEEAITALRQTPQKVRLVVYRDEAHYRDEENLEIFPVDLQKKAGRGLGLSIVGKR

SEQ ID NO: 18850 - protein, 1552 aa, Homo sapiens
MPENPATDKLQVLQVLDRLKMKLQEKGDTSQNEKLSMFYETLKSPLFNQILTLQQSIKQLKGQLNHIPSDCSANFDFSRKGLLVFTDGSITNGNVHRPSNNSTVSGLFPWTPKLGNEDFNSVIQQMAQGRQIEYIDIERPSTGGLGFSVVALRSQNLGKVDIFVKDVQPGSVADRDQRLKENDQILAINHTPLDQNISHQQAIALLQQTTGSLRLIVAREPVHTKSSTSSSLNDTTLPETVCWGHVEEVELINDGSGLGFGIVGGKTSGVVVRTIVPGGLADRDGRLQTGDHILKIGGTNVQGMTSEQVAQVLRNCGNSVRMLVARDPAGDISVTPPAPAALPVALPTVASKGPGSDSSLFETYNVELVRKDGQSLGIRIVGYVGTSHTGEASGIYVKSIIPGSAAYHNGHIQVNDKIVAVDGVNIQGFANHDVVEVLRNAGQVVHLTLVRRKTSSSTSPLEPPSDRGTVVEPLKPPALFLTGAVETETNVDGEDEEIKERIDTLKNDNIQALEKLEKVPDSPENELKSRWENLLGPDYEVMVATLDTQIADDAELQKYSKLLPIHTLRLGVEVDSFDGHHYISSIVSGGPVDTLGLLQPEDELLEVNGMQLYGKSRREAVSFLKEVPPPFTLVCCRRLFDDEASVDEPRRTETSLPETEVDHNMDVNTEEDDDGELALWSPEVKIVELVKDCKGLGFSILDYQDPLDPTRSVIVIRSLVADGVAERSGGLLPGDRLVSVNEYCLDNTSLAEAVEILKAVPPGLVHLGICKPLVEDNEEESCYILHSSSNEDKTEFSGTIHDINSSLILEAPKGFRDEPYFKEELVDEPFLDLGKSFHSQQKEIEQSKEAWEMHEFLTPRLQEMDEEREILVDEEYELYQDPSPSMELYPLSHIQEATPVPSVNELHFGTQWLHDNEPSESQEARTGRTVYSQEAQPYGYCPENVMKENFVMESLPSVPSTEGNSQQGRFDDLENLNSLAKTSLDLGMIPNDVQGPSLLIDLPVVAQRREQEDLPLYQHQATRVISKASAYTGMLSSRYATDTCELPEREEGEGEETPNFSHWGPPRIVEIFREPNVSLGISIVGGQTVIKRLKNGEELKGIFIKQVLEDSPAGKTNALKTGDKILEVSGVDLQNASHSEAVEAIKNAGNPVVFIVQSLSSTPRVIPNVHNKANKITGNQNQDTQEKKEKRQGTAPPPMKLPPPYKALTDDSDENEEEDAFTDQKIRQRYADLPGELHIIELEKDKNGLGLSLAGNKDRSRMSIFVVGINPEGPAAADGRMRIGDELLEINNQILYGRSHQNASAIIKTAPSKVKLVFIRNEDAVNQMAVTPFPVPSSSPSSIEDQSGTEPISSEEDGSVEVGIKQLPESESFKLAVSQMKQQKYPTKVSFSSQEIPLAPASSYHSTDADFTGYGGFQAPLSVDPATCPIVPGQEMIIEISKGRSGLGLSIVGGKDTPLNAIVIHEVYEEGAAARDGRLWAGDQILEVNGVDLRNSSHEEAITALRQTPQKVRLVVYRDEAHYRDEENLEIFPVDLQKKAGRGLGLSIVGKR

SEQ ID NO: 18851 - protein, 1006 aa, Homo sapiens
VPETLRVSAPKMEKTDAKDQSSQGDEEKDPPKSHPYSVETPYGFHLDLDFLKYVDDIEKGNTIKRIPIHRRAKQAKFSTLPRNFSLPDSGARPPAAPPLQNWSPVVPREASLGTQEQNQSPPLGNAPQASTSRSEVSYHRKALLAEATRQLEAAEPEDAELTFGSGRPQLLRASSMPATLLHSRASEEPGLSLGPPAPPALPPLQGEGSVCDGTFEPAEGLAGFHSSSPRASTRIPELVQEGAEPPEGVVKVPNHLPLPGPPFSFQNVLVVLEDKEDEHNAREAEVLFTPGSPTPSPPPLPSPIPENELLLEEIELNISEIPPPPPVEVDMRSIGIRVTEESLGLARVDPGSISSLKQQVSALEGELSGRTEELAQVRTALQQQEEEIKAREQRIRELEFTVAQLEGQFHQENAKDTQGQTDVMVNTDPVHGLLTRESCDKGIEVNLLGSMESESWGHRGEENGLLWGPDGHKQGNQSPAERVLLPQLSLPQGPEQVLTSSVHSFLSTELRIEEAGTEQEGGPQGGTRGAGGFLWGSDRKTPPAGREETSSNLPGKEHPGRPPSSPTDATIGQYVKKIQELLQEQWNCLEHGYPELASAIKQPASKLSSIQSQLLSSLNLLLSAYSAQAHPPKEPPASSSSPPVEISPSTSLKSIMKKKDYGFRAGGNGTKKNLQFVGVNGGYETTSSEETSGEDSTPEDLSDSEAEKKCDGPDHKHVKDAHLTCEAGQGIPEGTCHAAQESGPGEEVPHSKAERYKPSEEFLNACRALSQHLPETGTTTDQLLRQSLNTISQEWFRVSSRKSSSPAVVASYLHEVQPHSPHFLKLLVNLADHNGNTALHYSVSHSNFSIVKLLLETGVCNVDHQNKAGYTAVMITPLASAETNEDMAVVWKLLREGNVNIQATQGGQTALMLGVSHDREDMVQALLSCQADVNLQDHDGSSALMVACHHGNVDLVRLLLAHPACDSSLTDKAGRTALSIALKSPTHMEIAGLLRAHAEQGRSLGL

SEQ ID NO: 18852 - protein, 202 aa, Homo sapiens
LLLVARRGARARRAPHGRGAHPPTPGGEVGEMAKQYIEKSLLVPDHVITRLMMSELENRRGQHWLLDGFPRTLGQAEALDKICEVDLVISLNIPFETLKDRLSRRWIHPPSGRVYNLDFNPPHVHGIDDVTGEPLVQQEDDKPEAVAARLRQYKDVAKPVIELYKSRGVLHQFSGTETNKIWPYVYTLFSNKITPIQSKEAY

SEQ ID NO: 18853 - protein, 20 aa, Homo sapiens
LGMPGRPAPFSDAAWGASWS

SEQ ID NO: 18854 - protein, 289 aa, Homo sapiens
LLLGPGAGLRGGVVLKVSPSPCRGGRRVPVRAEGARGRGPRNKVPGASSGAAVGAARLTAPLLAKAMASKLLRAVILGPPGSGKGTVCQRIAQNFGLQHLSSGHFLRENIKASTEVGEMAKQYIEKSLLVPDHVITRLMMSELENRRGQHWLLDGFPRTLGQAEALDKICEVDLVISLNIPFETLKDRLSRRWIHPPSGRVYNLDFNPPHVHGIDDVTGEPLVQQEDDKPEAVAARLRQYKDVAKPVIELYKSRGVLHQFSGTETNKIWPYVYTLFSNKITPIQSKEAY

SEQ ID NO: 18855 - protein, 183 aa, Homo sapiens
LVAFGTASEVGEMAKQYIEKSLLVPDHVITRLMMSELENRRGQHWLLDGFPRTLGQAEALDKICEVDLVISLNIPFETLKDRLSRRWIHPPSGRVYNLDFNPPHVHGIDDVTGEPLVQQEDDKPEAVAARLRQYKDVAKPVIELYKSRGVLHQFSGTETNKIWPYVYTLFSNKITPIQSKEAY

SEQ ID NO: 18856 - protein, 9 aa, Homo sapiens
VCLLRLSSG

SEQ ID NO: 18857 - protein, 31 aa, Homo sapiens
LPRLLLLVTSVARTPAQVFLTQKTELFPGCY

SEQ ID NO: 18858 - protein, 46 aa, Homo sapiens
MIAPLHPSLGDTARPSLLKKKNSRAHQSDVHLFMTFLFLSLRKESC

SEQ ID NO: 18859 - protein, 67 aa, Homo sapiens [sequence omitted]

SEQ ID NO: 18860 - protein, 50 aa, Homo sapiens
LHLLKYSCSYLPSLIFLVTICTVLARINAIICMFQGVPQFDHFCVCVVCV

SEQ ID NO: 18861 - protein, 511 aa, Homo sapiens
LWQGEHSKMPEANYLLSVSWGYIKFKRMLNRELTHLSEMSRSGNQVSEYISNTFLDKQNDVEIPSPTQKDREKKKKQQLMTQISGVKKLMHSSSLNNTSISRFGVNTENEDHLAKELEDLNKWGLNIFNVAGYSHNRPLTCIMYAIFQERDLLKTFRISSDTFITYMMTLEDHYHSDVAYHNSLHAADVAQSTHVLLSTPALDAVFTDLEILAAIFAAAIHDVDHPGVSNQFLINTNSELALMYNDESVLENHHLAVGFKLLQEEHCDIFMNLTKKQRQTLRKMVIDMVLATDMSKHMSLLADLKTMVETKKVTSSGVLLLDNYTDRIQVLRNMVHCADLSNPTKSLELYRQWTDRIMEEFFQQGDKERERGMEISPMCDKHTASVEKSQVGFIDYIVHPLWETWADLVQPDAQDILDTLEDNRNWYQSMIPQSPSPPLDEQNRDCQGLMEKFQFELTLDEEDSEGPEKEGEGHSYFSSTKTLCVIDPENRDSLGETDIDIATEDKSPVDT

SEQ ID NO: 18862 - protein, 94 aa, Homo sapiens
LMYNDESVLENHHLAVGFKLLQEEHCDIFMNLTKKQRQTLRKMVIDMVLATDMSKHMSLLADLKTMVETKKVTSSGVLLLDNYTDRIQVFEESL

SEQ ID NO: 18863 - protein, 196 aa, Homo sapiens
LLVKVPTEMRGNFVCKEKTQLPLDRLLIDWPTPEDPEPLVISEVLHQVTPVFRHPPCSNWPQREKGIQGHQASEKDMMHSASSPPPPRALQAESRQLVDLYKVLESRGSDPKPENPACPWTVLPAGDLPTHDGYLPSNIDDLPSHEAPLADSLEELEPQHISLSVFPSSSLHPLTFSCGDKLTLDQLKMRCDSLML

SEQ ID NO: 18864 - protein, 78 aa, Homo sapiens
VQKAGARALAVAGAARTPRSLPGRPAVCNMTLEEFSAGEQKTERMDKVGDALEEVLSKALSQRTITVGVYEAAKLLNV

SEQ ID NO: 18865 - protein, 89 aa, Homo sapiens
VQKAGARALAVAGAARTPRSLPGRPAVCNMTLEEFSAGEQKTERMDKVGDALEEVLSKALSQRTITVGVYEAAKLLNVIHIHLNGRILP

SEQ ID NO: 18866 - protein, 194 aa, Homo sapiens
VQKAGARALAVAGAARTPRSLPGRPAVCNMTLEEFSAGEQKTERMDKVGDALEEVLSKALSQRTITVGVYEAAKLLNVDPDNVVLCLLAADEDDDRDVALQIHFTLIQAFCCENDINILRVSNPGRLAELLLLETDAGPAASEGAEQPPDLHCVLVTNPHSSQWKDPALSQLICFCRESRYMDQWVPVINLPER

SEQ ID NO: 18867 - protein, 160 aa, Homo sapiens
VQKAGARALAVAGAARTPRSLPGRPAVCNMTLEEFSAGEQKTESDPDNVVLCLLAADEDDDRDVALQIHFTLIQAFCCENDINILRVSNPGRLAELLLLETDAGPAASEGAEQPPDLHCVLVTNPHSSQWKDPALSQLICFCRESRYMDQWVPVINLPER

SEQ ID NO: 18868 - protein, 232 aa, Homo sapiens
LGGYFCILGLLQPHLERVAIDALQLCCLLLPPPNRRKLQLLMRMISRMSQNVDMPKLHDAMGTRSLMIHTFSRCVLCCAEEVDLDELLAGRLVSFLMDHHQEILQVPSYLQTAVEKHLDYLKKGHIENPGDGLFAPLPTYSYCKQISAQEFDEQKVSTSQAAIAELLENIIKNRSLPLKEKRKKLKQFQKEYPLIYQKRFPTTESEAALFGDKPTIKQPMLILRKPKFRSLR

SEQ ID NO: 18869 - protein, 826 aa, Homo sapiens
VSPSPPWTPPGADRPMESQGVPPGPYRATKLWNEVTTSFRAGMPLRKHRQHFKKYGNCFTAGEAVDWLYDLLRNNSNFGPEVTRQQTIQLLRKFLKNHVIEDIKGRWGSENVDDNNQLFRFPATSPLKTLPRRYPELRKNNIENFSKDKDSIFKLRNLSRRTPKRHGLHLSQENGEKIKHEIINEDQENAIDNRELSQEDVEEVWRYVILIYLQTILGVPSLEEVINPKQVIPQYIMYNMANTSKRGVVILQNKSDDLPHWVLSAMKCLANWPRSNDMNNPTYVGFERDVFRTIADYFLDLPEPLLTFEYYELFVNILVVCGYITVSDRSSGIHKIQDDPQSSKFLHLNNLNSFKSTECLLLSLLHREKNKEESDSTERLQISNPGFQERCAKKMQLVNLRNRRVSANDIMGGSCHNLIGLSNMHDLSSNSKPRCCSLEGIVDVPGNSSKEASSVFHQSFPNIEGQNNKLFLESKPKQEFLLNLHSEENIQKPFSAGFKRTSTLTVQDQEELCNGKCKSKQLCRSQSLLLRSSTRRNSYINTPVAEIIMKPNVGQGSTSVQTAMESELGESSATINKRLCKSTIELSENSLLPASSMLTGTQSLLQPHLERVAIDALQLCCLLLPPPNRRKLQLLMRMISRMSQNVDMPKLHDAMGTRSLMIHTFSRCVLCCAEEVDLDELLAGRLVSFLMDHHQEILQVPSYLQTAVEKHLDYLKKGHIENPGDGLFAPLPTYSYCKQISAQEFDEQKVSTSQAAIAELLENIIKNRSLPLKEKRKKLKQFQKEYPLIYQKRFPTTESEAALFGDKPTIKQPMLILRKPKFRSLR

SEQ ID NO: 18870 - protein, 542 aa, Homo sapiens
VSPSPPWTPPGADRPMESQGVPPGPYRATKLWNEVTTSFRAGMPLRKHRQHFKKYGNCFTAGEAVDWLYDLLRNNSNFGPEVTRQQTIQLLRKFLKNHVIEDIKGRWGSENVDDNNQLFRFPATSPLKTLPRRYPELRKNNIENFSKDKDSIFKLRNLSRRTPKRHGLHLSQENGEKIKHEIINEDQENAIDNRELSQEDVEEVWRYVILIYLQTILGVPSLEEVINPKQVIPQYIMYNMANTSKRGVVILQNKSDDLPHWVLSAMKCLANWPRSNDMNNPTYVGFERDVFRTIADYFLDLPEPLLTFEYYELFVNILGLLQPHLERVAIDALQLCCLLLPPPNRRKLQLLMRMISRMSQNVDMPKLHDAMGTRSLMIHTFSRCVLCCAEEVDLDELLAGRLVSFLMDHHQEILQVPSYLQTAVEKHLDYLKKGHIENPGDGLFAPLPTYSYCKQISAQEFDEQKVSTSQAAIAELLENIIKNRSLPLKEKRKKLKQFQKEYPLIYQKRFPTTESEAALFGDKPTIKQPMLILRKPKFRSLR

SEQ ID NO: 18871 - protein, 34 aa, Homo sapiens
VPRREPALPREMRLSQARGLSGSSCCAGGSWPPL

SEQ ID NO: 18872 - protein, 412 aa, Homo sapiens
LRALAPSRLILLSLPTPDTRLRLVISSVFFSSLLLSRFSMQEKDASSQGFLPHFQHFATQAIHVGQDPEQWTSRAVVPPISLSTTFKQGAPGQHSGFEYSRSGNPTRNCLEKAVAALDGAKYCTNRYFRQVASEFGLKISFVDCSKIKLLEAAITPETKLVWIETPTNPTQKVIDIEGCAHIVHKHGDIILVVDNTFMSPYFQRPLALGADISMYSATKYMNGHSDVVMGLVSVNCESLHNRLRFLQNSLGAVPSPIDCYLCNRGLKTLHVRMEKHFKNGMAVAQFLESNPWVEKVIYPGLPSHPQHELVKRQCTGCTGMVTFYIKGTLQHAEIFLKNLKLFTLAESLGGFESLAELPAIMTHASVLKNDRDVLGISDTLIRLSVGLEDEEDLLEDLDQALKAAHPPSGSHS

SEQ ID NO: 18873 - protein, 444 aa, Homo sapiens
LRALAPSRLILLSLPTPDTRLRLVISSVFFSSLLLSRFSMQEKDASSQGFLPHFQHFATQAIHVGQDPEQWTSRAVVPPISLSTTFKQGAPGQHSGFEYSRSGNPTRNCLEKAVAALDGAKYCLAFASGLAATVTITHLLKAGDQIICMDDVYGGTNRYFRQVASEFGLKISFVDCSKIKLLEAAITPETKLVWIETPTNPTQKVIDIEGCAHIVHKHGDIILVVDNTFMSPYFQRPLALGADISMYSATKYMNGHSDVVMGLVSVNCESLHNRLRFLQNSLGAVPSPIDCYLCNRGLKTLHVRMEKHFKNGMAVAQFLESNPWVEKVIYPGLPSHPQHELVKRQCTGCTGMVTFYIKGTLQHAEIFLKNLKLFTLAESLGGFESLAELPAIMTHASVLKNDRDVLGISDTLIRLSVGLEDEEDLLEDLDQALKAAHPPSGSHS

SEQ ID NO: 18874 - protein, 55 aa, Homo sapiens
LLDMGTPQKDVIIKSDAPDTLLLEKHADYIASYGSKKDDYVCIIFLCWKVYFKEV

SEQ ID NO: 18875 - protein, 89 aa, Homo sapiens
LLDMGTPQKDVIIKSDAPDTLLLEKHADYIASYGSKKDDYILTLYDSINVIDVNKVVEYVKGLQKEDGSFAGDIWGNVRFSPFYPKYQY

SEQ ID NO: 18876 - protein, 155 aa, Homo sapiens
LLDMGTPQKDVIIKSDAPDTLLLEKHADYIASYGSKKDDYEYCMSEYLRMSGIYWGLTVMDLMGQLHRMNREEILAFIKSCQHECGGISASIGHDPHLLYTLSAVQILTLYDSINVIDVNKVVEYVKGLQKEDGSFAGDIWGNVRFSPFYPKYQY

SEQ ID NO: 18877 - protein, 334 aa, Homo sapiens
LLDMGTPQKDVIIKSDAPDTLLLEKHADYIASYGSKKDDYEYCMSEYLRMSGIYWGLTVMDLMGQLHRMNREEILAFIKSCQHECGGISASIGHDPHLLYTLSAVQILTLYDSINVIDVNKVVEYVKGLQKEDGSFAGDIWGEIDTRFSFCAVATLALLGKLDAINVEKAIEFVLSCMNFDGGFGCRPGSESHAGQIYCCTGFLAITSQLHQVNSDLLGWWLCERQLPSGGLNGRPEKLPDVCYSWWVLASLKIIGRLHWIDREKLRNFILACQDEETGGFADRPGDMVDPFHTLFGIAGLSLLGEEQIKPVNPVFCMPEEVLQRVNVQPELVS

SEQ ID NO: 18878 - protein, 107 aa, Homo sapiens
LLLEKHADYIASYGSKKDDYEYCMSEYLRMSGIYWGLTVMDLMGQLHRMNREEILAFIKSCQHECGGISASIGHDPHLLYTLSAVQVNTNQNCNDLDSMFSYFRVGN

SEQ ID NO: 18879 - protein, 128 aa, Homo sapiens
LLLEKHADYIASYGSKKDDYEYCMSEYLRMSGIYWGLTVMDLMGQLHRMNREEILAFIKSCQHECGGISASIGHDPHLLYTLSAVQILTLYDSINVIDVNKVVEYVKGLQKEDGSFAGDIWGPTKQLV

SEQ ID NO: 18880 - protein, 96 aa, Homo sapiens
LLLEKHADYIASYGSKKDDYEYCMSEYLRMSGIYWGLTVMDLMGQLHRMNREEILAFIKSCQHECGGISASIGHDPHLLYTLSAVQVPLSSWSNWS

SEQ ID NO: 18881 - protein, 54 aa, Homo sapiens
LSLLQILTLYDSINVIDVNKVVEYVKGLQKEDGSFAGDIWGNVRFSPFYPKYQY

SEQ ID NO: 18882 - protein, 284 aa, Homo sapiens
VRVRKRAAPLLGADSASPSFSPGSGRRSPGASPLAPQGTRGTAMNTNDAKEYLARREIPQLFESLLNGLMCSKPEDPVEYLESCLQKVKELGGCDKVKWDTFVSQEKKTLPPLNGGQSRRSFLRNESDTDLSETAELIEEYEVFDPTRPRPKIILVIGGPGSGKGTQSLKIAERYGFQYISVGELLRKKIHSTSSNRKWSLIAKIITTGELAPQETTITEIKQKLMQIPDEEGIVIDGFPRDVAQALSFEDQYSLRPQTKMPVQSDPLPYAAPCGVCPVRQDSP

SEQ ID NO: 18883 - protein, 605 aa, Homo sapiens
VRVRKRAAPLLGADSASPSFSPGSGRRSPGASPLAPQGTRGTAMNTNDAKEYLARREIPQLFESLLNGLMCSKPEDPVEYLESCLQKVKELGGCDKVKWDTFVSQEKKTLPPLNGGQSRRSFLRNVMPENSNFPYRRYDRLPPIHQFSIESDTDLSETAELIEEYEVFDPTRPRPKIILVIGGPGSGKGTQSLKIAERYGFQYISVGELLRKKIHSTSSNRKWSLIAKIITTGELAPQETTITEIKQKLMQIPDEEGIVIDGFPRDVAQALSFEDQICTPDLVVFLACANQRLKERLLKRAEQQGRPDDNVKATQRRLMNFKQNAAPLVKYFQEKGLIMTFDADRDEDEVFYDISMAVDNKLFPNKEAAAGSSDLDPSMILDTGEIIDTGSDYEDQGDDQLNVFGEDTMGGFMEDLRKCKIIFIIGGPGSGKGTQCEKLVEKYGFTHLSTGELLREELASESERSKLIRDIMERGDLVPSGIVLELLKEAMVASLGDTRGFLIDGYPREVKQGEEFGRRIGDPQLVICMDCSADTMTNRLLQRSRSSLPVDDTTKTIAKRLEAYYRASIPVIAYYETKTQLHKINAEGTPEDVFLQLCTAIDSIF

SEQ ID NO: 18884 - protein, 94 aa, Homo sapiens
LMQIPDEEGIVIDGFPRDVAQALSFEDQICTPDLVVFLACANQRLKERLLKRAEQQGRPDDNVKATQRRLMNFKQNAAPLVKYFQEKGLIMTVS

SEQ ID NO: 18885 - protein, 103 aa, Homo sapiens
LKRAEQQGRPDDNVKATQRRLMNFKQNAAPLVKYFQEKGLIMTFDADRDEDEVFYDISMAVDNKLFPNKEAAAGSSDLDPSMILDTGEIIDTGSDYEDQVIKI

SEQ ID NO: 18886 - protein, 477 aa, Homo sapiens
LLDKSDRTVNPQFKPDLTPRNRYRTMEVTTRLTWNDENHLRKLLGNVSLSLLYKSSVHGGSIEDMVERCSRQGCTITMAYIDYNMIVAFMLGNYINLHESSTEPNDSLWFSLQKKNDTTEIETLLLNTAPKIIDEQLVCRLSKTDIFIICRDNKIYLDKMITRNLKLRFYGHRQYLECEVFRVEGIKDNLDDIKRIIKAREHRNRLLADIRDYRPYADLVSEIRILLVGPVGSGKSSFFNSVKSIFHGHVTGQAVVGSDITSITERYRIYSVKDGKNGKSLPFMLCDTMGLDGAEGAGLCMDDIPHILKGCMPDRYQFNSRKPITPEHSTFITSPSLKDRIHCVAYVLDINSIDNLYSKMLAKVKQVHKEVLNCGIAYVALLTKVDDCSEVLQDNFLNMSRSMTSQSRVMNVHKMLGIPISNILMVGNYASDLELDPMKDILILSALRQMLRAADDFLEDLPLEETGAIERALQPCI

SEQ ID NO: 18887 - protein, 130 aa, Homo sapiens
MEVTTRLTWNDENHLRKLLGNVSLSLLYKSSVHGGIKDNLDDIKRIIKAREHRNRLLADIRDYRPYADLVSEIRILLVGPVGSGKSSFFNSVKSIFHGHVTGQAVVGSDITSITERITISHRLFSPFWFE

SEQ ID NO: 18888 - protein, 300 aa, Homo sapiens [sequence omitted]

SEQ ID NO: 18889 - protein, 13 aa, Homo sapiens
MCHNIQTSTFVSP

SEQ ID NO: 18890 - protein, 678 aa, Homo sapiens
VTVKKLQKWMYKGRLLSLGMKGRARGTAPKVTGTQAASPNVGALKVRENRVLSVPPDQRITLTDLFENAYGSSMKGRELEELKDNIEFRGHKPLNSITVSKKRNWLYQSTLRPLNLEEENKKCQDRSHLSISPVSLPKHQLSQSFLKSSKEYCTYVVCNATNSSLSKNCALDFNEENDADDEGEIWYNPIPEDDDLGISSALSFGEADSAVLKLPAVNLSMLSGSDLMKAERHTEDSLCSSEHAGDIQTTRSNGMNPIHPAHSTEFVQQYKQKLGHKTQEGIMVEDSPMLKSPFAGSGILAATNSTELGIMEPSSPNPSPVKKGSSINWSLPDKIKSPRTVRKLSMKMKKLPEFSRKLSVKGTLNYINSPDNTPSLSKYNCREVHHTDILPSGNTTTAAKRNVISRYHLDTSVSSQQSYQKKNSMSSKYSCKGGYLSDGDSPELTTKASKHGSENKFGKGKEIISNSCSKNEIDIDAFRHYSFSDQPKCSQYISGLMSVHFYGAEDLKPPRIDSKDVFCAIQVDSVNKARTALLTCRTTFLDMDHTFNIEIENAQHLKLVVFSWEPTPRKNRVCCHGTVVLPTLFRVTKTHQLAVKLEPRGLIYVKVTLMEQWENSLHGLDINQEPIIFGVDIQKVVEKENIGLMVPLLIQKCIMEIEKRGCQVLSYYGSLLLPLLID

SEQ ID NO: 18891 - protein, 99 aa, Homo sapiens
LDMASEIHMTGPMCLIENTNGRLMANPEALKILSAITQPMVVVAIVGLYRTGKSYLMNKLAGKKKGEWHEQSSAKSLLSIYTVSLHYEDVRRERDEDEY

SEQ ID NO: 18892 - protein, 26 aa, Homo sapiens
LEEETNNVGNFPVCLVNQFFHADVWR

SEQ ID NO: 18893 - protein, 19 aa, Homo sapiens
MNQHHDLWMKCWKLLQCQL

SEQ ID NO: 18894 - protein, 40 aa, Homo sapiens
MMHAFLLNHKVCKVKVAHRCSRIVREPYSTAIPPRIILPL

SEQ ID NO: 18895 - protein, 12 aa, Homo sapiens
LDVGGSPRTLEG

SEQ ID NO: 18896 - protein, 37 aa, Homo sapiens
VERLLVWRMQWQFWPSVRTQQPCRGQPTTTASRWPSK

SEQ ID NO: 18897 - protein, 41 aa, Homo sapiens
MVVCWMPSEGSTNGKVETMCSFQLGGGCYSVDSEMFPWHCQ

SEQ ID NO: 18898 - protein, 75 aa, Homo sapiens
LQGFCVCVRGCRGGKAICGDFSSQYGHILQFVSFCPRLAQGTRMWFSLGVVIVAPKFWELAVGATFWTKNKLQGS

SEQ ID NO: 18899 - protein, 43 aa, Homo sapiens
VILVEQYKPETNNATPPPTPANPLWKNYLPRNWSLMPNRLGDR

SEQ ID NO: 18900 - protein, 16 aa, Homo sapiens
LWPLRNPATQQEVSSR

SEQ ID NO: 18901 - protein, 68 aa, Homo sapiens
VAKRERQQDLVALSRESGARKSGYESKLHLLEQAAQLSTTFQAQNRSLLSELQHAQRTVNNDDPCVLL

SEQ ID NO: 18902 - protein, 172 aa, Homo sapiens
LAWPSWDVKLEQEWQRCFLAPQAYLTGMILHCGYLEGKNNPWEFYPGSWNNHKQKWEAEGRGTLILEKIIFFSSEAQVKAEAEKAEAQRLAAIQRQNEQMMQERERLHQEQVRQMEIAKQNWLAEQQKMQEQQMQEQAAQLSTTFQAQNRSLLSELQHAQRTVNNDDPCVLL

SEQ ID NO: 18903 - protein, 55 aa, Homo sapiens
LAEQQKMQEQQMQVFINCFISPLPVTMRVCSSGKEGEAARSCGSQQGVWSQKVWV

SEQ ID NO: 18904 - protein, 48 aa, Homo sapiens
LQKYLKSKESVSHAILQTDQALTETEKKKKGEKKVEIMQDRKKSINFK

SEQ ID NO: 18905 - protein, 247 aa, Homo sapiens
LPRLCIQKFFPKKKCFIFDLPAHQKKLAQLETLPDDELEPEFVQQVTEFCSYIFSHSMTKTLPGGIMVNGSRLKNLVLTYVNAISSGDLPCIENAVLALAQRENSAAVQKAIAHYDQQMGQKVQLPMETLQELLDLHRTSEREAIEVFMKNSFKDVDQSFQKELETLLDAKQNDICKRNLEASSDYCSALLKDIFGPLEEAVKQGIYSKPGGHNLFIQKTEELKAKYYREPRKGIQVSLVLPIVENC

SEQ ID NO: 18906 - protein, 12 aa, Homo sapiens
LHTNQATRILHI

SEQ ID NO: 18907 - protein, 22 aa, Homo sapiens
MKVSKTMIAIIFMRKNNEYDAM

SEQ ID NO: 18908 - protein, 31 aa, Homo sapiens
LVSAVCLSFERMKTNTEMVCLRNFKRCRPPD

SEQ ID NO: 18909 - protein, 309 aa, Homo sapiens
LSSSGRRSLFRRMGFVKVVKNKAYFKRYQVKFRRRREGKTDYYARKRLVIQDKNKYNTPKYRMIVRVTNRDIICQIAYARIEGDMIVCAAYAHELPKYGVKVGLTNYAAAYCTGLLLARRLLNRFGMDKIYEGQVEVTGDEYNVESIDGQPGAFTCYLDAGLARTTTGNKVFGALKGAVDGGLSIPHSTKRFPGYDSESKEFNAEVHRKHIMGQNVADYMRYLMEEDEDAYKKQFSQYIKNSVTPDMMEEMYKKAHAAIRENPVYEKKPKKEVKKKRWNRPKMSLAQKKDRVAQKKASFLRAQERAAES

SEQ ID NO: 18910 - protein, 106 aa, Homo sapiens
LASTSGSHSFTGTLARSLCISWTALLELSSKSTVGWVGGSADFSLDFHIWDELAVISSRKGVAVLHWLFSSHSSSRYCNKELEKYSQMGSSPCCQGACHLMGETGK

SEQ ID NO: 18911 - protein, 147 aa, Homo sapiens
LLRRAPRPARPRAGPGLAPQPSISRDFLGQAACASGTMLRWLRDFVLPTAACQDAEQPTRYETLFQALDRNGDGVVDIGELQEGLRNLGIPLGQDAEEKIFTTGDVNKDGKLDFEEFMKYLKDHEKKMKLAFKSLDKNNDALMLMGQ

SEQ ID NO: 18912 - protein, 84 aa, Homo sapiens
LAHVTCRGREQGARRPPAVPLPWGGAVTTRLSPEAAAAAPSPRTRDPPARGRNVAEVLLKGPEMQGFGIHFEPLSCLTLTSFHY

SEQ ID NO: 18913 - protein, 37 aa, Homo sapiens
LLQKENVAEVLLKGPEMQGFGIHFEPLSCLTLTSFHY

SEQ ID NO: 18914 - protein, 319 aa, Homo sapiens
LDSRSCWLDMEDLEEDVRFIVDETLDFGGLSPSDSREEEDITVLVTPEKPLRRGLSHRSDPNAVAPAPQGVRLSLGPLSPEKLEEILDEANRLAAQLEQCALQDRESAGEGLGPRRVKPSPRRETFVLKDSPVRDLLPTVNSLTRSTPSPSSLTPRLRSNDRKGSVRALRATSGKRPSNMKRESPTCNLFPASKSPASSPLTRSTPPVRGRAGPSGRAAASEETRAAKLRACQPNATHQPECATWQRCPTSGFSVNSKRASKTKHCRTQSAGKWTQGSCFPATKSSCHGCHSQQSAAPQESGSPRTYQVKRSGQQARLQ

SEQ ID NO: 18915 - protein, 118 aa, Homo sapiens
LHPKAQHLLLLPDRLPQSGGEPGPVGEQQPVRRPEQPSCGPASRMPLTSRSVPPGRGALPPDSLSTRKGLPRPSTAGHRVRESGHKVPVSQRLNLPVMGATRSNLQPPRKVAVPGPTR

SEQ ID NO: 18916 - protein, 320 aa, Homo sapiens
LHGHDAWFVSCLSREEEDITVLVTPEKPLRRGLSHRSDPNAVAPAPQGVRLSLGPLSPEKLEEILDEANRLAAQLEQCALQDRESAGEGLGPRRVKPSPRRETFVLKDSPVRDLLPTVNSLTRSTPSPSSLTPRLRSNDRKGSVRALRATSGKRPSNMKRESPTCNLFPASKSPASSPLTRSTPPVRGRAGPSGRAAASPPTPIRSVLAPQPSTSNSQRLPRPQGAAAKSSSQLPIPSAIPRPASRMPLTSRSVPPGRGALPPDSLSTRKGLPRPSTAGHRVRESGHKVPVSQRLNLPVMGATRSNLQPPRKVAVPGPTR

SEQ ID NO: 18917 - protein, 342 aa, Homo sapiens
LDSRSCWLDMEDLEEDVRFIVDETLDFGGLSPSDSREEEDITVLVTPEKPLRRGLSHRSDPNAVAPAPQGVRLSLGPLSPEKLEEILDEANRLAAQLEQCALQDRESAGEGLGPRRVKPSPRRETFVLKDSPVRDLLPTVNSLTRSTPSPSSLTPRLRSNDRKGSVRALRATSGKRPSNMKRESPTCNLFPASKSPASSPLTRSTPPVRGRAGPSGRAAASPPTPIRSVLAPQPSTSNSQRLPRPQGAAAKSSSQLPIPSAIPRPASRMPLTSRSVPPGRGALPPDSLSTRKGLPRPSTAGHRVRESGHKVPVSQRLNLPVMGATRSNLQPPRKVAVPGPTR

SEQ ID NO: 18918 - protein, 372 aa, Homo sapiens
LDSRSCWLDMEDLEEDVRFIVDETLDFGGLSPSDSREEEDITVLVTPEKPLRRGLSHRSDPNAVAPAPQGVRLSLGPLSPEKLEEILDEANRLAAQLEQCALQDRESAGEGLGPRRVKPSPRRETFVLKDSPVRDLLPTVNSLTRSTPSPSSLTPRLRSNDRKGSVRALRATSGKRPSNMKRESPTCNLFPASKSPASSPLTRSTPPVRGRAGPSGRAAASEETRAAKLRVSGSGEFVGLTLKFLHPSPPGPPTPIRSVLAPQPSTSNSQRLPRPQGAAAKSSSQLPIPSAIPRPASRMPLTSRSVPPGRGALPPDSLSTRKGLPRPSTAGHRVRESGHKVPVSQRLNLPVMGATRSNLQPPRKVAVPGPTR

SEQ ID NO: 18919 - protein, 184 aa, Homo sapiens
LDSRSCWLDMEDLEEDVRFIVDETLDFGGLSPSDSREEEDITVLVTPEKPLRRGLSHRSDPNAVAPAPQGVRLSLGPLSPEKLEEILDEANRLAAQLEQCALQDRESAGEGLGPRRVKPSPRRETFVLKDSPVRDLLPTVNSLTRSTPSPSSLTPRLRSNDRKGSVRALRATSGKRPSNMKRVS

SEQ ID NO: 18920 - protein, 111 aa, Homo sapiens
LRKPENSECDATAKNKNECSLHIHASYSISQKLNVPMAPLSEPNAVGIVIAHGSVGDAISVMVPDVYISDDGGYSWTKMLEGPHYYTILDSGGIIVAIEHSSRPINVIKYA

SEQ ID NO: 18921 - protein, 38 aa, Homo sapiens [sequence omitted]

SEQ ID NO: 18922 - protein, 215 aa, Homo sapiens
VPGLPSALAYGKGMLGSLLAQLSFPGFPSIQLPYLIDGAHKITQSNAILCYIARKHNLCGETEEEKIRVDILENQAMDVSNQLARVCYSPDFEKLKPEYLEELPTMMQHFSQFLGKRPWFVGDKITFVDFLAYDVLDLHRIFEPNCLDAFPNLKDFISRFEVMPPSSFLFDAPCSVTSFQMLSQSWSYIKNNLHLLSAGFMPGTLPSTLYLSCGI

SEQ ID NO: 18923 - protein, 138 aa, Homo sapiens
LKDPVCYLKKAFLLVQDIMEDTMRFRDNTPNAIAIVQLQELSLRLKSCFTKDYEEHDKACVRTFYETPLQLLEKVKNVFNETKNLLDKDWNIFSKNCNNSFAECSSQGWLNVWGVLWRQLTPIWESGPLLQELCCESP

SEQ ID NO: 18924 - protein, 55 aa, Homo sapiens
LQILDEVEKRHQISMAVIYPFMQGLREAAFPAPGKTVTLKSFIPDSGTEVKVQRN

SEQ ID NO: 18925 - protein, 407 aa, Homo sapiens
VDKRPRECVSQKKLAKDMGATTMDQKSLWAGVVVLLLLQGGSAYKLVCYFTNWSQDRQEPGKFTPENIDPFLCSHLIYSFASIENNKVIIKDKSEVMLYQTINSLKTKNPKLKILLSIGGYLFGSKGFHPMVDSSTSRLEFINSIILFLRNHNFDGLDVSWIYPDQKENTHFTVLIHELAEAFQKDFTKSTKERLLLTAGVSAGRQMIDNSYQVEKLAKDLDFINLLSFDFHGSWEKPLITGHNSPLSKGWQDRGPSSYYNVEYAVGYWIHKGMPSEKVVMGIPTYGHSFTLASAETTVGAPASGPGAAGPITESSGFLAYYEICQFLKGAKITRLQDQQVPYAVKGNQWVGYDDVKSMETKVQFLKNLNLGGAMIWSIDMDDFTGKSCNQGPYPLVQAVKRSLGSL

SEQ ID NO: 18926 - protein, 397 aa, Homo sapiens
VDKRPRECVSQKKLAKDMGATTMDQKSLWAGSAYKLVCYFTNWSQDRQEPGKFTPENIDPFLCSHLIYSFASIENNKVIIKDKSEVMLYQTINSLKTKNPKLKILLSIGGYLFGSKGFHPMVDSSTSRLEFINSIILFLRNHNFDGLDVSWIYPDQKENTHFTVLIHELAEAFQKDFTKSTKERLLLTAGVSAGRQMIDNSYQVEKLAKDLDFINLLSFDFHGSWEKPLITGHNSPLSKGWQDRGPSSYYNVEYAVGYWIHKGMPSEKVVMGIPTYGHSFTLASAETTVGAPASGPGAAGPITESSGFLAYYEICQFLKGAKITRLQDQQVPYAVKGNQWVGYDDVKSMETKVQFLKNLNLGGAMIWSIDMDDFTGKSCNQGPYPLVQAVKRSLGSL

SEQ ID NO: 18927 - protein, 421 aa, Homo sapiens
LWLGSPDEVWLYLVCEHTHIFTAIIWDSRTRFGSTDFSFHPSIAGVVVLLLLQGGSAYKLVCYFTNWSQDRQEPGKFTPENIDPFLCSHLIYSFASIENNKVIIKDKSEVMLYQTINSLKTKNPKLKILLSIGGYLFGSKGFHPMVDSSTSRLEFINSIILFLRNHNFDGLDVSWIYPDQKENTHFTVLIHELAEAFQKDFTKSTKERLLLTAGVSAGRQMIDNSYQVEKLAKDLDFINLLSFDFHGSWEKPLITGHNSPLSKGWQDRGPSSYYNVEYAVGYWIHKGMPSEKVVMGIPTYGHSFTLASAETTVGAPASGPGAAGPITESSGFLAYYEICQFLKGAKITRLQDQQVPYAVKGNQWVGYDDVKSMETKVQFLKNLNLGGAMIWSIDMDDFTGKSCNQGPYPLVQAVKRSLGSL

SEQ ID NO: 18928 - protein, 76 aa, Homo sapiens
VVLLLLQGGSAYKLVCYFTNWSQDRQEPGKFTPENIDPFLCSHLIYSFASIENNKVIIKDKSEVMLYQTINSLKTK

SEQ ID NO: 18929 - protein, 95 aa, Homo sapiens
VVLLLLQGGSAYKLVCYFTNWSQDRQEPGKFTPENIDPFLCSHLIYSFASIENNKVIIKDKSEVMLYQTINSLKTKNPKLKILLSIGGYLFGSKG

SEQ ID NO: 18930 - protein, 43 aa, Homo sapiens
LPPPLPLLSPRRAGAGATAERREEEEEEVEEVEEVEEAPDRGG

SEQ ID NO: 18931 - protein, 64 aa, Homo sapiens [sequence omitted]

SEQ ID NO: 18932 - protein, 229 aa, Homo sapiens
VRIWQRIFEWWYFHKHGTSFIEQVSVSHLQPLMGGTESSISEPGSPSRNRENETSRQNLSECKVWRNPLNLFRGAEYRRYTWVTGKEPLTYYDMNLSAQDHQTFFTCDTDFLRPSDTVMQKAWRERNPPARIKAAYQALELNNDCATAYVLLAEEEATTIVDAERLFKQALKAGETIYRQSQQCQHQSPQHEAQLRRDTNVLVYIKRRLAMCARKLGRIREAVKIMRDI

SEQ ID NO: 18933 - protein, 17 aa, Homo sapiens
MADFDDRVSDEEKHELR

SEQ ID NO: 18934 - protein, 108 aa, Homo sapiens
LLVHVYTENIPEKWTPEVKHFCPNVPIILVGNKKDLRQDEHTRRELAKMKQEPVRSEEGRDMANRISAFGYLECSAKTKEGVREVFEMATRAGLQVRKNKRRRGCPIL

SEQ ID NO: 18935 - protein, 198 aa, Homo sapiens
LRSPTMAAIRKKLVIVGDGACGKTCLLIVFSKDQFPEVYVPTVFENYIADIEVDGKQVELALWDTAGQEDYDRLRPLSYPDTDVILMCFSIDSPDSLENIPEKWTPEVKHFCPNVPIILVGNKKDLRQDEHTRRELAKMKQEPVRSEEGRDMANRISAFGYLECSAKTKEGVREVFEMATRAGLQVRKNKRRRGCPIL

SEQ ID NO: 18936 - protein, 263 aa, Homo sapiens
LRLRSGYRRFLNCSLPGWCWDWPSFVSSFGAPPSPDSSPLPLPNSLDFISAPEPALSSCSLGTSAGWSPTMAAIRKKLVIVGDGACGKTCLLIVFSKDQFPEVYVPTVFENYIADIEVDGKQVELALWDTAGQEDYDRLRPLSYPDTDVILMCFSIDSPDSLENIPEKWTPEVKHFCPNVPIILVGNKKDLRQDEHTRRELAKMKQEPVRSEEGRDMANRISAFGYLECSAKTKEGVREVFEMATRAGLQVRKNKRRRGCPIL

SEQ ID NO: 18937 - protein, 332 aa, Homo sapiens
LGRGCGRWGVLGTRPQESTFPSSLARRSGPVRGGASAWAWTPFPPSGVGIRAGRWSDRVGPSPGCSEGARTCRQGLWPPEVRVGAPSLLLPASRNLPRRARGEGTSTQTPQPPGLDFISAPEPALSSCSLGTSAGWSPTMAAIRKKLVIVGDGACGKTCLLIVFSKDQFPEVYVPTVFENYIADIEVDGKQVELALWDTAGQEDYDRLRPLSYPDTDVILMCFSIDSPDSLENIPEKWTPEVKHFCPNVPIILVGNKKDLRQDEHTRRELAKMKQEPVRSEEGRDMANRISAFGYLECSAKTKEGVREVFEMATRAGLQVRKNKRRRGCPIL

SEQ ID NO: 18938 - protein, 219 aa, Homo sapiens
LSLRHRPRSWRRRSGSLGTSAGWSPTMAAIRKKLVIVGDGACGKTCLLIVFSKDQFPEVYVPTVFENYIADIEVDGKQVELALWDTAGQEDYDRLRPLSYPDTDVILMCFSIDSPDSLENIPEKWTPEVKHFCPNVPIILVGNKKDLRQDEHTRRELAKMKQEPVRSEEGRDMANRISAFGYLECSAKTKEGVREVFEMATRAGLQVRKNKRRRGCPIL

SEQ ID NO: 18939 - protein, 100 aa, Homo sapiens
VELALWDTAGQEDYDRLRPLSYPDTDVILMCFSIDSPDSLGEGIGGRGLRTPWNQPEVSCLGLSSVIFRGGGGDAGEHSGPVGLLYCGNWPSEGILLLRF

SEQ ID NO: 18940 - protein, 107 aa, Homo sapiens
LSLRHRPRSWRRRSGSLDFISAPEPALSSCSLGTSAGWSPTMAAIRKKLVIVGDGACGKTCLLIVFSKDQFPEVYVPTVFENYIADIEVDGKQTGSVTWAESLCLWV

SEQ ID NO: 18941 - protein, 84 aa, Homo sapiens
LSLRHRPRSWRRRSGSPTMAAIRKKLVIVGDGACGKTCLLIVFSKDQFPEVYVPTVFENYIADIEVDGKQTGSVTWAESLCLWV

SEQ ID NO: 18942 - protein, 80 aa, Homo sapiens
LGTSAGWSPTMAAIRKKLVIVGDGACGKTCLLIVFSKDQFPEVYVPTVFENYIADIEVDGKQVKAEMPFPPHPETPPPSH

SEQ ID NO: 18943 - protein, 15 aa, Homo sapiens
LNVVGMKCNRTDFTT

SEQ ID NO: 18944 - protein, 13 aa, Homo sapiens
LLGMKCNRTDFTT

SEQ ID NO: 18945 - protein, 7 aa, Homo sapiens
MKLELAF

SEQ ID NO: 18946 - protein, 463 aa, Homo sapiens
LAPPGGRLRGGDGGVVPPYKNGGGGGGTAHSVPLPRGCRGRAAPAGACPRQGPASVASSSIAQFPQPEHPLKMAEESSCTRDCMSFSVLNWDQVSRLHEVLTEVVPIHGRGNFPTLEITLKDIVQTVRSRLEEAGIKVHDVRLNGSAAGHVLVKDNGLGCKDLDLIFHVALPTEAEFQLVRDVVLCSLLNFLPEGVNKLKISPVTLKEAYVQKLVKVCTDTDRWSLISLSNKNGKNVELKFVDSIRRQFEFSVDSFQIILDSLLFFYDCSNNPISEHFHPTVIGESMYGDFEEAFDHLQNRLIATKNPEEIRGGGLLKYSNLLVRDFRPTDQEEIKTLERYMCSRFFIDFPDILEQQRKLETYLQNHFAEEERSKYDYLMILRRVVNESTVCLMGHERRQTLNLISLLALRVLAEQNIIPSATNVTCYYQPAPYVSDGNFSNYYVAHPPVTYSQPYPTWLPCN

SEQ ID NO: 18947 - protein, 41 aa, Homo sapiens
VSPGGAWLGRRALSAAPILQILAEAFVMSAAAETGVLKAGC

SEQ ID NO: 18948 - protein, 14 aa, Homo sapiens
MTGERELENTAQLL

SEQ ID NO: 18949 - protein, 499 aa, Homo sapiens
MTFWTQMFFLLQDCEGLIVRSATKVTADVINAAEKLQVVGRAGTGVDNVDLEAATRKGILVMNTPNGNSLSAAELTCGMIMCLARQIPQATASMKDGKWERKKFMGTELNGKTLGILGLGRIGREVATRMQSFGMKTIGYDPIISPEVSASFGVQQLPLEEIWPLCDFITVHTPLLPSTTGLLNDNTFAQCKKGVRVVNCARGGIVDEGALLRALQSGQCAGAALDVFTEEPPRDRALVDHENVISCPHLGASTKEAQSRCGEEIAVQFVDMVKGKSLTGVVNAQALTSAFSPHTKPWIGLAEALGTLMRAWAGSPKGTIQVITQGTSLKNAGNCLSPAVIVGLLKEASKQADVNLVNAKLLVKEAGLNVTTSHSPAAPGEQGFGECLLAVALAGAPYQAVGLVQGTTPVLQGLNGAVFRPEVPLRRDLPLLLFRTQTSDPAMLPTMIGLLAEAGVRLLSYQTSLVSDGETWHVMGISSLLPSLEAWKQHVTEAFQFHF

SEQ ID NO: 18950 - protein, 139 aa, Homo sapiens
LKPSGTKKLLFPWRDLLSLLLEEDLGEFTSALTPPCSFHLSSLVFTDIHWQIPQATASMKDGKWERKKFMGTELNGKTLGILGLGRIGREVATRMQSFGMKASFSVAPLHINIPGNILHHGDFGSDFNQMKSPTSFLND

SEQ ID NO: 18951 - protein, 245 aa, Homo sapiens
LGLGSQILIQDLPCLFLTTAPLLHPLQVNAQALTSAFSPHTKPWIGLAEALGTLMRAWAGSPKGTIQVITQGTSLKNAGNCLSPAVIVGLLKEASKQADVNLVNAKLLVKEAGLNVTTSHSPAAPGEQGFGECLLAVALAGAPYQAVGLVQGTTPVLQGLNGAVFRPEVPLRRDLPLLLFRTQTSDPAMLPTMIGLLAEAGVRLLSYQTSLVSDGETWHVMGISSLLPSLEAWKQHVTEAFQFHF

SEQ ID NO: 18952 - protein, 20 aa, Homo sapiens
LQRGFLDLELFFSSTVISNS

SEQ ID NO: 18953 - protein, 141 aa, Homo sapiens [sequence omitted]

SEQ ID NO: 18954 - protein, 53 aa, Homo sapiens [sequence omitted]

SEQ ID NO: 18955 - protein, 19 aa, Homo sapiens
MITKVVFSGRGLSVMFRVY

SEQ ID NO: 18956 - protein, 128 aa, Homo sapiens
MPDPAKSAPAPKKGSKKAVTKVQKKDGKKRKRSRKESYSVYVYKVLKQVHPDTGISSKAMGIMNSFVNDIFERIAGEASRLAHYNKRSTITSREIQTAVRLLLPGELAKHAVSEGTKAVTKYTSSNIF

SEQ ID NO: 18957 - protein, 130 aa, Homo sapiens
LCLTMPEPAKSAPAPKKGSKKAVTKAQKKDGKKRKRSRKESYSIYVYKVLKQVHPDTGISSKAMGIMNSFVNDIFERIAGEASRLAHYNKRSTITSREIQTAVRLLLPGELAKHAVSEGTKAVTKYTSSK

SEQ ID NO: 18958 - protein, 112 aa, Homo sapiens
VETNCGKGQISQTQPLTSAQTSPPTYRPQFRLPGLPQFLQPLPHLSLRRSPASPGPSTHPATRMITRSGSPATVIKKSAKAGPNATKVQPKNTAAPMAGQLQTDRRKGFFSV

SEQ ID NO: 18959 - protein, 405 aa, Homo sapiens
LQVPIFGYSRSCSIAPASGPMDSPSSVSSYSSYSLSSSFPTSPVNSDFGFPSDSEREDKGAHGPRPDTVGQRGGSRPSPGPIRCRHRSKVSGNQHTPSHPKQRGSASPMAGSGAKRSRDGELETSLNTQGCTTEGDLLFAQKCKELQGFIPPLTDLLNGLKMGRFERGLSSFQQSVAMDRIQRIVGVLQKPQMGERYLGTLLQVEGMLKTWFPQIAAQKSSLGGGKHQLTKHFPSHHSDSAASSPASPMEKMDQTQLGHLALKPKQPWHLTQWPAMNLTWIHTTPICNPPLSSPGTISFSHGPLGTGTGIGVILFLQHGVQPFTHSAPTTPVPPTTASPVIPGEPMKLSGEGPRCYSLPVTLPSDWSYTLSPPSLPTLARKMTIGHREQQRSHPPVAADAHLLNL

SEQ ID NO: 18960 - protein, 76 aa, Homo sapiens
LAWREGRFAGFRPLFQRPTKSPSPTPNSTPFGTMCGGWDPVAHPCRSCPSHARRRVFVVTPCCHLFSSLCEDLDWQ

SEQ ID NO: 18961 - protein, 19 aa, Homo sapiens
MYTAFRKDLKVRVPSLRKT

SEQ ID NO: 18962 - protein, 26 aa, Homo sapiens
LYFSSPAQTPELPRHSLHLWNTPVID

SEQ ID NO: 18963 - protein, 62 aa, Homo sapiens
VAWRSGETGTENLSLLGLTVVMSFKREGDDWSQLNVLKKRRVGDLLASYIPEDEALMLRDGR

SEQ ID NO: 18964 - protein, 18 aa, Homo sapiens
MPGEWCGLELVQEPARRV

SEQ ID NO: 18965 - protein, 170 aa, Homo sapiens
VTKMEAFLGSRSGLWAGGPAPGQFYRIPSTPDSFMDPASALYRGPITRTQNPMVTGTSVLGVKFEGGVVIAADMLGSYGSLARFRNISRIMRVNNSTMLGASGDYADFQYLKQVLGQMVIDEELLGDGHSYSPRAIHSWLTRAMYSRRSKMNPLWNTMVIGGYADGERFI

SEQ ID NO: 18966 - protein, 267 aa, Homo sapiens
VTKMEAFLGSRSGLWAGGPAPGQFYRIPSTPDSFMDPASALYRGPITRTQNPMVTGTSVLGVKFEGGVVIAADMLGSYGSLARFRNISRIMRVNNSTMLGASGDYADFQYLKQVLGQMVIDEELLGDGHSYSPRAIHSWLTRAMYSRRSKMNPLWNTMVIGGYADGESFLGYVDMLGVAYEAPSLATGYGAYLAQPLLREVLEKQPVLSQTEARDLVERCMRVLYYRDARSYNRFQIATVTEKGVEIEGPLSTETNWDIAHMISGFE

SEQ ID NO: 18967 - protein, 116 aa, Homo sapiens
MEAFLGSRSGLWAGGPAPGQFYRIPSTPDSFMDPASALYRGPITRTQNPMVTGTSVLGVKFEGGVVIAADMLGSYGSLARFRNISRIMRVNNSTMLGASGDYADFQYLKQVLGQMV

SEQ ID NO: 18968 - protein, 112 aa, Homo sapiens
LGSRSGLWAGGPAPGQFYRIPSTPDSFMDPASALYRGPITRTQNPMVTGTSVLGVKFEGGVVIAADMLGSYGSLARFRNISRIMRVNNSTMLGASGDYADFQYLKQVLGQMD

SEQ ID NO: 18969 - protein, 44 aa, Homo sapiens
VGIIECSAFFQFQIATVTEKGVEIEGPLSTETNWDIAHMISGFE

SEQ ID NO: 18970 - protein, 28 aa, Homo sapiens
MCLPNNSFFFSFQNIFQMARSQQRDVAT

SEQ ID NO: 18971 - protein, 533 aa, Homo sapiens
LLRGPRPASAASCTPLLDHPLLRRTGSQGRQSQGSVMRTQIEVIPCKICGDKSSGIHYGVITCEGCKGFFRRSQRCNAAYSCTRQQNCPIDRTSRNRCQHCRLQKCLALGMSRDAVKFGRMSKKQRDSLHAEVQKQLQQRQQQQQEPVVKTPPAGAQGADTLTYTLGLPDGQLPLGSSPDLPEASACPPGLLKASGSGPSYSNNLAKAGLNGASCHLEYSPERGKAEGRESFYSTGSQLTPDRCGLRFEEHRHPGLGELGQGPDSYGSPSFRSTPEAPYASLTEIEHLVQSVCKSYRETCQLRLEDLLRQRSNIFSREEVTGYQRKSMWEMWERCAHHLTEAIQYVVEFAKRLSGFMELCQNDQIVLLKAGAMEVVLVRMCRAYNADNRTVFFEGKYGGMELFRALGCSELISSIFDFSHSLSALHFSEDEIALYTALVLINAHRPGLQEKRKVEQLQYNLELAFHHHLCKTHRQSILAKLPPKGKLRSLCSQHVERLQIFQHLHPIVVQAAFPPLYKELFSTETESPVGLSK

SEQ ID NO: 18972 - protein, 572 aa, Homo sapiens
MWGTGPSAGKDRMSGRPWPHPWSKSGTPSEQDRRATGLVSCEHGGGKFEGQSHQAPGPPGGGRTGCLELLAAKKTHTSQIEVIPCKICGDKSSGIHYGVITCEGCKGFFRRSQRCNAAYSCTRQQNCPIDRTSRNRCQHCRLQKCLALGMSRDAVKFGRMSKKQRDSLHAEVQKQLQQRQQQQQEPVVKTPPAGAQGADTLTYTLGLPDGQLPLGSSPDLPEASACPPGLLKASGSGPSYSNNLAKAGLNGASCHLEYSPERGKAEGRESFYSTGSQLTPDRCGLRFEEHRHPGLGELGQGPDSYGSPSFRSTPEAPYASLTEIEHLVQSVCKSYRETCQLRLEDLLRQRSNIFSREEVTGYQRKSMWEMWERCAHHLTEAIQYVVEFAKRLSGFMELCQNDQIVLLKAGAMEVVLVRMCRAYNADNRTVFFEGKYGGMELFRALGCSELISSIFDFSHSLSALHFSEDEIALYTALVLINAHRPGLQEKRKVEQLQYNLELAFHHHLCKTHRQSILAKLPPKGKLRSLCSQHVERLQIFQHLHPIVVQAAFPPLYKELFSTETESPVGLSK

SEQ ID NO: 18973 - protein, 540 aa, Homo sapiens
LGPAPCPPGQPGQPGRHQGSCPMDRAPQRQHRASRELLAAKKTHTSQIEVIPCKICGDKSSGIHYGVITCEGCKGFFRRSQRCNAAYSCTRQQNCPIDRTSRNRCQHCRLQKCLALGMSRDAVKFGRMSKKQRDSLHAEVQKQLQQRQQQQQEPVVKTPPAGAQGADTLTYTLGLPDGQLPLGSSPDLPEASACPPGLLKASGSGPSYSNNLAKAGLNGASCHLEYSPERGKAEGRESFYSTGSQLTPDRCGLRFEEHRHPGLGELGQGPDSYGSPSFRSTPEAPYASLTEIEHLVQSVCKSYRETCQLRLEDLLRQRSNIFSREEVTGYQRKSMWEMWERCAHHLTEAIQYVVEFAKRLSGFMELCQNDQIVLLKAGAMEVVLVRMCRAYNADNRTVFFEGKYGGMELFRALGCSELISSIFDFSHSLSALHFSEDEIALYTALVLINAHRPGLQEKRKVEQLQYNLELAFHHHLCKTHRQSILAKLPPKGKLRSLCSQHVERLQIFQHLHPIVVQAAFPPLYKELFSTETESPVGLSK

SEQ ID NO: 18974 - protein, 140 aa, Homo sapiens
LGVCCPNLQSLRSGSCKCSLPRACVPHCAHPPSQILTAVMACPLEKALDVMVSTFHKYSGKEGDKFKLNKSELKELLTRELPSFLGKRTDEAAFQKLMSNLDSNRDNEVDFQEYCVFLSCIAMMCNEFFEGFPDKQPRKK

SEQ ID NO: 18975 - protein, 143 aa, Homo sapiens
LLWAGPGWGINRSDLWAVPILPLSTTLSPQRFFFLGLILTAVMACPLEKALDVMVSTFHKYSGKEGDKFKLNKSELKELLTRELPSFLGKRTDEAAFQKLMSNLDSNRDNEVDFQEYCVFLSCIAMMCNEFFEGFPDKQPRKK

SEQ ID NO: 18976 - protein, 107 aa, Homo sapiens
VILTAVMACPLEKALDVMVSTFHKYSGKEGDKFKLNKSELKELLTRELPSFLGKRTDEAAFQKLMSNLDSNRDNEVDFQEYCVFLSCIAMMCNEFFEGFPDKQPRKK

SEQ ID NO: 18977 - protein, 62 aa, Homo sapiens
LILTAVMACPLEKALDVMVSTFHKYSGKEGDKFKLNKSELKELLTRELPSFLGPLLPPEKDR

SEQ ID NO: 18978 - protein, 135 aa, Homo sapiens
LCIPLIPHTSLCSRRCLQILAAGLFLPGSVGITDPCESGNFRVHTVMTLEQQDMVCYTAQTLVRILSHGGFRKILGQEGDASYLASEISTWDGVIVTPSEKAYEKPPEKKEGEEEEENTEEPPQGEEEESMETQE

SEQ ID NO: 18979 - protein, 43 aa, Homo sapiens
MRGDRGRGRGGRFGSRGGPGGGFRPFVPHIPFDFYLLFTSGLV

SEQ ID NO: 18980 - protein, 145 aa, Homo sapiens
LLAEVSAEVDGPVPGYLSSPQSITDTCLYIFTSGTTGLPKAARISHLKILQCQGFYQLCGVHQEDVIYLALPLYHMSGSLLGIVGCMGIGATVVLKSKFSAGQFWEDCQQHRVTVFQYIGELCRYLVNQPPVRGHRSWAELLTQG

SEQ ID NO: 18981 - protein, 45 aa, Homo sapiens
VSGSRACFPVAWADASLNFSQGCAGFPRLRMDHWRGSKVRVPVRE

SEQ ID NO: 18982 - protein, 204 aa, Homo sapiens
VSASGIARRGGPMAPLGGAPRLVLLFSGKRKSGKDFVTEALQSRLGADVCAVLRLSGPLKEQYAQEHGLNFQRLLDTSTYKEAFRKDMIRWGEEKRQADPGFFCRKIVEGISQPIWLVSDTRRVSDIQWFREAYGAVTQTVRVVALEQSRQQRGWVFTPGVDDAESECGLDNFGDFDWVIENHGVEQRLEEQLENLIEFIRSRL

SEQ ID NO: 18983 - protein, 330 aa, Homo sapiens
LVQVAATAASGTSATMASCPDSDNSWVLAGSESLPVETLGPASRMDPESERALQAPHSPSKTDGKELAGTMDGEGTLFQTESPQSGSILTEETEVKGTLEGDVCGVEPPGPGDTVVQGDLQETTVVTGLGPDTQDLEGQSPPQSLPSTPKAAWIREEGRCSSSDDDTDVDMEGLRRRRGREAGPPQPMVPLAVENQAGGGLSESETGPMEEVERQVLPDPEVLEAVGDRQDGLREQLQAPVPPDSVPSLQNMGLLLDKLAKENQDIRLLQAQLQVGTGRRGWARVTHLGQASVLASSPKRNVSYLPTHPDPPLSHYSQGVFPVLGSHPLC

SEQ ID NO: 18984 - protein, 162 aa, Homo sapiens
LVQVAATAASGTSATMASCPDSDNSWVLAGSESLPVETLGPASRMDPESERALQAPHSPSKTDGKELAGTMDGEGTLFQTESPQSGSILTEETEVKGTLEGDVCGVEPPGPGDTVVQGDLQETTVVTGLGPDTQDLEGQSPPQSLPSTPKAVTSLPCPCPFP

SEQ ID NO: 18985 - protein, 104 aa, Homo sapiens
VAATAASGTSATMASCPDSDNSWVLAGSESLPVETLGPASRMDPESERALQAPHSPSKTDGKELAGTMDGEGTGPCLGHSLPDKAILHILGFLSFLREREAGSF

SEQ ID NO: 18986 - protein, 11 aa, Homo sapiens
VRCGDSMRPWT

SEQ ID NO: 18987 - protein, 97 aa, Homo sapiens [sequence omitted]

SEQ ID NO: 18988 - protein, 32 aa, Homo sapiens
MCAGPWRKGAETGPYFCNDTVRHRKASLLCPF

SEQ ID NO: 18989 - protein, 87 aa, Homo sapiens
LGSCHHASAFGACPCRECLVPPPYATPRMPLSRWLRSVGVFLLPAPYWAPRERWLGSLRRPSLVHGYPVLAWHSARCWCQAWTEEPR

SEQ ID NO: 18990 - protein, 109 aa, Homo sapiens
MNGDQNSDVYAQEKQDFVQHFSQIVRVLTEDEMGHPEIGDAIARLKEVLEYNAIGGKYNRGLTVVVAFRELVEPRKQDADSLQRAWTVGWCVELVRGVGQGRRSFLQWW

SEQ ID NO: 18991 - protein, 176 aa, Homo sapiens
MNGDQNSDVYAQEKQDFVQHFSQIVRVLTEDEMGHPEIGDAIARLKEVLEYNAIGGKYNRGLTVVVAFRELVEPRKQDADSLQRAWTVGWCVELLQAFFLVADDIMDSSLTRRGQICWYQKPGVGLDAINDANLLEACIYRLLKLYCREQPYYLNLIELFLQVYCRQGPMPRGCPW

SEQ ID NO: 18992 - protein, 192 aa, Homo sapiens
MNGDQNSDVYAQEKQDFVQHFSQIVRVLTEDEMGHPEIGDAIARLKEVLEYNAIGGKYNRGLTVVVAFRELVEPRKQDADSLQRAWTVGWCVELLQAFFLVADDIMDSSLTRRGQICWYQKPGVGLDAINDANLLEACIYRLLKLYCREQPYYLNLIELFLQSSYQTEIGQTLDLLTAPQGNVDLVRFTEKR

SEQ ID NO: 18993 - protein, 575 aa, Homo sapiens
VEQRSMAGGAREVLTLQLGHFAGFVGAHWWNQQDAALGRATDSKEPPGELCPDVLYRTGRTLHGQETYTPRLILMDLKGSLSSLKEEGGLYRDKQLDAAIAWQGKLTTHKEELYPKNPYLQDFLSAEGVLSSDGVWRVKSIPNGKGSSPLPTATTPKPLIPTEASIRVWSDFLRVHLHPRSICMIQKYNHDGEAGRLEAFGQGESVLKEPKYQEELEDRLHFYVEECDYLQGFQILCDLHDGFSGVGAKAAELLQDEYSGRGIITWGLLPGPYHRGEAQRNIYRLLNTAFGLVHLTAHSSLVCPLSLGGSLGLRPEPPVSFPYLHYDATLPFHCSAILATALDTVTVPYRLCSSPVSMVHLADMLSFCGKKVVTAGAIIPFPLAPGQSLPDSLMQFGGATPWTPLSACGEPSGTRCFAQSVVLRGIDRACHTSQLTPGTPPPSALHACTTGEEILAQYLQQQQPGVMSSSHLLLTPCRVAPPYPHLFSSCSPPGMVLDGSPKGAAVESIPVFGALCSSSSLHQTLEALARDLTKLDLRRWASFMDAGVEHDDVAELLQELQSLAQCYQGGDSLVD

SEQ ID NO: 18994 - protein, 498 aa, Homo sapiens
LSGSLSSLKEEGGLYRDKQLDAAIAWQGKLTTHKEELYPKNPYLQDFLSAEGVLSSDGVWRVKSIPNGKGSSPLPTATTPKPLIPTEASIRVWSDFLRVHLHPRSICMIQKYNHDGEAGRLEAFGQGESVLKEPKYQEELEDRLHFYVEECDYLQGFQILCDLHDGFSGVGAKAAELLQDEYSGRGIITWGLLPGPYHRGEAQRNIYRLLNTAFGLVHLTAHSSLVCPLSLGGSLGLRPEPPVSFPYLHYDATLPFHCSAILATALDTVTVPYRLCSSPVSMVHLADMLSFCGKKVVTAGAIIPFPLAPGQSLPDSLMQFGGATPWTPLSACGEPSGTRCFAQSVVLRGIDRACHTSQLTPGTPPPSALHACTTGEEILAQYLQQQQPGVMSSSHLLLTPCRVAPPYPHLFSSCSPPGMVLDGSPKGAVESIPVFGALCSSSSLHQTLEALARDLTKLDLRRWASFMDAGVEHDDVAELLQELQSLAQCYQGGDSLVD

SEQ ID NO: 18995 - protein, 427 aa, Homo sapiens
MAGEAHHTQRGTLSQEPLSPRLSECREASIRVWSDFLRVHLHPRSICMIQKYNHDGEAGRLEAFGQGESVLKEPKYQEELEDRLHFYVEECDYLQGFQILCDLHDGFSGVGAKAAELLQDEYSGRGIITWGLLPGPYHRGEAQRNIYRLLNTAFGLVHLTAHSSLVCPLSLGGSLGLRPEPPVSFPYLHYDATLPFHCSAILATALDTVTVPYRLCSSPVSMVHLADMLSFCGKKVVTAGAIIPFPLAPGQSLPDSLMQFGGATPWTPLSACGEPSGTRCFAQSVVLRGIDRACHTSHRLMVVLALFWQPAHPRDTSTLCPSCMYHWGRNLGSVFTTAAAWSHEFFPSAADSLQGGSSLPPPLLKLQSTGYGSGWFPQGSSSGEHPSVWGTVFLFVPAPDPGSLGQRPHQTRLAALGQLHGCWSGAR

SEQ ID NO: 18996 - protein, 449 aa, Homo sapiens
MGVLSSDGVWRVKSIPNGKGSSPLPTATTPKPLIPTEASIRVWSDFLRVHLHPRSICMIQKYNHDGEAGRLEAFGQGESVLKEPKYQEELEDRLHFYVEECDYLQGFQILCDLHDGFSGVGAKAAELLQDEYSGRGIITWGLLPGPYHRGEAQRNIYRLLNTAFGLVHLTAHSSLVCPLSLGGSLGLRPEPPVSFPYLHYDATLPFHCSAILATALDTVTVPYRLCSSPVSMVHLADMLSFCGKKVVTAGAIIPFPLAPGQSLPDSLMQFGGATPWTPLSACGEPSGTRCFAQSVVLRGIDRACHTSQLTPGTPPPSALHACTTGEEILAQYLQQQQPGVMSSSHLLLTPCRVAPPYPHLFSSCSPPGMVLDGSPKGAAVESIPVFGALCSSSSLHQTLEALARDLTKLDLRRWASFMDAGVEHDDVAELLQELQSLAQCYQGGDSLVD

SEQ ID NO: 18997 - protein, 36 aa, Homo sapiens
VHLTAHSSLVCPLSLGGSLGLRPEPPVSFPYLHYDA

SEQ ID NO: 18998 - protein, 59 aa, Homo sapiens
VAVDGINALWGRTTLKREDKSPIAPEELALVHNLRKMMKNDWVSAYDTSHISERNVLSF

SEQ ID NO: 18999 - protein, 586 aa, Homo sapiens
LLFCSLPVCCLAMGNSEGCNTKKEGDLIAAQARLKDLEALLNSKEAALSTALSEKRTLEGELHDLRGQVAKLEAALGEAKKQLQDEMLRRVDAENRLQTMKEELDFQKNIYSEELRETKRRHETRLVEIDNGKQREFESRLADALQELRAQHEDQVEQYKKELEKTYSAKLDNARQSAERNSNLVGAAHEELQQSRIRIDSLSAQLSQLQKQLAAKEAKLRDLEDSLARERDTSRRLLAEKEREMAEMRARMQQQLDEYQELLDIKLALDMEIHAYRKLLEGEEERLRLSPSPTSQRSRGRASSHSSQTQGGGSVTKKRKLESTESRSSFSQHARTSGRVAVEEVDEEGKFVRLRNKSNEDQSMGNWQIKRQNGDDPLLTYRFPPKFTLKAGQVVTIWAAGAGATHSPPTDLVWKAQNTWGCGNSLRTALINSTGEEVAMRKLVRSVTVVEDDEDEDGDDLLHHHHGSHCSSSGDPAEYNLRSRTVLCGTCGQPADKASASGSGAQVGGPISSGSSASSVTVTRSYRSVGGSGGGSFGDNLVTRSYLLGNSSPRTQSPQNCSIIQEMGMRWEVEEGRRKVSLSCLP

SEQ ID NO: 19000 - protein, 117 aa, Homo sapiens
LVEIDNGKQREFESRLADALQELRAQHEDQVEQYKKELEKTYSAKLDNARQSAERNSNLVGAAHEELQQSRIRIDSLSAQLSQLQKQGPWELTKPSHPPSAGSQGGEASRPGGLTGP

SEQ ID NO: 19001 - protein, 228 aa, Homo sapiens
LDNARQSAERNSNLVGAAHEELQQSRIRIDSLSAQLSQLQKQLAAKEAKLRDLEDSLARERDTSRRLLAEKEREMAEMRARMQQQLDEYQELLDIKLALDMEIHAYRKLLEGEEERLRLSPSPTSQRSRGRASSHSSQTQGGGSVTKKRKLESTESRSSFSQHARTSGRVAVEEVDEEGKFVRLRNKSNEVGSCSGSKGIQLHQGESGKTEGWHVERGTSLPSEGGPG

SEQ ID NO: 19002 - protein, 83 aa, Homo sapiens
VSFSPLQIWAAGAGATHSPPTDLVWKAQNTWGCGNSLRTALINSTGEEVAMRKLVRSVTVVEDDEDEDGDDLLHHHHVSGSRR

SEQ ID NO: 19003 - protein, 115 aa, Homo sapiens
VVSPRLAVPPEPCLPSQGSHCSSSGDPAEYNLRSRTVLCGTCGQPADKASASGSGAQVGGPISSGSSASSVTVTRSYRSVGGSGGGSFGDNLVTRSYLLGNSSPRTQSPQNCSIM

SEQ ID NO: 19004 - protein, 69 aa, Homo sapiens
VSDSRKCGDSNRELEVGGGRREEQRRGGNGYGETGTQREMPGRNRGSRRKRDTARNRSPKGKKSHWRAD

SEQ ID NO: 19005 - protein, 89 aa, Homo sapiens
LLLSGDGNTLYVGAREAILALDIQDPGVPRLKNMIPWPASDRKKSECAFKKKSNETQCFNFIRVLVSYNVTHLYTCGTFAFSPACTFIM

SEQ ID NO: 19006 - protein, 65 aa, Homo sapiens
LLPISEDKVMEGKGQSPFDPAHKHTAVLVGEYQVSHFIPTSTFSSHAVKYGILQSFPKGRGNWVW

SEQ ID NO: 19007 - protein, 102 aa, Homo sapiens
LHHDASFVAAIPSTQVVYFFFEETASEFDFFERLHTSRVARVCKNDVGGEKLLQKKWTTFLKAQLLCTQPGQLPFNVIRHAVLLPADSPTAPHIYAVFTSQW

SEQ ID NO: 19008 - protein, 138 aa, Homo sapiens
VARVCKNDVGGEKLLQKKWTTFLKAQLLCTQPGQLPFNVIRHAVLLPADSPTAPHIYAVFTSQWQVGGTRSSAVCAFSLLDIERVFKGKYKELNKETSRWTTYRGPETNPRPGSVSTTPHTEHSLHIHNVHEKTPIMA

SEQ ID NO: 19009 - protein, 11 aa, Homo sapiens
MTAAQKTTFLP

SEQ ID NO: 19010 - protein, 58 aa, Homo sapiens
LILKNLERILQFWPFQGPSRNTVFQETLKNLPVPGPYGNEHQTSKQSYANMPLLETPL

SEQ ID NO: 19011 - protein, 53 aa, Homo sapiens
VLGKATSMHRTSRVSPFPEPECQEHCGRLCSEGIRLGGSPQSLSVPAQFSKRH

SEQ ID NO: 19012 - protein, 1616 aa, Homo sapiens
VAQRREIQTWKKEEHGEESSGPRLGSLWMEACLKEELPSPVELEESLRNGVLLAKLGHCFAPSVVPLKKIYDVEQLRYQATGLHFRHTDNINFWLSAIAHIGLPSTFFPETTDIYDKKNMPRVVYCIHALSLFLFRLGLAPQIHDLYGKVKFTAEELSNMASELAKYGLQLPAFSKIGGILANELSVDEAAVHAAVLAINEAVERGVVEDTLAALQNPSALLENLREPLAAVYQEMLAQAKMEKAANARNHDDRESQDIYDHYLTQAEIQGNINHVNVHGALEVVDDALERQSPEALLKALQDPALALRGVRRDFADWYLEQLNSDREQKAQELGLVELLEKEEVQAGVAAANTKGDQEQAMLHAVQRINKAIRRRVAADTVKELMCPEAQLPPVYPVASSMYQLELAVLQQQQGELGQEELFVAVEMLSAVVLINRALEARDASGFWSSLVNPATGLAEVEGENAQRYFDALLKLRQERGMGEDFLSWNDLQATVSQVNAQTQEETDRVLAVSLINEALDKGSPEKTLSALLLPAAGLDDVSLPVAPRYHLLLVAAKRQKAQVTGDPGAVLWLEEIRQGVVRANQDTNTAQRMALGVAAINQAIKEGKAAQTERVLRNPAVALRGVVPDCANGYQRALESAMAKKQRPADTAFWVQHDMKDGTAYYFHLQTFQGIWEQPPGCPLNTSHLTREEIQSAVTKVTAAYDRQQLWKANVGFVIQLQARLRGFLVRQKFAEHSHFLRTWLPAVIKIQAHWRGYRQRKIYLEWLQYFKANLDAIIKIQAWARMWAARRQYLRRLHYFQKNVNSIVKIQAFFRARKAQDDYRILVHAPHPPLSVVRRFAHLLNQSQQDFLAEAELLKLQEEVVRKIRSNQQLEQDLNIMDIKIGLLVKNRITLQEVVSHCKKLTKRNKEQLSDMMVLDKQKGLKSLSKEKRQKLEAYQHLFYLLQTQPIYLAKLIFQMPQNKTTKFMEAVIFSLYNYASSRREAYLLLQLFKTALQEEIKSKVEQPQDVVTGNPTVVRLVVRFYRNGRGQSALQEILGKVIQDVLEDKVLSVHTDPVHLYKNWINQTEAQTGQRSHLPYDVTPEQALSHPEVQRRLDIALRNLLAMTDKFLLAITSSVDQIPYGMRYVAKVLKATLAEKFPDATDSEVYKVVGNLLYYRFLNPAVVAPDAFDIVAMAAGGALAAPQRHALGAVAQLLQHAAAGKAFSGQSQHLRVLNDYLEETHLKFRKFIHRACQVPEPEERFAVDEYSDMVAVAKPMVYITVGELVNTHRLLLEHQDCIAPDHQDPLHELLEDLGELPTIPDLIGESIAADGHTDLSKLEVSLTLTNKFEGLEADADDSNTRSLLLSTKQLLADIIQFHPGDTLKEILSLSASREQEAAHKQLMSRRQACTAQTPEPLRRHRSLTAHSLLPLAEKQRRVLRNLRRLEALGLVSARNGYQGLVDELAKDIRNQHRHRHRRKAELVKLQATLQGLSTKTTFYEEQGDYYSQYIRACLDHLAPDSKSSGKGKKQPSLHYTAAQLLEKGVLVEIEDLPASHFRNVIFDITPGDEAGKFEVNAKFLGVDMERFQLHYQDLLQLQYEGVAVMKLFNKAKVNVNLLIFLLNKKFLRK

SEQ ID NO: 19013 - protein, 149 aa, Homo sapiens
MNVTPEVKSRGMKFAEEQLLKHGWTQGKGLGRKENGITQALRVTLKQDTHGVGHDPAKEFTNHWWNELFNKTAANLVVETGQDGVQIRSLSKETTRYNHPKPNLLYQKFVKMATLTSGGEKPNKDLESCSDDDNQGSKSPKITSKSARS

SEQ ID NO: 19014 - protein, 142 aa, Homo sapiens
MNVTPEVKSRGMKFAEEQLLKHGWTQGKGLGRKENGITQALRVTLKQDTHGVGHDPAKEFTNHWWNELFNKTAANLVVETGQDGVQIRSLSKETTRYNHPKPNLLYQKFVKMATLTSGGEKPNKDLESCSDDDNQGSKSPKM

SEQ ID NO: 19015 - protein, 139 aa, Homo sapiens
MDGLKVGHDPAKEFTNHWWNELFNKTAANLVVETGQDGVQIRSLSKETTRYNHPKPNLLYQKFVKVLEAVGNRVHPFSLPWFPWGLNSCLVCLINSQNFPNIVGSCDQPCCCLLRLPRPSAGIEIFRFRGSCHLLREQQ

SEQ ID NO: 19016 - protein, 185 aa, Homo sapiens
MNVTPEVKSRGMKFAEEQLLKHGWTQGKGLGRKENGITQALRVTLKQDTHGVGHDPAKEFTNHWWNELFNKTAANLVVETGQDGVQIRSLSKETTRYNHPKPNLLYQKFVKVLEAVGNRVHPFSLPWFPWGLNSCLVCLINSQNFPNIVGSCDQPCCCLLRLPRPSAGIEIFRFRGSCHLLREQQ

SEQ ID NO: 19017 - protein, 37 aa, Homo sapiens
MDGLKVGHDPAKEFTNHWWNELFNKTAANLVVETGQV

SEQ ID NO: 19018 - protein, 83 aa, Homo sapiens
MNVTPEVKSRGMKFAEEQLLKHGWTQGKGLGRKENGITQALRVTLKQDTHGVGHDPAKEFTNHWWNELFNKTAANLVVETGQV

SEQ ID NO: 19019 - protein, 32 aa, Homo sapiens
LESNFLGPLSLLSLGPGPMLLLSEEWFGENRC

SEQ ID NO: 19020 - protein, 413 aa, Homo sapiens
LLSVHTFPEHIHTPCSGIPCEAALMEFPLAQICPQGSHEAPIPTFSTFQITDMTRRSCQNLGYTAASPQAPEAASNTGNAERAEEVPGEGSLFLQAETRAWFQKTQAHWLLQHGAAPAWFHGFITRREAERLLEPKPQGCYLVRFSESAVTFVLTYRSRTCCRHFLLAQLRDGRHVVLGEDSAHARLQDLLLHYTAHPLSPYGETLTEPLARQTPEPAGLSLRTEESNFGSKSQDPNPQYSPIIKQGQAPVPMQKEGAGEKEPSQLLRPKPPIPAKPQLPPEVYTIPVPRHRPAPRPKPSNPIYNEPDEPIAFYAMGRGSPGEAPSNIYVEVEDEGLPATLGHPVLRKSWSRPVPGGQNTGGSQLHSENSVIGQGPPLPHQPPPAWRHTLPHNLSRQVLQDRGQAWLPLGPPQ

SEQ ID NO: 19021 - protein, 423 aa, Homo sapiens
LLSVHTFPEHIHTPCSGIPCEAALMEFPLAQICPQGSHEAPIPTFSTFQITDMTRRSCQNLGYTAASPQAPEAASNTGNAERAEEVPGEGSLFLQAETRAWFQKTQAHWLLQHGAAPAWFHGFITRRVRPPLSVTHREAERLLEPKPQGCYLVRFSESAVTFVLTYRSRTCCRHFLLAQLRDGRHVVLGEDSAHARLQDLLLHYTAHPLSPYGETLTEPLARQTPEPAGLSLRTEESNFGSKSQDPNPQYSPIIKQGQAPVPMQKEGAGEKEPSQLLRPKPPIPAKPQLPPEVYTIPVPRHRPAPRPKPSNPIYNEPDEPIAFYAMGRGSPGEAPSNIYVEVEDEGLPATLGHPVLRKSWSRPVPGGQNTGGSQLHSENSVIGQGPPLPHQPPPAWRHTLPHNLSRQVLQDRGQAWLPLGPPQ

SEQ ID NO: 19022 - protein, 103 aa, Homo sapiens
MEFPLAQICPQGSHEAPIPTFSTFQITDMTRRSCQNLGYTAASPQAPEAASNTGNAERAEEVPGEGSLFLQAETRAWFQKTQAHWLLQHGAAPAWFHGFITRR

SEQ ID NO: 19023 - protein, 42 aa, Homo sapiens
LLSVHTFPEHIHTPCSGIPCEAALMEFPLAQICPQAPSRSQT

SEQ ID NO: 19024 - protein, 8 aa, Homo sapiens
VRGEMMSC

SEQ ID NO: 19025 - protein, 13 aa, Homo sapiens
LWVRRHFLPPGPG

SEQ ID NO: 19026 - protein, 22 aa, Homo sapiens
VHKLVGSKLHREPAASAASGAP

SEQ ID NO: 19027 - protein, 373 aa, Homo sapiens
LHPLPRVTASPNHVLSGQVQPHTMTWGLLKGCRLNFSPHAVPRLGSLVQHTALPRQSPLQPQPSQDWGYRLTLQAPSGVHHIKRRDIVLKWELGEGAFGKVFLAECHNLLPEQDKMLVAVKALKEASESARQDFQREAELLTMLQHQHIVRFFGVCTEGRPLLMVFEYMRHGDLNRFLRSHGPDAKLLAGGEDVAPGPLGLGQLLAVASQVAAGMVYLAGLHFVHRDLATRNCLVGQGLVVKIGDFGMSRDIYSTDYYRVGGRTMLPIRWMPPESILYRKFTTESDVWSFGVVLWEIFTYGKQPWYQLSNTEAIDCITQGRELERPRACPPEVYAIMRGCWQREPQQRHSIKDVHARLQALAQAPPVYLDVLG

SEQ ID NO: 19028 - protein, 251 aa, Homo sapiens
LPGMSSCMILCSPCSSHFLLPLSPPPALSPSCSLSLPFPCVLVSPLPGGGGVGAAEVAGSKVVPALPESGQSEPGPPEVEGGTKATGNCFYVSMPSGPPDSSTDHSEAPMSPPQPDSLPAGQTEPQPQLQGGNDDPRRPSRSPPSLALRDVGMIFHTIEQLTLKLNRLKDMELAHRELLKSLGGESSGGTTPVGSFHTEAARWTDGSLSPPAKEPLASDSRNSHELGPCPEDGSDAPLEDSTADAAASPGP

SEQ ID NO: 19029 - protein, 1531 aa, Homo sapiens
LEPWRHRETMSVRLPQSIDRLSSLSSLGDSAPERKSPSHHRQPSDASETTGLVQRCVIIQKDQHGFGFTVSGDRIVLVQSVRPGGAAMKAGVKEGDRIIKVNGTMVTNSSHLEVVKLIKSGAYVALTLLGSSPSSMGISGLQQDPSPAGAPRITSVIPSPPPPPPLPPPQRITGPKPLQDPEVQKHATQILRNMLRQEEKELQDILPLYGDTSQRPSEGRLSLDSQEGDSGLDSGTERFPSLSESLMNRNSVLSDPGLDSPRTSPVIMARVAQHHRRQGSDAAVPSTGDQGVDQSPKPLIIGPEEDYDPGYFNNESDIIFQDLEKLKSRPAHLGVFLRYIFSQADPSPLLFYLCAEVYQQASPKDSRSLGKDIWNIFLEKNAPLRVKIPEMLQAEIDSRLRNSEDARGVLCEAQEAAMPEIQEQIHDYRTKRTLGLGSLYGENDLLDLDGDPLRERQVAEKQLAALGDILSKYEEDRSAPMDFALNTYMSHAGIRLREARPSNTAEKAQSAPDKDKWLPFFPKTKKSSNSKKEKDALEDKKRNPILKYIGKPKSSSQSTFHIPLSPVEVKPGNVRNIIQHFENNQQYDAPEPGTQRLSTGSFPEDLLESDSSRSEIRLGRSESLKGREEMKRSRKAENVPRSRSDVDMDAAAEATRLHQSASSSTSSLSTRSLENPTPPFTPKMGRRSIESPSLGFCTDTLLPHLLEDDLGQLSDLEPEPDAQNWQHTVGKDVVAGLTQREIDRQEVINELFVTEASHLRTLRVLDLIFYQRMKKENLMPREELARLFPNLPELIEIHNSWCEAMKKLREEGPIIKEISDLMLARFDGPAREELQQVAAQFCSYQSIALELIKTKQRKESRFQLFMQEAESHPQCRRLQLRDLIISEMQRLTKYPLLLESIIKHTEGGTSEHEKLCRARDQCREILKYVNEAVKQTENRHRLEGYQKRLDATALERASNPLAAEFKSLDLTTRKMIHEGPLTWRISKDKTLDLHVLLLEDLLVLLQKQDEKLLLKCHSKTAVGSSDSKQTFSPVLKLNAVLIRSVATDKRAFFIICTSKLGPPQIYELVALTSSDKNTWMELLEEAVRNATRHPGAAPMPVHPPPPGPREPAQQGPTPSRVELDDSDVFHGEPEPEELPGGTGSQQRVQGKHQVLLEDPEQEGSAEEEELGVLPCPSTSLDGENRGIRTRNPIHLAFPGPLFMEGLADSALEDVENLRHLILWSLLPGHTMETQAAQEPEDDLTPTPSVISVTSHPWDPGSPGQAPPGGEGDNTQLAGLEGERPEQEDMGLCSLEHLPPRTRNSGIWESPELDRNLAEDASSTEAAGGYKVVRKAEVAGSKVVPALPESGQSEPGPPEVEGGTKATGNCFYVSMPSGPPDSSTDHSEAPMSPPQPDSLPAGQTEPQPQLQGGNDDPRRPSRSPPSLALRDVGMIFHTIEQLTLKLNRLKDMELAHRELLKSLGGESSGGTTPVGSFHTEAARWTDGSLSPPAKEPLASDSRNSHELGPCPEDGSDAPLEDSTADAAASPGP

SEQ ID NO: 19030 - protein, 149 aa, Homo sapiens
LMPREELARLFPNLPELIEIHNSWCEAMKKLREEGPIIKEISDLMLARFDGPAREELQQVAAQFCSYQSIALELIKTKQRKESRFQLFMQEAESHPQCRRLQLRDLIISEMQRLTKYPLLLESIIKHTEGSTWGGAGITGSGPRARPSF

SEQ ID NO: 19031 - protein, 133 aa, Homo sapiens
LFLHPVLRASSSTPIEGSPMTLTCETQLSPQRPDVQLQFSLFRDSQTLGLGWSRSPRLQIPAMWTEDSGSYWCEVETVTHSIKKRSLRSQIRVQSECLRGCSSRVRAGERKASDISCTPRMVDITERSVQLFW

SEQ ID NO: 19032 - protein, 120 aa, Homo sapiens
LILQALHPVFEGDNVILRCQGKDNKNTHQKVYYKDGKQLPNSYNLEKITVNSVSRDNSKYHCTAYRKFYILDIEVTSKPLNIQVQEIARPSDWAGAGPPDSRSLPCGLKTQGLTGVRWRQ

SEQ ID NO: 19033 - protein, 275 aa, Homo sapiens
LANRHATASKNIFREDPIIAMVLNATKVFKYESSENEQRRMFHATVATQTQFFHVKVLNINLKRKFIKKRIIIISNYSKRNSLLEVNEASSVSEAGPDQTFEVPKDIIRRAKKIPKINILHKQTSGYIVYGLFMLHTKIVNRKTTIYEIQDKTGSMAVVGKGECHNIPCEKGDKLRLFCFRLRKRENMSKLMSEMHSFIQIQKNTNQRSHDSRSMALPQEQSQHPKPSEASTTLPESHLKTPQMPPTTPSSSSFTKVQYPGSHDSYLPNINYKDH

SEQ ID NO: 19034 - protein, 59 aa, Homo sapiens
LGLQHAKGHPLSLTEKNTLLSRGLNRLLTLPEVQCIFQDFQVFDAVMLRVHYPRLFIQE

SEQ ID NO: 19035 - protein, 18 aa, Homo sapiens
LQLNEVEDNSGDLLERER

SEQ ID NO: 19036 - protein, 34 aa, Homo sapiens
MLPSLAIAPPSSGHPPTFGPEAWLLSAGFALTCF

SEQ ID NO: 19037 - protein, 124 aa, Homo sapiens
MLPSLVPCVGKTVWLYLQAWPNPVFEGDALTLRCQGWKNTPLSQVKFYRDGKFLHFSKENQTLSMGAATVQSRGQYSCSGQVMYIPQTFTQTSETAMVQVQGESPAWEFVGQEVLLKGPVSRGQ

SEQ ID NO: 19038 - protein, 140 aa, Homo sapiens
LCSLRCARTGPMLLWTAVLLFVPCVGKTVWLYLQAWPNPVFEGDALTLRCQGWKNTPLSQVKFYRDGKFLHFSKENQTLSMGAATVQSRGQYSCSGQVMYIPQTFTQTSETAMVQVQGESPAWEFVGQEVLLKGPVSRGQ

SEQ ID NO: 19039 - protein, 56 aa, Homo sapiens
VLSTLWCIEPQRGVKDSSIICAEVRCLQPSEVSSTEVNMRSRTLQEPLSDCEEVLC

SEQ ID NO: 19040 - protein, 52 aa, Homo sapiens
VKPGLLSSPWGESSIICAEVRCLQPSEVSSTEVNMRSRTLQEPLSDCEEVLC

SEQ ID NO: 19041 - protein, 50 aa, Homo sapiens
LSPRKSKENPRNFSDNQLQEGKNVIGLQMGTNRGASQAGMTGYGMPRQIL

SEQ ID NO: 19042 - protein, 7 aa, Homo sapiens
LMKMGSK

SEQ ID NO: 19043 - protein, 24 aa, Homo sapiens
VHSPKSLLKKKTILGPKKTIRRIH

SEQ ID NO: 19044 - protein, 61 aa, Homo sapiens
VSGVSFHPRAWMSGLYQESCYQEGKKTKTDRQVQQKQMHLTKMDVLIGSINYVPSTMLSLH

SEQ ID NO: 19045 - protein, 34 aa, Homo sapiens
LETCWGKRPGKLSFLRSTVGIAAAEQGFWKALRT

SEQ ID NO: 19046 - protein, 58 aa, Homo sapiens
LLEPGCGAVRQARESGADGSNMAAPSLSREKRPGKLSFLRSTVGIAAAEQGFWKALRT

SEQ ID NO: 19047 - protein, 194 aa, Homo sapiens
LGASMSCTVYAKTQQAKFLTWQFDGEYRGDDYTATLTLGNPDLIGESVIMVAHFLQSLTHRLVLGGELVYHRRPGEEGAILTLAGKYSAVHWVATLNVGSGGAHASYYHRANEQVQVGVEFEANTRLQDTTFSFGYHLTLPQANMVFRGLVDSNWCVGAVLEKKMPPLPVTLALGAFLNHWRNRFHCGFSITVG

SEQ ID NO: 19048 - protein, 7 aa, Homo sapiens
VMTVDVC

SEQ ID NO: 19049 - protein, 84 aa, Homo sapiens
LTLLVAAPRTRRLPVGGRHCRYNVAEIVIHIRNKILTGADGKNLTKNDLYPNPKPEVLHMIYMRALQIVYGIRLEHFYMEELPN

SEQ ID NO: 19050 - protein, 27 aa, Homo sapiens
LGLAVFSSCSAVGGGGRNQSLGGAQTM

SEQ ID NO: 19051 - protein, 92 aa, Homo sapiens
METLSFPRYNVAEIVIHIRNKILTGADGKNLTKNDLYPNPKPEVLHMIYMRALQIVYGIRLEHFYMMPVNSEVMYPHLMEGFLPFSNLVTHL

SEQ ID NO: 19052 - protein, 47 aa, Homo sapiens
MPVNSEVMYPHLMEGFLPFSNLVTHLLSSNRTASNCATFSAYFQLNF

SEQ ID NO: 19053 - protein, 177 aa, Homo sapiens
MQQLNAAHQEALMKLERLDSVPVEEQEEFKQLSDGIQELQQSLNQDFHQKTIVLQEGNSQKKSNISEKTKRLNELKLSVVSLKEIQESLKTKIVDSPEKLKNYKEKMKDTVQKLKNARQEVVEKYEIYGDSVDCLPSCQLEVQLYQKKIQDLSDNREKLASILKEVCIVWNFDVFII

SEQ ID NO: 19054 - protein, 151 aa, Homo sapiens
LYFLTNAFSKEETVTVYPADVVLFEGILAFYSQEVRDLFQMKLFVDTDADTRLSRRVLRDISERGRDLEQILSQYITFVKPAFEEFCLPTKKYADVIIPRGADNLVAINLIVQHIQDILNGGPSKRQTNGCLNGYTPSRKRQASESSSRPH

SEQ ID NO: 19055 - protein, 101 aa, Homo sapiens
VSRLWLVLRDISERGRDLEQILSQYITFVKPAFEEFCLPTKKYADVIIPRGADNLVAINLIVQHIQDILNGGPSKRQTNGCLNGYTPSRKRQASESSSRPH

SEQ ID NO: 19056 - protein, 104 aa, Homo sapiens
LILVFPSLTVLRDISERGRDLEQILSQYITFVKPAFEEFCLPTKKYADVIIPRGADNLVAINLIVQHIQDILNGGPSKRQTNGCLNGYTPSRKRQASESSSRPH

SEQ ID NO: 19057 - protein, 39 aa, Homo sapiens
LATAGSGGDSGDRELRPGRAGASAAESAPEGHGEAICNS

SEQ ID NO: 19058 - protein, 68 aa, Homo sapiens
LATAGSGGDSGDRELRPGRAGASAAESAPEGHGDRVLLCCPGWNAVAQSWLTAASTFQGLSDPLTSSS

SEQ ID NO: 19059 - protein, 58 aa, Homo sapiens
LATAGSGGDSGDRELRPGRAGASAAESAPEGHGGKTGRDQCQCGQLGVPLGGPAGRAV

SEQ ID NO: 19060 - protein, 64 aa, Homo sapiens
LESRGWDRSGERGVEVPPGAGGGEIRSLFPKPSQPQRGPGLRDAAAAAATAVAGRWQRPPEPGR

SEQ ID NO: 19061 - protein, 147 aa, Homo sapiens
MNHSERFVFIAEWYDPNASLLRRYELLFYPGDGSVEMHDVKNHRTFLKRTKYDNLHLEDLFIGNKVNVFSRQLVLIDYGDQYTARQLGSRKEKTLALIKPDAISKAGEIIEIINKAGFTITKLKMMMLSRKEALDFHVDHQSRPFFK

SEQ ID NO: 19062 - protein, 2235 aa, Homo sapiens
VVAASGSRKGSMFPGCPRLWVLVVLGTSWVGWGSQGTEAAQLRQFYVAAQGISWSYRPEPTNSSLNLSVTSFKKIVYREYEPYFKKEKPQSTISGLLGPTLYAEVGDIIKVHFKNKADKPLSIHPQGIRYSKLSEGASYLDHTFPAEKMDDAVAPGREYTYEWSISEDSGPTHDDPPCLTHIYYSHENLIEDFNSGLIGPLLICKKGTLTEGGTQKTFDKQIVLLFAVFDESKSWSQSSSLMYTVNGYVNGTMPDITVCAHDHISWHLLGMSSGPELFSIHFNGQVLEQNHHKVSAITLVSATSTTANMTVGPEGKWIISSLTPKHLQAGMQAYIDIKNCPKKTRNLKKITREQRRHMKRWEYFIAAEEVIWDYAPVIPANMDKKYRSQHLDNFSNQIGKHYKKVMYTQYEDESFTKHTVNPNMKEDGILGPIIRAQVRDTLKIVFKNMASRPYSIYPHGVTFSPYEDEVNSSFTSGRNNTMIRAVQPGETYTYKWNILEFDEPTENDAQCLTRPYYSDVDIMRDIASGLIGLLLICKSRSLDRRGIQRAADIEQQAVFAVFDENKSWYLEDNINKFCENPDEVKRDDPKFYESNIMSTINGYVPESITTLGFCFDDTVQWHFCSVGTQNEILTIHFTGHSFIYGKRHEDTLTLFPMRGESVTVTMDNVGTWMLTSMNSSPRSKKLRLKFRDVKCIPDDDEDSYEIFEPPESTVMATRKMHDRLEPEDEESDADYDYQNRLAAALGIRSFRNSSLNQEEEEFNLTALALENGTEFVSSNTDIIVGSNYSSPSNISKFTVNNLAEPQKAPSHQQATTAGSPLRHLIGKNSVLNSSTAEHSSPYSEDPIEDPLQPDVTGIRLLSLGAGEFKSQEHAKHKGPKVERDQAAKHRFSWMKLLAHKVGRHLSQDTGSPSGMRPWEDLPSQDTGSPSRMRPWKDPPSDLLLLKQSNSSKILVGRWHLASEKGSYEIIQDTDEDTAVNNWLISPQNASRAWGESTPLANKPGKQSGHPKFPRVRHKSLQVRQDGGKSRLKKSQFLIKTRKKKKEKHTHHAPLSPRTFHPLRSEAYNTFSERRLKHSLVLHKSNETSLPTDLNQTLPSMDFGWIASLPDHNQNSSNDTGQASCPPGLYQTVPPEEHYQTFPIQDPDQMHSTSDPSHRSSSPELSEMLEYDRSHKSFPTDISQMSPSSEHEVWQTVISPDLSQVTLSPELSQTNLSPDLSHTTLSPELIQRNLSPALGQMPISPDLSHTTLSPDLSHTTLSLDLSQTNLSPELSQTNLSPALGQMPLSPDLSHTTLSLDFSQTNLSPELSHMTLSPELSQTNLSPALGQMPISPDLSHTTLSLDFSQTNLSPELSQTNLSPALGQMPLSPDPSHTTLSLDLSQTNLSPELSQTNLSPDLSEMPLFADLSQIPLTPDLDQMTLSPDLGETDLSPNFGQMSLSPDLSQVTLSPDISDTTLLPDLSQISPPPDLDQIFYPSESSQSLLLQEFNESFPYPDLGQMPSPSSPTLNDTFLSKEFNPLVIVGLSKDGTDYIEIIPKEEVQSSEDDYAEIDYVPYDDPYKTDVRTNINSSRDPDNIAAWYLRSNNGNRRNYYIAAEEISWDYSEFVQRETDIEDSDDIPEDTTYKKVVFRKYLDSTFTKRDPRGEYEEHLGILGPIIRAEVDDVIQVRFKNLASRPYSLHAHGLSYEKSSEGKTYEDDSPEWFKEDNAVQPNSSYTYVWHATERSGPESPGSACRAWAYYSAVNPEKDIHSGLIGPLLICQKGILHKDSNMPMDMREFVLLFMTFDEKKSWYYEKKSRSSWRLTSSEMKKSHEFHAINGMIYSLPGLKMYEQEWVRLHLLNIGGSQDIHVVHFHGQTLLENGNKQHQLGVWPLLPGSFKTLEMKASKPGWWLLNTEVGENQRAGMQTPFLIMDRDCRMPMGLSTGIISDSQIKASEFLGYWEPRLARLNNGGSYNAWSVEKLAAEFASKPWIQVDMQKEVIITGIQTQGAKHYLKSCYTTEFYVAYSSNQINWQIFKGNSTRNVMYFNGNSDASTIKENQFDPPIVARYIRISPTRAYNRPTLRLELQGCEVNGCSTPLGMENGKIENKQITASSFKKSWWGDYWEPFRARLNAQGRVNAWQAKANNNKQWLEIDLLKIKKITAIITQGCKSLSSEMYVKSYTIHYSEQGVEWKPYRLKSSMVDKIFEGNTNTKGHVKNFFNPPIISRFIRVIPKTWNQSIALRLELFGCDIY

SEQ ID NO: 19063 - protein, 2240 aa, Homo sapiens
VVAASGSRKGSMFPGCPRLWVLVVLGTSWVGWGSQGTEAAQLRQFYVAAQGISWSYRPEPTNSSLNLSVTSFKKIVYREYEPYFKKEKPQSTISGLLGPTLYAEVGDIIKVHFKNKADKPLSIHPQGIRYSKLSEGASYLDHTFPAEKMDDAVAPGREYTYEWSISEDSGPTHDDPPCLTHIYYSHENLIEDFNSGLIGPLLICKKGTLTEGGTQKTFDKQIVLLFAVFDESKSWSQSSSLMYTVNGYVNGTMPDITVCAHDHISWHLLGMSSGPELFSIHFNGQVLEQNHHKVSAITLVSATSTTANMTVGPEGKWIISSLTPKHLQAGMQAYIDIKNCPKKTRNLKKITREQRRHMKRWEYFIAAEEVIWDYAPVIPANMDKKYRSQHLDNFSNQIGKHYKKVMYTQYEDESFTKHTVNPNMKEDGILGPIIRAQVRDTLKIVFKNMASRPYSIYPHGVTFSPYEDEVNSSFTSGRNNTMIRAVQPGETYTYKWNILEFDEPTENDAQCLTRPYYSDVDIMRDIASGLIGLLLICKSRSLDRRGIQRAADIEQQAVFAVFDENKSWYLEDNINKFCENPDEVKRDDPKFYESNIMSNFTLSAINGYVPESITTLGFCFDDTVQWHFCSVGTQNEILTIHFTGHSFIYGKRHEDTLTLFPMRGESVTVTMDNVGTWMLTSMNSSPRSKKLRLKFRDVKCIPDDDEDSYEIFEPPESTVMATRKMHDRLEPEDEESDADYDYQNRLAAALGIRSFRNSSLNQEEEEFNLTALALENGTEFVSSNTDIIVGSNYSSPSNISKFTVNNLAEPQKAPSHQQATTAGSPLRHLIGKNSVLNSSTAEHSSPYSEDPIEDPLQPDVTGIRLLSLGAGEFKSQEHAKHKGPKVERDQAAKHRFSWMKLLAHKVGRHLSQDTGSPSGMRPWEDLPSQDTGSPSRMRPWKDPPSDLLLLKQSNSSKILVGRWHLASEKGSYEIIQDTDEDTAVNNWLISPQNASRAWGESTPLANKPGKQSGHPKFPRVRHKSLQVRQDGGKSRLKKSQFLIKTRKKKKEKHTHHAPLSPRTFHPLRSEAYNTFSERRLKHSLVLHKSNETSLPTDLNQTLPSMDFGWIASLPDHNQNSSNDTGQASCPPGLYQTVPPEEHYQTFPIQDPDQMHSTSDPSHRSSSPELSEMLEYDRSHKSFPTDISQMSPSSEHEVWQTVISPDLSQVTLSPELSQTNLSPDLSHTTLSPELIQRNLSPALGQMPISPDLSHTTLSPDLSHTTLSLDLSQTNLSPELSQTNLSPALGQMPLSPDLSHTTLSLDFSQTNLSPELSHMTLSPELSQTNLSPALGQMPISPDLSHTTLSLDFSQTNLSPELSQTNLSPALGQMPLSPDPSHTTLSLDLSQTNLSPELSQTNLSPDLSEMPLFADLSQIPLTPDLDQMTLSPDLGETDLSPNFGQMSLSPDLSQVTLSPDISDTTLLPDLSQISPPPDLDQIFYPSESSQSLLLQEFNESFPYPDLGQMPSPSSPTLNDTFLSKEFNPLVIVGLSKDGTDYIEIIPKEEVQSSEDDYAEIDYVPYDDPYKTDVRTNINSSRDPDNIAAWYLRSNNGNRRNYYIAAEEISWDYSEFVQRETDIEDSDDIPEDTTYKKVVFRKYLDSTFTKRDPRGEYEEHLGILGPIIRAEVDDVIQVRFKNLASRPYSLHAHGLSYEKSSEGKTYEDDSPEWFKEDNAVQPNSSYTYVWHATERSGPESPGSACRAWAYYSAVNPEKDIHSGLIGPLLICQKGILHKDSNMPMDMREFVLLFMTFDEKKSWYYEKKSRSSWRLTSSEMKKSHEFHAINGMIYSLPGLKMYEQEWVRLHLLNIGGSQDIHVVHFHGQTLLENGNKQHQLGVWPLLPGSFKTLEMKASKPGWWLLNTEVGENQRAGMQTPFLIMDRDCRMPMGLSTGIISDSQIKASEFLGYWEPRLARLNNGGSYNAWSVEKLAAEFASKPWIQVDMQKEVIITGIQTQGAKHYLKSCYTTEFYVAYSSNQINWQIFKGNSTRNVMYFNGNSDASTIKENQFDPPIVARYIRISPTRAYNRPTLRLELQGCEVNGCSTPLGMENGKIENKQITASSFKKSWWGDYWEPFRARLNAQGRVNAWQAKANNNKQWLEIDLLKIKKITAIITQGCKSLSSEMYVKSYTIHYSEQGVEWKPYRLKSSMVDKIFEGNTNTKGHVKNFFNPPIISRFIRVIPKTWNQSIALRLELFGCDIY

SEQ ID NO: 19064 - protein, 34 aa, Homo sapiens
MRSFKSFHETFCVVAPPTSNMKCVSFSASGKIST

SEQ ID NO: 19065 - protein, 157 aa, Homo sapiens
VGTNKSLTEEAENWGDGEPNNKKNKEDCVEIYIKRNKDAGKWNDDACHKLKAALCYTASCQPWSCSGHGECVEIINNYTCNCDVGYYGPQCQFVIQCEPLEAPELGTMDCTHPLGNFSFSSQCAFSCSEGTNLTGIEETTCGPFGNWSSPEPTCQGE

SEQ ID NO: 19066 - protein, 61 aa, Homo sapiens
LFDESMSQEGAVPASAVPLEELSSWPEELCRRELPSVLPRLLSLSQHSDSWIEHIHCEIIR

SEQ ID NO: 19067 - protein, 185 aa, Homo sapiens
LFDESMSQEGAVPASAVPLEELSSWPEELCRRELPSVLPRLLSLSQHSDSWIEHIQILKIIVEMFLPHMNHLTLEQTFFSQVLPKTVKLFDDMMYELTSQARGLSSQNLEIQTTLRNILQTMVQLLGALTGCVQHICATQESIILENIQSLPSSVLHIIKSTFVHCKFQTFSRLFSRRPILFKSS

SEQ ID NO: 19068 - protein, 108 aa, Homo sapiens
LTVGLSIFTVKLFDDMMYELTSQARGLSSQNLEIQTTLRNILQTMVQLLGALTGCVQHICATQESIILENIQSLPSSVLHIIKSTFVHCKFQTFSRLFSRRPILFKSS

SEQ ID NO: 19069 - protein, 116 aa, Homo sapiens
MPVIPALWEAKTGFVDETEAAKVERVKQEKGIFWEPFANVTVEEAKRSSLQPYAKRARQEFPWEEEYRSALHTIAGALEATESLLQKGPAPAWLSMEMEALQERMDKLKRYIHTLG

SEQ ID NO: 19070 - protein, 253 aa, Homo sapiens
LGGQQCQLSLGPSRHSSSLSNLCAQKAWSKEATTTTATATTTTSAAAATTASTTAATPEEEREPQHRPVSPCDVFHGSGCLGRIGPGDVSALPPTEGAGRTPRGHPSPPPEKKELRKVAHLTGKSNSRSMPLEWEDTYGIVLLSGVKYKKGGLVINETGLYFVYSKVYFRGQSCNNLPLSHKVYMRNSKYPQDLVMMEGKMMSYCTTGQMWARSSYLGAVFNLTSADHLYVNVSELSLVNFEESQTFFGLYKL

SEQ ID NO: 19071 - protein, 202 aa, Homo sapiens [sequence omitted]

SEQ ID NO: 19072 - protein, 45 aa, Homo sapiens
VPKITGKEFNESVVRCRRHAYYGRKFERKLRTGDFSLHIVLEPDF

SEQ ID NO: 19073 - protein, 31 aa, Homo sapiens
LVVLGSRLAPLRGVALSSSLLAADLLSRSAD

SEQ ID NO: 19074 - protein, 27 aa, Homo sapiens
LFLDTCTPMLCGGGLKYSRREWELLEF

SEQ ID NO: 19075 - protein, 374 aa, Homo sapiens
LEKAGLNAPSGTTMEKGGNIQLEIPDFSNSVLSHLNQLRMQGRLCDIVVNVQGQAFRAHKVVLAASSPYFRDHMSLNEMSTVSISVIKNPTVFEQLLSFCYTGRICLQLADIISYLTAASFLQMQHIIDKCTQILEGIHFKINVAEVEAELSQTRTKHQERPPESHRVTPNLNRSLSPRHNTPKGNRRGQVSAVLDIRELSPPEESTSPQIIEPSSDVESREPILRINRAGQWYVETGVADRGGRSDDEVRVLGAVHIKTENLEEWLGPENQPSGEDGSSAEEVTAMVIDTTGHGSVGQENYTLGSSGAKVARPTSSEVDRFSPSGSVVPLTERHRARSESPGRMDEPKQPSSQVWSCGFRTALVVGGIATVYE

SEQ ID NO: 19076 - protein, 321 aa, Homo sapiens
LEKAGLNAPSGTTMEKGGNIQLEIPDFSNSVLSHLNQLRMQGRLCDIVVNVQGQAFRAHKVVLAASSPYFRDHMSLNEMSTVSISVIKNPTVFEQLLSFCYTGRICLQLADIISYLTAASFLQMQHIIDKCTQILEGIHFKINVAEVEAELSQTRTKHQERPPESHRVTPNLNRSLSPRHNTPKGNRRGQVSAVLDIRELSPPEESTSPQIIEPSSDVESREPILRINRAGQWYVETGVADRGGRSDDEVRVLGAVHIKTENLEEWLGPENQPSGEDGSSAEEVTAMVIDTTGHGSVGQENYTLGSSGAKVARPTSSEVDR

SEQ ID NO: 19077 - protein, 40 aa, Homo sapiens
VLAVAAAAVARRPGTESESTVASAAAAAAAAVATAAGTRS

SEQ ID NO: 19078 - protein, 256 aa, Homo sapiens
MLKIPTHLEGKIKITKRENRRLQEASMRLEQENDDLAHELVTSKIALRNDLDQAEDKADVLNKELLLTKQRLVETEEEKRKQEEETAQLKEVFRKQLEKAEYEIKKTTAIIAEYKQICSQLSTRLEKQQAASKEELEVVKGKMMACKHCSDIFSKEGALKLAATGREDQGIETDDEKDSLKKQLREMELELAQTKLQLVEAKCKIQELEHQRGALMNEIQAAKNSWFSKTLNSIKTATGTQPLQPAPVTQPPKEST

SEQ ID NO: 19079 - protein, 51 aa, Homo sapiens
VEPGLAGCACSRWAVAAAASRRFEIRRVREAGRDLAQGRCGRRLQRRDSCG

SEQ ID NO: 19080 - protein, 112 aa, Homo sapiens
LARPAAGWSRSSGPAMLRGPWRQLWLFFLLLLPGAPEPRGASRPWEGTDEPGSAWAWPGFQRLQEQLRAAGALSKRYWTLFSCQVWPDDCDEDEEAATGPLALGNVRCGHAW

SEQ ID NO: 19081 - protein, 20 aa, Homo sapiens
MSSQDRLHWIHDQEDSARFF

SEQ ID NO: 19082 - protein, 59 aa, Homo sapiens
VFCPDASVGPYYCGVGADRAYGRDIVEAHYRACLYAGVKIAGTNAEVMPAQVSIAPIHQ

SEQ ID NO: 19083 - protein, 236 aa, Homo sapiens
LTSTCYRAFASWRTRSLLEPATILPTTCCPAPAAMCRTLAAFPTTCLERAKEFKTRLGIFLHKSELGCDTGSTGKFEWGSKHSKENRNFSEDVLGWRESFDLLLSSKNGVAAFHAFLKTEFSEENLEFWLACEEFKKIRSATKLASRAHQIFEEFICSEAPKEVNIDHETHELTRMNLQTATATCFDAAQGKTRTLMEKDSYPRFLKSPAYRDLAAQASAASATLSSCSLDEPSHT

SEQ ID NO: 19084 - protein, 284 aa, Homo sapiens
MAFPKKKLQGLVAATITPMTENGEINFSVIGQYVDYLVKEQGVKNIFVNGTTGEGLSLSVSERRQVAEEWVTKGKDKLDQVIIHVGALSLKESQELAQHAAEIGADGIAVIAPFFLKPWTKDILINFLKEVAAAAPALPFYYYHIPALTGVKIRAEELLDGILDKIPTFQGLKFSDTDLLDFGQCVDQNRQQQFAFLFGVDEQLLSALVMGATGAVGSTYNYLGKKTNQMLEAFEQKDFSLALNYQFCIQRFINFVVKLENSKLKVSKNQRTLPLGTTNFPFLH

SEQ ID NO: 19085 - protein, 316 aa, Homo sapiens
LLPGQSRGLRSAGGKMSRAPGILASWRRAPSLSVQKGSQTARHTCHPEVPLGNCFLPVYKASPLTVTRLWAERLDQVIIHVGALSLKESQELAQHAAEIGADGIAVIAPFFLKPWTKDILINFLKEVAAAAPALPFYYYHIPALTGVKIRAEELLDGILDKIPTFQGLKFSDTDLLDFGQCVDQNRQQQFAFLFGVDEQLLSALVMGATGAVGSTYNYLGKKTNQMLEAFEQKDFSLALNYQFCIQRFINFVVKLGFGVSQTKAIMTLVSGIPMGPPRLPLQKASREFTDSAEAKLKSLDFLSFTDLKDGNLEAGS

SEQ ID NO: 19086 - protein, 538 aa, Homo sapiens
LKLSWPPSFYLIMSLVEAISLWNEGVLAADKKDWKGALDAFSAVQDPHSRICFNIGCMYTILKNMTEAEKAFTRSINRDKHLAVAYFQRGMLYYQTEKYDLAIKDLKEALIQLRGNQLIDYKILGLQFKLFACEVLYNIAFMYAKKEEWKKAEEQLALATSMKSEPRHSKIDKAMECVWKQKLYEPVVIPVGKLFRPNERQVAQLAKKDYLGKATVVASVVDQDSFSGFAPLQPQAAEPPPRPKTPEIFRALEGEAHRVLFGFVPETKEELQVMPGNIVFVLKKGNDNWATVMFNGQKGLVPCNYLEPVELRIHPQQQPQEESSPQSDIPAPPSSKAPGRPQLSPGQKQKEEPKEVKLSVPMPYTLKVHYKYTVVMKTQPGLPYSQVRDMVSKKLELRLEHTKLSYRPRDSNELVPLSEDSMKDAWGQVKNYCLTLWCENTVGDQGFPDEPKESEKADANNQTTEPQLKKGSQVEALFSYEATQPEDLEFQEGDIILVLSKVNEEWLEGECKGKVGIFPKVFVEDCATTDLESTRREV

SEQ ID NO: 19087 - protein, 809 aa, Homo sapiens
LPASFKMEVKPVGEPTQEVSKFKLSTKVESTGHWLVEDHVRIWEVLKTEESSIQDWGEEVEEGAVYHVTLKRVQIQQAANKGARWLGVEGDQLPPGHTVSQYETCKIRTIKAGTLEKLVENLLTAFGDNDFTYISIFLSTYRGFASTKEVLELLLDRYGNLTSPNCEEDGSQSSSESKMVIRNAIASILRAWLDQCAEDFREPPHFPCLQKLLDYLTRMMPGSDPERRAQNLLEQFQKQEVETDNGLPNTISFSLEEEEELEGGESAEFTCFSEDLVAEQLTYMDAQLFKKVVPHHCLGCIWSRRDKKENKHLAPTIRATISQFNTLTKCVVSTILGGKELKTQQRAKIIEKWINIAHECRLLKNFSSLRAIVSALQSNSIYRLKKTWAAVPRDRMLMFEELSDIFSDHNNHLTSRELLMKEGTSKFANLDSSVKENQKRTQRRLQLQKDMGVMQGTVPYLGTFLTDLTMLDTALQDYIEGGLINFEKRRREFEVIAQIKLLQSACNSYCMTPDQKFIQWFQRQQLLTEEESYALSCEIEAAADASTTSPKPRKSMVKRLSLLFLGSDMITSPTPTKEQPKSTASGSSGESMDSVSVSSCESNHSEAEEGSITPMDTPDEPQKKLSESSSSCSSIHSMDTNSSGMSSLINPLSSPPSCNNNPKIHKRSVSVTSITSTVLPPVYNQQNEDTCIIRISVEDNNGNMYKSIMLTSQDKTPAVIQRAMLKHNLDSDPAEEYELVQVISEDKELVIPDSANVFYAMNSQVNFDFILRKKNSMEEQVKLRSRTSLTLPRTAKRGCWSNRHSKITL

SEQ ID NO: 19088 - protein, 812 aa, Homo sapiens
VSVRCGRSGPGPGRGAAGLSPADIALASEQGASCSVRAPERKLRMKLLWQAKMSSIQDWGEEVEEGAVYHVTLKRVQIQQAANKGARWLGVEGDQLPPGHTVSQYETCKIRTIKAGTLEKLVENLLTAFGDNDFTYISIFLSTYRGFASTKEVLELLLDRYGNLTSPNCEEDGSQSSSESKMVIRNAIASILRAWLDQCAEDFREPPHFPCLQKLLDYLTRMMPGSDPERRAQNLLEQFQKQEVETDNGLPNTISFSLEEEEELEGGESAEFTCFSEDLVAEQLTYMDAQLFKKVVPHHCLGCIWSRRDKKENKHLAPTIRATISQFNTLTKCVVSTILGGKELKTQQRAKIIEKWINIAHECRLLKNFSSLRAIVSALQSNSIYRLKKTWAAVPRDRMLMFEELSDIFSDHNNHLTSRELLMKEGTSKFANLDSSVKENQKRTQRRLQLQKDMGVMQGTVPYLGTFLTDLTMLDTALQDYIEGGLINFEKRRREFEVIAQIKLLQSACNSYCMTPDQKFIQWFQRQQLLTEEESYALSCEIEAAADASTTSPKPRKSMVKRLSLLFLGSDMITSPTPTKEQPKSTASGSSGESMDSVSVSSCESNHSEAEEGSITPMDTPDEPQKKLSESSSSCSSIHSMDTNSSGMSSLINPLSSPPSCNNNPKIHKRSVSVTSITSTVLPPVYNQQNEDTCIIRISVEDNNGNMYKSIMLTSQDKTPAVIQRAMLKHNLDSDPAEEYELVQVISEDKELVIPDSANVFYAMNSQVNFDFILRKKNSMEEQVKLRSRTSLTLPRTAKRGCWSNRHSKITL

SEQ ID NO: 19089 - protein, 11 aa, Homo sapiens
LMLVLFIQDWI

SEQ ID NO: 19090 - protein, 425 aa, Homo sapiens
LQVQTLYYSADHKLLDGNLLDGQAEVFGSDDDHIQFVQKKPPRENGHKQISSSSTGCLSSPNATVQSPKHEWKIVASEKTSNNTYLCLAVLDGIFCVIFLHGRNSPQSSPTSTPKLSKSLSFEMQQDELIEKPMSPMQYARSGLGTAEMNGKLIAAGGYNREECLRTVECYNPHTDHWSFLAPMRTPRARFQMAVLMGQLYVVGGSNGHSDDLSCGEMYDSNIDDWIPVPELRTNRCNAGVCALNGKLYIVGGSDPYGQKGLKNCDVFDPVTKLWTSCAPLNIRRHQSAVCELGGYLYIIGGAESWNCLNTVERYNPENNTWTLIAPMNVARRGAGVAVLNGKLFVCGGFDGSHAISCVEMYDPTRNEWKMMGNMTSPRSNAGIATVGNTIYAVGGFDGNEFLNTVEVYNLESNEWSPYTKIFQF

SEQ ID NO: 19091 - protein, 433 aa, Homo sapiens
LWAENDDDLMVQTLYYSADHKLLDGNLLDGQAEVFGSDDDHIQFVQKKPPRENGHKQISSSSTGCLSSPNATVQSPKHEWKIVASEKTSNNTYLCLAVLDGIFCVIFLHGRNSPQSSPTSTPKLSKSLSFEMQQDELIEKPMSPMQYARSGLGTAEMNGKLIAAGGYNREECLRTVECYNPHTDHWSFLAPMRTPRARFQMAVLMGQLYVVGGSNGHSDDLSCGEMYDSNIDDWIPVPELRTNRCNAGVCALNGKLYIVGGSDPYGQKGLKNCDVFDPVTKLWTSCAPLNIRRHQSAVCELGGYLYIIGGAESWNCLNTVERYNPENNTWTLIAPMNVARRGAGVAVLNGKLFVCGGFDGSHAISCVEMYDPTRNEWKMMGNMTSPRSNAGIATVGNTIYAVGGFDGNEFLNTVEVYNLESNEWSPYTKIFQF

SEQ ID NO: 19092 - protein, 264 aa, Homo sapiens
LCLAVLDGIFCVIFLHGRNSPQSSPTSTPKLSKSLSFEMQQDELIEKPMSPMQYARSGLGTAEMNGKLIAAGGYNREECLRTVECYNPHTDHWSFLAPMRTPRARFQMAVLMGQLYVVGGSNGHSDDLSCGEMYDSNIDDWIPVPELRTNRCNAGVCALNGKLYIVGGSDPYGQKGLKNCDVFDPVTKLWTSCAPLNIRRHQSAVCELGGYLYIIGGAESWNCLNTVERYNPENNTWTLIAPMNVARRGAGVAVLNGECWDLER

SEQ ID NO: 19093 - protein, 128 aa, Homo sapiens
LCLAVLDGIFCVIFLHGRNSPQSSPTSTPKLSKSLSFEMQQDELIEKPMSPMQYARSGLGTAEMNGKLIAAGGYNREECLRTVECYNPHTDHWSFLAPMRTPRARFQMAVLMVSALCCRSNPYLAFSS

SEQ ID NO: 19094 - protein, 46 aa, Homo sapiens
MRAAAISTPKLDKMPGMFFSANPKELKGTTHSLLDDKMQKRRPKTL

SEQ ID NO: 19095 - protein, 73 aa, Homo sapiens
MRAAAISTPKLDKMPGMFFSANPKELKGTTHSLLDDKMQKRRPKTFGMDMKAYLRSMIPHLESGMKSSKSKDV

SEQ ID NO: 19096 - protein, 71 aa, Homo sapiens
MRAAAISTPKLDKMPGMFFSANPKELKGTTHSLLDDKMQKRRPKTLLSAAEVMQWSQSLEKLLANQSKYNY

SEQ ID NO: 19097 - protein, 98 aa, Homo sapiens
MRAAAISTPKLDKMPGMFFSANPKELKGTTHSLLDDKMQKRRPKTFGMDMKAYLRSMIPHLESGMKSSKSKDVLSAAEVMQWSQSLEKLLANQSKYNY

SEQ ID NO: 19098 - protein, 35 aa, Homo sapiens
MAPWVNSLAFFGCLDRPRRTNDSEWINMKVIQAQS

SEQ ID NO: 19099 - protein, 71 aa, Homo sapiens [sequence omitted]

SEQ ID NO: 19100 - protein, 35 aa, Homo sapiens
LWSEAFDELLASKCKLTLELEPLLTSQKPGKAAST

SEQ ID NO: 19101 - protein, 87 aa, Homo sapiens
LWSEAFDELLASKYGLAAFRAFLKSEFCEENIEFWLACEDFKKTKSPQKLSSKARKIYTDFIEKEAPKEVRKQVPNFSTIWTSLAQK

SEQ ID NO: 19102 - protein, 10 aa, Homo sapiens
VDRGGVWPGP

SEQ ID NO: 19103 - protein, 35 aa, Homo sapiens [sequence omitted]

SEQ ID NO: 19104 - protein, 1924 aa, Homo sapiens
LRGSGQRKSRIPAPEPPRGSGARRSRRGLESAMANRRVGRGCWEVSPTERRPPAGLRGPAAEEEASSPPVLSLSHFCRSPFLCFGDVLLGASRTLSLALDNPNEEVAEVKISHFPAADLGFSVSQRCFVLQPKEKIVISVNWTPLKEGRVREIMTFLVNDVLKHQAILLGNAEEQKKKKRSLWDTIKKKKISASTSHNRRVSNIQNVNKTFSVSQKVDRVRSPLQACENLAMNEGGPPTENNSLILEENKIPISPISPAFNECHGATCLPLSVRRSTTYSSLHASENRELLNVHSANVSKVSFNEKAVTETSFNSVNVNGQRGENSKLSLTPNCSSTLNITQSQIHFLSPDSFVNNSHGANNELELVTCLSSDMFMKDNSQPVHLESTIAHEIYQKILSPDSFIKDNYGLNQDLESESVNPILSPNQFLKDNMAYMCTSQQTCKVPLSNENSQVPQSPEDWRKSEVSPRIPECQGSKSPKAIFEELVEMKSNYYSFIKQNNPKFSAVQDISSHSHNKQPKRRPILSATVTKRKATCTRENQTEINKPKAKRCLNSAVGEHEKVINNQKEKEDFHSYLPIIDPILSKSKSYKNEVTPSSTTASVARKRKSDGSMEDANVRVAITEHTEVREIKRIHFSPSEPKTSAVKKTKNVTTPISKRISNREKLNLKKKTDLSIFRTPISKTNKRTKPIIAVAQSSLTFIKPLKTDIPRHPMPFAAKNMFYDERWKEKQEQGFTWWLNFILTPDDFTVKTNISEVNAATLLLGIENQHKISVPRAPTKEEMSLRAYTARCRLNRLRRAACRLFTSEKMVKAIKKLEIEIEARRLIVRKDRHLWKDVGERQKVLNWLLSYNPLWLRIGLETTYGELISLEDNSDVTGLAMFILNRLLWNPDIAAEYRHPTVPHLYRDGHEEALSKFTLKKLLLLVCFLDYAKISRLIDHDPCLFCKDAEFKASKEILLAFSRDFLSGEGDLSRHLGLLGLPVNHVQTPFDEFDFAVTNLAVDLQCGVRLVRTMELLTQNWDLSKKLRIPAISRLQKMHNVDIVLQVLKSRGIELSDEHGNTILSKDIVDRHREKTLRLLWKIAFAFQVDISLNLDQLKEEIAFLKHTKSIKKTISLLSCHSDDLINKKKGKRDSGSFEQYSENIKLLMDWVNAVCAFYNKKVENFTVSFSDGRVLCYLIHHYHPCYVPFDAICQRTTQTVECTQTGSVVLNSSSESDDSSLDMSLKAFDHENTSELYKELLENEKKNFHLVRSAVRDLGGIPAMINHSDMSNTIPDEKVVITYLSFLCARLLDLRKEIRAARLIQTTWRKYKLKTDLKRHQEREKAARIIQLAVINFLAKQRLRKRVNAALVIQKYWRRVLAQRKLLMLKKEKLEKVQNKAASLIQAMWRRYRAKKYLCKVKAACKIQAWYRCWRAHKEYLAILKAVKIIQGCFYTKLERTRFLNVRASAIIIQRKWRAILPAKIAHEHFLMIKRHRAACLIQAHYRGYKGRQVFLRQKSAALIIQKYIRAREAGKHERIKYIEFKKSTVILQALVRGWLVRKRFLEQRAKIRLLHFTAAAYYHLNAVRIQRAYKLYLAVKNANKQVNSVICIQRWFRARLQEKRFIQKYHSIKKIEHEGQECLSQRNRAASVIQKAVRHFLLRKKQEKFTSGIIKIQALWRGYSWRKKNDCTKIKAIRLSLQVVNREIREENKLYKRTALALHYLLTYKHLSAILEALKHLEVVTRLSPLCCENMAQSGAISKIFVLIRSCNRSIPCMEVIRYAVQVLLNVSKYEKTTSAVYDVENCIDILLELLQIYREKPGNKVADKGGSIFTKTCCLLAILLKTTNRASDVRSRSKVVDRIYSLYKLTAHKHKMNTERILYKQKKNSSISIPFIPETPVRTRIVSRLKPDWVLRRDNMEEITNPLQAIQMVMDTLGIPY

SEQ ID NO: 19105 - protein, 30 aa, Homo sapiens
LLSQKGSGGWGGRRGSAGGAADMGPPPRLL

SEQ ID NO: 19106 - protein, 1652 aa, Homo sapiens
LSAKMSLHSTHNRNNSGDILDIPSSQNSSSLNALTHSSRLKLHLKSDMSECENDDPLLRSAGKVRDINRTYVISASRKTADMPLTPNPVGRLALQRRTTRNKESSLLVSELEDTTEKTAETRLTLQRRAKTDSAEKWKTAEIDSVKMTLNVGGETENNGVSKESRTNVRIVNNAKNSFVASSVPLDEDPQVIEMMADKKYKETFSAPSRANENVALKYSSNRPPIASLSQTEVVRSGHLTTKPTQSKLDIKVLGTGNLYHRSIGKEIAKTSNKFGSLEKRTPTKCTTEHKLTTKCSLPQLKSPAPSILKNRMSNLQVKQRPKSSFLANKQERSAENTILPEEETVVQNTSAGKDPLKVENSQVTVAVRVRPFTKREKIEKASQVVFMSGKEITVEHPDTKQVYNFIYDVSFWSFDECHPHYASQTTVYEKLAAPLLERAFEGFNTCLFAYGQTGSGKSYTMMGFSEEPGIIPRFCEDLFSQVARKQTQEVSYHIEMSFFEVYNEKIHDLLVCKDENGQRKQPLRVREHPVYGPYVEALSMNIVSSYADIQSWLELGNKQRATAATGMNDKSSRSHSVFTLVMTQTKTEFVEGEEHDHRITSRINLIDLAGSERCSTAHTNGDRLKEGVSINKSLLTLGKVISALSEQANQRSVFIPYRESVLTWLLKESLGGNSKTAMIATISPAASNIEETLSTLRYANQARLIVNIAKVNEDMNAKLIRELKAEIAKLKAAQRNSRNIDPERYRLCRQEITSLRMKLHQQERDMAEMQRVWKEKFEQAEKRKLQETKELQKAGIMFQMDNHLPNLVNLNEDPQLSEMLLYMIKEGTTTVGKYKPNSSHDIQLSGVLIADDHCTIKNFGGTVSIIPVGEAKTYVNGKHILEITVLRHGDRVILGGDHYFRFNHPVEVQKGKRPSGRDTPISEGPKDFEFAKNELLMAQRSQLEAEIKEAQLKAKEEMMQGIQIAKEMAQQELSSQKAAYESKIKALEAELREESQRKKMQEINNQKANHKIEELEKAKQHLEQEIYVNKKRLEMETLATKQALEDHSIRHARILEALETEKQKIAKEVQILQQNRNNRDKTFTVQTTWSSMKLSMMIQEANAISSKLKTYYVFGRHDISDKSSSDTSIRVRNLKLGISTFWSLEKFESKLAAMKELYESNGSNRGEDAFCDPEDEWEPDITDAPVSSLSRRRSRSLMKNRRISGCLHDIQVHPIKNLHSSHSSGLMDKSSTIYSNSAESFLPGICKELIGSSLDFFGQSYDEERTIADSLINSFLKIYNGLFAISKAHEEQDEESQDNLFSSDRAIQSLTIQTACAFEQLVVLMKHWLSDLLPCTNIARLEDELRQEVKKLGGYLQLFLQGCCLDISSMIKEAQKNAIQIVQQAVKYVGQLAVLKGSKLHFLENGNNKAASVQEEFMDAVCDGVGLGMKILLDSGLEKAKELQHELFRQCTKNEVTKEMKTNAMGLIRSLENIFAESKIKSFRRQVQEENFEYQDFKRMVNRAPEFLKLKHCLEKAIEIIISALKGCHSDINLLQTCVESIRNLASDFYSDFSVPSTSVGSYESRVTHIVHQELESLAKSLLFCFESEESPDLLKPWETYNQNTKEEHQQSKSSGIDGSKNKGVPKRVYELHGSSPAVSSEECTPSRIQWV

SEQ ID NO: 19107 - protein, 203 aa, Homo sapiens
VPAEAGRWARSALGAPTPPHRQPGAEGRGVGARSSQGAGGQRARPASPGRQNPALRGREGRRARRSLELSANLGAPMTAAATATVLKEGVLEKRSGGLLQLWKRKRCVLTERGLQLFEAKGTGGRPKELSFARIKAVECVESTGRHIYFTLVTEGGGEIDFRCPLEDPGWNAQITLGLVKFKNQQAIQTVRARQSLGTGTLVS

SEQ ID NO: 19108 - protein, 1500 aa, Homo sapiens
LGGAGCPPGEWPPEPGKMLHLPLPRSGRTVNFPRSWDESSSISSGLSDASDNLSSEEFNASSSLNSLPSTPTASRRNSTIVLRTDSEKRSLAESGLSWFSESEEKAPKKLEYDSGSLKMEPGTSKWRRERPESCDDSSKGGELKKPISLGHPGSLKKGKTPPVAVTSPITHTAQSALKVAGKPEGKATDKGKLAVKNTGLQRSSSDAGRDRLSDAKKPPSGIARPSTSGSFGYKKPPPATGTATVMQTGGSATLSKIQKSSGIPVKPVNGRKTSLDVSNSAEPGFLAPGARSNIQYRSLPRPAKSSSMSVTGGRGGPRPVSSSIDPSLLSTKQGGLTPSRLKEPTKVASGRTTPAPVNQTDREKEKAKAKAVALDSDNISLKSIGSPESTPKNQASHPTATKLAELPPTPLRATAKSFVKPPSLANLDKVNSNSLDLPSSSDTTHASKVPDLHATSSASGGPLPSCFTPSPAPILNINSASFSQGLELMSGFSVPKETRMYPKLSGLHRSMESLQMPMSLPSAFPSSTPVPTPPAPPAAPTEEETEELTWSGSPRAGQLDSNQRDRNTLPKKGLRYQLQSQEETKERRHSHTIGGLPESDDQSELPSPPALPMSLSAKGQLTNIVSPTAATTPRITRSNSIPTHEAAFELYSGSQMGSTLSLAERPKGMIRSGSFRDPTDDVHGSVLSLASSASSTYSSAEERMQSEQIRKLRRELESSQEKVATLTSQLSANANLVAAFEQSLVNMTSRLRHLAETAEEKDTELLDLRETIDFLKKKNSEAQAVIQGALNASETTPKELRIKRQNSSDSISSLNSITSHSSIGSSKDADAKKKKKKSWLRSSFNKAFSIKKGPKSASSYSDIEEIATPDSSAPSSPKLQHGSTETASPSIKSSTSSSVGTDVTEGPAHPAPHTRLFHANEEEEPEKKEVSELRSELWEKEMKLTDIRLEALNSAHQLDQLRETMHNMQLEVDLLKAENDRLKVAPGPSSGSTPGQVPGSSALSSPRRSLGLALTHSFGPSLADTDLSPMDGISTCGPKEEVTLRVVVRMPPQHIIKGDLKQQEFFLGCSKVSGKVDWKMLDEAVFQVFKDYISKMDPASTLGLSTESIHGYSISHVKRVLDAEPPEMPPCRRGVNNISVSLKGLKEKCVDSLVFETLIPKPMMQHYISLLLKHRRLVLSGPSGTGKTYLTNRLAEYLVERSGREVTEGIVSTFNMHQQSCKDLQLYLSNLANQIDRETGIGDVPLVILLDDLSEAGSISELVNGALTCKYHKCPYIIGTTNQPVKMTPNHGLHLSFRMLTFSNNVEPANGFLVRYLRRKLVESDSDINANKEELLRVLDWVPKLWYHLHTFLEKHSTSDFLIGPCFFLSCPIGIEDFRTWFIDLWNNSIIPYLQEGAKDGIKVHGQKAAWEDPVEWVRDTLPWPSAQQDQSKLYHLPPPTVGPHSIASPPEDRTVKDSTPSSLDSDPLMAMLLKLQEAANYIESPDRETILDPNLQATL

SEQ ID NO: 19109 - protein, 125 aa, Homo sapiens
LCPASRQRLDVTKTQRRNTEEGRGSGSWGKQDGREGLAPHPFPGNGALGPRRAQAGGSRPLVAAAAGTGGQNAAGVCVGGSKEGRREEAGFLEPSQPSKTDRQTDRQLARGSLGATAASADLMAE

SEQ ID NO: 19110 - protein, 144 aa, Homo sapiens
LGVEQQQLGEDPAGVQEPACLAAQPAPTLLEASILCSGEGPLVSSEMASACFLPSVLENTYFLFPPLPSPTWTCSEPCVLWCVASLPSLFSSFWILSYLHPQSLPFILPLLYPETAFCPGSHQIDPVLPLVKMRPPLGEQKTPQ

SEQ ID NO: 19111 - protein, 183 aa, Homo sapiens
LVPERSFEGLSSLRHLWLDDNALTEIPVRALNNLPALQAMTLALNRISHIPDYAFQNLTSLVVLHLHNNRIQHLGTHSFEGLHNLETLDLNYNKLQEFPVAIRTLGRLQELFKRFSCLSLPSCWDYRHAPPCPGGSITTTSRPSQKRPSWGTLCYRRYTFMITQSSLWEDRHSSTCLNSTHYL

SEQ ID NO: 19112 - protein, 153 aa, Homo sapiens
LGIMQRASRLKRELHMLATEPPPGITCWQDKDQMDDLRAQILGGANTPYEKGVFKLEVIIPERYPFEPPQIRFLTPIYHPNIDSAGRICLDVLKLPPKGAWRPSLNIATVLTSIQLLMSEPNPDDPLMADIVNIPIFLCNTYPTLSIPLTLPV

SEQ ID NO: 19113 - protein, 124 aa, Homo sapiens
LWGQFISAIPTRSLKFLKEAGHGTTKEEITKDAEGLDEIDHAEMELRRGQILWFRGLNRIQTQIDVINTFQTGASFKGVLRRQNMGQHLDVKLVPSSSYVAVAPVKSSPTTSVPAVSSPPMGSE

SEQ ID NO: 19114 - protein, 33 aa, Homo sapiens
LLWVLKEDELLTEPLLSLLAVSPSVPLTFPPET

SEQ ID NO: 19115 - protein, 14 aa, Homo sapiens
MRSHFLQWALATSR

SEQ ID NO: 19116 - protein, 11 aa, Homo sapiens
MLGQLGLTFQR

SEQ ID NO: 19117 - protein, 41 aa, Homo sapiens
MSSELRGHTKAEVWEFQKGILLKQSVVISCTSLRMFAETAS

SEQ ID NO: 19118 - protein, 26 aa, Homo sapiens
MAYRGQGQKVQKVMVQPIVSYAGCQD

SEQ ID NO: 19119 - protein, 672 aa, Homo sapiens
MLCFTARSGTAVAPRPGAGPVPRASALPAQPTDSPAALAHLLLAMESLVFARRSGPTPSAAELARPLAEGLIKSPKPLMKKQAVKRHHHKHNLRHRYEFLETLGKGTYGKVKKARESSGRLVAIKSIRKDKIKDEQDLMHIRREIEIMSSLNHPHIIAIHEVFENSSKIVIVMEYASRGDLYDYISERQQLSEREARHFFRQIVSAVHYCHQNRVVHRDLKLENILLDANGNIKIADFGLSNLYHQGKFLQTFCGSPLYASPEIVNGKPYTGPEVDSWSLGVLLYILVHGTMPFDGHDHKILVKQISNGAYREPPKPSDACGLIRWLLMVNPTRRATLEDVASHWWVNWGYATRVGEQEAPHEGGHPGSDSARASMADWLRRSSRPLLENGAKVCSFFKQHAPGGGSTTPGLERQHSLKKSRKENDMAQSLHSDTADDTAHRPGKSNLKLPKGILKKKVSASAEGVQEDPPELSPIPASPGQAAPLLPKKGILKKPRQRESGYYSSPEPSESGELLDAGDVFVSGDPKEQKPPQASGLLLHRKGILKLNGKFSQTALELAAPTTFGSLDELAPPRPLARASRPSGAVSEDSILSSESFDQLDLPERLPEPPLRGCVSVDNLTGLEEPPSEGPGSCLRRWRQDPLGDSCFSLTDCQEVTATYRQALRVCSKLT

SEQ ID NO: 19120 - protein, 25 aa, Homo sapiens
VPTSLRRIPSPAPLMRWRPRPGTPG

SEQ ID NO: 19121 - protein, 122 aa, Homo sapiens
LGCQALSEMIQFYLEEVMPQAENQDPDIKAHVNSLGENLKTLRLRLRRCHRFLPCENKSKAVEQVKNAFNKVSLDGGREGLQSTTHAHSPTPKHGRWWGLNRPHSSLERVWEPDRWYDLLSQ

SEQ ID NO: 19122 - protein, 151 aa, Homo sapiens
LSNFSVKRTSCLQAASPQASLTGPEQAQDNITSARLLQQEVLQNVSDAESCYLVHTLLEFYLKTVFKNYHNRTVEVRTLKSFSTLANNFVLIVSQLQPSQENEMFSIRDSAHRRFLLFRRAFKQLDVEAALTKALGEVDILLTWMQKFYKL

SEQ ID NO: 19123 - protein, 103 aa, Homo sapiens
LRLLGRKARRNTRLRDEFSTEAAKPVDFSQQAQDNITSARLLQQEVLQNVSQENEMFSIRDSAHRRFLLFRRAFKQLDVEAALTKALGEVDILLTWMQKFYKL

SEQ ID NO: 19124 - protein, 156 aa, Homo sapiens
LRLLGRKARRNTRLRDEFSTEAAKPVDFSQQAQDNITSARLLQQEVLQNVSDAESCYLVHTLLEFYLKTVFKNYHNRTVEVRTLKSFSTLANNFVLIVSQLQPSQENEMFSIRDSAHRRFLLFRRAFKQLDVEAALTKALGEVDILLTWMQKFYKL

SEQ ID NO: 19125 - protein, 24 aa, Homo sapiens
LDGPCTLEGTMDFWLWPLYFLPGV

SEQ ID NO: 19126 - protein, 46 aa, Homo sapiens
LTKPQHQFVRPDVNSSCGEGYKLSGSVYQECQGTIPWFMEIRLCKV

SEQ ID NO: 19127 - protein, 629 aa, Homo sapiens
MCLGRMGASSPRSPEPVGPPAPGLPFCCGGSLLAVVVLLALPVAWGQCNAPEWLPFARPTNLTDEFEFPIGTYLNYECRPGYSGRPFSIICLKNSVWTGAKDRCRRKSCRNPPDPVNGMVHVIKGIQFGSQIKYSCTKGYRLIGSSSATCIISGDTVIWDNETPICDRIPCGLPPTITNGDFISTNRENFHYGSVVTYRCNPGSGGRKVFELVGEPSIYCTSNDDQVGIWSGPAPQCIIPNKCTPPNVENGILVSDNRSLFSLNEVVEFRCQPGFVMKGPRRVKCQALNKWEPELPSCSRVCQPPPDVLHAERTQRDKDNFSPGQEVFYSCEPGYDLRGAASMRCTPQGDWSPAAPTCEVKSCDDFMGQLLNGRVLFPVNLQLGAKVDFVCDEGFQLKGSSASYCVLAGMESLWNSSVPVCEQIFCPSPPVIPNGRHTGKPLEVFPFGKTVNYTCDPHPDRGTSFDLIGESTIRCTSDPQGNGVWSSPAPRCGILGHCQAPDHFLFAKLKTQTNASDFPIGTSLKYECRPEYYGRPFSITCLDNLVWSSPKDVCKRKSCKTPPDPVNGMVHVITDIQVGSRINYSCTTGHRLIGHSSAECILSGNAAHWSTKPPICQRSCHLPCELFGR

SEQ ID NO: 19128 - protein, 38 aa, Homo sapiens
VAVRNVPMTGSISHVLVQLPHVFQRMEAENLASVIDAR

SEQ ID NO: 19129 - protein, 158 aa, Homo sapiens
LACCYLLQDHLQQCLFQPVQCSNEKCREPVLRKDLKEHLSASCQFRKEKCLYCKKDVVVINLQVKNNTYNSHLYGAKLCLSGHSESGGMPEEHSCIYFCTELGLKNLLFGEKFCEKLKTFLLVALHLLLAKILFEHMLCMCNECWVLSHKEVTIMSTL

SEQ ID NO: 19130 - protein, 425 aa, Homo sapiens
VLLGGFSIQVPGVPGPWSSALGGATCVRQRDSGDWPAMPSRAEDYEVLYTIGTGSYGRCQKIRRKSDGKILVWKELDYGSMTEAEKQMLVSEVNLLRELKHPNIVRYYDRIIDRTNTTLYIVMEYCEGGDLASVITKGTKERQYLDEEFVLRVMTQLTLALKECHRRSDGGHTVLHRDLKPANVFLDGKQNVKLGDFGLARILNHDTSFAKTFVGTPYYMSPEQMNRMSYNEKSDIWSLGCLLYELCALMPPFTAFSQKELAGKIREGKFRRIPYRYSDELNEIITRMLNLKDYHRPSVEEILENPLIADLVADEQRRNLERRGRQLGEPEKSQDSSPVLSELKLKEIQLQERERALKAREERLEQKEQELCVRERLAEDKLARAENLLKNYSLLKERKFLSLASNPESHFVAQAGMQWCDHSSM

SEQ ID NO: 19131 - protein, 482 aa, Homo sapiens
VLLGGFSIQVPGVPGPWSSALGGATCVRQRDSGDWPAMPSRAEDYEVLYTIGTGSYGRCQKIRRKSDGKILVWKELDYGSMTEAEKQMLVSEVNLLRELKHPNIVRYYDRIIDRTNTTLYIVMEYCEGGDLASVITKGTKERQYLDEEFVLRVMTQLTLALKECHRRSDGGHTVLHRDLKPANVFLDGKQNVKLGDFGLARILNHDTSFAKTFVGTPYYMSPEQMNRMSYNEKSDIWSLGCLLYELCALMPPFTAFSQKELAGKIREGKFRRIPYRYSDELNEIITRMLNLKDYHRPSVEEILENPLIADLVADEQRRNLERRGRQLGEPEKSQDSSPVLSELKLKEIQLQERERALKAREERLEQKEQELCVRERLAEDKLARAENLLKNYSLLKERKFLSLASNPELLNLPSSVIKKKVHFSGESKENIMRSENSESQLTSKSKCKDLKKRLHAAQLRAQALSDIEKNYQLKSRQILGMR

SEQ ID NO: 19132 - protein, 395 aa, Homo sapiens
VRQRDSGDWPAMPSRAEDYEVLYTIGTGSYGRCQKIRRKSDGKILVWKELDYGSMTEAEKQMLVSEVNLLRELKHPNIVRYYDRIIDRTNTTLYIVMEYCEGGDLASVITKGTKERQYLDEEFVLRVMTQLTLALKECHRRSDGGHTVLHRDLKPANVFLDGKQNVKLGDFGLARILNHDTSFAKTFVGTPYYMSPEQMNRMSYNEKSDIWSLGCLLYELCALMPPFTAFSQKELAGKIREGKFRRIPYRYSDELNEIITRMLNLKDYHRPSVEEILENPLIADLVADEQRRNLERRGRQLGEPEKSQDSSPVLSELKLKEIQLQERERALKAREERLEQKEQELCVRERLAEDKLARAENLLKNYSLLKERKFLSLASNPGMRINLVNRSWCYK

SEQ ID NO: 19133 - protein, 53 aa, Homo sapiens
VTSVWRGVWRPGLTVAGVGGDNDLCCERRKLRFLLNLEAFLRLFSQLRLFLRP

SEQ ID NO: 19134 - protein, 689 aa, Homo sapiens
LMLFNSVLRQPQLGVLRNAPNMEHVLAVANEEGFVRLYNTESQSFRKKCFKEWMAHWNAVFDLAWVPGELKLVTAAGDQTAKFWDVKAGELIGTCKGHQCSLKSVAFSKFEKAVFCTGGRDGNIMVWDTRCNKKDGFYRQVNQISGAHNTSDKQTPSKPKKKQNSKGLAPSVDFQQSVTVVLFQDENTLVSAGAVDGIIKVWDLRKNYTAYRQEPIASKSFLYPGSSTRKLGYSSLILDSTGSTLFANCTDDNIYMFNMTGLKTSPVAIFNGHQNSTFYVKSSLSPDDQFLVSGSSDEAAYIWKVSTPWQPPTVLLGHSQEVTSVCWCPSDFTKIATCSDDNTLKIWRLNRGLEEKPGGDKLSTVGWASQKKKESRPGLVTVTSSQSTPAKAPRAKCNPSNSSPSSAACAPSCAGDLPLPSNTPTFSIKTSPAKARSPINRRGSVSSVSPKPPSSFKMSIRNWVTRTPSSSPPITPPASETKIMSPRKALIPVSQKSSQAEACSESRNRVKRRLDSSCLESVKQKCVKSCNCVTELDGQVENLHLDLCCLAGNQEDLSKDSLGPTKSSKIEGAGTSISEPPSPISPYASESCGTLPLPLRPCGEGSEMVGKENSSPENKNWLLAMAAKRKAENPSPRSPSSQTPNSRRQSGKKLPSPVTITPSSMRKICTYFHRKSQEDFCGPEHSTEL

SEQ ID NO: 19135 - protein, 461 aa, Homo sapiens
LWMGYSSLILDSTGSTLFANCTDDNIYMFNMTGLKTSPVAIFNGHQNSTFYVKSSLSPDDQFLVSGSSDEAAYIWKVSTPWQPPTVLLGHSQEVTSVCWCPSDFTKIATCSDDNTLKIWRLNRGLEEKPGGDKLSTVGWASQKKKESRPGLVTVTSSQSTPAKAPRAKCNPSNSSPSSAACAPSCAGDLPLPSNTPTFSIKTSPAKARSPINRRGSVSSVSPKPPSSFKMSIRNWVTRTPSSSPPITPPASETKIMSPRKALIPVSQKSSQAEACSESRNRVKRRLDSSCLESVKQKCVKSCNCVTELDGQVENLHLDLCCLAGNQEDLSKDSLGPTKSSKIEGAGTSISEPPSPISPYASESCGTLPLPLRPCGEGSEMVGKENSSPENKNWLLAMAAKRKAENPSPRSPSSQTPNSRRQSGKKLPSPVTITPSSMRKICTYFHRKSQEDFCGPEHSTEL

SEQ ID NO: 19136 - protein, 122 aa, Homo sapiens
LSDETGQKRVRRGATTSHPPSVFPQSPEDDDRKVRRREKNRVAAQRSRKKQTQKADKLHEEYESLEQENTMLRREIGKLTEELKHLTEALKEHEKMCPLLLCPMNFVPVPPRPDPVAGCLPR

SEQ ID NO: 19137 - protein, 161 aa, Homo sapiens
VRHEDAGGGTAPVGSPTGRARGRGGAGRARGAPGMSQGLPAAGSVLQRSVAAPGNQPQPQPQQQSPEDDDRKVRRREKNRVAAQRSRKKQTQKADKLHEEYESLEQENTMLRREIGKLTEELKHLTEALKEHEKMCPLLLCPMNFVPVPPRPDPVAGCLPR

SEQ ID NO: 19138 - protein, 18 aa, Homo sapiens
VSGIHQFHRLENDCCLVQ

SEQ ID NO: 19139 - protein, 12 aa, Homo sapiens
VVMGSHRRALSS

SEQ ID NO: 19140 - protein, 83 aa, Homo sapiens
LMIIVFYLNKMCVLDRDLKVEVTKSLERPSRKQMGKLIYGSCKAFSYITGVLARKHIKCDPRCADIIFRLWSARSELIPLGTP

SEQ ID NO: 19141 - protein, 57 aa, Homo sapiens
LLDHFEDRGMREHISCEVAARFVTNPEIHQLNSFISLIHSSFIAYIQSKDGKKMNSS

SEQ ID NO: 19142 - protein, 233 aa, Homo sapiens
LLRPSQGRVRQDRRAASEDHIAMPFGLKLRRTRRYNVLSKNCFVTRIRLLDSNVIECTLSVESTGQECLEAVAQRLELRETHYFGLWFLSKSQQARWVELEKPLKKHLDKFANEPLLFFGVMFYVPNVSWLQQEATRYQYYLQVKKDVLEGRLRCTLDQVIRLAGLAVQADFGDYNQFDSQDFLREYVLFPMDLALEEAVLEELTQKVAQEHKAHRTIMETVYTLAFSLWGFS

SEQ ID NO: 19143 - protein, 13 aa, Homo sapiens
VCARIGGRRPRTT

SEQ ID NO: 19144 - protein, 24 aa, Homo sapiens
LGMDTLFPAWRSTGDSVIFQSRNC

SEQ ID NO: 19145 - protein, 56 aa, Homo sapiens
LSLESIPWGIGSAAAKDSLSARDSGAPRGPCKQLSSRGPHWAWTPFSLPGGAQVIV

SEQ ID NO: 19146 - protein, 58 aa, Homo sapiens
MPPPSFGGETSKILRTEESILFILGHSLVKLVRNYDSSVGSKCKCGRSKLMCEADISV

SEQ ID NO: 19147 - protein, 15 aa, Homo sapiens
MTALWEASASVGEAS

SEQ ID NO: 19148 - protein, 80 aa, Homo sapiens
LFSKLAFRFFMESRSISKDWTVRPSSVSVISAAPTWADWVVTTVVLSSVRSDQHLSSSSRFFRASLSYWAQMSAMIVARS

SEQ ID NO: 19149 - protein, 15 aa, Homo sapiens
MVCVELLLSITKIED

SEQ ID NO: 19150 - protein, 120 aa, Homo sapiens
MSWALEEWKEGLPTRALQKIQELEGQLDKLKKEKQQRQFQLDSLEAALQKQKQKVENEKTEGTNLKRENQRLMEICESLEKTKQKISHELQVKESQVNFQEGQLNSGKKQIEKLEQELKR

SEQ ID NO: 19151 - protein, 129 aa, Homo sapiens
LKKTPKKKMKMVTGAVASVLEDEATDTSDSEGSCGSEKDHFYSDDDAIEADSEGDAEPCDKENENDGESSVGTNMGWADAMAKVLNKKTPESKPTILVKNKKLEKEKEKLKQERLEKIKQVCSTSSLVD

SEQ ID NO: 19152 - protein, 10 aa, Homo sapiens
MPSLASCAII

SEQ ID NO: 19153 - protein, 13 aa, Homo sapiens
LMPLRFTSHKLTN

SEQ ID NO: 19154 - protein, 228 aa, Homo sapiens
LVRHRGSRLGRCSGGRGGLSSFKQNHENLCDNSLQLQECREVGGGASAASSLLPQPIPTTPDIENAELTPILPFLFLGNEQDAQDLDTMQRLNIGYVINVTTHLPLYHYEKGLFNYKRLPATDSNKQNLRQYFEEAFEFIEEAHQCGKGLLIHCQAGVSRSATIVIAYLMKHTRMTMTDAYKFVKGKRPIISPNLNFMGQLLEFEEDLNNGVTPRILTPKLMGVETVV

SEQ ID NO: 19155 - protein, 489 aa, Homo sapiens
LPVFSLLMPPSPLDDRVVVALSRPVRPQDLNLCLDSSYLGSANPGSNSHPPVIATTVVSLKAANLTYMPSSSGSARSLNCGCSSASCCTVATYDKDNQAQTQAIAAGTTTTAIGTSTTCPANQMVNNNENTGSLSPSSGVGSPVSGTPKQLASIKIIYPNDLAKKMTKCSKSHLPSQGPVIIDCRPFMEYNKSHIQGAVHINCADKISRRRLQQGKITVLDLISCREGKDSFKRIFSKEIIVYDENTNEPSRVMPSQPLHIVLESLKREGKEPLVLKGGLSSFKQNHENLCDNSLQLQECREVGGGASAASSLLPQPIPTTPDIENAELTPILPFLFLGNEQDAQDLDTMQRLNIGYVINVTTHLPLYHYEKGLFNYKRLPATDSNKQNLRQYFEEAFEFIEEAHQCGKGLLIHCQAGVSRSATIVIAYLMKHTRMTMTDAYKFVKGKRPIISPNLNFMGQLLEFEEDLNNGVTPRILTPKLMGVETVV

SEQ ID NO: 19156 - protein, 8 aa, Homo sapiens
MGAECASP

SEQ ID NO: 19157 - protein, 10 aa, Homo sapiens
MLLLEINEAE

SEQ ID NO: 19158 - protein, 106 aa, Homo sapiens [sequence omitted]

SEQ ID NO: 19159 - protein, 47 aa, Homo sapiens
MSDFSEELKGPVTDDEEVETSVLSGAGMHFPWLQTYVETVDYLEARK

SEQ ID NO: 19160 - protein, 26 aa, Homo sapiens
LLCDYSPGAVRVTAGTWRRLIIENAK

SEQ ID NO: 19161 - protein, 79 aa, Homo sapiens [sequence omitted]

SEQ ID NO: 19162 - protein, 42 aa, Homo sapiens
LVPQDSLVRKALQDMSVRPDAWPLAAWEVAGAAFAFARDSSN

SEQ ID NO: 19163 - protein, 103 aa, Homo sapiens
VRRCHVGSVGGRGGPGCCGARWPGWLRPPWAGPHRTRPHCYPQPLFSPPGMSGPRPVVLSGPSGAGKSTLLKRLLQEHSGIFGFSVSHTTRNPRPGEENGKGR

SEQ ID NO: 19164 - protein, 74 aa, Homo sapiens
MLRRPLAGLAAAALGRAPPDGMSGPRPVVLSGPSGAGKSTLLKRLLQEHSGIFGFSVSHTTRNPRPGEENGKGR

SEQ ID NO: 19165 - protein, 141 aa, Homo sapiens
LAGLAAAALGRAPPDGWLEARRRRLCRHSRECLSRKAAAGAAWEPSPGSVLAETIPEHGSAPAAPRRPSISELLWRPRAWQPLFSPPGMSGPRPVVLSGPSGAGKSTLLKRLLQEHSGIFGFSVSHTTRNPRPGEENGKGR

SEQ ID NO: 19166 - protein, 115 aa, Homo sapiens
LAGLAAAALGRAPPDGMSGPRPVVLSGPSGAGKSTLLKRLLQEHSGIFGFSVSHTTRNPRPGEENGKDYYFVTREVMQRDIAAGDFIEHAEFSGNLYGTRSSGCGSATLKPRRAW

SEQ ID NO: 19167 - protein, 65 aa, Homo sapiens
LWLWKSPISSGGMSGPRPVVLSGPSGAGKSTLLKRLLQEHSGIFGFSVSHTTRNPRPGEENGKGR

SEQ ID NO: 19168 - protein, 87 aa, Homo sapiens [sequence omitted]

SEQ ID NO: 19169 - protein, 140 aa, Homo sapiens
LPLSFFLDSEMSGRGKQGGKARAKAKSRSSRAGLQFPVGRVHRLLRKGNYSERVGAGAPVYLAAVLEYLTAEILELAGNAARDNKKTRIIPRHLQLAIRNDEELNKLLGRVTIAQGGVLPNIQAVLLPKKTESHHKAKGK

SEQ ID NO: 19170 - protein, 568 aa, Homo sapiens
MCLDASNSEIFGSRDCLPPAACFRRRRLARRPGYMRSSTGPGIGFLSPAVGTLFRFPGGVSGEESHHSESRARQCGLDSRGLLVRSPVSKSAAAPTVTSVRGTSAHFGIQLRGGTRLPDRLSWPCGPGSAGWQQEFAAMDSSETLDASWEAACSDGARRVRAAGSLPSAELSSNSCSPGCGPEVPPTPPGSHSAFTSSFSFIRLSLGSAGERGEAEGCPPSREAESHCQSPQEMGAKAASLDGPHEDPRCLSRPFSLLATRVSADLAQAARNSSRPERDMHSLPDMDPGSSSSLDPSLAGCGGDGSSGSGDAHSWDTLLRKWEPVLRDCLLRNRRQMEVISLRLKLQKLQEDAVENDDYDKAETLQQRLEDLEQEKISLHFQLPSRQPALSSFLGHLAAQVQAALRRGATQQASGDDTHTPLRMEPRLLEPTAQDSLHVSITRRDWLLQEKQQLQKEIEALQARMFVLEAKDQQLRREIEEQEQQLQWQGCDLTPLVGQLSLGQLQEVSKALQDTLASAGQIPFHAEPPETIRSLQERIKSLNLSLKEITTKETISGRLKTSPRRLDH

SEQ ID NO: 19171 - protein, 651 aa, Homo sapiens
MCLDASNSEIFGSRDCLPPAACFRRRRLARRPGYMRSSTGPGIGFLSPAVGTLFRFPGGVSGEESHHSESRARQCGLDSRGLLVRSPVSKSAAAPTVTSVRGTSAHFGIQLRGGTRLPDRLSWPCGPGSAGWQQEFAAMDSSETLDASWEAACSDGARRVRAAGSLPSAELSSNSCSPGCGPEVPPTPPGSHSAFTSSFSFIRLSLGSAGERGEAEGCPPSREAESHCQSPQEMGAKAASLDGPHEDPRCLSRPFSLLATRVSADLAQAARNSSRPERDMHSLPDMDPGSSSSLDPSLAGCGGDGSSGSGDAHSWDTLLRKWEPVLRDCLLRNRRQMEVISLRLKLQKLQEDAVENDDYDKAETLQQRLEDLEQEKISLHFQLPSRQPALSSFLGHLAAQVQAALRRGATQQASGDDTHTPLRMEPRLLEPTAQDSLHVSITRRDWLLQEKQQLQKEIEALQARMFVLEAKDQQLRREIEEQEQQLQWQGCDLTPLVGQLSLGQLQEVSKALQDTLASAGQIPFHAEPPETIRSLQERIKSLNLSLKEITTKVCMSEKFCSTLRKKVNDIETQLPALLEAKMHAISGNHFWTAKDLTEEIRSLTSEREGLEGLLSKLLVLSSRNVKKLGSVKEDYNRLRREVEHQETAYGR

SEQ ID NO: 19172 - protein, 374 aa, Homo sapiens
LVFVFPKAMHAHYRKHRKLQTSSRDCLPPAACFRRRRLARRPGYMRSSTGPGIGFLSPAVGTLFRFPGGVSGEESHHSESRARQCGLDSRGLLVRSPVSKSAAAPTVTSVRGTSAHFGIQLRGGTRLPDRLSWPCGPGSAGWQQEFAAMDSSETLDASWEAACSDGARRVRAAGSLPSAELSSNSCSPGCGPEVPPTPPGSHSAFTSSFSFIRLSLGSAGERGEAEGCPPSREAESHCQSPQEMGAKAASLDGPHEDPRCLSRPFSLLATRVSADLAQAARNSSRPERDMHSLPDMDPGSSSSLDPSLAGCGGDGSSGSGDAHSWDTLLRKWEPVLRDCLLRNRRQMEVISLRLKLQKLQEDAVENDDYDKGEF

SEQ ID NO: 19173 - protein, 765 aa, Homo sapiens
LARRPGYMRSSTGPGIGFLSPAVGTLFRFPGGVSGEESHHSESRARQCGLDSRGLLVRSPVSKSAAAPTVTSVRGTSAHFGIQLRGGTRLPDRLSWPCGPGSAGWQQEFAAMDSSETLDASWEAACSDGARRVRAAGSLPSAELSSNSCSPGCGPEVPPTPPGSHSAFTSSFSFIRLSLGSAGERGEAEGCPPSREAESHCQSPQEMGAKAASLDGPHEDPRCLSRPFSLLATRVSADLAQAARNSSRPERDMHSLPDMDPGSSSSLDPSLAGCGGDGSSGSGDAHSWDTLLRKWEPVLRDCLLRNRRQMEVISLRLKLQKLQEDAVENDDYDKAETLQQRLEDLEQEKISLHFQLPSRQPALSSFLGHLAAQVQAALRRGATQQASGDDTHTPLRMEPRLLEPTAQDSLHVSITRRDWLLQEKQQLQKEIEALQARMFVLEAKDQQLRREIEEQEQQLQWQGCDLTPLVGQLSLGQLQEVSKALQDTLASAGQIPFHAEPPETIRSLQERIKSLNLSLKEITTKVCMSEKFCSTLRKKVNDIETQLPALLEAKMHAISGNHFWTAKDLTEEIRSLTSEREGLEGLLSKLLVLSSRNVKKLGSVKEDYNRLRREVEHQETAYETSVKENTMKYMETLKNKLCSCKCPLLGKVWEADLEACRLLIQSLQLQEARGSLSVEDERQMDDLEGAAPPIPPRLHSEDKRKTPLKVLEEWKTHLIPSLHCAGGEQKEVCPFHMASRGDPYSKGCFGTMLQMGTINIGKASH

SEQ ID NO: 19174 - protein, 314 aa, Homo sapiens
LGHPAQEMGASAAGLPAEKPEADGAETLQQRLEDLEQEKISLHFQLPSRQPALSSFLGHLAAQVQAALRRGATQQASGDDTHTPLRMEPRLLEPTAQDSLHVSITRRDWLLQEKQQLQKEIEALQARMFVLEAKDQQLRREIEEQEQQLQWQGCDLTPLVGQLSLGQLQEVSKALQDTLASAGQIPFHAEPPETIRSLQERIKSLNLSLKEITTKVCMSEKFCSTLRKKVNDIETQLPALLEAKMHAISGNHFWTAKDLTEEIRSLTSEREGLEGLLSKLLVLSSRNVKKLGSVKEDYNRLRREVEHQETAYGR

SEQ ID NO: 19175 - protein, 407 aa, Homo sapiens
LGHPAQEMGASAAGLPAEKPEADGAETLQQRLEDLEQEKISLHFQLPSRQPALSSFLGHLAAQVQAALRRGATQQASGDDTHTPLRMEPRLLEPTAQDSLHVSITRRDWLLQEKQQLQKEIEALQARMFVLEAKDQQLRREIEEQEQQLQWQGCDLTPLVGQLSLGQLQEVSKALQDTLASAGQIPFHAEPPETIRSLQERIKSLNLSLKEITTKVCMSEKFCSTLRKKVNDIETQLPALLEAKMHAISGNHFWTAKDLTEEIRSLTSEREGLEGLLSKLLVLSSRNVKKLGSVKEDYNRLRREVEHQETAYDGVSLCRPVWSAVVRSCSLQPLPPEFKQFSCLSLRSSWDYRCPPPCLANFVFLVEMGFYHVDQTGLKLLTSSDPPSSASQSAGITDMSHCAWPLQ

SEQ ID NO: 19176 - protein, 1746 aa, Homo sapiens
VVGSNVIRFTSVFLVRLGGSSSVDMSDPRQSQEEKHKLGRASSKFKDPPRIMQSDDYFARKFKAINGNMGPTTSLNASNSNETGGGGPANGTPAVPKMGVRARVSEWPPKKDCSKELTCKALWESRSQTSYESITSVLQNGQSDQSEGQQDEQLDLDFVEAKYTIGDIFVHSPQRGLHPIRQRSNSDVTISDIDAEDVLDQNAVNPNTGAALHREYGSTSSIDRQGLSGENFFAMLRGYRVENYDHKAMVPFGFPEFFRCDPAISPSLHAAAQISRGEFVRISGLDYVDSALLMGRDRDKPFKRRLKSESVETSLFRKLRTVKSEHETFKFTSELEESRLERGIRPWNCQRCFAHYDVQSILFNINEAMATRANVGKRKNITTGASAASQTQMPTGQTGNCESPLGSKEDLNSKENLDADEGDGKSNDLVLSCPYFRNETGGEGDRRIALSRANSSSFSSGESCSFESSLSSHCTNAGVSVLEVPRENQPIHREKVKRYIIEHIDLGAYYYRKFFYGKEHQNYFGIDENLGPVAVSIRREKVEDAKEKEGSQFNYRVAFRTSELTTLRGAILEDAIPSTARHGTARGLPLKEVLEYVIPELSIQCLRQASNSPKVSEQLLKLDEQGLSFQHKIGILYCKAGQSTEEEMYNNETAGPAFEEFLDLLGQRVRLKGFSKYRAQLDNKTDSTGTHSLYTTYKDYELMFHVSTLLPYMPNNRQQLLRKRHIGNDIVTIVFQEPGALPFTPKSIRSHFQHVFVIVKVHNPCTENVCYSVGVSRSKDVPPFGPPIPKGVTFPKSAVFRDFLLAKVINAENAAHKSEKFRAMATRTRQEYLKDLAENFVTTATVDTSVKFSFITLGAKKKEKVKPRKDAHLFSIGAIMWHVIARDFGQSADIECLLGISNEFIMLIEKDSKNVVFNCSCRDVIGWTSGLVSIKVFYERGECVLLSSVDNCAEDIREIVQRLVIVTRGCETVEMTLRRNGLGQLGFHVNFEGIVADVEPFGFAWKAGLRQGSRLVEICKVAVATLTHEQMIDLLRTSVTVKVVIIQPHDDGSPRRGCSELCRIPMVEYKLDSEGTPCEYKTPFRRNTTWHRVPTPALQPLSRASPIPGTPDRLPCQQLLQQAQAAIPRSTSFDRKLPDGTRSSPSNQSSSSDPGPGGSGPWRPQVGYDGCQSPLLLEHQGSGPLECDGAREREDTMEASRHPETKWHGPPSKVLGSYKERALQKDGSCKDSPNKLSHIGDKSCSSHSSSNTLSSNTSSNSDDKHFGSGDLMDPELLGLTYIKGASTDSGIDTAPCMPATILGPVHLAGSRSLIHSRAEQWADAADVSGPDDEPAKLYSVHGYASTISAGSAAEGSMGDLSEISSHSSGSHHSGSPSAHCSKSSGSLDSSKVYIVSHSSGQQVPGSMSKPYHRQGAVNKYVIGWKKSEGSPPPEEPEVTECPGMYSEMDVMSTATQHQTVVGDAVAETQHVLSKEDFLKLMLPDSPLVEEGRRKFSFYGNLSPRRSLYRTLSDESICSNRRGSSFGSSRSSVLDQALPNDILFSTTPPYHSTLPPRAHPAPSMGSLRNEFWFSDGSLSDKSKCADPGLMPLPDTATGLDWTHLVDAARAFEGLDSDEELGLLCHHTSYLDQRVASFCTLTDMQHGQDLEGAQELPLCVDPGSGKEFMDTTGERSPSPLTGKVNQLELILRQLQTDLRKEKQDKAVLQAEVQHLRQDNMRLQEESQTATAQLRKFTEWFFTTIDKKS

SEQ ID NO: 19177 - protein, 131 aa, Homo sapiens
VGRAWTMGPGGPLLSPSRGFLLCKTGWHSNRLLGDCGPHTPVSTALSFIAVGMAAPSMKERQVCWGARDEYWKCLDENLEDASQCKKLRSSFESSCPQQWIKYFDKRRDYLKFKEKFEAGQFEPSETTAKS

SEQ ID NO: 19178 - protein, 111 aa, Homo sapiens
LTVFLFPYLLFRLQSSLLISNIILANSFIAVGMAAPSMKERQVCWGARDEYWKCLDENLEDASQCKKLRSSFESSCPQQWIKYFDKRRDYLKFKEKFEAGQFEPSETTAKS

SEQ ID NO: 19179 - protein, 10 aa, Homo sapiens
LLKHFALNGC

SEQ ID NO: 19180 - protein, 110 aa, Homo sapiens
VHVCFILFIYLFETESCSVARAGMQWHNLSSPQPPLAGSSDPHVSASLVAGMTSTRQHAWLIFVFLVETGFHHVGQAGLQLLASSDLPTLASQSAGIAGVSQCTRPYVLE

SEQ ID NO: 19181 - protein, 73 aa, Homo sapiens
LTVKVPHTVDALWQTCGCGLPSPNATSSCSLLFWLLLSSSIVGCSNIRTCSGHSTGPAGVLVGQPLPCRSEAW

SEQ ID NO: 19182 - protein, 15 aa, Homo sapiens
VCDENASFSDLQSPL

SEQ ID NO: 19183 - protein, 90 aa, Homo sapiens
LLWRKSCCPEWRGSRMKEGMSNNSTTSISQARKAVEQLKMEACMDRVKVSQAAADLLAYCEAHVREDPLIIPVPASENPFREKKFFCTIL

SEQ ID NO: 19184 - protein, 101 aa, Homo sapiens
LTAAATASLCPLPRPVTRLPLSRGSRMKEGMSNNSTTSISQARKAVEQLKMEACMDRVKVSQAAADLLAYCEAHVREDPLIIPVPASENPFREKKFFCTIL

SEQ ID NO: 19185 - protein, 3808 aa, Homo sapiens
VVKDCSVMSTDSNSLAREFLTDVNRLCNAVVQRVEAREEEEEETHMATLGQYLVHGRGFLLLTKLNSIIDQALTCREELLTLLLSLLPLVWKIPVQEEKATDFNLPLSADIILTKEKNSSSQRSTQEKLHLEGSALSSQVSAKVNVFRKSRRQRKITHRYSVRDARKTQLSTSDSEANSDEKGIAMNKHRRPHLLHHFLTSFPKQDHPKAKLDRLATKEQTPPDAMALENSREIIPRQGSNTDILSEPAALSVISNMNNSPFDLCHVLLSLLEKVCKFDVTLNHNSPLAASVVPTLTEFLAGFGDCCSLSDNLESRVVSAGWTEEPVALIQRMLFRTVLHLLSVDVSTAEMMPENLRKNLTELLRAALKIRICLEKQPDPFAPRQKKTLQEVQEDFVFSKYRHRALLLPELLEGVLQILICCLQSAASNPFYFSQAMDLVQEFIQHHGFNLFETAVLQMEWLVLRDGVPPEASEHLKALINSVMKIMSTVKKVKSEQLHHSMCTRKRHRRCEYSHFMHHHRDLSGLLVSAFKNQVSKNPFEETADGDVYYPERCCCIAVCAHQCLRLLQQASLSSTCVQILSGVHNIGICCCMDPKSVIIPLLHAFKLPALKNFQQHILNILNKLILDQLGGAEISPKIKKAACNICTVDSDQLAQLEETLQGNLCDAELSSSLSSPSYRFQGILPSSGSEDLLWKWDALKAYQNFVFEEDRLHSIQIANHICNLIQKGNIVVQWKLYNYIFNPVLQRGVELAHHCQHLSVTSAQSHVCSHHNQCLPQDVLQIYVKTLPILLKSRVIRDLFLSCNGVSQIIELNCLNGIRSHSLKAFETLIISLGEQQKDASVPDIDGIDIEQKELSSVHVGTSFHHQQAYSDSPQSLSKFYAGLKEAYPKRRKTVNQDVHINTINLFLCVAFLCVSKEAESDRESANDSEDTSGYDSTASEPLSHMLPCISLESLVLPSPEHMHQAADIWSMCRWIYMLSSVFQKQFYRLGGFRVCHKLIFMIIQKLFRSHKEEQGKKEGDTSVNENQDLNRISQPKRTMKEDLLSLAIKSDPIPSELGSLKKSADSLGKLELQHISSINVEEVSATEAAPEEAKLFTSQESETSLQSIRLLEALLAICLHGARTSQQKMELELPNQNLSVESILFEMRDHLSQSKVIETQLAKPLFDALLRVALGNYSADFEHNDAMTEKSHQSAEELSSQPGDFSEEAEDSQCCSFKLLVEEEGYEADSESNPEDGETQDDGVDLKSETEGFSASSSPNDLLENLTQGEIIYPEICMLELNLLSASKAKLDVLAHVFESFLKIIRQKEKNVFLLMQQGTVKNLLGGFLSILTQDDSDFQACQRVLVDLLVSLMSSRTCSEELTLLLRIFLEKSPCTKILLLGILKIIESDTTMSPSQYLTFPLLHAPNLSNGVSSQKYPGILNSKAMGLLRRARVSRSKKEADRESFPHRLLSSWHIAPVHLPLLGQNCWPHLSEGFSVSLWFNVECIHEAESTTEKGKKIKKRNKSLILPDSSFDGTESDRPEGAEYINPGERLIEEGCIHIISLGSKALMIQVWADPHNATLIFRVCMDSNDDMKAVLLAQVESQENIFLPSKWQHLVLTYLQQPQGKRRIHGKISIWVSGQRKPDVTLDFMLPRKTSLSSDSNKTFCMIGHCLSSQEEFLQLAGKWDLGNLLLFNGAKVGSQEAFYLYACGPNHTSVMPCKYGKPVNDYSKYINKEILRCEQIRELFMTKKDVDIGLLIESLSVVYTTYCPAQYTIYEPVIRLKGQMKTQLSQRPFSSKEVQSILLEPHHLKNLQPTEYKTIQGILHEIGGTGIFVFLFARVVELSSCEETQALALRVILSLIKYNQQRVHELENCNGLSMIHQVLIKQKCIVGFYILKTLLEGCCGEDIIYMNENGEFKLDVDSNAIIQDVKLLEELLLDWKIWSKAEQGVWETLLAALEVLIRADHHQQMFNIKQLLKAQVVHHFLLTCQVLQEYKEGQLTPMPREVCRSFVKIIAEVLGSPPDLELLTIIFNFLLAVHPPTNTYVCHNPTNFYFSLHIDGKIFQEKVRSIMYLRHSSSGGRSLMSPGFMVISPSGFTASPYEGENSSNIIPQQMAAHMLRSRSLPAFPTSSLLTQSQKLTGSLGCSIDRLQNIADTYVATQSKKQNSLGSSDTLKKGKEDAFISSCESAKTVCEMEAVLSAQVSVSDVPKGVLGFPVVKADHKQLGAEPRSEDDSPGDESCPRRPDYLKGLASFQRSHSTIASLGLAFPSQNGSAAVGRWPSLVDRNTDDWENFAYSLGYEPNYNRTASAHSVTEDCLVPICCGLYELLSGVLLILPDVLLEDVMDKLIQADTLLVLVNHPSPAIQQGVIKLLDAYFARASKEQKDKFLKNRGFSLLANQLYLHRGTQELLECFIEMFFGRHIGLDEEFDLEDVRNMGLFQKWSVIPILGLIETSLYDNILLHNALLLLLQILNSCSKVADMLLDNGLLYVLCNTVAALNGLEKNIPMSEYKLLACDIQQLFIAVTIHACSSSGSQYFRVIEDLIVMLGYLQNSKNKRTQNMAVALQLRVLQAAMEFIRTTANHDSENLTDSLQSPSAPHHAVVQKRKSIAGPRKFPLAQTESLLMKMRSVANDELHVMMQRRMSQENPSQATETELAQRLQRLTVLAVNRIIYQEFNSDIIDILRTPENVTQSKTSVFQTEISEENIHHEQSSVFNPFQKEIFTYLVEGFKVSIGSSKASGSKQQWTKILWSCKETFRMQLGRLLVHILSPAHAAQERKQIFEIVHEPNHQEILRDCLSPSLQHGAKLVLYLSELIHNHQGELTEEELGTAELLMNALKLCGHKCIPPSASTKADLIKMIKEEQKKYETEEGVNKAAWQKTVNNNQQSLFQRLDSKSKDISKIAADITQAVSLSQGNERKKVIQHIRGMYKVDLSASRHWQELIQQLTHDRAVWYDPIYYPTSWQLDPTEGPNRERRRLQRCYLTIPNKYLLRDRQKSEDVVKPPLSYLFEDKTHSSFSSTVKDKAASESIRVNRRCISVAPSRETAGELLLGKCGMYFVEDNASDTVESSSLQGELEPASFSWTYEEIKEVHKRWWQLRDNAVEIFLTNGRTLLLAFDNTKVRDDVYHNILTNNLPNLLEYGNITALTNLWYTGQITNFEYLTHLNKHAGRSFNDLMQYPVFPFILADYVSETLDLNDLLIYRNLSKPIAVQYKEKEDRYVDTYKYLEEEYRKGAREDDPMPPVQPYHYGSHYSNSGTVLHFLVRMPPFTKMFLAYQDQSFDIPDRTFHSTNTTWRLSSFESMTDVKELIPEFFYLPEFLVNREGFDFGVRQNGERVNHVNLPPWARNDPRLFILIHRQALESDYVSQNICQWIDLVFGYKQKGKASVQAINVFHPATYFGMDVSAVEDPVQRRALETMIKTYGQTPRQLFHMAHVSRPGAKLNIEGELPAAVGLLVQFAFRETREQVKEITYPSPLSWIKGLKWGEYVGSPSAPVPVVCFSQPHGERFGSLQALPTRAICGLSRNFCLLMTYSKEQGVRSMNSTDIQWSAILSWGYADNILRLKSKQSEPPVNFIQSSQQYQVTSCAWVPDSCQLFTGSKCGVITAYTNRFTSSTPSEIEMETQIHLYGHTEEITSLFVCKPYSILISVSRDGTCIIWDLNRLCYVQSLAGHKSPVTAVSASETSGDIATVCDSAGGGSDLRLWTVNGDLVGHVHCREIICSVAFSNQPEGVSINVIAGGLENGIVRLWSTWDLKPVREITFPKSNKPIISLTFSCDGHHLYTANSDGTVIAWCRKDQQRLKQPMFYSFLSSYAAG

SEQ ID NO: 19186 - protein, 2008 aa, Homo sapiens
VVKDCSVMSTDSNSLAREFLTDVNRLCNAVVQRVEAREEEEEETHMATLGQYLVHGRGFLLLTKLNSIIDQALTCREELLTLLLSLLPLVWKIPVQEEKATDFNLPLSADIILTKEKNSSSQRSTQEKLHLEGSALSSQVSAKVNVFRKSRRQRKITHRYSVRDARKTQLSTSDSEANSDEKGIAMNKHRRPHLLHHFLTSFPKQDHPKAKLDRLATKEQTPPDAMALENSREIIPRQGSNTDILSEPAALSVISNMNNSPFDLCHVLLSLLEKVCKFDVTLNHNSPLAASVVPTLTEFLAGFGDCCSLSDNLESRVVSAGWTEEPVALIQRMLFRTVLHLLSVDVSTAEMMPENLRKNLTELLRAALKIRICLEKQPDPFAPRQKKTLQEVQEDFVFSKYRHRALLLPELLEGVLQILICCLQSAASNPFYFSQAMDLVQEFIQHHGFNLFETAVLQMEWLVLRDGVPPEASEHLKALINSVMKIMSTVKKVKSEQLHHSMCTRKRHRRCEYSHFMHHHRDLSGLLVSAFKNQVSKNPFEETADGDVYYPERCCCIAVCAHQCLRLLQQASLSSTCVQILSGVHNIGICCCMDPKSVIIPLLHAFKLPALKNFQQHILNILNKLILDQLGGAEISPKIKKAACNICTVDSDQLAQLEETLQGNLCDAELSSSLSSPSYRFQGILPSSGSEDLLWKWDALKAYQNFVFEEDRLHSIQIANHICNLIQKGNIVVQWKLYNYIFNPVLQRGVELAHHCQHLSVTSAQSHVCSHHNQCLPQDVLQIYVKTLPILLKSRVIRDLFLSCNGVSQIIELNCLNGIRSHSLKAFETLIISLGEQQKDASVPDIDGIDIEQKELSSVHVGTSFHHQQAYSDSPQSLSKFYAGLKEAYPKRRKTVNQDVHINTINLFLCVAFLCVSKEAESDRESANDSEDTSGYDSTASEPLSHMLPCISLESLVLPSPEHMHQAADIWSMCRWIYMLSSVFQKQFYRLGGFRVCHKLIFMIIQKLFRSHKEEQGKKEGDTSVNENQDLNRISQPKRTMKEDLLSLAIKSDPIPSELGSLKKSADSLGKLELQHISSINVEEVSATEAAPEEAKLFTSQESETSLQSIRLLEALLAICLHGARTSQQKMELELPNQNLSVESILFEMRDHLSQSKVIETQLAKPLFDALLRVALGNYSADFEHNDAMTEKSHQSAEELSSQPGDFSEEAEDSQCCSFKLLVEEEGYEADSESNPEDGETQDDGVDLKSETEGFSASSSPNDLLENLTQGEIIYPEICMLELNLLSASKAKLDVLAHVFESFLKIIRQKEKNVFLLMQQGTVKNLLGGFLSILTQDDSDFQACQRVLVDLLVSLMSSRTCSEELTLLLRIFLEKSPCTKILLLGILKIIESDTTMSPSQYLTFPLLHAPNLSNGVSSQKYPGILNSKAMGLLRRARVSRSKKEADRESFPHRLLSSWHIAPVHLPLLGQNCWPHLSEGFSVSLWFNVECIHEAESTTEKGKKIKKRNKSLILPDSSFDGTESDRPEGAEYINPGERLIEEGCIHIISLGSKALMIQVWADPHNATLIFRVCMDSNDDMKAVLLAQVESQENIFLPSKWQHLVLTYLQQPQGKRRIHGKISIWVSGQRKPDVTLDFMLPRKTSLSSDSNKTFCMIGHCLSSQEEFLQLAGKWDLGNLLLFNGAKVGSQEAFYLYACGPNHTSVMPCKYGKPVNDYSKYINKEILRCEQIRELFMTKKDVDIGLLIESLSVVYTTYCPAQYTIYEPVIRLKGQMKTQLSQRPFSSKEVQSILLEPHHLKNLQPTEYKTIQGILHEIGGTGIFVFLFARVVELSSCEETQALALRVILSLIKYNQQRVHELENCNGLSMIHQVLIKQKCIVGFYILKTLLEGCCGEDIIYMNENGEFKLDVDSNAIIQDVKLLEELLLDWKIWSKAEQGVWETLLAALEVLIRADHHQQMFNIKQLLKAQVVHHFLLTCQVLQEYKEGQLTPMPREMARSFRRKCGQSCT

SEQ ID NO: 19187 - protein, 1389 aa, Homo sapiens
VVKDCSVMSTDSNSLAREFLTDVNRLCNAVVQRVEAREEEEEETHMATLGQYLVHGRGFLLLTKLNSIIDQALTCREELLTLLLSLLPLVWKIPVQEEKATDFNLPLSADIILTKEKNSSSQRSTQEKLHLEGSALSSQVSAKVNVFRKSRRQRKITHRYSVRDARKTQLSTSDSEANSDEKGIAMNKHRRPHLLHHFLTSFPKQDHPKAKLDRLATKEQTPPDAMALENSREIIPRQGSNTDILSEPAALSVISNMNNSPFDLCHVLLSLLEKVCKFDVTLNHNSPLAASVVPTLTEFLAGFGDCCSLSDNLESRVVSAGWTEEPVALIQRMLFRTVLHLLSVDVSTAEMMPENLRKNLTELLRAALKIRICLEKQPDPFAPRQKKTLQEVQEDFVFSKYRHRALLLPELLEGVLQILICCLQSAASNPFYFSQAMDLVQEFIQHHGFNLFETAVLQMEWLVLRDGVPPEASEHLKALINSVMKIMSTVKKVKSEQLHHSMCTRKRHRRCEYSHFMHHHRDLSGLLVSAFKNQVSKNPFEETADGDVYYPERCCCIAVCAHQCLRLLQQASLSSTCVQILSGVHNIGICCCMDPKSVIIPLLHAFKLPALKNFQQHILNILNKLILDQLGGAEISPKIKKAACNICTVDSDQLAQLEETLQGNLCDAELSSSLSSPSYRFQGILPSSGSEDLLWKWDALKAYQNFVFEEDRLHSIQIANHICNLIQKGNIVVQWKLYNYIFNPVLQRGVELAHHCQHLSVTSAQSHVCSHHNQCLPQDVLQIYVKTLPILLKSRVIRDLFLSCNGVSQIIELNCLNGIRSHSLKAFETLIISLGEQQKDASVPDIDGIDIEQKELSSVHVGTSFHHQQAYSDSPQSLSKFYAGLKEAYPKRRKTVNQDVHINTINLFLCVAFLCVSKEAESDRESANDSEDTSGYDSTASEPLSHMLPCISLESLVLPSPEHMHQAADIWSMCRWIYMLSSVFQKQFYRLGGFRVCHKLIFMIIQKLFRSHKEEQGKKEGDTSVNENQDLNRISQPKRTMKEDLLSLAIKSDPIPSELGSLKKSADSLGKLELQHISSINVEEVSATEAAPEEAKLFTSQESETSLQSIRLLEALLAICLHGARTSQQKMELELPNQNLSVESILFEMRDHLSQSKVIETQLAKPLFDALLRVALGNYSADFEHNDAMTEKSHQSAEELSSQPGDFSEEAEDSQCCSFKLLVEEEGYEADSESNPEDGETQDDGVDLKSETEGFSASSSPNDLLENLTQGEIIYPEICMLELNLLSASKAKLDVLAHVFESFLKIIRQKEKNVFLLMQQGTVKNLLGGFLSILTQDDSDFQACQRVLVDLLVSLMSSRTCSEELTLLLRIFLEKSPCTRATDQKVQST

SEQ ID NO: 19188 - protein, 1538 aa, Homo sapiens
VVKDCSVMSTDSNSLAREFLTDVNRLCNAVVQRVEAREEEEEETHMATLGQYLVHGRGFLLLTKLNSIIDQALTCREELLTLLLSLLPLVWKIPVQEEKATDFNLPLSADIILTKEKNSSSQRSTQEKLHLEGSALSSQVSAKVNVFRKSRRQRKITHRYSVRDARKTQLSTSDSEANSDEKGIAMNKHRRPHLLHHFLTSFPKQDHPKAKLDRLATKEQTPPDAMALENSREIIPRQGSNTDILSEPAALSVISNMNNSPFDLCHVLLSLLEKVCKFDVTLNHNSPLAASVVPTLTEFLAGFGDCCSLSDNLESRVVSAGWTEEPVALIQRMLFRTVLHLLSVDVSTAEMMPENLRKNLTELLRAALKIRICLEKQPDPFAPRQKKTLQEVQEDFVFSKYRHRALLLPELLEGVLQILICCLQSAASNPFYFSQAMDLVQEFIQHHGFNLFETAVLQMEWLVLRDGVPPEASEHLKALINSVMKIMSTVKKVKSEQLHHSMCTRKRHRRCEYSHFMHHHRDLSGLLVSAFKNQVSKNPFEETADGDVYYPERCCCIAVCAHQCLRLLQQASLSSTCVQILSGVHNIGICCCMDPKSVIIPLLHAFKLPALKNFQQHILNILNKLILDQLGGAEISPKIKKAACNICTVDSDQLAQLEETLQGNLCDAELSSSLSSPSYRFQGILPSSGSEDLLWKWDALKAYQNFVFEEDRLHSIQIANHICNLIQKGNIVVQWKLYNYIFNPVLQRGVELAHHCQHLSVTSAQSHVCSHHNQCLPQDVLQIYVKTLPILLKSRVIRDLFLSCNGVSQIIELNCLNGIRSHSLKAFETLIISLGEQQKDASVPDIDGIDIEQKELSSVHVGTSFHHQQAYSDSPQSLSKFYAGLKEAYPKRRKTVNQDVHINTINLFLCVAFLCVSKEAESDRESANDSEDTSGYDSTASEPLSHMLPCISLESLVLPSPEHMHQAADIWSMCRWIYMLSSVFQKQFYRLGGFRVCHKLIFMIIQKLFRSHKEEQGKKEGDTSVNENQDLNRISQPKRTMKEDLLSLAIKSDPIPSELGSLKKSADSLGKLELQHISSINVEEVSATEAAPEEAKLFTSQESETSLQSIRLLEALLAICLHGARTSQQKMELELPNQNLSVESILFEMRDHLSQSKVIETQLAKPLFDALLRVALGNYSADFEHNDAMTEKSHQSAEELSSQPGDFSEEAEDSQCCSFKLLVEEEGYEADSESNPEDGETQDDGVDLKSETEGFSASSSPNDLLENLTQGEIIYPEICMLELNLLSASKAKLDVLAHVFESFLKIIRQKEKNVFLLMQQGTVKNLLGGFLSILTQDDSDFQACQRVLVDLLVSLMSSRTCSEELTLLLRIFLEKSPCTKILLLGILKIIESDTTMSPSQYLTFPLLHAPNLSNGVSSQKYPGILNSKAMGLLRRARVSRSKKEADRESFPHRLLSSWHIAPVHLPLLGQNCWPHLSEGFSVSLWFNVECIHEAESTTEKGKKIKKRNKSLILPDSSFDGTGMMTGLSDLYTKIVFRL

SEQ ID NO: 19189 - protein, 80 aa, Homo sapiens
VVKDCSVMSTDSNSLAREFLTDVNRLCNAVVQRVEAREEEEEETHMATLGQYLVHGRGFLLLTKLNSIIDQRWGFTVLTS

SEQ ID NO: 19190 - protein, 77 aa, Homo sapiens
LFPCLPRVTSEYSSIFPCHLMGFGLFDSTVCVPQCQGNNPTLSQLNRSQDLTANKRPSLLNSMEETSFVAATWEDGC

SEQ ID NO: 19191 - protein, 38 aa, Homo sapiens
LTLARQPASIFSQSVASSMANSRELRSQTQHRHGPQDD

SEQ ID NO: 19192 - protein, 55 aa, Homo sapiens
LLTNSLAQKMSTGIMEYKKTTKAMKKRRMFYLHPISKPLLSCYCMSLQAQYRASS

SEQ ID NO: 19193 - protein, 579 aa, Homo sapiens
VRICGGEGISFLSNIISTLHLSLLVCFFSTDVTDLEPAGLRGKDLIRFMCPKGYEDSMEFPDHSRHLLQCLSEQRHQGFLCDCTVLVGDAQFRAHRAVLASCSMYFHLFYKDQLDKRDIVHLNSDIVTAPAFALLLEFMYEGKLQFKDLPIEDVLAAASYLHMYDIVKVCKKKLKEKATTEADSTKKEEDASSCSDKVESLSDGSSHIAGDLPSDEDEGEDEKLNILPSKRDLAAEPGNMWMRLPSDSAGIPQAGGEAEPHATAAGKTVASPCSSTESLSQRSVTSVRDSADVDCVLDLSVKSSLSGVENLNSSYFSSQDVLRSNLVQVKVEKEASCDESDVGTNDYDMEHSTVKESVSTNNRVQYEPAHLAPLREDSVLRELDREDKASDDEMMTPESERVQVEGGMESSLLPYVSNILSPAGQIFMCPLCNKVFPSPHILQIHLSTHFREQDGIRSKPAADVNVPTCSLCGKTFSCMYTLKRHERTHSGEKPYTCTQCGKSFQYSHNLSRHAVVHTREKPHACKWCERRFTQSGDLYRHIRKFHCELVNSLSVKSEALSLPTVRDWTLEDSSQELWK

SEQ ID NO: 19194 - protein, 12 aa, Homo sapiens
MFHVGYPAWGSL

SEQ ID NO: 19195 - protein, 33 aa, Homo sapiens
LFLRLASGETFLPWLRTHSWIEPTGELSVWTEA

SEQ ID NO: 19196 - protein, 10 aa, Homo sapiens
LDRANRRTFW

SEQ ID NO: 19197 - protein, 981 aa, Homo sapiens
LQMKMASTRCKLARYLEDLEDVDLKKFKMHLEDYPPQKGCIPLPRGQTEKADHVDLATLMIDFNGEEKAWAMAVWIFAAINRRDLYEKAKRDEPKWGSDNARVSNPTVICQEDSIEEEWMGLLEYLSRISICKMKKDYRKKYRKYVRSRFQCIEDRNARLGESVSLNKRYTRLRLIKEHRSQQEREQELLAIGKTKTCESPVSPIKMELLFDPDDEHSEPVHTVVFQGAAGIGKTILARKMMLDWASGTLYQDRFDYLFYIHCREVSLVTQRSLGDLIMSCCPDPNPPIHKIVRKPSRILFLMDGFDELQGAFDEHIGPLCTDWQKAERGDILLSSLIRKKLLPEASLLITTRPVALEKLQHLLDHPRHVEILGFSEAKRKEYFFKYFSDEAQARAAFSLIQENEVLFTMCFIPLVCWIVCTGLKQQMESGKSLAQTSKTTTAVYVFFLSSLLQPRGGSQEHGLCAHLWGLCSLAADGIWNQKILFEESDLRNHGLQKADVSAFLRMNLFQKEVDCEKFYSFIHMTFQEFFAAMYYLLEEEKEGRTNVPGSRLKLPSRDVTVLLENYGKFEKGYLIFVVRFLFGLVNQERTSYLEKKLSCKISQQIRLELLKWIEVKAKAKKLQIQPSQLELFYCLYEMQEEDFVQRAMDYFPKIEINLSTRMDHMVSSFCIENCHRVESLSLGFLHNMPKEEEEEEKEGRHLDMVQCVLPSSSHAACSHGLVNSHLTSSFCRGLFSVLSTSQSLTELDLSDNSLGDPGMRVLCETLQHPGCNIRRLWLGRCGLSHECCFDISLVLSSNQKLVELDLSDNALGDFGIRLLCVGLKHLLCNLKKLWLVNSGLTSVCCSALSSVLSTNQNLTHLYLRGNTLGDKGIKLLCEGLLHPDCKLQVLELDNCNLTSHCCWDLSTLLTSSQSLRKLSLGNNDLGDLGVMMFCEVLKQQSCLLQNLGLSEMYFNYETKSALETLQEEKPELTVVFEPSW

SEQ ID NO: 19198 - protein, 1038 aa, Homo sapiens
LQMKMASTRCKLARYLEDLEDVDLKKFKMHLEDYPPQKGCIPLPRGQTEKADHVDLATLMIDFNGEEKAWAMAVWIFAAINRRDLYEKAKRDEPKWGSDNARVSNPTVICQEDSIEEEWMGLLEYLSRISICKMKKDYRKKYRKYVRSRFQCIEDRNARLGESVSLNKRYTRLRLIKEHRSQQEREQELLAIGKTKTCESPVSPIKMELLFDPDDEHSEPVHTVVFQGAAGIGKTILARKMMLDWASGTLYQDRFDYLFYIHCREVSLVTQRSLGDLIMSCCPDPNPPIHKIVRKPSRILFLMDGFDELQGAFDEHIGPLCTDWQKAERGDILLSSLIRKKLLPEASLLITTRPVALEKLQHLLDHPRHVEILGFSEAKRKEYFFKYFSDEAQARAAFSLIQENEVLFTMCFIPLVCWIVCTGLKQQMESGKSLAQTSKTTTAVYVFFLSSLLQPRGGSQEHGLCAHLWGLCSLAADGIWNQKILFEESDLRNHGLQKADVSAFLRMNLFQKEVDCEKFYSFIHMTFQEFFAAMYYLLEEEKEGRTNVPGSRLKLPSRDVTVLLENYGKFEKGYLIFVVRFLFGLVNQERTSYLEKKLSCKISQQIRLELLKWIEVKAKAKKLQIQPSQLELFYCLYEMQEEDFVQRAMDYFPKIEINLSTRMDHMVSSFCIENCHRVESLSLGFLHNMPKEEEEEEKEGRHLDMVQCVLPSSSHAACSHGLVNSHLTSSFCRGLFSVLSTSQSLTELDLSDNSLGDPGMRVLCETLQHPGCNIRRLWLGRCGLSHECCFDISLVLSSNQKLVELDLSDNALGDFGIRLLCVGLKHLLCNLKKLWLVSCCLTSACCQDLASVLSTSHSLTRLYVGENALGDSGVAILCEKAKNPQCNLQKLGLVNSGLTSVCCSALSSVLSTNQNLTHLYLRGNTLGDKGIKLLCEGLLHPDCKLQVLELDNCNLTSHCCWDLSTLLTSSQSLRKLSLGNNDLGDLGVMMFCEVLKQQSCLLQNLGLSEMYFNYETKSALETLQEEKPELTVVFEPSW

SEQ ID NO: 19199 - protein, 151 aa, Homo sapiens
LSFYRLVNSGLTSVCCSALSSVLSTNQNLTHLYLRGNTLGDKGIKLLCEGLLHPDCKLQVLELDNCNLTSHCCWDLSTLLTSSQSLRKLSLGNNDLGDLGVMMFCEVLKQQSCLLQNLGLSEMYFNYETKSALETLQEEKPELTVVFEPSW

SEQ ID NO: 19200 - protein, 30 aa, Homo sapiens
LPDASVLRSLQLGALRWRELRSIQAKTTAL

SEQ ID NO: 19201 - protein, 165 aa, Homo sapiens
LGFTASRWLCWRIPIVLLDVEPEIVWNAWCFFQFLDANLSCLGENQKKPKKGNPDEERKRQEMTTFERKLQDQDKKSQEVSSTSNQENENGSGSEEVCYTVINHIPHQRSSLSSNDDGYENIDSLTRKVRQFRERSETEYALLRTSVSRPCSCTHEHDYEVVFPH

SEQ ID NO: 19202 - protein, 145 aa, Homo sapiens
LGFTASRWLCWRIPIVLLDVEPEIVWNAWCFFQFLDANLRQEMTTFERKLQDQDKKSQEVSSTSNQENENGSGSEEVCYTVINHIPHQRSSLSSNDDGYENIDSLTRKVRQFRERSETEYALLRTSVSRPCSCTHEHDYEVVFPH

SEQ ID NO: 19203 - protein, 175 aa, Homo sapiens
VTPSALAPHPLQLPATAAEFPHPHAERTRKAPWGRLSGKPAAAGRGRTWSCLGENQKKPKKGNPDEERKRQEMTTFERKLQDQDKKSQEVSSTSNQENENGSGSEEVCYTVINHIPHQRSSLSSNDDGYENIDSLTRKVRQFRERSETEYALLRTSVSRPCSCTHEHDYEVVFPH

SEQ ID NO: 19204 - protein, 200 aa, Homo sapiens
LQPPLNSLIPTLRGRERRPGEGSRESPQPLDAGGHGGFTASRWLCWRIPIVLLDVEPEIVWNAWCFFQFLDANLSCLGENQKKPKKGNPDEERKRQEMTTFERKLQDQDKKSQEVSSTSNQENENGSGSEEVCYTVINHIPHQRSSLSSNDDGYENIDSLTRKVRQFRERSETEYALLRTSVSRPCSCTHEHDYEVVFPH

SEQ ID NO: 19205 - protein, 31 aa, Homo sapiens
VGTARCLRRQSATGFHFKRDPFACGMSSSMG

SEQ ID NO: 19206 - protein, 20 aa, Homo sapiens
LRGFHFKRDPFACGMSSSMG

SEQ ID NO: 19207 - protein, 654 aa, Homo sapiens
LRPTAEVPGVPSTRVHTAAGMAHYNFKKITVVPSAKDFIDLTLSKTQRKTPTVIHKHYQIHRIRHFYMRKVKFTQQNYHDRLSQILTDFPKLDDIHPFYADLMNILYDKDHYKLALGQINIAKNLVDNVAKDYVRLMKYGDSLYRCKQLKRAALGRMCTVIKRQKQSLEYLEQVRQHLSRLPTIDPNTRTLLLCGYPNVGKSSFINKVTRADVDVQPYAFTTKSLFVGHMDYKYLRWQVVDTPGILDHPLEDRNTIEMQAITALAHLRAAVLYVMDLSEQCGHGLREQLELFQNIRPLFINKPLIVVANKCDVKRIAELSEDDQKIFTDLQSEGFPVIETSTLTEEGVIKVKTEACDRLLAHRVETKMKGNKVNEVLNRLHLAIPTRRDDKERPPFIPEGVVARRKRMETEESRKKRERDLELEMGDDYILDLQKYWDLMNLSEKHDKIPEIWEGHNIADYIDPAIMKKLEELEKEEELRTAAGEYDSVSESEDEEMLEIRQLAKQIREKKKLKILESKEKNTQGPRMPRTAKKVQRTVLEKEMRSLGVDMDDKDDAHYAVQARRSRSITRKRKREDSAPPSSVARSGSCSRTPRDVSGLRDVKMVKKAKTMMKNAQKKMNRLGKKGEADRHVFDMKPKHLLSGKRKAGKKDRR

SEQ ID NO: 19208 - protein, 52 aa, Homo sapiens
LMKYGDSLYRCKQLKRAALGRMCTVIKRQKQSLEYLEQGACHASAGTVLASC

SEQ ID NO: 19209 - protein, 339 aa, Homo sapiens
VGRVDPLKGARARGHGSGSRCFARLPLSQAREVAPPGEAWRDCVVKRVRAPIGRAMWRGLALARAIGCAARGRGQWAVRAADCAQSGRHPGPAVVCGRRLISVLEQIRHFVMMPEINTNHLDKQQVQLLAEMCILIDENDNKIGAETKKNCHLNENIEKGLLHRAFSVFLFNTENKLLLQQRSDAKITFPGCFTNTCCSHPLSNPAELEESDALGVRRAAQRRLKAELGIPLEEVPPEEINYLTRIHYKAQSDGIWGEHEIDYILLVRKNVTLNPDPNEIKSYCYVSKEELKELLKKAASGEIKITPWFKIIAATFLFKWWDNLNHLNQFVDHEKIYRM

SEQ ID NO: 19210 - protein, 84 aa, Homo sapiens
LPLSQAREVAPPGEAWRDCVVKRVRAPIGRAMWRGLALARAIGCAARGRGQWAVRAADCAQSGRHPGPAVVCGRRLIRIIASSF

SEQ ID NO: 19211 - protein, 69 aa, Homo sapiens
LISVLEQIRHFVMMPEINTNHLDKQQVQLLAEMCILIDENDNKIGAETKKNCHLNENIEKGAALKQSFL

SEQ ID NO: 19212 - protein, 126 aa, Homo sapiens
VRSRRGGLDSWGWRRWSPELEGGRAFPGCGGRPRPVEGGGVSRGVRDVAILCQRKRSSSAHSHLRFRNSWNWKPSRRRLRVASLPLENSETSVDSIVRNTSVTTPASPCRVHACDAGAYTCVRARG

SEQ ID NO: 19213 - protein, 52 aa, Homo sapiens
MNAAVRAVVRMGIYVGAKVYFIYEGYQGMVDGGSNIAEADWESVSSILQVVL

SEQ ID NO: 19214 - protein, 620 aa, Homo sapiens
LAGIVPVPAGLPGTRPPPHPLLRAMEPELAAQKQPRPRRRSRRASGLSTEGATGPSADTSGSELDGRCSLRRGSSFTFLTPGPNWDFTLKRKRREKDDDVVSLSSLDLKEPSNKRVRPLARVTSLANLISPVRNGAVRRFGQTIQSFTLRGDHRSPASAQKFSSRSTVPTPAKRRSSALWSEMLDITMKESLTTREIRRQEAIYEMSRGEQDLIEDLKLARKAYHDPMLKLSIMSEEELTHIFGDLDSYIPLHEDLLTRIGEATKPDGTVEQIGHILVSWLPRLNAYRGYCSNQLAAKALLDQKKQDPRVQDFLQRCLESPFSRKLDLWSFLDIPRSRLVKYPLLLKEILKHTPKEHPDVQLLEDAILIIQGVLSDINLKKGESECQYYIDKLEYLDEKQRDPRIEASKVLLCHGELRSKSGHKLYIFLFQDILVLTRPVTRNERHSYQVYRQPIPVQELVLEDLQDGDVRMGGSFRGAFSNSEKAKNIFRIRFHDPSPAQSHTLQANDVFHKQQWFNCIRAAIAPFQSAGSPPELQGLPELHEECEGNHPSARKLTAQRRASTVSSVTQVEVDENAYRCGSGMQMAEDSKSLKTHQTQPGIRRARDKALSGGKRKETLV

SEQ ID NO: 19215 - protein, 26 aa, Homo sapiens
MGTWLPRVAELWEEKPVCLCIASLQR

SEQ ID NO: 19216 - protein, 138 aa, Homo sapiens
VWIDWKGLREYLGSMVAHDETGGLLPIKRTIRVLDVNNQSFREQEEPSNKRVRPLARVTSLANLISPVRNGAVRRFGQTIQSFTLRGDHRSPASAQKFSSRSTVPTPAKRRSSALWSEMLDITMKESLTTREIRRQEE

SEQ ID NO: 19217 - protein, 556 aa, Homo sapiens
VWIDWKGLREYLGSMVAHDETGGLLPIKRTIRVLDVNNQSFREQEEPSNKRVRPLARVTSLANLISPVRNGAVRRFGQTIQSFTLRGDHRSPASAQKFSSRSTVPTPAKRRSSALWSEMLDITMKESLTTREIRRQEAIYEMSRGEQDLIEDLKLARKAYHDPMLKLSIMSEEELTHIFGDLDSYIPLHEDLLTRIGEATKPDGTVEQIGHILVSWLPRLNAYRGYCSNQLAAKALLDQKKQDPRVQDFLQRCLESPFSRKLDLWSFLDIPRSRLVKYPLLLKEILKHTPKEHPDVQLLEDAILIIQGVLSDINLKKGESECQYYIDKLEYLDEKQRDPRIEASKVLLCHGELRSKSGHKLYIFLFQDILVLTRPVTRNERHSYQVYRQPIPVQELVLEDLQDGDVRMGGSFRGAFSNSEKAKNIFRIRFHDPSPAQSHTLQANDVFHKQQWFNCIRAAIAPFQSAGSPPELQGLPELHEECEGNHPSARKLTAQRRASTVSSVTQVEVDENAYRCGSGMQMAEDSKSLKTHQTQPGIRRARDKALSGGKRKETLV

SEQ ID NO: 19218 - protein, 47 aa, Homo sapiens
LWSEMLDITMKESLTTREIRRQEAIYEMSRGEQDLIEDLKLARKVSK

SEQ ID NO: 19219 - protein, 152 aa, Homo sapiens
LLKEILKHTPKEHPDVQLLEDAILIIQGVLSDINLKKGESECQYYIDKLEYLDEKQRDPRIEASKVLLCHGELRSKSGHKLYIFLFQDILVLTRPVTRNERHSYQVYRQPIPVQELVLEDLQDGDVRMGGSFRGAFSNSEKGKMQAFNNLKK

SEQ ID NO: 19220 - protein, 112 aa, Homo sapiens
LKNILICLCIFHRVDSTAHKKNIMLKSFQSANIIELLHYHQCDSRSSTKAEILKCLLNLQIQHIDARFAVLLTDKPTIPREVFENSGILVTDVNNFIENIEKIAAPFRSSYW

SEQ ID NO: 19221 - protein, 10 aa, Homo sapiens
LILSERMHSL

SEQ ID NO: 19222 - protein, 36 aa, Homo sapiens
VGRGAGQGEGEKSSRHLALPFFPSHSQGRADKALMR

SEQ ID NO: 19223 - protein, 33 aa, Homo sapiens
MPEGGCAPILLAPREAPVFRAVAPASADTAASS

SEQ ID NO: 19224 - protein, 56 aa, Homo sapiens
MARENGESSSSWKKQAEDIKKIFEFKETLGTIKHENIVALEDIYESPNHLYLVMQL

SEQ ID NO: 19225 - protein, 105 aa, Homo sapiens
LKQQKQRMLEMRRRKSEEIQKRFLQSSSEVESPAVPSSSRQPPAQPPRTGSEFPRLEGAPATMTPKLGRGVLEGDDVLFYDESPPPRPKLSALAEAKKVTGISSL

SEQ ID NO: 19226 - protein, 224 aa, Homo sapiens
LEGAPATMTPKLGRGVLEGDDVLFYDESPPPRPKLSALAEAKKLAAITKLRAKGQVLTKTNPNSIKKKQKDPQDILEVKERVEKNTMFSSQAEDELEPARKKRREQLAYLESEEFQKILKAKSKHTGILKEAEAEMQERYFEPLVKKEQMEEKMRNIREVKCRVVTCKTVGEGGGCSNPWALCGAFVTRQHVENLWDLGPYLVMCQLIRLESKGRRWPRTRLPA

SEQ ID NO: 19227 - protein, 111 aa, Homo sapiens
LKEAEAEMQERYFEPLVKKEQMEEKMRNIREVKCRVVTCKTCAYTHFKLLETCVSEQHEYHWHDGVKRFFKCPCGNRSISLDRLPNKHCRYENHLELFVPRGDFHLFFQSL

SEQ ID NO: 19228 - protein, 69 aa, Homo sapiens
LHVAALPQSQRSSTPSSEIGATPPSSPHHILTWQTGSYNDSCFLDSSLYPELADVQWYGQEKAKPGTLV

SEQ ID NO: 19229 - protein, 63 aa, Homo sapiens
LNNWSISGSRLNEAERGCPSMCLPAGRRAAVCAAGVASTSAPPHPAVPGWSLEFPGWKLGNPQ

SEQ ID NO: 19230 - protein, 7 aa, Homo sapiens
MCAHIRC

SEQ ID NO: 19231 - protein, 16 aa, Homo sapiens
LKSVAGHQYPLCVKNR

SEQ ID NO: 19232 - protein, 68 aa, Homo sapiens
LLGPSPRSPPLLPLLEGKSLPSWGLPRPNQQRPTEGGELEKNLFCSNIPMETVGKPVLQRKEVFRGSS

SEQ ID NO: 19233 - protein, 107 aa, Homo sapiens
LSARSSRSSPLTRRLPCWVPLPGLHLSSLSWKGKVCQAGDCHDQTNKGRPKAENLKRTCFVPVKEPAGKSTPTLPGFELESCVCVYIPMETVGKPVLQRKEVFRGSS

SEQ ID NO: 19234 - protein, 40 aa, Homo sapiens
LTRQQDSCMGIGDHGSAAGARLSSRPADDDGGPPMSSTSS

SEQ ID NO: 19235 - protein, 20 aa, Homo sapiens
LSQLCRGTDGRKLEMLLRGR

SEQ ID NO: 19236 - protein, 19 aa, Homo sapiens
LDHSPQTRHLPTSGTRQSR

SEQ ID NO: 19237 - protein, 27 aa, Homo sapiens
LGLQDDAHSKIFCFISVFCNRWPALLP

SEQ ID NO: 19238 - protein, 38 aa, Homo sapiens
MVRLGCLTPRYLILQKGTHLSAAKKTLTRLRAVLLDAL

SEQ ID NO: 19239 - protein, 15 aa, Homo sapiens
VGSPHPREAVLLDAL

SEQ ID NO: 19240 - protein, 68 aa, Homo sapiens
LTCSRIWFDFPTIWVDALPVTVAVPIRQMKGSAPHVSWNDGPVFRDLTEPTSKTSENRKKEEDTGINS

SEQ ID NO: 19241 - protein, 95 aa, Homo sapiens
LLMLFRRGLAPQNKPELQKVMEKRKRDQVIKQKEEEAQKKKSDLEIELLKRQQKLEQLELEKQKLQEEQENAPEFVKVKGNLRRTGQEVAQAQES

SEQ ID NO: 19242 - protein, 155 aa, Homo sapiens
LHLQPDSPPEDIDHKDSYLITRSIMAEPDYIEDDNPELIRPQKLINPVKTSRNHQDLHRELLMNQKRGLAPQNKPELQKVMEKRKRDQVIKQKEEEAQKKKSDLEIELLKRQQKLEQLELEKQKLQEEQENAPEFVKVKGNLRRTGQEVAQAQES

SEQ ID NO: 19243 - protein, 177 aa, Homo sapiens
LLTSRGADFCTDKYISPVLPARSLGLEDSPPEDIDHKDSYLITRSIMAEPDYIEDDNPELIRPQKLINPVKTSRNHQDLHRELLMNQKRGLAPQNKPELQKVMEKRKRDQVIKQKEEEAQKKKSDLEIELLKRQQKLEQLELEKQKLQEEQENAPEFVKVKGNLRRTGQEVAQAQES

SEQ ID NO: 19244 - protein, 197 aa, Homo sapiens
LACGPGRRPRSRPRAASGRRRAVGPLGAAAGAGSELGGSRAPLCARRDSPPEDIDHKDSYLITRSIMAEPDYIEDDNPELIRPQKLINPVKTSRNHQDLHRELLMNQKRGLAPQNKPELQKVMEKRKRDQVIKQKEEEAQKKKSDLEIELLKRQQKLEQLELEKQKLQEEQENAPEFVKVKGNLRRTGQEVAQAQES

SEQ ID NO: 19245 - protein, 323 aa, Homo sapiens
LENFLAPFELCNDSLQVMSTWKARLTKRLKSPSRSMHPFPCSALLACFGNTRESASFNQSGVADTHSTVRVQPVAKAGRQPRHPSAEGAPEKRQDSSTHAERNGSANRNSSHRTAAQPAETPEDVPGSLDDGADCEAVVFHASIPRPSIIDTPKEEEFREEPKCLELEQKMTSDSPPEDIDHKDSYLITRSIMAEPDYIEDDNPELIRPQKLINPVKTSRNHQDLHRELLMNQKRGLAPQNKPELQKVMEKRKRDQVIKQKEEEAQKKKSDLEIELLKRQQKLEQLELEKQKLQEEQENAPEFVKVKGNLRRTGQEVAQAQES

SEQ ID NO: 19246 - protein, 73 aa, Homo sapiens
LQPDSPPEDIDHKDSYLITRSIMAEPDYIEDDNPELIRPQKLINPVKTSRNHQDLHRELLMNQKRILVWLEIH

SEQ ID NO: 19247 - protein, 106 aa, Homo sapiens
LGGSRAPLCARRDSPPEDIDHKDSYLITRSIMAEPDYIEDDNPELIRPQKLINPVKTSRNHQDLHRELLMNQKRTGLPLREADPLQVAITVVASSASRLLQSRVPF

SEQ ID NO: 19248 - protein, 26 aa, Homo sapiens
MQLKLILWIEKLLELLYKVFYSFKIK

SEQ ID NO: 19249 - protein, 26 aa, Homo sapiens
MPVIRRMQLKLILWIEKLLELLYKVF

SEQ ID NO: 19250 - protein, 28 aa, Homo sapiens
LPRPGLRRMQLKLILWIEKLLELLYKVF

SEQ ID NO: 19251 - protein, 31 aa, Homo sapiens
LLFCIALAARRMQLKLILWIEKLLELLYKVF

SEQ ID NO: 19252 - protein, 47 aa, Homo sapiens
LGLRSLPISTEPENPGQALNSPETLRRMQLKLILWIEKLLELLYKVF

SEQ ID NO: 19253 - protein, 40 aa, Homo sapiens
LYRQVHFTSAASTFSWSGRRMQLKLILWIEKLLELLYKVF

SEQ ID NO: 19254 - protein, 41 aa, Homo sapiens
VLAVDLEKGGHQNKLESWTGRMQLKLILWIEKLLELLYKVF

SEQ ID NO: 19255 - protein, 32 aa, Homo sapiens
MPRAGAENDIRRMQLKLILWIEKLLELLYKVF

SEQ ID NO: 19256 - protein, 18 aa, Homo sapiens
LGLRSLPISTEVRLGQSL

SEQ ID NO: 19257 - protein, 410 aa, Homo sapiens
LFPGKLPRPGRRGRPAGQPDGDVAVPRPPRPQLRDARCGRLSSPRPLTRLPARPAPAAEDMEYYLVKWKGWPDSTNTWEPLQNLKCPLLLQQFSNDKHNYLSQVKKGKAITPKDNNKTLKPAIAEYIVKKAKQRIALQRWQDELNRRKNHKGMIFVENTVDLEGPPSDFYYINEYKPAPGISLVNEATFGCSCTDCFFQKCCPAEAGVLLAYNKNQQIKIPPGTPIYECNSRCQCGPDCPNRIVQKGTQYSLCIFRTSNGRGWGVKTLVKIKRMSFVMEYVGEVITSEEAERRGQFYDNKGITYLFDLDYESDEFTVDAARYGNVSHFVNHSCDPNLQVFNVFIDNLDTRLPRIALFSTRTINAGEELTFDYQMKGSGDISSDSIDHSPAKKRVRTVCKCGAVTCRGYLN

SEQ ID NO: 19258 - protein, 233 aa, Homo sapiens [sequence omitted]

SEQ ID NO: 19259 - protein, 165 aa, Homo sapiens
MRNCFRLQEEMLQREEAENTLQSFRQDVDNASLARLDLERKVESLQEEIAFLKKLHEEEIQELQAQIQEQHVQIDVDVSKPDLTAALRDVRQQYESVAAKNLQEAEEWYKSKFADLSEAANRNNDALRQAKQESTEYRRQVQSLTCEVDALKGTVSTNPAVKEGK

SEQ ID NO: 19260 - protein, 37 aa, Homo sapiens
MLADPRSFDSNAFTLLLRAAFQSLLDAQADEAVLALI

SEQ ID NO: 19261 - protein, 137 aa, Homo sapiens
LARIGNTTVISILTQVIEDLVRGEFLQLGSKENENERFAHYLEKTFKKTASLIANSCKAVSVLGCPDPVVHEIAYQYGKNVGIAFQLIDDVLDFTSCSDQMGKPTSADLKLGLATGPVLFACQQVHCQGKTGSCCKH

SEQ ID NO: 19262 - protein, 153 aa, Homo sapiens
MIFMDTPRNNCIQKQVSVLGCPDPVVHEIAYQYGKNVGIAFQLIDDVLDFTSCSDQMGKPTSADLKLGLATGPVLFACQQFPEMNAMIMRRFSLPGDVDRARQYVLQSDGVQQTTYLAQQYCHEAIREISKLRPSPERDALIQLSEIVLTRDK

SEQ ID NO: 19263 - protein, 77 aa, Homo sapiens
LWQLFPEMNAMIMRRFSLPGDVDRARQYVLQSDGVQQTTYLAQQYCHEAIREISKLRPSPERDALIQLSEIVLTRDK

SEQ ID NO: 19264 - protein, 902 aa, Homo sapiens
LNPVGGSGCSRRGSVCGAAVCCPAMDPTAGSKKEPGGGAATEEGVNRIAVPKPPSIEEFSIVKPISRGAFGKVYLGQKGGKLYAVKVVKKADMINKNMTHQVQAERDALALSKSPFIVHLYYSLQSANNVYLVMEYLIGGDVKSLLHIYGYFDEEMAVKYISEVALALDYLHRHGIIHRDLKPDNMLISNEGHIKLTDFGLSKVTLNRDINMMDILTTPSMAKPRQDYSRTPGQVLSLISSLGFNTPIAEKNQDPANILSACLSETSQLSQGLVCPMSVDQKDTTPYSSKLLKSCLETVASNPGMPVKCLTSNLLQSRKRLATSSASSQSHTFISSVESECHSSPKWEKDCQESDEALGPTMMSWNAVEKLCAKSANAIETKGFNKKDLELALSPIHNSSALPTTGRSCVNLAKKCFSGEVSWEAVELDVNNINMDTDTSQLGFHQSNQWAVDSGGISEEHLGKRSLKRNFELVDSSPCKKIIQNKKTCVEYKHNEMTNCYTNQNTGLTVEVQDLKLSVHKSQQNDCANKENIVNSFTDKQQTPEKLPIPMIAKNLMCELDEDCEKNSKRDYLSSSFLCSDDDRASKNISMNSDSSFPGISIMESPLESQPLDSDRSIKESSFEESNIEDPLIVTPDCQEKTSPKGVENPAVQESNQKMLGPPLEVLKTLASKRNAVAFRSFNSHINASNNSEPSRMNMTSLDAMDISCAYSGSYPMAITPTQKRRSCMPHQTPNQIKSGTPYRTPKSVRRGVAPVDDGRILGTPDYLAPELLLGRAHGPAVDWWALGVCLFEFLTGIPPFNDETPQQVFQNILKRDIPWPEGEEKLSDNAQSAVEILLTIDDTKRAGMKELKRHPLFSDVDWENLQHQTMPFIPQPDDETDTSYFEARNTAQHLTVSGFSL

SEQ ID NO: 19265 - protein, 36 aa, Homo sapiens
MASLAPHRPLPEGGSLPAQPGAPEISLEQAPERDYP

SEQ ID NO: 19266 - protein, 47 aa, Homo sapiens
LGSECSGVRMDEDVLHPEEPHHRLLLRFTDDTFDPELAATIDNAGIT

SEQ ID NO: 19267 - protein, 8 aa, Homo sapiens
LLSPISPA

SEQ ID NO: 19268 - protein, 8 aa, Homo sapiens
MVLSSPDW

SEQ ID NO: 19269 - protein, 26 aa, Homo sapiens
VAARGGMREPLVLGPATTMVPVVELC

SEQ ID NO: 19270 - protein, 106 aa, Homo sapiens
LAVLPPLLLIFCGYFSDFPQKPTDPGGSHPIRPPIMEESITFYLPNILKMLEDPYAAWRLLFLGTQVSSLYCYNFFSRTAVFFACTNGTSSSAGYFSTAGVWREEG

SEQ ID NO: 19271 - protein, 254 aa, Homo sapiens
LFQDSNHLPMVAAIAETDESAESEGVIDSHKRREILSRRPSYRKILNELSSDVPGVPKIEEERSEEEGTPPSIATMAVPTSIYQTSTGQYIAIAQGGTIQISNPGSDGVQGLQALTMTNSGAPPPGATIVQYAAQSADGTQQFFVPGSQVVVQAATGDMPTYQIRAPTAALPQGVVMAASPGSLHSPQQLAEEATRKRELRLMKNREAAKECRRRKKEYVKCLESRVAVLEVQNKKLIEELETLKDICSPKTDY

SEQ ID NO: 19272 - protein, 126 aa, Homo sapiens
LQKPIMAVTGDDTDEETELAPSHMAAATGDMPTYQIRAPTAALPQGVVMAASPGSLHSPQQLAEEATRKRELRLMKNREAAKECRRRKKEYVKCLESRVAVLEVQNKKLIEELETLKDICSPKTDY

SEQ ID NO: 19273 - protein, 114 aa, Homo sapiens
LQKPIMAVTGDDTAATGDMPTYQIRAPTAALPQGVVMAASPGSLHSPQQLAEEATRKRELRLMKNREAAKECRRRKKEYVKCLESRVAVLEVQNKKLIEELETLKDICSPKTDY

SEQ ID NO: 19274 - protein, 26 aa, Homo sapiens
VVVCLKRETRHETVMHEQNSGVVWPA

SEQ ID NO: 19275 - protein, 93 aa, Homo sapiens
LKLNWECCSRMWNAAVITLTELTLICLSIACKKCFVCPLLLLFFREAAKECRRRKKEYVKCLESRVAVLEVQNKKLIEELETLKDICSPKTDY

SEQ ID NO: 19276 - protein, 568 aa, Homo sapiens
LQTSSIPFLPFPVLLTSPHLQGICADGCLLRRNVLNVLGTSYIQGCLCGLHRGGVRSPGLCSQEAVRSCDAGQLQKLGLGDLNENSVENLQQKTLQDLLHELSSWLVLEGMASTITGSQDCIVNHRGEVDGEPELDISPCQQWGEASSPISRNRDSVMTLQSGCFENIESETYLPLKVSSQIDTQDSSVKFCKNEPQDHQESRRLFVMEESTERKVIKGESCSENLQVKLVSDGQELASPLLNGEATCQNGQLKESLDPIDCNCKDIHGWKSQVVSCSQQRAHTEEKPCDHNNCGKILNTSPDGHPYEKIHTAEKQYECSQCGKNFSQSSELLLHQRDHTEEKPYKCEQCGKGFTRSSSLLIHQAVHTDEKPYKCDKCGKGFTRSSSLLIHHAVHTGEKPYKCDKCGKGFSQSSKLHIHQRVHTGEKPYECEECGMSFSQRSNLHIHQRVHTGERPYKCGECGKGFSQSSNLHIHRCIHTGEKPYQCYECGKGFSQSSDLRIHLRVHTGEKPYHCGKCGKGFSQSSKLLIHQRVHTGEKPYECSKCGKGFSQSSNLHIHQRVHKKDPR

SEQ ID NO: 19277 - protein, 539 aa, Homo sapiens
LGVRNDQGPGTSYIQGCLCGLHRGGVRSPGLCSQEAVRSCDAGQLQKLGLGDLNENSVENLQQKTLQDLLHELSSWLVLEGMASTITGSQDCIVNHRGEVDGEPELDISPCQQWGEASSPISRNRDSVMTLQSGCFENIESETYLPLKVSSQIDTQDSSVKFCKNEPQDHQESRRLFVMEESTERKVIKGESCSENLQVKLVSDGQELASPLLNGEATCQNGQLKESLDPIDCNCKDIHGWKSQVVSCSQQRAHTEEKPCDHNNCGKILNTSPDGHPYEKIHTAEKQYECSQCGKNFSQSSELLLHQRDHTEEKPYKCEQCGKGFTRSSSLLIHQAVHTDEKPYKCDKCGKGFTRSSSLLIHHAVHTGEKPYKCDKCGKGFSQSSKLHIHQRVHTGEKPYECEECGMSFSQRSNLHIHQRVHTGERPYKCGECGKGFSQSSNLHIHRCIHTGEKPYQCYECGKGFSQSSDLRIHLRVHTGEKPYHCGKCGKGFSQSSKLLIHQRVHTGEKPYECSKCGKGFSQSSNLHIHQRVHKKDPR

SEQ ID NO: 19278 - protein, 515 aa, Homo sapiens
LYFGALGARAVSIRNLAPAGVGFHVGGDLNENSVENLQQKTLQDLLHELSSWLVLEGMASTITGSQDCIVNHRGEVDGEPELDISPCQQWGEASSPISRNRDSVMTLQSGCFENIESETYLPLKVSSQIDTQDSSVKFCKNEPQDHQESRRLFVMEESTERKVIKGESCSENLQVKLVSDGQELASPLLNGEATCQNGQLKESLDPIDCNCKDIHGWKSQVVSCSQQRAHTEEKPCDHNNCGKILNTSPDGHPYEKIHTAEKQYECSQCGKNFSQSSELLLHQRDHTEEKPYKCEQCGKGFTRSSSLLIHQAVHTDEKPYKCDKCGKGFTRSSSLLIHHAVHTGEKPYKCDKCGKGFSQSSKLHIHQRVHTGEKPYECEECGMSFSQRSNLHIHQRVHTGERPYKCGECGKGFSQSSNLHIHRCIHTGEKPYQCYECGKGFSQSSDLRIHLRVHTGEKPYHCGKCGKGFSQSSKLLIHQRVHTGEKPYECSKCGKGFSQSSNLHIHQRVHKKDPR

SEQ ID NO: 19279 - protein, 556 aa, Homo sapiens
LYFGALGARAVSIRNLAPAGVGFHVGGTSYIQGCLCGLHRGGVRSPGLCSQEAVRSCDAGQLQKLGLGDLNENSVENLQQKTLQDLLHELSSWLVLEGMASTITGSQDCIVNHRGEVDGEPELDISPCQQWGEASSPISRNRDSVMTLQSGCFENIESETYLPLKVSSQIDTQDSSVKFCKNEPQDHQESRRLFVMEESTERKVIKGESCSENLQVKLVSDGQELASPLLNGEATCQNGQLKESLDPIDCNCKDIHGWKSQVVSCSQQRAHTEEKPCDHNNCGKILNTSPDGHPYEKIHTAEKQYECSQCGKNFSQSSELLLHQRDHTEEKPYKCEQCGKGFTRSSSLLIHQAVHTDEKPYKCDKCGKGFTRSSSLLIHHAVHTGEKPYKCDKCGKGFSQSSKLHIHQRVHTGEKPYECEECGMSFSQRSNLHIHQRVHTGERPYKCGECGKGFSQSSNLHIHRCIHTGEKPYQCYECGKGFSQSSDLRIHLRVHTGEKPYHCGKCGKGFSQSSKLLIHQRVHTGEKPYECSKCGKGFSQSSNLHIHQRVHKKDPR

SEQ ID NO: 19280 - protein, 449 aa, Homo sapiens
LGEQFRRQMAPRAQIQGPLTFGDVAVAFTRIEWRHLDAAQRALYRDVMLENYGNLVSVGLLSSKPKLITQLEQGAEPWTEVREAPSGTHAVEDYWFETKMSALKQSTSEASVLGERTKSVMMEKGLDWEGRSSTEKNYKCKECGKVFKYNSSFISHQRNHTSEKPHKCKECGIAFMNSSSLLNHHKVHAGKQPYRCIECGKFLKKHSTFINHQRIHSREKPHKCIECGKTFRKNSILLSHQRIHTGQKPYKCNDCGKAFAQNAALTRHERIHSGEKPFKCNKCGRAFRDNSTVLEHQKIHTGEKPYQCNECGKAFRKSSTLISHQRMHTGEKPYHCSKCGKSFRYSSSFAGHQKTHSGNKPYQCRDCGKAFTKSSTLTGHQRIHTGEKPYHCKKCGKAFRHSSGLVEHQRLHTGEKPYKCNECGKAFPRSSALKQHKKIHNKERAMKCS

SEQ ID NO: 19281 - protein, 34 aa, Homo sapiens
LALWVSRRKITEVKHHFITSCQGFLVNFWMKPLN

SEQ ID NO: 19282 - protein, 3196 aa, Homo sapiens
LTATPPDLLCHGMEAEDLSKAEDRNEDPGSKNEGQLAAVQPDVPHGGQSSSPTALWDMLERKFLEYQQLTHKSPIERQKSLLSLLPLFLKAWEHSVGIICFPSLQRLAEDVSDQLAQQLQKALVGKPAEQARLAAGQLLWWKGDVDQDGYLLLKSVYVLTGTDSETLGRVAESGLPALLLQCLYLFFVFPLDKDELLESDLQVQKMFVQMLLNICSDSQGLEGLLSGSELQSLLIATTCLREHSCCFWKEPTFCVLRAISKAQNLSIIQYLQATDCVRLSLQNLSRLTDTLPAPEVSEAVSLILGFVKDSYPVSSALFLEFENSEGYPLLLKVLLRYDGLTQSEVDPHLEELLGLVVWLTTCGRSELKVFDSITYPQLEGFKFHHEASGVTVKNLQAFQVLQNVFHKASDSVLCIQVLSVIRTMWAWNARNFFLLEWTLQPISQFVEIMPLKPAPVQEHFFQLLEALVFELHYVPHEILRKVQHLIKESPGPSCTLMALQSILSIAGGDPLFTDIFRDSGLLGLLLAQLRKQAKIMRKSGNKVSTPGVQDPERELTCVMLRIVVTLLKGSVRNAVVLKDHGMVPFIKIFLDDECYREASLSILEQLSAINAEEYMSIIVGALCSSTQGELQLKLDLLKSLLRILVTPKGRAAFRVSSGFNGLLSLLSDLEGSLQEPPLQAWGAVSPRQTLELVLYTLCAVSAALHWDPVNGYFFRRNGLFEKLAEDLCLLGCFGALEEEGNLLRSWVDTKARPFADLLGTAFSSSGSLPPRIQSCLQILGFLDSMASGTLHLRGDLKESLRTKQGPVVDVQKGETGSDPQRNFKQWPDLEERMDEGDAAIMHPGVVCIMVRLLPRLYHEDHPQLSEEIQCSLASHIQSLVKSEKNRQVMCEAGLLGTLMASCHRALVTSGSPLHSRLIRIFEKLASQAIEPDVLRQFLGLGIPSSLSATTKILDSSHTHRGNPGCSGSQTAQGLAEGPWPAAPDAGLHPGVTQAPQPLGESQDSTTALQTALSLISMTSPRNLQPQRAALAPSFVEFDMSVEGYGCLFIPTLSTVMGTSTEYSVSGGIGTGATRPFPPPGGLTFSCWFLISRHGAATEGHPLRFLTLVRHLARTEQPFVCFSVSLCPDDLSLVVSTEEKEFQPLDVMEPEDDSEPSAGCQLQVRCGQLLACGQWHHLAVVVTKEMKRHCTVSTCLDGQVIGSAKMLYIQALPGPFLSMDPSAFVDVYGYIATPRVWKQKSSLIWRLGPTYLFEEAISMETLEVINKLGPRYCGNFQAVHVQGEDLDSEATPFVAEERVSFGLHIASSSITSVADIRNAYNEVDSRLIAKEMNISSRDNAMPVFLLRNCAGHLSGSLRTIGAVAVGQLGVRVFHSSPAASSLDFIGGPAILLGLISLATDDHTMYAAVKVLHSVLTSNAMCDFLMQHICGYQIMAFLLRKKASLLNHRIFQLILSVAGTVELGFRSSAITNTGVFQHILCNFELWMNTADNLELSLFSHLLEILQSPREGPRNAEAAHQAQLIPKLIFLFNEPSLIPSKISTIIGILACQLRGHFSTQDLLRIGLFVVYTLKPSSVNERQICMDGALDPSLPAGSQTSGKTIWLRNQLLEMLLSVISSPQLHLSSESKEEMFLKLGPDWFLLLLQGHLHASTTVLALKLLLYFLASPSLRTRFRDGLCAGSWVERSTEGVDIVMDNLKSQSPLPEQSPCLLPGFRVLNDFLAHHVHIPEVYLIVSTFFLQTPLTELMDGPKDSLDAMLQWLLQRHHQEEVLQAGLCTEGALLLLEMLKATMSQPLAGSEDGAWAQTFPASVLQFLSLVHRTYPQDPAWRAPEFLQTLAIAAFPLGAQKGVGAESTRNTSSPEAAAEGDSTVEGLQAPTKAHPARRKLREFTQLLLRELLLGASSPKQWLPLEVLLEASPDHATSQQKRDFQSEVLLSAMELFHMTSGGDAAMFRDGKEPQPSAEAAAAPSLANISCFTQKLVEKLYSGMFSADPRHILLFILEHIMVVIETASSQRDTVLSTLYSSLNKVILYCLSKPQQSLSECLGLLSILGFLQEHWDVVFATYNSNISFLLCLMHCLLLLNERSYPEGFGLEPKPRMSTYHQVFLSPNEDVKEKREDLPSLSDVQHNIQKTVQTLWQQLVAQRQQTLEDAFKIDLSVKPGEREVKIEEVTPLWEETMLKAWQHYLASEKKSLASRSNVAHHSKVTLWSGSLSSAMKLMPGRQAKDPECKTEDFVSCIENYRRRGQELYASLYKDHVQRRKCGNIKAANAWARIQEQLFGELGLWSQGEETKPCSPWELDWREGPARMRKRIKRLSPLEALSSGRHKESQDKNDHISQTNAENQDELTLREAEGEPDEVGVDCTQLTFFPALHESLHSEDFLELCRERQVILQELLDKEKVTQKFSLVIVQGHLVSEGVLLFGHQHFYICENFTLSPTGDVYCTRHCLSNISDPFIFNLCSKDRSTDHYSCQCHSYADMRELRQARFLLQDIALEIFFHNGYSKFLVFYNNDRSKAFKSFCSFQPSLKGKATSEDTLSLRRYPGSDRIMLQKWQKRDISNFEYLMYLNTAAGRTCNDYMQYPVFPWVLADYTSETLNLANPKIFRDLSKPMGAQTKERKLKFIQRFKEVEKTEGDMTVQCHYYTHYSSAIIVASYLVRMPPFTQAFCALQGGSFDVADRMFHSVKSTWESASRENMSDVRELTPEFFYLPEFLTNCNGVEFGCMQDGTVLGDVQLPPWADGDPRKFISLHRKALESDFVSANLHHWIDLIFGYKQQGPAAVDAVNIFHPYFYGDRMDLSSITDPLIKSTILGFVSNFGQVPKQLFTKPHPARTAAGKPLPGKDVSTPVSLPGHPQPFFYSLQSLRPSQVTVKDMYLFSLGSESPKGAIGHIVSTEKTILAVERNKVLLPPLWNRTFSWGFDDFSCCLGSYGSDKVLMTFENLAAWGRCLCAVCPSPTTIVTSGTSTVVCVWELSMTKGRPRGLRLRQALYGHTQAVTCLAASVTFSLLVSGSQDCTCILWDLDHLTHVTRLPAHREGISAITISDVSGTIVSCAGAHLSLWNVNGQPLASITTAWGPEGAITCCCLMEGPAWDTSQIIITGSQDGMVRVWKTEDVKMSVPGRPAGEEPPAQPPSPRGHKWEKNLALSRELDVSIALTGKPSKTSPAVTALAVSRNHTKLLVGDERGRIFCWSADG

SEQ ID NO: 19283 - protein, 14 aa, Homo sapiens
MVLFLSRDAQVIEL

SEQ ID NO: 19284 - protein, 82 aa, Homo sapiens
LCLFPSVLFLSVALGSPENHISWRKVGEELKLASHRNFCSLIQMMRSNKPSPSRQRDTIPLKKRAPRRNHNFSKRDAQVIEL

SEQ ID NO: 19285 - protein, 214 aa, Homo sapiens
VLQGGRLAGHPHSCTHSWWLISGQKAIAAKEQWKELKATYREHVEAIKIGLTKALTQMEEAQRKRTQLREAFEQLQAKKQMAMEKRRAVQNQWQLQQEKHLQHLAEVSAEVRERKTGTQQELDRVFQKLGNLKQQAEQERDKLQRYQTFLQLLYTLQGKLLFPEAEAEAENLPDDKPQQPTRPQEQSTGDTMGRDPGVSFKAVGLQPAGDVNLP

SEQ ID NO: 19286 - protein, 36 aa, Homo sapiens
LLCSQLQVADFLQNILAQEDTAKGLDPLASEDTSRE

SEQ ID NO: 19287 - protein, 45 aa, Homo sapiens
MKCNWTCLDSFSFIYRFPFCDGAHTKHNEETGDNVGPLIIKKKET

SEQ ID NO: 19288 - protein, 36 aa, Homo sapiens
LFHCEILICTLLSKQGEGFKVKTKKEIRHVEKKSHS

SEQ ID NO: 19289 - protein, 969 aa, Homo sapiens
VEIPHFGSMRGKERELIVLRSENGETWKEHQFDSKNEDLTELLNGMDEELDSPEELGKKRICRIITKDFPQYFAVVSRIKQESNQIGPEGGILSSTTVPLVQASFPEGALTKRIRVGLQAQPVPDEIVKKILGNKATFSPIVTVEPRRRKFHKPITMTIPVPPPSGEGVSNGYKGDTTPNLRLLCSITGGTSPAQWEDITGTTPLTFIKDCVSFTTNVSARFWLADCHQVLETVGLATQLYRELICVPYMAKFVVFAKMNDPVESSLRCFCMTDDKVDKTLEQQENFEEVARSKDIEVLEGKPIYVDCYGNLAPLTKGGQQLVFNFYSFKENRLPFSIKIRDTSQEPCGRLSFLKEPKTTKGLPQTAVCNLNITLPAHKKETESDQDDEIEKTDRRQSFASLALRPQSPCERTDIRMAIVADHLGLSWTELARELNFSVDEINQIRVENPNSLISQSFMLLKKWVTRDGKNATTDALTSVLTKINRIDIVTLLEGPIFDYGNISGTRSFADENNVFHDPVDGYPSLQVELETPTGLHYTPPTPFQQDDYFSDISSIESPLRTPSRLSDGLVPSQGNIEHSADGPPVVTAEDASLEDSKLEDSVPLTEMPEAVDVDESQLENVCLSEYPQYLGNLAGSPKDVKPAEPRKLGVSSEQQEKGKSGPDEEMMEEKLKSLFEDIQLEEGVESEEMTEEKVQAILKRVQQAELEMSSITGWQNETSSGNLESCAQARRVTGGLLDRLDDSPDQCRDSITSYLKGEAGKFEANGSHTEITPEAKTKSYFPESQNDVGKQSTKETLKPKIHGSGHVEEPASPLAAYQKSLEETSKLIIEETKPCVPVSMKKMSRTSPADGKPRLSLHEEEGSSGSEQKDLKDSESDSSSEEERRVTTRVIRRRLIIKGEEAKNIPGESVTEEQFTDEEGNLITRKITRKVLRRIVIPQERKRDDVQGEGFKVKTKKEIRHVEKKSHS

SEQ ID NO: 19290 - protein, 1003 aa, Homo sapiens
VEMALPQSEDAMTGDTDKYLGPQDLKELGDDSLPAEGYMGFSLGARSASLRSFSSDRSYTLNRSSYARDSMMIEELLVPSKEQHLTFTREFDSDSLRHYSWAADTLDNVNLVSSPIHSGFLVSFMVDARGGSMRGSRHHGMRIIIPPRKCTAPTRITCRLVKRHKLANPPPMVEGEGLASRLVEMGPAGAQFLGPVIVEIPHFGSMRGKERELIVLRSENGETWKEHQFDSKNEDLTELLNGMDEELDSPEELGKKRICRIITKDFPQYFAVVSRIKQESNQIGPEGGILSSTTVPLVQASFPEGALTKRIRVGLQAQPVPDEIVKKILGNKATFSPIVTVEPRRRKFHKPITMTIPVPPPSGEGVSNGYKGDTTPNLRLLCSITGGTSPAQWEDITGTTPLTFIKDCVSFTTNVSARFWLADCHQVLETVGLATQLYRELICVPYMAKFVVFAKMNDPVESSLRCFCMTDDKVDKTLEQQENFEEVARSKDIEVLEGKPIYVDCYGNLAPLTKGGQQLVFNFYSFKENRLPFSIKIRDTSQEPCGRLSFLKEPKTTKGLPQTAVCNLNITLPAHKKIEKTDRRQSFASLALRKRYSYLTEPGMSPQSPCERTDIRMAIVADHLGLSWTELARELNFSVDEINQIRVENPNSLISQSFMLLKKWVTRDGKNATTDALTSVLTKINRIDIVTLLEGPIFDYGNISGTRSFADENNVFHDPVDGYPSLQVELETPTGLHYTPPTPFQQDDYFSDISSIESPLRTPSRLSDGLVPSQGNIEHSADGPPVVTAEDASLEDSKLEDSVPLTEMPEAVDVDESQLENVCLSWQNETSSGNLESCAQARRVTGGLLDRLDDSPDQCRDSITSYLKGEAGKFEANGSHTEITPEAKTKSYFPESQNDVGKQSTKETLKPKIHGSGHVEEPASPLAAYQKSLEETSKLIIEETKPCVPVSMKKMSRTSPADGKPRLSLHEEEGSSGSEQKQGEGFKVKTKKEIRHVEKKSHS

SEQ ID NO: 19291 - protein, 929 aa, Homo sapiens
LAHVPQRGETALHMAARSGQAEVVRYLVQDGAQVEAKAKDDQTPLHISARLGKADIVQQLLQQGASPNAATTSGYTPLHLSAREGHEDVAAFLLDHGASLSITTKKGFTPLHVAAKYGKLEVANLLLQKSASPDAAGKSGLTPLHVAAHYDNQKVALLLLDQGASPHAAAKNGYTPLHIAAKKNQMDIATTLLEYGADANAVTRQGIASVHLAAQEGHVDMVSLLLGRNANVNLSNKSGLTPLHLAAQEDRVNVAEVLVNQGAHVDAQTKMGYTPLHVGCHYGNIKIVNFLLQHSAKVNAKTKNGYTPLHQAAQQGHTHIINVLLQNNASPNELTVNGNTALGIARRLGYISVVDTLKIVTEETMTTTTVTEKHKMNVPETMNEVLDMSDDEGEDAMTGDTDKYLGPQDLKELGDDSLPAEGYMGFSLGARSASPKISSDRSYTLNRSSYARDSMMIEELLVPSKEQHLTFTREFDSDSLRHYSWAADTLDNVNLVSSPIHSGYSSPLPQYDSRFLVSFMVDARGGSMRGSRHHGMRIIIPPRKCTAPTRITCRLVKRHKLANPPPMVEGEGLASRLVEMGPAGAQFLGPVIVEIPHFGSMRGKERELIVLRSENGETWKEHQFDSKNEDLTELLNGMDEELDSPEELGKKRICRIITKDFPQYFAVVSRIKQESNQIGPEGGILSSTTVPLVQASFPEGALTKRIRVGLQAQPVPDEIVKKILGNKATFSPIVTVEPRRRKFHKPITMTIPVPPPSGEGVSNGYKGDTTPNLRLLCSITGGTSPAQWEDITGTTPLTFIKDCVSFTTNVSARFWLADCHQVLETVGLATQLYRELICVPYMAKFVVFAKMNDPVESSLRCFCMTDDKVDKTLEQQENFEEVARSKDIEVPCSQKQVHFITYSRYEVLFCGLNSTHYKIPSALLILLLL

SEQ ID NO: 19292 - protein, 109 aa, Homo sapiens
MEDYTKIEKIGEGTYGVVYKGRHKTTGQVVAMKKIRLESEEEGVPSTAIREISLLKELRHPNIVSLQDVLMQDSRLYLIFEFLSMDLKKYLDSIPPGQYMDSSLVKVKA

SEQ ID NO: 19293 - protein, 100 aa, Homo sapiens
MGIQKLINSSGFSEIFFLFFRALGTPNNEVWPEVESLQDYKNTFPKWKPGSLASHVKNLDENGLDLLSKMLIYDPAKRISGKMALNHPYFNDLDNQIKKM

SEQ ID NO: 19294 - protein, 176 aa, Homo sapiens
LKEWRRPGQFALEMEGPSLRGPALRLAGLPTQQDCNIQEKIDLEIRMREGIWKLLSLSTQKDQVLHAVKNLMVCNARLMAYTSELQKLEEQIANQTGRCDVKFESKERTACKGKIAISDIRIPLMWKDSDHFSNKERSRRYAIFCLFKMGANVFDTDVVNVDKTITDICFENVTIL

SEQ ID NO: 19295 - protein, 362 aa, Homo sapiens
LLKTASLPQHQHRRRRLQQQQQQVGTFRVMQQKAFEESRYPWQESFENVAVCLPLRCPRCGDHTRFRSLSSLRAHLEFSHSYEERTLLTKCSLFPSLKDTDLVTSSELLKPGKLQSSGNVVKQKPSYVNLYSISHEHSKDRKPFEVVAERPVSYVQTYTAMDLHADSLDGTRSGPGLPTSDTKASFEAHVREKFNRMVEAVDRTIEKRIDKLTKELAQKTAELLEVRAAFVQLTQKKQEVQRRERALNRQVDVAVEMIAVLRQRLTESEEELLRKEEEVVTFNHFLEAAAEKEVQGKARLQDFIENLLQRVELAEKQLEYYQSQQASGFVRDLSGHVSWKGAGEARLVCQNDLELEESAIVE

SEQ ID NO: 19296 - protein, 491 aa, Homo sapiens
LLKTASLPQHQHRRRRLQQQQQQVGTFRVMQQKAFEESRYPWQESFENVAVCLPLRCPRCGDHTRFRSLSSLRAHLEFSHSYEERTLLTKCSLFPSLKDTDLVTSSELLKPGKLQSSGNVVKQKPSYVNLYSISHEHSKDRKPFEVVAERPVSYVQTYTAMDLHADSLDGTRSGPGLPTSDTKASFEAHVREKFNRMVEAVDRTIEKRIDKLTKELAQKTAELLEVRAAFVQLTQKKQEVQRRERALNRQVDVAVEMIAVLRQRLTESEEELLRKEEEVVTFNHFLEAAAEKEVQGKARLQDFIENLLQRVELAEKQLEYYQSQQASGFVRDLSGHVSWKGAGEARLVCQNDLELEIFGHINHHLSGLKDSHCLVFLQAPPVPWIILASFLWILGNPWTSSTATAGFSQIWVLFPFCGGTFHHNEKDVLGLQDFERESVSTSQSRNISLLTLGQLQNCVIGKLTIIDLLTEHLLGVRHGVICFPWGLPSSS

SEQ ID NO: 19297 - protein, 10 aa, Homo sapiens
VYIHSDFVYF

SEQ ID NO: 19298 - protein, 13 aa, Homo sapiens
LVVWGPLAKRAEV

SEQ ID NO: 19299 - protein, 481 aa, Homo sapiens
LCEEQMMTAKAVDKIPVTLSGFVHQLSDNIYPVEDLAATSVTIFPNAELGGPFDQMNGVAGDGMINIDMTGEKRSLDLPYPSSFAPVSAPRNQTFTYMGKFSIDPQYPGASCYPEGIINIVSAGILQGVTSPASTTASSSVTSASPNPLATGPLGVCTMSQTQPDLDHLYSPPPPPPPYSGCAGDLYQDPSAFLSAATTSTSSSLAYPPPPSYPSPKPATDPGLFPMIPDYPGFFPSQCQRDLHGTAGPDRKPFPCPLDTLRVPPPLTPLSTIRNFTLGGPSAGVTGPGASGGSEGPRLPGSSSAAAAAAAAAAYNPHHLPLRPILRPRKYPNRPSKTPVHERPYPCPAEGCDRRFSRSDELTRHIRIHTGHKPFQCRICMRNFSRSDHLTTHIRTHTGEKPFACDYCGRKFARSDERKRHTKIHLRQKERKSSAPSASVPAPSTASCSGGVQPGGTLCSSNSSSLGGGPLAPCSSRTRTP

SEQ ID NO: 19300 - protein, 481 aa, Homo sapiens
VWRAKGDTIPGSVQPLSKTAFLTLQLSDNIYPVEDLAATSVTIFPNAELGGPFDQMNGVAGDGMINIDMTGEKRSLDLPYPSSFAPVSAPRNQTFTYMGKFSIDPQYPGASCYPEGIINIVSAGILQGVTSPASTTASSSVTSASPNPLATGPLGVCTMSQTQPDLDHLYSPPPPPPPYSGCAGDLYQDPSAFLSAATTSTSSSLAYPPPPSYPSPKPATDPGLFPMIPDYPGFFPSQCQRDLHGTAGPDRKPFPCPLDTLRVPPPLTPLSTIRNFTLGGPSAGVTGPGASGGSEGPRLPGSSSAAAAAAAAAAYNPHHLPLRPILRPRKYPNRPSKTPVHERPYPCPAEGCDRRFSRSDELTRHIRIHTGHKPFQCRICMRNFSRSDHLTTHIRTHTGEKPFACDYCGRKFARSDERKRHTKIHLRQKERKSSAPSASVPAPSTASCSGGVQPGGTLCSSNSSSLGGGPLAPCSSRTRTP

SEQ ID NO: 19301 - protein, 46 aa, Homo sapiens
LLLLFLLIFFSWCVWWLFLSVEGKRRYHPRLSPTPLQNGFSDTPAV

SEQ ID NO: 19302 - protein, 58 aa, Homo sapiens
LTVIITLHQQLLASQQPEHRQERVARELGLQVVRGANDDRQGRRQNPSNSQWFCAPAV

SEQ ID NO: 19303 - protein, 58 aa, Homo sapiens
LLLLFLLIFFSWCVWWLFLSVEGKRRYHPRLSPTPLQNGFSDTPGSEGVGSPGCARSK

SEQ ID NO: 19304 - protein, 27 aa, Homo sapiens
LTVIITLHQQLLASQQPEHRQERVSGK

SEQ ID NO: 19305 - protein, 54 aa, Homo sapiens
LHCWKLLHCVSTQTEYSGKGFLQLMDGCSLYLEYLTGYVSDLERNYPDPDRRMQ

SEQ ID NO: 19306 - protein, 364 aa, Homo sapiens
MYSRKIQKVHPAIQQFTEQEICRSKSIKSLALLEELYNSQLIVATTCMGINHPIFSRKIFDFCIVDEASQISQPICLGPLFFSRRFVLVGDHQQLPPLVLNREARALGMSESLFKRLEQNKSAVVQLTVQYRMNSKIMSLSNKLTYEGKLECGSDKVANAVINLRHFKDVKLELEFYADYSDNPWLMGVFEPNNPVCFLNTDKVPAPEQVEKGGVSNVTEAKLIVFLTSIFVKAGCSPSDIGIIAPYRQQLKIINDLLARSIGMVEVNTVDKYQGRDKSIVLVSFVRSNKDGTVGELLKDWRRLNVAITRAKHKLILLGCVPSLNCYPPLEKLLNHLNSEKLIIDLPSREHESLCHILGDFQRE

SEQ ID NO: 19307 - protein, 2147 aa, Homo sapiens
LRPFIFSYSVAMSRSRHARPSRLVRKEDVNKKKKNSQLRKTTKGANKNVASVKTLSPGKLKQLIQERDVKKKTEPKPPVPVRSLLTRAGAARMNLDRTEVLFQNPESLTCNGFTMALRSTSLSRRLSQPPLVVAKSKKVPLSKGLEKQHDCDYKILPALGVKHSENDSVPMQDTQVLPDIETLIGVQNPSLLKGKSQETTQFWSQRVEDSKINIPTHSGPAAEILPGPLEGTRCGEGLFSEETLNDTSGSPKMFAQDTVCAPFPQRATPKVTSQGNPSIQLEELGSRVESLKLSDSYLDPIKSEHDCYPTSSLNKVIPDLNLRNCLALGGSTSPTSVIKFLLAGSKQATLGAKPDHQEAFEATANQQEVSDTTSFLGQAFGAIPHQWELPGADPVHGEALGETPDLPEIPGAIPVQGEVFGTILDQQETLGMSGSVVPDLPVFLPVPPNPIATFNAPSKWPEPQSTVSYGLAVQGAIQILPLGSGHTPQSSSNSEKNSLPPVMAISNVENEKQVHISFLPANTQGFPLAPERGLFHASLGIAQLSQAGPSKSDRGSSQVSVTSTVHVVNTTVVTMPVPMVSTSSSSYTTLLPTLEKKKRKRCGVCEPCQQKTNCGECTYCKNRKNSHQICKKRKCEELKKKPSVVVPLEVIKENKRPQREKKPKVLKADFDNKPVNGPKSESMDYSRCGHGEEQKLELNPHTVENVTKNEDSMTGIEVEKWTQNKKSQLTDHVKGDFSANVPEAEKSKNSEVDKKRTKSPKLFVQTVRNGIKHVHCLPAETNVSFKKFNIEEFGKTLENNSYKFLKDTANHKNAMSSVATDMSCDHLKGRSNVLVFQQPGFNCSSIPHSSHSIINHHASIHNEGDQPKTPENIPSKEPKDGSPVQPSLLSLMKDRRLTLEQVVAIEALTQLSEAPSENSSPSKSEKDEESEQRTASLLNSCKAILYTVRKDLQDPNLQGEPPKLNHCPSLEKQSSCNTVVFNGQTTTLSNSHINSATNQASTKSHEYSKVTNSLSLFIPKSNSSKIDTNKSIAQGIITLDNCSNDLHQLPPRNNEVEYCNQLLDSSKKLDSDDLSCQDATHTQIEEDVATQLTQLASIIKINYIKPEDKKVESTPTSLVTCNVQQKYNQEKGTIQQKPPSSVHNNHGSSLTKQKNPTQKKTKSTPSRDRRKKKPTVVSYQENDRQKWEKLSYMYGTICDIWIASKFQNFGQFCPHDFPTVFGKISSSTKIWKPLAQTRSIMQPKTVFPPLTQIKLQRYPESAEEKVKVEPLDSLSLFHLKTESNGKAFTDKAYNSQVQLTVNANQKAHPLTQPSSPPNQCANVMAGDDQIRFQQVVKEQLMHQRLPTLPGISHETPLPESALTLRNVNVVCSGGITVVSTKSEEEVCSSSFGTSEFSTVDSAQKNFNDYAMNFFTNPTKNLVSITKDSELPTCSCLDRVIQKDKGPYYTHLGAGPSVAAVREIMENRYGQKGNAIRIEIVVYTGKEGKSSHGCPIAKWVLRRSSDEEKVLCLVRQRTGHHCPTAVMVVLIMVWDGIPLPMADRLYTELTENLKSYNGHPTDRRCTLNENRTCTCQGIDPETCGASFSFGCSWSMYFNGCKFGRSPSPRRFRIDPSSPLHEKNLEDNLQSLATRLAPIYKQYAPVAYQNQVEYENVARECRLGSKEGRPFSGVTACLDFCAHPHRDIHNMNNGSTVVCTLTREDNRSLGVIPQDEQLHVLPLYKLSDTDEFGSKEGMEAKIKSGAIEVLAPRRKKRTCFTQPVPRSGKKRAAMMTEVLAHKIRAVEKKPIPRIKRKNNSTTTNNSKPSSLPTLGSNTETVQPEVKSETEPHFILKSSDNTKTYSLMPSAPHPVKEASPGFSWSPKTASATPAPLKNDATASCGFSERSSTPHCTMPSGRLSGANAAAADGPGISQLGEVAPLPTLSAPVMEPLINSEPSTGVTEPLTPHQPNHQPSFLTSPQDLASSPMEEDEQHSEADEPPSDEPLSDDPLSPAEEKLPHIDEYWSDSEHIFLDANIGGVAIAPAHGSVLIECARRELHATTPVEHPNRNHPTRLSLVFYQHKNLNKPQHGFELNKIKFEAKEAKNKKMKASEQKDQAANEGPEQSSEVNELNQIPSHKALTLTHDNVVTVSPYALTHVAGPYNHWV

SEQ ID NO: 19308 - protein, 814 aa, Homo sapiens
VTRAGWTQGGELPLPLHAVEKTGRPGQPALKMPGKLRSDAGLESDTAMKKGETLRKQTEEKEKKEKPKSDKTEEIAEEEETVFPKAKQVKKKAEPSEVDMNSPKSKKAKKKEEPSQNDISPKTKSLRKKKEPIEKKVVSSKTKKVTKNEEPSEEEIDAPKPKKMKKEKEMNGETREKSPKLKNGFPHPEPDCNPSEAASEESNSEIEQEIPVEQKEGAFSNFPISEETIKLLKGRGVTFLFPIQAKTFHHVYSGKDLIAQARTGTGKTFSFAIPLIEKLHGELQDRKRGRAPQVLVLAPTRELANQVSKDFSDITKKLSVACFYGGTPYGGQFERMRNGIDILVGTPGRIKDHIQNGKLDLTKLKHVVLDEVDQMLDMGFADQVEEILSVAYKKDSEDNPQTLLFSATCPHWVFNVAKKYMKSTYEQVDLIGKKTQKTAITVEHLAIKCHWTQRAAVIGDVIRVYSGHQGRTIIFCETKKEAQELSQNSAIKQDAQSLHGDIPQKQREITLKGFRNGSFGVLVATNVAARGLDIPEVDLVIQSSPPKDVESYIHRSGRTGRAGRTGVCICFYQHKEEYQLVQVEQKAGIKFKRIGVPSATEIIKASSKDAIRLLDSVPPTAISHFKQSAEKLIEEKGAVEALAAALAHISGATSVDQRSLINSNVGFVTMILQCSIEMPNISYAWKELKEQLGEEIDSKVKGMVFLKGKLGVCFDVPTASVTEIQEKWHDSRRWQLSVATEQPELEGPREGYGGFRGQREGSRGFRGQRDGNRRFRGQREGSRGPRGQRSGGGNKSNRSQNKGQKRSFSKAFGQ

SEQ ID NO: 19309 - protein, 933 aa, Homo sapiens
LHRNLCPSQEKPNLGKMFAVHLMAFYFSKLKEDQIKKVDRFLYHMRLSDDTLLDIMRRFRAEMEKGLAKDTNPTAAVKMLPTFVRAIPDGSENGEFLSLDLGGSKFRVLKVQVAEEGKRHVQMESQFYPTPNEIIRGNGTELFEYVADCLADFMKTKDLKHKKLPLGLTFSFPCRQTKLEEGVLLSWTKKFKARGVQDTDVVSRLTKAMRRHKDMDVDILALVNDTVGTMMTCAYDDPYCEVGVIIGTGTNACYMEDMSNIDLVEGDEGRMCINTEWGAFGDDGALEDIRTEFDRELDLGSLNPGKQLFEKMISGLYLGELVRLILLKMAKAGLLFGGEKSSALHTKGKIETRHVAAMEKYKEGLANTREILVDLGLEPSEADCIAVQHVCTIVSFRSANLCAAALAAILTRLRENKKVERLRTTVGMDGTLYKIHPQYPKRLHKVVRKLVPSCDVRFLLSESGSTKGAAMVTAVASRVQAQRKQIDRVLALFQLTREQLVDVQAKMRAELEYGLKKKSHGLATVRMLPTYVCGLPDGTEKGKFLALDLGGTNFRVLLVKIRSGRRSVRMYNKIFAIPLEIMQGTGEELFDHIVQCIADFLDYMGLKGASLPLGFTFSFPCRQMSIDKGTLIGWTKGFKATDCEGEDVVDMLREAIKRRNEFDLDIVAVVNDTVGTMMTCGYEDPNCEIGLIAGTGSNMCYMEDMRNIEMVEGGEGKMCINTEWGGFGDNGCIDDIWTRYDTEVDEGSLNPGKQRYEKMTSGMYLGEIVRQILIDLTKQGLLFRGQISERLRTRGIFETKFLSQIESDRLALLQVRRILQQLGLDSTCEDSIVVKEVCGAVSRRAAQLCGAGLAAIVEKRREDQGLEHLRITVGVDGTLYKLHPHFSRILQETVKELAPRCDVTFMLSEDGSGKGAALITAVAKRLQQAQKEN

SEQ ID NO: 19310 - protein, 8 aa, Homo sapiens
LAVPGAAG

SEQ ID NO: 19311 - protein, 29 aa, Homo sapiens
MVVEVPRWSNAKMEVIFHLTFESDLGYWF

SEQ ID NO: 19312 - protein, 179 aa, Homo sapiens
LGRRRRRRERDCAAQGARRHCRHLAECKLVSFPIGIYKVLRNVSGQIHLITLANNELKSLTSKFMTTFSQLRELHLEGNFLHRLPSEVSALQHLKAIDLSRNQFQDFPEQLTALPALETINLEENEIVDVPVEKLAAMPALRSINLRFNPLNAEVRVIAPPLIKFDMLMSPEGARAPLP

SEQ ID NO: 19313 - protein, 195 aa, Homo sapiens
VCVPVRCPFPLALWVRGLPGTHALRRYAGPRATPRAGLRPVPGHGGLVALEQPSSRELPPPTPGAGAGAGPLLCCKLASFIRPFLVHRPSEQAGKAHRLSAEERDQLLPNLRAVGWNELEGRDAIFKQFHFKDFNRAFGFMTRVALQAEKLDHHPEWFNVYNKVHITLSTHECAGLSERDINLASFIEQVAVSMT

SEQ ID NO: 19314 - protein, 37 aa, Homo sapiens
VDLGRVWAALGGWHGFAHPFKRQDALVLAVLADRASW

SEQ ID NO: 19315 - protein, 44 aa, Homo sapiens
VDLGRVWAALGGWHGFAHPFKRQDALVLAVLADRASCGFYAPAL

SEQ ID NO: 19316 - protein, 137 aa, Homo sapiens
LRLLRSGTLSSSANALASVLTMPSLWDRFSSSSTSSSPSSLPRTPTPDRPPRSAWGSATREEGFDRSTSLESSDCESLDSSNSGFGPEEGERWAGADATRGAGKVGKPRCWKGSEPPWLPIPSGPRLLGGRGNWSIR

SEQ ID NO: 19317 - protein, 41 aa, Homo sapiens
LCFQEARKMRSIQETLGESGSLLPNKLNKLLQRFPNKPYLS

SEQ ID NO: 19318 - protein, 76 aa, Homo sapiens
LEVKLAYQESEVAALLKKIPLGPSEMSTMRCRAEELREGTLCDYRPVLPLMLASFIFDVLCAPGMMPDPTVSGELG

SEQ ID NO: 19319 - protein, 447 aa, Homo sapiens
LAREEEAAGTAPACGHLVDEACLGQSISPGWKPMVFHLRTRYEQANCDCLNGGTCVSNKYFSNIHWCNCPKKFGGQHCEIDKSKTCYEGNGHFYRGKASTDTMGRPCLPWNSATVLQQTYHAHRSDALQLGLGKHNYCRNPDNRRRPWCYVQVGLKLLVQECMVHDCADGKKPSSPPEELKFQCGQKTLRPRFKIIGGEFTTIENQPWFAAIYRRHRGGSVTYVCGGSLISPCWVISATHCFIDYPKKEDYIVYLGRSRLNSNTQGEMKFEVENLILHKDYSADTLAHHNDIALLKIRSKEGRCAQPSRTIQTICLPSMYNDPQFGTSCEITGFGKENSTDYLYPEQLKMTVVKLISHRECQQPHYYGSEVTTKMLCAADPQWKTDSCQGDSGGPLVCSLQGRMTLTGIVSWGRGCALKDKPGVYTRVSHFLPWIRSHTKEENGLAL

SEQ ID NO: 19320 - protein, 89 aa, Homo sapiens
LVPPSPFTQLTLEQPQGDSMMTCEQAQLLANLARLIQAKKALDLGTFTGYSALALALALPADGRVVTCEVDAQPPELGRPLWRQVSARA

SEQ ID NO: 19321 - protein, 34 aa, Homo sapiens
VARPRPHAGSSRGPSVRVDMIGRRIVVLFSSLAV

SEQ ID NO: 19322 - protein, 114 aa, Homo sapiens
MNDTVTIRTRKFMTNRLLQRKQMVIDVLHPGKATVPKTEIREKLAKMYKTTPDVIFVFGFRTHFGGGKTTGFGMIYDSLDYAKKNEPKHRLARVGVFSFVDQLLKTYFFNSVVL

SEQ ID NO: 19323 - protein, 131 aa, Homo sapiens
MNDTVTIRTRKFMTNRLLQRKQMVIDVLHPGKATVPKTEIREKLAKMYKTTPDVIFVFGFRTHFGGGKTTGFGMIYDSLDYAKKNEPKHRLARHGLYEKKKTSRKQRKERKNRMKKVRGTAKANVGAGKKV

SEQ ID NO: 19324 - protein, 29 aa, Homo sapiens
VSWRLDHSRRSKGAAMMLAVATVDFSQEH

SEQ ID NO: 19325 - protein, 49 aa, Homo sapiens
LCSDFVLLLGLPPPPPDALSRLESWSFCRGLSRRKRRRPVGVGPMLQGV

SEQ ID NO: 19326 - protein, 121 aa, Homo sapiens
LCSPRPCPARPAPAMLALRCGSRWLGLLSVPRSVPLRLPAARACSKGSGDPSSSSSSGNPLVYLDVDANGKPLGRVVLELKADVVPKTAENFRALCTGEKGFGYKGSTFHRVIPSFMCQVM

SEQ ID NO: 19327 - protein, 159 aa, Homo sapiens
LCSPRPCPARPAPAMLALRCGSRWLGLLSVPRSVPLRLPAARACSKGSGDPSSSSSSGNPLVYLDVDANGKPLGRVVLELKADVVPKTAENFRALCTGEKGFGYKGSTFHRVIPSFMCQAGDFTNHNGTGGKSIYGSRFPDENFTLKHVGPGEWGPPLG

SEQ ID NO: 19328 - protein, 221 aa, Homo sapiens
LCSPRPCPARPAPAMLALRCGSRWLGLLSVPRSVPLRLPAARACSKGSGDPSSSSSSGNPLVYLDVDANGKPLGRVVLELKADVVPKTAENFRALCTGEKGFGYKGSTFHRVIPSFMCQAGDFTNHNGTGGKSIYGSRFPDENFTLKHVGPGVLSMANAGPNTNGSQFFICTIKTDWLDGKHVVFGHVKEGMDVVKKIESFGSKSGRTSKKIVITDCGQLS

SEQ ID NO: 19329 - protein, 55 aa, Homo sapiens
LLLTRVTRPHRLDGKHVVFGHVKEGMDVVKKIESFGSKSGRTSKKIVITDCGQLS

SEQ ID NO: 19330 - protein, 32 aa, Homo sapiens
MPIGHPAEPCRWWSLGRCCLPSSAQHAPHRAG

SEQ ID NO: 19331 - protein, 483 aa, Homo sapiens
LENLGSCTNGDDHQVKDSLEQLRCHFTWELSIDDDEMPDLENRVLDQIEFLDTKYSVGIHNLLAYVKHLKGQNEEALKSLKEAENLMQEEHDNQANVRSLVTWGNFAWMYYHMGRLAEAQTYLDKVENICKKLSNPFRYRMECPEIDCEEGWALLKCGGKNYERAKACFEKVLEVDPENPESSAGYAISAYRLDGFKLATKNHKPFSLLPLRQAVRLNPDNGYIKVLLALKLQDEGQEAEGEKYIEEALANMSSQTYVFRYAAKFYRRKGSVDKALELLKKALQETPTSVLLHHQIGLCYKAQMIQIKEATKGQPRGQNREKLDKMIRSAIFHFESAVEKKPTFEVAHLDLARMYIEAGNHRKAEENFQKLLCMKPVVEETMQDIHFHYGRFQEFQKKSDVNAIIHYLKAIKIEQASLTRDKSINSLKKLVLRKLRRKALDLESLSLLGFVYKLEGNMNEALEYYERALRLAADFENSVRQGP

SEQ ID NO: 19332 - protein, 1082 aa, Homo sapiens
LSAAKPLRPSQRPGPRPGLDFLAGTVMASQPNSSAKKKEEKGKNIQVVVRCRPFNLAERKASAHSIVECDPVRKEVSVRTGGLADKSSRKTYTFDMVFGASTKQIDVYRSVVCPILDEVIMGYNCTIFAYGQTGTGKTFTMEGERSPNEEYTWEEDPLAGIIPRTLHQIFEKLTDNGTEFSVKVSLLEIYNEELFDLLNPSSDVSERLQMFDDPRNKRGVIIKGLEEITVHNKDEVYQILEKGAAKRTTAATLMNAYSSRSHSVFSVTIHMKETTIDGEELVKIGKLNLVDLAGSENIGRSGAVDKRAREAGNINQSLLTLGRVITALVERTPHVPYRESKLTRILQDSLGGRTRTSIIATISPASLNLEETLSTLEYAHRAKNILNKPEVNQKLTKKALIKEYTEEIERLKRDLAAAREKNGVYISEENFRVMSGKLTVQEEQIVELIEKIGAVEEELNRVTELFMDNKNELDQCKSDLQNKTQELETTQKHLQETKLQLVKEEYITSALESTEEKLHDAASKLLNTVEETTKDVSGLHSKLDRKKAVDQHNAEAQDIFGKNLNSLFNNMEELIKDGSSKQKAMLEVHKTLFGNLLSSSVSALDTITTVALGSLTSIPENVSTHVSQIFNMILKEQSLAAESKTVLQELINVLKTDLLSSLEMILSPTVVSILKINSQLKHIFKTSLTVADKIEDQKKELDGFLSILCNNLHELQENTICSLVESQKQCGNLTEDLKTIKQTHSQELCKLMNLWTERFCALEEKCENIQKPLSSVQENIQQKSKDIVNKMTFHSQKFCADSDGFSQELRNFNQEGTKLVEESVKHSDKLNGNLEKISQETEQRCESLNTRTVYFSEQWVSSLNEREQELHNLLEVVSQCCEASSSDITEKSDGRKAAHEKQHNIFLDQMTIDEDKLIAQNLELNETIKIGLTKLNCFLEQDLKLDIPTGTTPQRKSYLYPSTLVRTEPREHLLDQLKRKQPELLMMLNCSENNKEETIPDVDVEEAVLGQYTEEPLSQEPSVDAGVDCSSIGGVPFFQHKKSHGKDKENRGINTLERSKVEETTEHLVTKSRLPLRAQINL

SEQ ID NO: 19333 - protein, 46 aa, Homo sapiens
LAQGRRPRRVARGGQDPQPRGRAGPDRQGGQVSGQIASAGFNLCPL

SEQ ID NO: 19334 - protein, 63 aa, Homo sapiens
LLKQQEEQTRVALLEQQMQACTLDFENEKLDRQHVQHQLHVILKELRKARNQITQLESLVSLE

SEQ ID NO: 19335 - protein, 117 aa, Homo sapiens
MKARRNKKQIPSFRKLIKTSKVKLENKLKNKQFKQQSTLKKYRKEQRKLRQAVKDAVSKKPIPLENPKEKRPGKRIEREEEEEEEALPLDMMDEDDLQLMKDLGQRVSFLTRDLSSR

SEQ ID NO: 19336 - protein, 87 aa, Homo sapiens
MKARRNKKQIPSFRKLIKTSKVKLENKLKNKQFKQQSTLKKYRKEQRKLRQAVKDAVSKKPIPLENPKEKRPDLPRVGKDSSPIGLL

SEQ ID NO: 19337 - protein, 706 aa, Homo sapiens
MVKIQLMQVKRSQEILSVAKKNKKENEDENSSSTNLCVEDLQKNKDSNSIIKDRLSETVRQNTKFFFDPVRKCNGQPVPFQQPKHFTGGVMRWYQVEGMEWLRMLWENGINGILADEMGLGKTVQCIATIALMIQRGVPGPFLVCGPLSTLPNWMAEFKRFTPDIPTMLYHGTQEERQKLVRNIYKRKGTLQIHPVVITSFEIAMRDRNALQHCYWKYLIVDEGHRIKNMKCRLIRELKRFNADNKLLLTGTPLQNNLSELWSLLNFLLPDVFDDLKSFESWFDITSLSETAEDIIAKEREQNVLHMLHQILTPFLLRRLKSDVALEVPPKREVVVYAPLSKKQEIFYTAIVNRTIANMFGSSEKETIELSPTGRPKRRTRKSINYSKIDDFPNELEKLISQIQPEVDRERAVVEVNIPVESEVNLKLQNIMMLLRKCCNHPYLIEYPIDPVTQEFKIDEELVTNSGKFLILDRMLPELKKRGHKVLLFSQMTSMLDILMDYCHLRDFNFSRLDGSMSYSEREKNMHSFNTDPEVFIFLVSTRAGGLGINLTAADTVIIYDSDWNPQSDLQAQDRCHRIGQTKPVVVYRLVTANTIDQKIVERAAAKRKLEKLIIHKNHFKGGQSGLNLSKNFLDPKELMELLKSRDYEREIKGSREKVISDKDLELLLDRSDLIDQMNASGPIKEKMGIFKILENSEDSSPECLF

SEQ ID NO: 19338 - protein, 103 aa, Homo sapiens
MSWDRESTEIRYRRLQHLLEKSNIYSKFLLTKMEQQQLEEQKKKEKLERKKESLKVKKGKNSIDASEEKPVMRKKRGREDESYNISEVMSKEECKLRCLSTEA

SEQ ID NO: 19339 - protein, 79 aa, Homo sapiens
LVTNSGKFLILDRMLPELKKRGHKVVLLIGILDCSIIFLSIIRNIKICLISGAAFFTNDKHVGHFDGLLPSQRFQLQQA

SEQ ID NO: 19340 - protein, 341 aa, Homo sapiens
LSPRVVARHSRAMTTQQIDLQGPGPWGFRLVGGKDFEQPLAISRVTPGSKAALANLCIGDVITAIDGENTSNMTHLEAQNRIKGCTDNLTLTVARSEHKVWSPLVTEEGKRHPYKMNLASEPQEVLHIGSAHNRSAMPFTASPASSTTARVITNQYNNPAGLYSSENISNFNNALESKTAASGVEANSRPLDHAQPPSSLVIDKESEVYKMLQEKQELNEPPKQSTSFLVLQEILESEEKGDPNKPSGFRSVKAPVTKVAASIGNAQKLPMCDKCGTGIVGVFVKLRDRHRHPECYVCTDCGTNLKQKGHFFVEDQIYCEKHARERVTPPEGYEVVTVFPK

SEQ ID NO: 19341 - protein, 57 aa, Homo sapiens
LRCGWGNRGKTEAPDAFSLLCSSAIDCPDVQRETHTRFAHENWGADGQADRLCLFSE

SEQ ID NO: 19342 - protein, 51 aa, Homo sapiens
LKHSPGAELARNASCCPSLRELPSQSLSLKASSPRMQQDPQPTFLSSPGAS

SEQ ID NO: 19343 - protein, 33 aa, Homo sapiens
LKTMEIIFIGGGSIIHEPIFLVESVGKLIQWIK

SEQ ID NO: 19344 - protein, 914 aa, Homo sapiens
LQTTCPATTMSSECDGGSKAVMNGLAPGSNGQDKATADPLRARSISAVKIIPVKTVKNASGLVLPTDMDLTKICTGKGAVTLRASSSYRETPSSSPASPQETRQHESKPGLEPEPSSADEWRLSSSADANGNAQPSSLAAKGYRSVHPNLPSDKSQRWPHHSQPARASGSFAPISQTPPSFSPPPPLVPPAPEDLRRVSEPDLTGAVSSTDSSPLLNEVSSSLIGTDSQAFPSVSKPSSAYPSTTIVNPTIVLLQHNREQQKRLSSLSDPVSERRVGEQDSAPTQEKPTSPGKAIEKRAKDDSRRVVKSTQDLSDVSMDEVGIPLRNTERSKDWYKTMFKQIHKLNRDDDSDLYSPRYSFSEDTKSPLSVPRSKSEMSYIDGEKVVKRSATLPLPARSSSLKSSSERNDWEPPDKKVDTRKYRAEPKSIYEYQPGKSSVLTNEKMSRDISPEEIDLKNEPWYKFFSELEFGKPPPKKIWDYTPGDCSILPREDRKSSAISPTPEISSETPGYIYSSNFHAVKRESDGAPGDLTSLENERQIYKSVLEGGDIPLQGLSGLKRPSSSASTKDSESPRHFIPADYLESTEEFIRRRHDDKEKLLADQRRLKREQEEADIAARRHTGVIPTHHQFITNERFGDLLNIDDTAKRKSGSEMRPARAKFDFKAQTLKELPLQKGDIVYIYKQIDQNWYEGEHHGRVGIFPRTYIELLPPAEKAQPKKLTPVQVLEYGEAIAKFNFNGDTQVEMSFRKGERITLLRQVDENWYEGRIPGTSRQGIFPITYVDVIKRPLVKNPVDYMDLPFSSSPSRSATASPQLSHHSLRAGPDLTESEKSYVQPQAQQRRVTPDRSQTSQDLFSYQALYSYIPQNDDELELRDGDIVDVMEKCDDGWFVGTSRRTKQFGTFPGNYVKPLYL

SEQ ID NO: 19345 - protein, 1282 aa, Homo sapiens
LSSSEPQLQTTCPATTMSSECDGGSKAVMNGLAPGSNGQDKATADPLRARSISAVKIIPVKTVKNASGLVLPTDMDLTKICTGKGAVTLRASSSYRETPSSSPASPQETRQHESKPGLEPEPSSADEWRLSSSADANGNAQPSSLAAKGYRSVHPNLPSDKSQDATSSSAAQPEVIVVPLYLVNTDRGQEGTARPPTPLGPLGCVPTIPATASAASPLTFPTLDDFIPPHLQRWPHHSQPARASGSFAPISQTPPSFSPPPPLVPPAPEDLRRVSEPDLTGAVSSTDSSPLLNEVSSSLIGTDSQAFPSVSKPSSAYPSTTIVNPTIVLLQHNREQQKRLSSLSDPVSERRVGEQDSAPTQEKPTSPGKAIEKRAKDDSRRVVKSTQDLSDVSMDEVGIPLRNTERSKDWYKTMFKQIHKLNRDDDSDLYSPRYSFSEDTKSPLSVPRSKSEMSYIDGEKVVKRSATLPLPARSSSLKSSSERNDWEPPDKKVDTRKYRAEPKSIYEYQPGKSSVLTNEKMSRDISPEEIDLKNEPWYKFFSELEFGKPPPKKIWDYTPGDCSILPREDRKTNLDKDLSLCQTELEADLEKMETLNKAPSANVPQSSAISPTPEISSETPGYIYSSNFHAVKRESDGAPGDLTSLENERQIYKSVLEGGDIPLQGLSGLKRPSSSASTKDSESPRHFIPADYLESTEEFIRRRHDDKEKLLADQRRLKREQEEADIAARRHTGVIPTHHQFITNERFGDLLNIDDTAKRKSGSEMRPARAKFDFKAQTLKELPLQKGDIVYIYKQIDQNWYEGEHHGRVGIFPRTYIELLPPAEKAQPKKLTPVQVLEYGEAIAKFNFNGDTQVEMSFRKGERITLLRQVDENWYEGRIPGTSRQGIFPITYVDVIKRPLVKNPVDYMDLPFSSSPSRSATASPQFSSHSKLITPAPSSLPHSRRALSPEMHAVTSEWISLTVGVPGRRSLALTPPLPPLPEASIYNTDHLALSPRASPSLSLSLPHLSWSDRPTPRSVASPLALPSPHKTYSLAPTSQASLHMNGDGGVHTPSSGIHQDSFLQLPLGSSDSVISQLSDAFSSQSKRQPWREESGQYERKAERGAGERGPGGPKISKKSCLKPSDVVRCLSTEQRLSDLNTPEESRPGKPLGSAFPGSEAEQTERHRGGEQAGRKAARRGGSQLSHHSLRAGPDLTESEKSYVQPQAQQRRVTPDRSQTSQDLFSYQALYSYIPQNDDELELRDGDIVDVMEKCDDGWFVGTSRRTKQFGTFPGNYVKPLYL

SEQ ID NO: 19346 - protein, 832 aa, Homo sapiens
LSSSEPQLQTTCPATTMSSECDGGSKAVMNGLAPGSNGQDKDMDLTKICTGKGAVTLRASSSYRETPSSSPASPQETRQHESKPGLEPEPSSADEWRLSSSADANGNAQPSSLAAKGYRSVHPNLPSDKSQDATSSSAAQPEVIVVPLYLVNTDRGQEGTARPPTPLGPLGCVPTIPATASAASPLTFPTLDDFIPPHLQRWPHHSQPARASGSFAPISQTPPSFSPPPPLVPPAPEDLRRVSEPDLTGAVSSTDSSPLLNEVSSSLIGTDSQAFPSVSKPSSAYPSTTIVNPTIVLLQHNREQQKRLSSLSDPVSERRVGEQDSAPTQEKPTSPGKAIEKRAKDDSRRVVKSTQDLSDVSMDEVGIPLRNTERSKDWYKTMFKQIHKLNRDDDSDLYSPRYSFSEDTKSPLSVPRSKSEMSYIDGEKVVKRSATLPLPARSSSLKSSSERNDWEPPDKKVDTRKYRAEPKSIYEYQPGKSSVLTNEKMSSAISPTPEISSETPGYIYSSNFHAVKRESDGAPGDLTSLENERQIYKSVLEGGDIPLQGLSGLKRPSSSASTKDSESPRHFIPADYLESTEEFIRRRHDDKEMRPARAKFDFKAQTLKELPLQKGDIVYIYKQIDQNWYEGEHHGRVGIFPRTYIELLPPAEKAQPKKLTPVQVLEYGEAIAKFNFNGDTQVEMSFRKGERITLLRQVDENWYEGRIPGTSRQGIFPITYVDVIKRPLVKNPVDYMDLPFSSSPSRSATASPQQPQAQQRRVTPDRSQTSQDLFSYQALYSYIPQNDDELELRDGDIVDVMEKCDDGWFVGTSRRTKQFGTFPGNYVKPLYL

SEQ ID NO: 19347 - protein, 797 aa, Homo sapiens
LSSSEPQLQTTCPATTMSSECDGGSKAVMNGLAPGSNGQDKATADPLRARSISAVKIIPVKTVKNASGLVLPTDMDLTKICTGKGAVTLRASSSYRETPSSSPASPQETRQHESKPGLEPEPSSADEWRLSSSADANGNAQPSSLAAKGYRSVHPNLPSDKSQDSSPLLNEVSSSLIGTDSQAFPSVSKPSSAYPSTTIVNPTIVLLQHNREQQKRLSSLSDPVSERRVGEQDSAPTQEKPTSPGKAIEKRAKDDSRRVVKSTQDLSDVSMDEVGIPLRNTERSKDWYKTMFKQIHKLNRDDDSDLYSPRYSFSEDTKSPLSVPRSKSEMSYIDGEKVVKRSATLPLPARSSSLKSSSERNDWEPPDKKVDTRKYRAEPKSIYEYQPGKSSVLTNEKMSSAISPTPEISSETPGYIYSSNFHAVKRESDGAPGDLTSLENERQIYKSVLEGGDIPLQGLSGLKRPSSSASTKDSESPRHFIPADYLESTEEFIRRRHDDKEKLLADQRRLKREQEEADIAARRHTGVIPTHHQFITNERFGDLLNIDDTAKRKSGSEMRPARAKFDFKAQTLKELPLQKGDIVYIYKQIDQNWYEGEHHGRVGIFPRTYIELLPPAEKAQPKKLTPVQVLEYGEAIAKFNFNGDTQVEMSFRKGERITLLRQVDENWYEGRIPGTSRQGIFPITYVDVIKRPLVKNPVDYMDLPFSSSPSRSATASPQQPQAQQRRVTPDRSQTSQDLFSYQALYSYIPQNDDELELRDGDIVDVMEKCDDGWFVGTSRRTKQFGTFPGNYVKPLYL

SEQ ID NO: 19348 - protein, 1167 aa, Homo sapiens
LSSSEPQLQTTCPATTMSSECDGGSKAVMNGLAPGSNGQDKATADPLRARSISAVKIIPVKTVKNASGLVLPTDMDLTKICTGKGAVTLRASSSYRETPSSSPASPQETRQHESKPGLEPEPSSADEWRLSSSADANGNAQPSSLAAKGYRSVHPNLPSDKSQDATSSSAAQPEVIVVPLYLVNTDRGQEGTARPPTPLGPLGCVPTIPATASAASPLTFPTLDDFIPPHLQRWPHHSQPARASGSFAPISQTPPSFSPPPPLVPPAPEDLRRVSEPDLTGAVSSTDSSPLLNEVSSSLIGTDSQAFPSVSKPSSAYPSTTIVNPTIVLLQHNREQQKRLSSLSDPVSERRVGEQDSAPTQEKPTSPGKAIEKRAKDDSRRVVKSTQDLSDVSMDEVGIPLRNTERSKDWYKTMFKQIHKLNRDTPEENPYFPTYKFPELPEIQQTSEETKSCSVMSPRLECSGTVIAHCSLKLLDSSNPPTSASQVAGTADDDSDLYSPRYSFSEDTKSPLSVPRSKSEMSYIDGEKVVKRSATLPLPARSSSLKSSSERNDWEPPDKKVDTRKYRAEPKSIYEYQPGKSSVLTNEKMSRDISPEEIDLKNEPWYKFFSELEFGKPPPKKIWDYTPGDCSILPREDRKTNLDKDLSLCQTELEADLEKMETLNKAPSANVPQSSAISPTPEISSETPGYIYSSNFHAVKRESDGAPGDLTSLENERQIYKSVLEGGDIPLQGLSGLKRPSSSASTKDSESPRHFIPADYLESTEEFIRRRHDDKEKLLADQRRLKREQEEADIAARRHTGVIPTHHQFITNERFGDLLNIDDTAKRKSGSEMRPARAKFDFKAQTLKELPLQKGDIVYIYKQIDQNWYEGEHHGRVGIFPRTYIELLPPAEKAQPKKLTPVQVLEYGEAIAKFNFNGDTQVEMSFRKGERITLLRQVDENWYEGRIPGTSRQGIFPITYVDVIKRPLVKNPVDYMDLPFSSSPSRSATASPQPWREESGQYERKAERGAGERGPGGPKISKKSCLKPSDVVRCLSTEQRLSDLNTPEESRPGKPLGSAFPGSEAEQTERHRGGEQAGRKAARRGGSQQPQAQQRRVTPDRSQTSQDLFSYQALYSYIPQNDDELELRDGDIVDVMEKCDDGWFVGTSRRTKQFGTFPGNYVKPLYL

SEQ ID NO: 19349 - protein, 1308 aa, Homo sapiens
LSSSEPQLQTTCPATTMSSECDGGSKAVMNGLAPGSNGQDKATADPLRARSISAVKIIPVKTVKNASGLVLPTDMDLTKICTGKGAVTLRASSSYRETPSSSPASPQETRQHESKPGLEPEPSSADEWRLSSSADANGNAQPSSLAAKGYRSVHPNLPSDKSQDATSSSAAQPEVIVVPLYLVNTDRGQEGTARPPTPLGPLGCVPTIPATASAASPLTFPTLDDFIPPHLQRWPHHSQPARASGSFAPISQTPPSFSPPPPLVPPAPEDLRRVSEPDLTGAVSSTDSSPLLNEVSSSLIGTDSQAFPSVSKPSSAYPSTTIVNPTIVLLQHNREQQKRLSSLSDPVSERRVGEQDSAPTQEKPTSPGKAIEKRAKDDSRRVVKSTQDLSDVSMDEVGIPLRNTERSKDWYKTMFKQIHKLNRDTPEENPYFPTYKFPELPEIQQTSEEDNPYTPTYQFPASTPSPKSEDDDSDLYSPRYSFSEDTKSPLSVPRSKSEMSYIDGEKVVKRSATLPLPARSSSLKSSSERNDWEPPDKKVDTRKYRAEPKSIYEYQPGKSSVLTNEKMSRDISPEEIDLKNEPWYKFFSELEFGKPPPKKIWDYTPGDCSILPREDRKTNLDKDLSLCQTELEADLEKMETLNKAPSANVPQSSAISPTPEISSETPGYIYSSNFHAVKRESDGAPGDLTSLENERQIYKSVLEGGDIPLQGLSGLKRPSSSASTKDSESPRHFIPADYLESTEEFIRRRHDDKEKLLADQRRLKREQEEADIAARRHTGVIPTHHQFITNERFGDLLNIDDTAKRKSGSEMRPARAKFDFKAQTLKELPLQKGDIVYIYKQIDQNWYEGEHHGRVGIFPRTYIELLPPAEKAQPKKLTPVQVLEYGEAIAKFNFNGDTQVEMSFRKGERITLLRQVDENWYEGRIPGTSRQGIFPITYVDVIKRPLVKNPVDYMDLPFSSSPSRSATASPQFSSHSKLITPAPSSLPHSRRALSPEMHAVTSEWISLTVGVPGRRSLALTPPLPPLPEASIYNTDHLALSPRASPSLSLSLPHLSWSDRPTPRSVASPLALPSPHKTYSLAPTSQASLHMNGDGGVHTPSSGIHQDSFLQLPLGSSDSVISQLSDAFSSQSKRQPWREESGQYERKAERGAGERGPGGPKISKKSCLKPSDVVRCLSTEQRLSDLNTPEESRPGKPLGSAFPGSEAEQTERHRGGEQAGRKAARRGGSQQPQAQQRRVTPDRSQTSQDLFSYQALYSYIPQNDDELELRDGDIVDVMEKCDDGWFVGTSRRTKQFGTFPGNYVKPLYL

SEQ ID NO: 19350 - protein, 1310 aa, Homo sapiens
LSSSEPQLQTTCPATTMSSECDGGSKAVMNGLAPGSNGQDKDMDLTKICTGKGAVTLRASSSYRETPSSSPASPQETRQHESKPGLEPEPSSADEWRLSSSADANGNAQPSSLAAKGYRSVHPNLPSDKSQDSSPLLNEVSSSLIGTDSQAFPSVSKPSSAYPSTTIVNPTIVLLQHNRDPVSERRVGEQDSAPTQEKPTSPGKAIEKRAKDDSRRVVKSTQDLSDVSMDEVGIPLRNTERSKDWYKTMFKQIHKLNRDDDSDLYSPRYSFSEDTKSPLSVPRSKSEMSYIDGEKVVKRSATLPLPARSSSLKSSSERNDWEPPDKKVDTRKYRAEPKSIYEYQPGKSSVLTNEKMSRDISPEEIDLKNEPWYKFFSELEFGKPTNLDKDLSLCQTELEADLEKMETLNKAPSANVPQSSAISPTPEISSETPGYIYSSNFHAVKRESDGAPGDLTSLENERQIYKSVLEGGDIPLQGLSGLKRPSSSASTKVDRKGGNAHMISSSSVHSRTFNTSNALGPVCKHKKPLSAAKACISEILPSKFKPRLSAPSALLQEQKSILLPSEKAQSCENLCVSGSLNDSKRGLPLQVGGSIENLLMRSRRDYDSKSSSTMSLQEYSTSGRRPCPLSRKAGMQFTMLYRDMHQINRSGLFLGSISSSSSVRDLASHFEKSSLALSRGELGPSQEGSEHIPKHTVSSRITAFEQLIQRSRSMPSLDLSGRLSKSPTPVLSRGSLTSARSAESLLESTKLHPKEMDGMNSSGVYASPTCSNMAHHALSFRGLVPSEPLSTCSDDVDRCSNISTDSREGSGGSVHGDFPKHRLNKCKGTCPASYTRFTTIRKHEQQQTSRQPEWRLDARGDKSTLLRNIYLMSPLPFRLKKPLHHHPRQPSPGDSSGLLVGQKPDLPSQPHQDQPPSGGKPVVPTRLSSRHTMARLSRSSEPSQERPTALEDYPRAINNGNSVPYSDHSLDRNNNPQSELAPSRGDSESPRHFIPADYLESTEEFIRRRHDDKEKLLADQRRLKREQEEADIAARRHTGVIPTHHQFITNERFGDLLNIDDTAKRKSGSEMRPARAKFDFKAQTLKELPLQKGDIVYIYKQIDQNWYEGEHHGRVGIFPRTYIELLPPAEKAQPKKLTPVQVLEYGEAIAKFNFNGDTQVEMSFRKGERITLLRQVDENWYEGRIPGTSRQGIFPITYVDVIKRPLVKNPVDYMDLPFSSSPSRSATASPQQPQAQQRRVTPDRSQTSQDLFSYQALYSYIPQNDDELELRDGDIVDVMEKCDDGWFVGTSRRTKQFGTFPGNYVKPLYL

SEQ ID NO: 19351 - protein, 876 aa, Homo sapiens
LSSSEPQLQTTCPATTMSSECDGGSKAVMNGLAPGSNGQDKDMDLTKICTGKGAVTLRASSSYRETPSSSPASPQETRQHESKPDEWRLSSSADANGNAQPSSLAAKGYRSVHPNLPSDKSQVLSPPRPPLPQKDRFAWQSPTIHNTYKDSLYLSSPKPYVPLGTPRQQNPSQPQPISVLLAAGSAPKGVVCPGSLLPDSTFPSASSQPQQRYAATRTVYHKNVSSNPCHEAVGIKKVSSLYVPCLSNNICLAASENSSRVARDPAEGTPLEAAGTRAPAPGLVSRTAGTGKPPPAPPPDPPKLFFDIRKDAVNRGESPSLGTQASFPDVRPPVLGPRVTSDPENRKSKESYLLQPSYPAKDATSSSAAQPEVIVVPLYLVNTDRGQEGTARPPTPLGPLGCVPTIPATASAASPLTFPTLDDFIPPHLQRWPHHSQPARASGSFAPISQTPPSFSPPPPLVPPAPEDLRRVSEPDLTGAVSSTDSSPLLNEVSSSLIGTDSQAFPSVSKPSSAYPSTTIVNPTIVLLQHNREQQKRLSSLSDPVSERRVGEQDSAPTQEKPTSPGKAIEKRAKDDSRRVVKSTQDLSDVSMDEVGIPLRNTERSKDWYKTMFKQIHKLNRDDDSDLYSPRYSFSEDTKSPLSVPRSKSEMSYIDGEKVVKRSATLPLPARSSSLKSSSERNDWEPPDKKVDTRKYRAEPKSIYEYQPGKSSVLTNEKMSSAISPTPEISSETPGYIYSSNFHAVKRESDGAPGDLTSLENERQIYKSVLEGGDIPLQGLSGLKRPSSSASTKDSESPRHFIPADYLESTEEFIRRRHDDKEKLLADQRRLKREQEEADIAARRHTGVIPTHHQFITNERFGDLLNIDDTAKRKSG

SEQ ID NO: 19352 - protein, 130 aa, Homo sapiens
LYSPRYSFSEDTKSPLSVPRSKSEMSYIDGEKVVKRSATLPLPARSSSLKSSSERNDWEPPDKKVDTRKYRAEPKSIYEYQPGKSSVLTNEKMVMCILKLFCLTVPMFFNQNALCSWITFFPLEIDLTLF

SEQ ID NO: 19353 - protein, 33 aa, Homo sapiens
LGLQELASFGRVRESFLPRAPGPMHLPTTLNHW

SEQ ID NO: 19354 - protein, 27 aa, Homo sapiens
LASFGRVRESFLPRAPGPMHLPTTLNH

SEQ ID NO: 19355 - protein, 520 aa, Homo sapiens
LTKMATEAQSEGEVPARESGRSDAICSFVICNDSSLRGQPIIFNPDFFVEKLRHEKPEIFTELVVSNITRLIDLPGTELAQLMGEVDLKLPGGAGPASGFFRSLMSLKRKEKGVIFGSPLTEEGIAQIYQLIEYLHKNLRVEGLFRVPGNSVRQQILRDALNNGTDIDLESGEFHSNDVATLLKMFLGELPEPLLTHKHFNAHLKIADLMQFDDKGNKTNIPDKDRQIEALQLLFLILPPPNRNLLKLLLDLLYQTAKKQDKNKMSAYNLALMFAPHVLWPKNVTANDLQENITKLNSGMAFMIKHSQKLFKAPAYIRECARLHYLGSRTQASKDDLDLIASCHTKSFQLAKSQKRNRVDSCPHQEETQHHTEEALRELFQHVHDMPESAKKKQLIRQFNKQSLTQTPGREPSTSQVQKRARSRSFSGLIKRKVLGNQMMSEKKKKNPTPESVAIGELKGTSKENRNLLFSGSPAVTMTPTRLKWSEGKKEGKKGNSMATTSLGSIRMTLRGSSSCGCCS

SEQ ID NO: 19356 - protein, 498 aa, Homo sapiens
LLTKMATEAQSEGEVPARESGRSDAICSFVICNDSSLRGQPIIFNPDFFVEKLRHEKPEIFTELVVSNITRLIDLPGTELAQLMGEVDLKLPGGAGPASGFFRSLMSLKRKEKGVIFGSPLTEEGIAQIYQLIEYLHKNLRVEGLFRVPGNSVRQQILRDALNNGTDIDLESGEFHSNDVATLLKMFLGELPEPLLTHKHFNAHLKIADLMQFDDKGNKTNIPDKDRQIEALQLLFLILPPPNRNLLKLLLDLLYQTAKKQDKNKMSAYNLALMFAPHVLWPKNVTANDLQENITKLNSGMAFMIKHSQKLFKAPAYIRECARLHYLGSRTQASKDDLDLIASCHTKSFQLAKSQKRNRVDSCPHQEETQHHTEEALRELFQHVHDMPESAKKKQLIRQFNKQSLTQTPGREPSTSQVQKRARSRSFSGLIKRKVLGNQMMSEKKKKNPTPESVAIGELKGTSKENRNLLFSGSPAVTMTPTRLKWSEGKKEGKKGFL

SEQ ID NO: 19357 - protein, 469 aa, Homo sapiens
LLTKMATEAQSEGEVPARESGRSDAICSFVICNDSSLRGQPIIFNPDFFVEKLRHEKPEIFTELVVSNITRLIDLPGTELAQLMGEVDLKLPGGAGPASGFFRSLMSLKRKEKGVIFGSPLTEEGIAQIYQLIEYLHKNLRVEGLFRVPGNSVRQQILRDALNNGTDIDLESGEFHSNDVATLLKMFLGELPEPLLTHKHFNAHLKIADLMQFDDKGNKTNIPDKDRQIEALQLLFLILPPPNRNLLKLLLDLLYQTAKKQDKNKMSAYNLALMFAPHVLWPKNAPAYIRECARLHYLGSRTQASKDDLDLIASCHTKSFQLAKSQKRNRVDSCPHQEETQHHTEEALRELFQHVHDMPESAKKKQLIRQFNKQSLTQTPGREPSTSQVQKRARSRSFSGLIKRKVLGNQMMSEKKKKNPTPESVAIGELKGTSKENRNLLFSGSPAVTMTPTRLKWSEGKKEGKKGFL

SEQ ID NO: 19358 - protein, 291 aa, Homo sapiens
VPARESGRSDAICSFVICNDSSLRGQPIIFNPDFFVEKLRHEKPEIFTELVVSNITRLIDLPGTELAQLMGEVDLKLPGGAGPASGFFRSLMSLKRKEKGVIFGSPLTEEGIAQIYQLIEYLHKNLRVEGLFRVPGNSVRQQILRDALNNGTDIDLESGEFHSNDVATLLKMFLGELPEPLLTHKHFNAHLKIADLMQFDDKGNKTNIPDKDRQIEALQLLFLILPPPNRNLLKLLLDLLYQTAKKQDKNKMSAYNLALMFAPHVLWPKNGLVLLPTLEESNTITTHCSLI

SEQ ID NO: 19359 - protein, 142 aa, Homo sapiens
LTKMATEAQSEGEVPARESGRSDAICSFVICNDSSLRGQPIIFNPDFFVEKLRHEKPEIFTELVVSNITRLIDLPGTELAQLMGEVDLKLPGGAGPASGFFRSLMSLKRKGRRCVCEGWAGLSCSLGFSLNIYTFTEELLLT

SEQ ID NO: 19360 - protein, 379 aa, Homo sapiens
LKEGAGERWGLPTRGKHDWARVWARSRAALTLPSAGLDHAASLGWTAVKGAQHGRLASLKAWCSVRQMEAIGKLSDDMRRHFRMKLRNLFTKFIRKFGFELVKRLLPEEYHRVLVNIRKAEARAKRHRALSQAAVEEEEEEEEEEEPAQGKGDSIEEILADSEDEEDNEEEERSRGKEQRKLARQRSRAWLKEGGGDEPLNFLDPKVAQRVLATQPGPGRGRKKDHGFKVSADGRLIIREEADGNKMEEEEGAKGEDEEMADPMEDVIIRNKKHQKLKHQKEAEEEELEIPPQYQAGGSGIHRPVAKKAMPGAEYKAKKAKGDVKKKGRPDPYAYIPLNRSKLNRRKKMKLQGQFKGLVKAARRGSQVGHKNRRKDRRP

SEQ ID NO: 19361 - protein, 597 aa, Homo sapiens
VSTVQSWVSGVDWWAPRHTPPTPVPRPGVSHSLSTFHWSSVKPHEPPRTPAQNPSSAGGCSVDSIGQGVSPRPPSPVPVCQSKAHGVQKKAYRVLEEVCASPQGPGALFVQSHLEDLKKTLLDSLRSTSSPAKRPRLKCLLHIVRKLSAEHKEFITALIPEVILCTKEVSVGARKNAFALLVEMGHAFLRFGSNQEEALQCYLVLIYPGLVGAVTMVSCSILALTHLLFEFKGLMGTSTVEQLLENVCLLLASRTRDVVKSALGFIKVAVTVMDVAHLAKHVQLVMEAIGKLSDDMRRHFRMKLRNLFTKFIRKFGFELVKRLLPEEYHRVLVNIRKAEARAKRHRALSQAAVEEEEEEEEEEEPAQGKGDSIEEILADSEDEEDNEEEERSRGKEQRKLARQRSRAWLKEGGGDEPLNFLDPKVAQRVLATQPGPGRGRKKDHGFKVSADGRLIIREEADGNKMEEEEGAKGEDEEMADPMEDVIIRNKKHQKLKHQKEAEEEELEIPPQYQAGGSGIHRPVAKKAMPGAEYKAKKAKGDVKKKGRPDPYAYIPLNRSKLNRRKKMKLQGQFKGLVKAARRGSQVGHKNRRKDRRP

SEQ ID NO: 19362 - protein, 152 aa, Homo sapiens
VSRFAKNFLPILFNLYGQPVAAGDTPAPRRAVLETIRTYLTITDTQLVNSLLEKASEKVLDPASSDFTRLSVLDLVVALAPCADEAAISKLYSTIRPYLEVSLGGQERHTATLGGRWAVGRWGLSSCLCPLLLPEIRSLSAFSCSGFSLCPV

SEQ ID NO: 19363 - protein, 74 aa, Homo sapiens
LHMLTLLKDLLPCFPEGLVKSCSETLLRVMTLSHVVSSGPKAGERGTCSGGIWGTHWSVKMQGLGSPSLTVFLS

SEQ ID NO: 19364 - protein, 22 aa, Homo sapiens
VGSERVSTSLEAGHLSSFLATA

SEQ ID NO: 19365 - protein, 19 aa, Homo sapiens
MVVWIEPGPAGAPSRRGWQ

SEQ ID NO: 19366 - protein, 223 aa, Homo sapiens
LADWGVGRRQGRNDIATVSICKKCIYPKPARTHHCSICNRCVLKMDHHCPWLNNCVGHYNHRYFFSFCFFMTLGCVYCSYGSWDLFREAYAAIEKMKQLDKNKLQAVANQTYHQTPPPTFSFRERMTHKSLVYLWFLCSRGETSIERHINKKERRRLQAKGRVFRNPYNYGCLDNWKVFLGVDTGRHWLTRVLLPSSHLPHGNGMSWEPPPWVTAHSASVMAV

SEQ ID NO: 19367 - protein, 16 aa, Homo sapiens
MPGTRRPPSQGKRKRR

SEQ ID NO: 19368 - protein, 343 aa, Homo sapiens
LASGASDSEIFIWDLNNLNVPMTLGSKSQPPEDIKALSWNRQAQHILSSAHPSGKAVVWDLRKNEPIIKVSDHSNRMHCSGLAWHPDIATQLVLCSEDDRLPVIQLWDLRFASSPLKVLESHSRGILSVSWSQADAELLLTSAKDSQILCRNLGSSEVVYKLPTQSSWCFDVQWCPRDPSVFSAASFNGWISLYSVMGRSWEVQHMRQADKISSSFSKGQPLPPLQVPEQVAQAPLIPPLKKPPKWIRRPTGVSFAFGGKLVTFGLPSTPAHLVPQPCPRLVFISQVTTESEFLMRSAELQEALGSGNLLNYCQNKSQQALLQSEKMLWQFLKPARDSSGARR

SEQ ID NO: 19369 - protein, 210 aa, Homo sapiens
LLHIATQSVVENAGQEAARSPARRHSYSLEAAEPKQRGEGGGTKPRGFRFRDDRSRSFASEVKGVNTLWGSFEISNVRLARVMLTQFAEGRLEDQLDKYDHWADRFEDLPLYFMTFHGQQSIRTVIDTMQHAVYVYDICHVIIDNLQFMMGHEQLSTDRIAAQDYIIGVFRKFATDNNCHVTLVIHPRKEDDDKELQTASIFGSAKVSGL

SEQ ID NO: 19370 - protein, 41 aa, Homo sapiens
MQMTIEMRTTRRCCGGAVEGQQAVERRHSSVSMPWICVPRG

SEQ ID NO: 19371 - protein, 43 aa, Homo sapiens
LPTHVTMSNDVSEEESEEEEEDSDEEEVELCPILPAKKQGGRP

SEQ ID NO: 19372 - protein, 128 aa, Homo sapiens
VSGAYGSRPRSLWTVFSSLCLTEGAKDECNVVEVVARNHDHQEIAVPVANLKLSCQPMLSLDDFQLQPPVTFRLKSGSGPVRITGRHQIVTMSNDVSEEESEEEEEDSDEEEVELCPILPAKKQGGRP

SEQ ID NO: 19373 - protein, 99 aa, Homo sapiens
LSQESRTRAGGVGGLRVPAPVTMDSFFFGCELSGHTRSFTFKVEEEDDAEHVLALTMLCLTEGAKDECNVVEVVARNHDHQEIAVPVANLKLSCQPMLR

SEQ ID NO: 19374 - protein, 715 aa, Homo sapiens
LSRAASTTVVTRIAWRMADAGIRRVVPSDLYPLVLGFLRDNQLSEVANKFAKATGATQQDANASSLLDIYSFWLKSAKVPERKLQANGPVAKKAKKKASSSDSEDSSEEEEEVQGPPAKKAAVPAKRVGLPPGKAAAKASESSSSEESSDDDDEEDQKKQPVQKGVKPQAKAAKAPPKKAKSSDSDSDSSSEDEPPKNQKPKITPVTVKAQTKAPPKPARAAPKIANGKAASSSSSSSSSSSSDDSEEEKAAATPKKTVPKKQVVAKAPVKAATTPTRKSSSSEDSSSDEEEEQKKPMKNKPGPYSSVPPPSAPPPKKSLGTQPPKKAVEKQQPVESSEDSSDESDSSSEEEKKPPTKAVVSKATTKPPPAKKAAESSSDSSDSDSSEDDEAPSKPAGTTKNSSNKPAVTTKSPAVKPAAAPKQPVGGGQKLLTRKADSSSSEEESSSSEEEKTKKMVATTKPKATAKAALSLPAKQAPQGSRDSSSDSDSSSSEEEEEKTSKSAVKKKPQKVAGGAAPSKPASAKKGKAESSNSSSSDDSSEEEEEKLKGKGSPRPQAPKANGTSALTAQNGKAAKNSEEEEEEKKKAAVVVSKSGSLKKRKQNEAAKEAETPQAKKIKLQTPNTFPKRKKGEKRASSPFRRVREEEIEVDSRVADNSFDAKRGAAGDWGERANQVLKFTKGKSFRHEKTKKKRGSYRGGSISVQVNSIKFDSE

SEQ ID NO: 19375 - protein, 725 aa, Homo sapiens
LSRAASTTVVTRIAWRMADAGIRRVVPSDLYPLVLGFLRDNQLSEVANKFAKATGATQQDANASSLLDIYSFWLKSAKVPERKLQANGPVAKKAKKKASSSDSEDSSEEEEEVQGPPAKKAAVPAKRVGLPPGKAAAKASESSSSEESSDDDDEEDQKKQPVQKGVKPQAKAAKAPPKKAKSSDSDSDSSSEDEPPKNQKPKITPVTVKAQTKAPPKPARAAPKIANGKAASSSSSSSSSSSSDDSEEEKAAATPKKVWTITSVRAETVPKKQVVAKAPVKAATTPTRKSSSSEDSSSDEEEEQKKPMKNKPGPYSSVPPPSAPPPKKSLGTQPPKKAVEKQQPVESSEDSSDESDSSSEEEKKPPTKAVVSKATTKPPPAKKAAESSSDSSDSDSSEDDEAPSKPAGTTKNSSNKPAVTTKSPAVKPAAAPKQPVGGGQKLLTRKADSSSSEEESSSSEEEKTKKMVATTKPKATAKAALSLPAKQAPQGSRDSSSDSDSSSSEEEEEKTSKSAVKKKPQKVAGGAAPSKPASAKKGKAESSNSSSSDDSSEEEEEKLKGKGSPRPQAPKANGTSALTAQNGKAAKNSEEEEEEKKKAAVVVSKSGSLKKRKQNEAAKEAETPQAKKIKLQTPNTFPKRKKGEKRASSPFRRVREEEIEVDSRVADNSFDAKRGAAGDWGERANQVLKFTKGKSFRHEKTKKKRGSYRGGSISVQVNSIKFDSE

SEQ ID NO: 19376 - protein, 270 aa, Homo sapiens
VQKDDIEVRFYEDDENGWQAFGDFSPTDVHKQYAIVFRTPPYHKMKIERPVTVFLQLKRKRGGDVSDSKQFTYYPLVEDKEEVQRKRRKALPTFSQPFGGGSHMGGGSGGAAGGYGGAGGGGSLGFFPSSLAYSPYQSGAGPMGCYPGGGGGAQMAATVPSRDSGEEAAEPSAPSRTPQCEPQAPEMLQRAREYNARLFGLAQRSARALLDYGVTADARALLAGQRHLLTAQDENGDTCCETLSAGTAMPWATCWVPWAPARETMRAVGP

SEQ ID NO: 19377 - protein, 137 aa, Homo sapiens
LQVEHPASLGLYPVHLAVRARSPECLDLLVDSGAEVEATERQGGRTALHLATEMEELGLVTHLVTKLRANVNARTFAGNTPLHLAAGLGYPTLTRLLLKAGQSHPQGHLNRVGGRERGASQSPDFAVLNVGPHHTAP

SEQ ID NO: 19378 - protein, 12 aa, Homo sapiens
VVHSFMCEQDGG

SEQ ID NO: 19379 - protein, 377 aa, Homo sapiens
MTLAALRDAEIQKDVQTYYGQVLKRSADLQTNGCVTTARPVPKHIREALQNVHEEVALRYYGCGLVIPEHLENCWILDLGSGSGRDCYVLSQLVGEKGHVTGIDMTKGQVEVAEKYLDYHMEKYGFQASNVTFIHGYIEKLGEAGIKNESHDIVVSNCVINLVPDKQQVLQEAYRVLKHGGELYFSDVYTSLELPEEIRTHKVLWGECLGGALYWKELAVLAQKIGFCPPRLVTANLITIQNKELERVIGDCRFVSATFRLFKHSKTGPTKRCQVIYNGGITGHEKELMFDANFTFKEGEIVEVDEETAAILKNSRFAQDFLIRPIGEKLPTSGGCSALELKDIITDPFKLAEESDSMKSRCVPDAAGGCCGTKKSC

SEQ ID NO: 19380 - protein, 34 aa, Homo sapiens
LADPAESLSLPTNLDRTSTGSSVLPIDSAWRRSW

SEQ ID NO: 19381 - protein, 8 aa, Homo sapiens
MQEAASVT

SEQ ID NO: 19382 - protein, 124 aa, Homo sapiens
LLVGSLSSPLPADVDVIAKFAQLEFQLGDAERAKAIFENTLSTYPKRTDVWSVYIDMTIKHGSQKDVRDIFERVIHLSLAPKRMKFFFKRYLDYEKQHGTEKDVQAVKAKALEYVEAKSSVLED

SEQ ID NO: 19383 - protein, 29 aa, Homo sapiens
LVAPLSLWSHQGFLLLAGGVERSCWEAAG

SEQ ID NO: 19384 - protein, 53 aa, Homo sapiens
VQKKSGRERRRPPLPCTALLEATWRVRPRGGHGHKCPQLAPGGVERSCWEAAG

SEQ ID NO: 19385 - protein, 49 aa, Homo sapiens
LEATWRVRPRGGHGHKCPQLAPGSSPAPPRAASLLSSLMLEEVPLGVWM

SEQ ID NO: 19386 - protein, 9 aa, Homo sapiens
VDNKSNPQT

SEQ ID NO: 19387 - protein, 30 aa, Homo sapiens
LLQPGRLPRRREGKHKAGYALRDNKSNPQT

SEQ ID NO: 19388 - protein, 51 aa, Homo sapiens
LQKVLGPSCKVLVLRNHGVVALGETLEEAFHYIFNVQLACEIQVGNIIPLF

SEQ ID NO: 19389 - protein, 105 aa, Homo sapiens
LKTAGPQSQLLAGIVVDKPPSTMQFEDDDHGPPAPPNPFSHLTEGELEEYKRTIERKQQGLEDAEQELLSDDASSVSQIQSQTQSPQNVPEKLEGTQCNFPHSIH

SEQ ID NO: 19390 - protein, 53 aa, Homo sapiens
VDVKPISQEKIESERALISQCGKPVVNVSYRPAYDQITETRGNQKILEGFMFL

SEQ ID NO: 19391 - protein, 10 aa, Homo sapiens
LQMNFRRTSG

SEQ ID NO: 19392 - protein, 13 aa, Homo sapiens
LKCCVDTLLGPMR

SEQ ID NO: 19393 - protein, 22 aa, Homo sapiens
MLAFLDFFCHGFFTDLGLWHDS

SEQ ID NO: 19394 - protein, 117 aa, Homo sapiens
LSHSTSSQSNSSFGKRVLQIIDQKSHTFEVVAVDSRRRRVLARYPGSVAVQTGFLSCLSFCVLMSLVTIVFLPAPGGCLQAVDFWDLQILQRGTTFFFFLSVSYFSRGKGNNFLRPV

SEQ ID NO: 19395 - protein, 21 aa, Homo sapiens
MILIPRNCKFKPKYLANSFQT

SEQ ID NO: 19396 - protein, 518 aa, Homo sapiens
LTSCCCWCFFFFYPPFLFIIFLHIDRILGNERKKKPKLTRAEDLPPLPLPSSLFSPPQEKKTPKQKKVHLGLVFFLQYFLGGQNFLGVIFFGFSSSFIFLPKLLLVGEKKMPQLNGGGGDDLGANDELISFKDEGEQEEKSSENSSAERDLADVKSSLVNESETNQNSSSDSEAERRPPPRSESFRDKSRESLEEAAKRQDGGLFKGPPYPGYPFIMIPDLTSPYLPNGSLSPTARTSNKVPVVQHPHHVHPLTPLITYSNEHFTPGNPPPHLPADVDPKTGIPRPPHPPDISPYYPLSPGTVGQIPHPLGWLVPQQGQPVYPITTGGFRHPYPTALTVNASMSRFPPHMVPPHHTLHTTGIPHPAIVTPTVKQESSQSDVGSLHSSKHQDSKKEEEKKKPHIKKPLNAFMLYMKEMRAKVVAECTLKESAAINQILGRRWHALSREEQAKYYELARKERQLHMQLYPGWSARDNYGKKKKRKRDKQPGETNGEKKSAFATYKVKAAASAHPLQMEAY

SEQ ID NO: 19397 - protein, 592 aa, Homo sapiens
LTSCCCWCFFFFYPPFLFIIFLHIDRILGNERKKKPKLTRAEDLPPLPLPSSLFSPPQEKKTPKQKKVHLGLVFFLQYFLGGQNFLGVIFFGFSSSFIFLPKLLLVGEKKMPQLNGGGGDDLGANDELISFKDEGEQEEKSSENSSAERDLADVKSSLVNESETNQNSSSDSEAERRPPPRSESFRDKSRESLEEAAKRQDGGLFKGPPYPGYPFIMIPDLTSPYLPNGSLSPTARTLHFQSGSTHYSAYKTIEHQIAVQYLQMKWPLLDVQAGSLQSRQALKDARSPSPAHIVSNKVPVVQHPHHVHPLTPLITYSNEHFTPGNPPPHLPADVDPKTGIPRPPHPPDISPYYPLSPGTVGQIPHPLGWLVPQQGQPVYPITTGGFRHPYPTALTVNASMSRFPPHMVPPHHTLHTTGIPHPAIVTPTVKQESSQSDVGSLHSSKHQDSKKEEEKKKPHIKKPLNAFMLYMKEMRAKVVAECTLKESAAINQILGRRWHALSREEQAKYYELARKERQLHMQLYPGWSARDNYGKKKKRKRDKQPGETNEHSECFLNPCLSLPPITGEKKSAFATYKVKAAASAHPLQMEAY

SEQ ID NO: 19398 - protein, 689 aa, Homo sapiens
LTSCCCWCFFFFYPPFLFIIFLHIDRILGNERKKKPKLTRAEDLPPLPLPSSLFSPPQEKKTPKQKKVHLGLVFFLQYFLGGQNFLGVIFFGFSSSFIFLPKLLLVGEKKMPQLNGGGGDDLGANDELISFKDEGEQEEKSSENSSAERDLADVKSSLVNESETNQNSSSDSEAERRPPPRSESFRDKSRESLEEAAKRQDGGLFKGPPYPGYPFIMIPDLTSPYLPNGSLSPTARTYLQMKWPLLDVQAGSLQSRQALKDARSPSPAHIVSNKVPVVQHPHHVHPLTPLITYSNEHFTPGNPPPHLPADVDPKTGIPRPPHPPDISPYYPLSPGTVGQIPHPLGWLVPQQGQPVYPITTGGFRHPYPTALTVNASMSRFPPHMVPPHHTLHTTGIPHPAIVTPTVKQESSQSDVGSLHSSKHQDSKKEEEKKKPHIKKPLNAFMLYMKEMRAKVVAECTLKESAAINQILGRRWHALSREEQAKYYELARKERQLHMQLYPGWSARDNYGKKKKRKRDKQPGETNDLSAPKKCRARFGLDQQNNWCGPCRRKKKCVRYIQGEGSCLSPPSSDGSLLDSPPPSPNLLGSPPRDAKSQTEQTQPLSLSLKPDPLAHLSMMPPPPALLLAEATHKASALCPNGALDLPPAALQPAAPSSSIAQPSTSSLHSHSSLAGTQPQPLSLVTKSLE

SEQ ID NO: 19399 - protein, 729 aa, Homo sapiens
LTSCCCWCFFFFYPPFLFIIFLHIDRILGNERKKKPKLTRAEDLPPLPLPSSLFSPPQEKKTPKQKKVHLGLVFFLQYFLGGQNFLGVIFFGFSSSFIFLPKLLLVGEKKMPQLNGGGGDDLGANDELISFKDEGEQEEKSSENSSAERDLADVKSSLVNESETNQNSSSDSEAERRPPPRSESFRDKSRESLEEAAKRQDGGLFKGPPYPGYPFIMIPDLTSPYLPNGSLSPTARTLHFQSGSTHYSAYKTIEHQIAVQYLQMKWPLLDVQAGSLQSRQALKDARSPSPAHIVSNKVPVVQHPHHVHPLTPLITYSNEHFTPGNPPPHLPADVDPKTGIPRPPHPPDISPYYPLSPGTVGQIPHPLGWLVPQQGQPVYPITTGGFRHPYPTALTVNASMSRFPPHMVPPHHTLHTTGIPHPAIVTPTVKQESSQSDVGSLHSSKHQDSKKEEEKKKPHIKKPLNAFMLYMKEMRAKVVAECTLKESAAINQILGRRWHALSREEQAKYYELARKERQLHMQLYPGWSARDNYGKKKKRKRDKQPGETNEHSECFLNPCLSLPPITDLSAPKKCRARFGLDQQNNWCGPCRRKKKCVRYIQGEGSCLSPPSSDGSLLDSPPPSPNLLGSPPRDAKSQTEQTQPLSLSLKPDPLAHLSMMPPPPALLLAEATHKASALCPNGALDLPPAALQPAAPSSSIAQPSTSSLHSHSSLAGTQPQPLSLVTKSLE

SEQ ID NO: 19400 - protein, 750 aa, Homo sapiens
LTSCCCWCFFFFYPPFLFIIFLHIDRILGNERKKKPKLTRAEDLPPLPLPSSLFSPPQEKKTPKQKKVHLGLVFFLQYFLGGQNFLGVIFFGFSSSFIFLPKLLLVGEKKMPQLNGGGGDDLGANDELISFKDEGEQEEKSSENSSAERDLADVKSSLVNESETNQNSSSDSEAERRPPPRSESFRDKSRESLEEAAKRQDGGLFKGPPYPGYPFIMIPDLTSPYLPNGSLSPTARTYLQMKWPLLDVQAGSLQSRQALKDARSPSPAHIVQSPLPCCTQGHDCQHFYPPSDFTVSTQVFRDMKRSHSLQKVGEPWCIESNKVPVVQHPHHVHPLTPLITYSNEHFTPGNPPPHLPADVDPKTGIPRPPHPPDISPYYPLSPGTVGQIPHPLGWQGQPVYPITTGGFRHPYPTALTVNASMSRFPPHMVPPHHTLHTTGIPHPAIVTPTVKQESSQSDVGSLHSSKHQDSKKEEEKKKPHIKKPLNAFMLYMKEMRAKVVAECTLKESAAINQILGRRWHALSREEQAKYYELARKERQLHMQLYPGWSARDNYGKKKKRKRDKQPGETNEHSECFLNPCLSLPPITDANTPKKCRALFGLDRQTLWCKPCRRKKKCVRYIQGEGSCLSPPSSDGSLLDSPPPSPNLLGSPPRDAKSQTEQTQPLSLSLKPDPLAHLSMMPPPPALLLAEATHKASALCPNGALDLPPAALQPAAPSSSIAQPSTSSLHSHSSLAGTQPQPLSLVTKSLE

SEQ ID NO: 19401 - protein, 717 aa, Homo sapiens
LTSCCCWCFFFFYPPFLFIIFLHIDRILGNERKKKPKLTRAEDLPPLPLPSSLFSPPQEKKTPKQKKVHLGLVFFLQYFLGGQNFLGVIFFGFSSSFIFLPKLLLVGEKKMPQLNGGGGDDLGANDELISFKDEGEQEEKSSENSSAERDLADVKSSLVNESETNQNSSSDSEAERRPPPRSESFRDKSRESLEEAAKRQDGGLFKGPPYPGYPFIMIPDLTSPYLPNGSLSPTARTLHFQSGSTHYSAYKTIEHQIAVQYLQMKWPLLDVQAGSLQSRQALKDARSPSPAHIVSNKVPVVQHPHHVHPLTPLITYSNEHFTPGNPPPHLPADVDPKTGIPRPPHPPDISPYYPLSPGTVGQIPHPLGWLVPQQGQPVYPITTGGFRHPYPTALTVNASMSSFLSSRFPPHMVPPHHTLHTTGIPHPAIVTPTVKQESSQSDVGSLHSSKHQDSKKEEEKKKPHIKKPLNAFMLYMKEMRAKVVAECTLKESAAINQILGRRWHALSREEQAKYYELARKERQLHMQLYPGWSARDNYGKKKKRKRDKQPGETNDANTPKKCRALFGLDRQTLWCKPCRRKKKCVRYIQGEGSCLSPPSSDGSLLDSPPPSPNLLGSPPRDAKSQTEQTQPLSLSLKPDPLAHLSMMPPPPALLLAEATHKASALCPNGALDLPPAALQPAAPSSSIAQPSTSSLHSHSSLAGTQPQPLSLVTKSLE

SEQ ID NO: 19402 - protein, 712 aa, Homo sapiens
LTSCCCWCFFFFYPPFLFIIFLHIDRILGNERKKKPKLTRAEDLPPLPLPSSLFSPPQEKKTPKQKKVHLGLVFFLQYFLGGQNFLGVIFFGFSSSFIFLPKLLLVGEKKMPQLNGGGGDDLGANDELISFKDEGEQEEKSSENSSAERDLADVKSSLVNESETNQNSSSDSEAERRPPPRSESFRDKSRESLEEAAKRQDGGLFKGPPYPGYPFIMIPDLTSPYLPNGSLSPTARTLHFQSGSTHYSAYKTIEHQIAVQYLQMKWPLLDVQAGSLQSRQALKDARSPSPAHIVSNKVPVVQHPHHVHPLTPLITYSNEHFTPGNPPPHLPADVDPKTGIPRPPHPPDISPYYPLSPGTVGQIPHPLGWLVPQQGQPVYPITTGGFRHPYPTALTVNASMSRFPPHMVPPHHTLHTTGIPHPAIVTPTVKQESSQSDVGSLHSSKHQDSKKEEEKKKPHIKKPLNAFMLYMKEMRAKVVAECTLKESAAINQILGRRWHALSREEQAKYYELARKERQLHMQLYPGWSARDNYGKKKKRKRDKQPGETNDANTPKKCRALFGLDRQTLWCKPCRRKKKCVRYIQGEGSCLSPPSSDGSLLDSPPPSPNLLGSPPRDAKSQTEQTQPLSLSLKPDPLAHLSMMPPPPALLLAEATHKASALCPNGALDLPPAALQPAAPSSSIAQPSTSSLHSHSSLAGTQPQPLSLVTKSLE

SEQ ID NO: 19403 - protein, 685 aa, Homo sapiens
LHIDRILGNERKKKPKLTRAEDLPPLPLPSSLFSPPQEKKTPKQKKVHLGLVFFLQYFLGGQNFLGVIFFGFSSSFIFLPKLLLVGEKKMPQLNGGGGDDLGANDELISFKDEGEQEEKSSENSSAERDLADVKSSLVNESETNQNSSSDSEAERRPPPRSESFRDKSRESLEEAAKRQDGGLFKGPPYPGYPFIMIPDLTSPYLPNGSLSPTARTYLQMKWPLLDVQAGSLQSRQALKDARSPSPAHIVSNKVPVVQHPHHVHPLTPLITYSNEHFTPGNPPPHLPADVDPKTGIPRPPHPPDISPYYPLSPGTVGQIPHPLGWLVPQQGQPVYPITTGGFRHPYPTALTVNASMSRFPPHMVPPHHTLHTTGIPHPAIVTPTVKQESSQSDVGSLHSSKHQDSKKEEEKKKPHIKKPLNAFMLYMKEMRAKVVAECTLKESAAINQILGRRWHALSREEQAKYYELARKERQLHMQLYPGWSARDNYGKKKKRKRDKQPGETNEHSECFLNPCLSLPPITDLSAPKKCRARFGLDQQNNWCGPCRRKKKCVRYIQGEGSCLSPPSSDGSLLDSPPPSPNLLGSPPRDAKSQTEQTQPLSLSLKPDPLAHLSMMPPPPALLLAEATHKASALCPNGALDLPPAALQPAAPSSSIAQPSTSSLHSHSSLAGTQPQPLSLVTKSLE

SEQ ID NO: 19404 - protein, 14 aa, Homo sapiens
LQAPLATLGKLGRT

SEQ ID NO: 19405 - protein, 34 aa, Homo sapiens
LPLLIPRGDQSRKRAGDELAYNSSSACASSRGYR

SEQ ID NO: 19406 - protein, 157 aa, Homo sapiens
LQNDSFYLLFQVPKQSDSQPNSDNLSRHGECGKKQVSYRTDIVGGVPIITPTQKEEVNECGESIDRNNLKRSQSHLPYFTPKPPQDSAVIKAGYCVKQGAVMKNWKRRYFQLDENTIGYFKSELVCCYVINVAIRMFEKCCNVVIIYNFLYCSVVSE

SEQ ID NO: 19407 - protein, 108 aa, Homo sapiens
LYTEEHPPGPSESKHAFRPTNAATATSHSTASRSNSLVSTFTMEKRGFYESLAKVKPGNFKVQTVSPREPASKVTEQALLRPQSKNGPQEKDCDLVDLDDASLPVSDV

SEQ ID NO: 19408 - protein, 98 aa, Homo sapiens
VMIAGTPVTPMWSAGSWAVAGPRQPQEMPGLARVQDPLSWMTCAAQAMSPTCGAAPTMAGSPITVSTVKTLVSSAQLPTPGRRPVQTHCRPSPCLHRQ

SEQ ID NO: 19409 - protein, 175 aa, Homo sapiens
LEDLASFQELSQTPGHTEELANGAADSFTSAPKQTPDSGKPLKISRRVLRAPKVEPVGDVVSTRDPVKSQSKSNTSLPPLPFKRGGGKDGSVTGTKRLRCMPAPEEIVEELPASKKQRVAPRARGKSSEPVVIMKRSLRTSAKRIEPAEELNSNDMKTNKEEHKLQDSVPENKKE

SEQ ID NO: 19410 - protein, 13 aa, Homo sapiens
VRSVAGAAYRAEV

SEQ ID NO: 19411 - protein, 47 aa, Homo sapiens
VRSVAGAAYRAEVSAAPAPPAADFGCDLTSGGSTSGLAGRIVPVEEL

SEQ ID NO: 19412 - protein, 141 aa, Homo sapiens
LRLAYRHSTCDGVVLVRHHGAWGYVCNQEWTLAEASVVCRQLGCGPAVGAPKYVPLPGEMAQPWLHNVSCRGNESSLWECSLGSWCQSPCPHAWVVVALCSRDQQQSMKLGTGVSLSPGPCVTARSPAPEAGPGSAHHCPP

SEQ ID NO: 19413 - protein, 96 aa, Homo sapiens
LLLTSHLGPWGCVRLSCLTHASLSAQVELLVMKALSVGLVKGSIDEVDKRVHMTWVQPRVLDLQQIKGMKDRLEFWCTDVKSMEMLVEHQAHDILT

SEQ ID NO: 19414 - protein, 393 aa, Homo sapiens
LVARQPGGSSFLPALAWSRGTQVPTLAPGDRVGLRPSSSMEDAGEDPTTFAAHSLPSDPRLLATVTNAYLGTRVFHDTLHVSGVYNGAGGDTHRAMLPSPLNVRLEAPAGMGEQLTETFALDTNTGSFLHTLEGPRFRASQCIYAHRTLPHVLAFRVSIARLAPGSGPITLLLRSAFSPESPDLDLHQGPDFQGARYLYGHTLTPEQPGGPQQEVHMLWTPAPPDLTLGEGEEARTWDFLTAVGGSQAEAQACLTEALQLQARGALYTAHAQAWAQLWVECGLDVVGPLQLRQALRGSLYYLLSALPQPKAPGYICHGLSPGGLSNGSREECYWGHVFWDQVSTVHPAPATQQATHGGPRSLPSLGPGLWLGKHRDCGKREEAWKVCRSLVEE

SEQ ID NO: 19415 - protein, 182 aa, Homo sapiens
LAWSRGTQVPTLAPGDRVGLRPSSSMEDAGEDPTTFAAHSLPSDPRLLATVTNAYLGTRVFHDTLHVSGVYNGAGGDTHRAMLPSPLNVRLEAPAGMGEQLTETFALDTNTGSFLHTLEGPRFRASQCIYAHRTLPHVLAFRVSIARLAPGSGPITLLLRSAFSPESPDLDLHQGPDFQGAR

SEQ ID NO: 19416 - protein, 196 aa, Homo sapiens
LAWSRGTQVPTLAPGDRVGLRDPRLLATVTNAYLGTRVFHDTLHVSGVYNGAGGDTHRAMLPSPLNVRLEAPAGMGEQLTETFALDTNTGSFLHTLEGPRFRASQCIYAHRTLPHVLAFRVSIARLAPGSGPITLLLRSAFSPESPDLDLHQGPDFQGARHGHALTGTCMATPSPLSSPGGHSKRYTCCGHQHPQT

SEQ ID NO: 19417 - protein, 106 aa, Homo sapiens
LPTPHRGAFGRLPEPGLVQPQLPVGPARGWVGPSVAPTPLTVPPRREGLCRLLELTRRPIFITFEGQRRDPAHPALRLLRQHRHLVTLLLWRPGSVVRSRRGRVRG

SEQ ID NO: 19418 - protein, 89 aa, Homo sapiens
LVNLSRCRRLIVVLSDAFLSRAWCSHSFREGLCRLLELTRRPIFITFEGQRRDPAHPALRLLRQHRHLVTLLLWRPGSVVRSRRGRVRG

SEQ ID NO: 19419 - protein, 146 aa, Homo sapiens
LLHPEHQLLLLHSSESWPYKPRGCGAGLPPGPAGPAAGRPALCQVPSQRAALVPGRVWGGGDKRDCPEDRKFVNFILKPQLERRRGYKLFLDDRDLLPRAEPSADLLVNLSRCRRLIVVLSDAFLSRAWCSHSFRWVPRGVGWAPA

SEQ ID NO: 19420 - protein, 109 aa, Homo sapiens
VEINDGKLYDAYVSYSDCPEDRKFVNFILKPQLERRRGYKLFLDDRDLLPRAGIPGPTPCPAHPEGPPRPAPCSVPPGAPPPPSSSAPIPAHPRPRLKNPPTPQAPPLP

SEQ ID NO: 19421 - protein, 203 aa, Homo sapiens
LQGQRGVLPSSWISLLAEEPGGARGDPGAQPAPRRPRLRAMPGVCDRAPDFLSPSEDQVLRPALGSSVALNCTAWVVSGPHCSLPSVQWLKDGLPLGIGGHYSLHEYSWPYKPRGCGAGLPPGPAGPAAGRPALCQVPSQRAALVPGRVWGGGDKRREALRRLRLLQRLPRGPQVRELHPKAAAGAASGLQALPGRPRPPAAR

SEQ ID NO: 19422 - protein, 37 aa, Homo sapiens
LVLWTLPGAQRRGEFAPKGAPMTNICPPEERTGTRCL

SEQ ID NO: 19423 - protein, 36 aa, Homo sapiens
LVLWTLPGAQRRGEFAPKGAPMTNICPPEERTGTSL

SEQ ID NO: 19424 - protein, 12 aa, Homo sapiens
VKLERMLTVSVV

SEQ ID NO: 19425 - protein, 136 aa, Homo sapiens
LSSHPLRAACSAASPGAAWTGLPACWDMSGLQGPSVGDGCNGGGARAGGSCCRRRCFRGFGRRVQGAAFPGRQPAELGPVPRGLPAAAAPVCPAASAAAAGGILASEHSRGPSAAGGHPGPAASEPVLPPLPGPQR

SEQ ID NO: 19426 - protein, 90 aa, Homo sapiens
VRLLRRLRRRRRRVSVVISELNGKNIEDVIAQGIGKLASVPAGGAVAVSAAPGSAAPAAGSAPAAAEEKKDEKKEESEESDDDMGFGLFD

SEQ ID NO: 19427 - protein, 98 aa, Homo sapiens [sequence omitted]

SEQ ID NO: 19428 - protein, 77 aa, Homo sapiens
LLQVISELNGKNIEDVIAQGIGKLASVPAGGAVAVSAAPGSAAPAAGSAPAAAEEKKDEKKEESEESDDDMGFGLFD

SEQ ID NO: 19429 - protein, 112 aa, Homo sapiens
VAQGGSVQEERETLAYGGSRYVGCHVPSLVPSNFPVEQPPRLGSCSGLTSLLSVGIGKLASVPAGGAVAVSAAPGSAAPAAGSAPAAAEEKKDEKKEESEESDDDMGFGLFD

SEQ ID NO: 19430 - protein, 347 aa, Homo sapiens
LWGPDYRLMAEASSDPGAEEREELLGPTAQWSVEDEEEAVHEQCQHERDRQLQAQDEEGGGHVPERPKQEMLLSLKPSEAPELDEDEGFGDWSQRPEQRQQHEGAQGALDSGEPPQCRSPEGEQEDRPGLHAYEKEDSDEVHLEELSLSKEGPGPEDTVQDNLGAAGAEEEQEEHQKCQQPRTPSPLVLEGTIEQSSPPLSPTTKLIDRTESLNRSIEKSNSVKKSQPDLPISKIDQWLEQYTQAIETAGRTPKLARQASIELPSMAVASTKSRWETGEVQAQSAAKTPSCKDIVAGDMSKKSLWEQKGGSKTSSTIKSTPSGKRYKFVATGHGKYEKVLVEGGPAP

SEQ ID NO: 19431 - protein, 472 aa, Homo sapiens
LRCREMAPIWSPPGRVSGCHLSSGPAPGSAVGPWLGTPHPSLPLPLAPHKPPPPGLPGSAGQTSLPAQRECVFPGDAAVHQELCGLGFEECLGSIPQAHQCYLTNGPKRRKCSPRRRGRAPAWLCGGSPPCHQGLGHEHPSSGPSTNCSPRPTAQWSVEDEEEAVHEQCQHERDRQLQAQDEEGGGHVPERPKQEMLLSLKPSEAPELDEDEGFGDWSQRPEQRQQHEGAQGALDSGEPPQCRSPEGEQEDRPGLHAYEKEDSDEVHLEELSLSKEGPGPEDTVQDNLGAAGAEEEQEEHQKCQQPRTPSPLVLEGTIEQSSPPLSPTTKLIDRTESLNRSIEKSNSVKKSQPDLPISKIDQWLEQYTQAIETAGRTPKLARQASIELPSMAVASTKSRWETGEVQAQSAAKTPSCKDIVAGDMSKKSLWEQKGGSKTSSTIKSTPSGKRYKFVATGHGKYEKVLVEGGPAP

SEQ ID NO: 19432 - protein, 342 aa, Homo sapiens
LRPEGAWPRGLSIRLRAAWQRPTAQWSVEDEEEAVHEQCQHERDRQLQAQDEEGGGHVPERPKQEMLLSLKPSEAPELDEDEGFGDWSQRPEQRQQHEGAQGALDSGEPPQCRSPEGEQEDRPGLHAYEKEDSDEVHLEELSLSKEGPGPEDTVQDNLGAAGAEEEQEEHQKCQQPRTPSPLVLEGTIEQSSPPLSPTTKLIDRTESLNRSIEKSNSVKKSQPDLPISKIDQWLEQYTQAIETAGRTPKLARQASIELPSMAVASTKSRWETGEVQAQSAAKTPSCKDIVAGDMSKKSLWEQKGGSKTSSTIKSTPSGKRYKFVATGHGKYEKVLVEGGPAP

SEQ ID NO: 19433 - protein, 345 aa, Homo sapiens
VEQVVECQAGLVLLSGCRLWLPPRPTAQWSVEDEEEAVHEQCQHERDRQLQAQDEEGGGHVPERPKQEMLLSLKPSEAPELDEDEGFGDWSQRPEQRQQHEGAQGALDSGEPPQCRSPEGEQEDRPGLHAYEKEDSDEVHLEELSLSKEGPGPEDTVQDNLGAAGAEEEQEEHQKCQQPRTPSPLVLEGTIEQSSPPLSPTTKLIDRTESLNRSIEKSNSVKKSQPDLPISKIDQWLEQYTQAIETAGRTPKLARQASIELPSMAVASTKSRWETGEVQAQSAAKTPSCKDIVAGDMSKKSLWEQKGGSKTSSTIKSTPSGKRYKFVATGHGKYEKVLVEGGPAP

SEQ ID NO: 19434 - protein, 277 aa, Homo sapiens
VSLSLKPSEAPELDEDEGFGDWSQRPEQRQQHEGAQGALDSGEPPQCRSPEGEQEDRPGLHAYEKEDSDEVHLEELSLSKEGPGPEDTVQDNLGAAGAEEEQEEHQKCQQPRTPSPLVLEGTIEQSSPPLSPTTKLIDRTESLNRSIEKSNSVKKSQPDLPISKIDQWLEQYTQAIETAGRTPKLARQASIELPSMAVASTKSRWETGEVQAQSAAKTPSCKDIVAGDMSKKSLWEQKGGSKTSSTIKSTPSGKRYKFVATGHGKYEKVLVEGGPAP

SEQ ID NO: 19435 - protein, 76 aa, Homo sapiens
LAKKLLPVASMTYPRLFDAIRCHLLLLLDPLASLPFHSLTTAPALPTQLRFLLLGGGKKLLIIGQRDLPLERPSAF

SEQ ID NO: 19436 - protein, 49 aa, Homo sapiens
LTSLELVRRAWSTTRFWDTSSSGGPWLNDATCSCPTLRPWCPCSTCHRS

SEQ ID NO: 19437 - protein, 59 aa, Homo sapiens
LTSLELVRRAWSTTRFWDTSSSALCPGGLTCHLKVASNPLTGGREPPAGPPETRRPLAQ

SEQ ID NO: 19438 - protein, 80 aa, Homo sapiens
LCCGKKSPFSRLGSTEADLCQGEEAAREVRGGPGCWPGKTLGGWTPWGPTPRPRAILPPHPLASPDPWELPLKGSGKVLM

SEQ ID NO: 19439 - protein, 95 aa, Homo sapiens
LCCGKKSPFSRLGSTEADLCQGEEAAREVLCPALGWMLGTQSEFEVARPRGANVWPNMDAQDSWETAPAGPRAVPECPQRPALSHWASPARAAFP

SEQ ID NO: 19440 - protein, 123 aa, Homo sapiens
LPPPFSEKMPLGAMPWGGTGSLGWNQEAGTVRGPPSHPSTSWLPALPVSHHPLVTKVLCPALGWMLGTQSEFEVARPRGANVWPNMDAQDSWETAPAGPRAVPECPQRPALSHWASPARAAFP

SEQ ID NO: 19441 - protein, 129 aa, Homo sapiens
VTRDRISGLEPHWLPTSGSCSGVTGPASYSWAAPLHCRVLMLPGEGRPHPGAVGQPRVSPSQVSALLFSSFLWFAIRCGCSLDRKGKYTLTPRMWPPAPGAQPLEMLPGWTHTLSPLRSSCYWSKRMLG

SEQ ID NO: 19442 - protein, 141 aa, Homo sapiens
VSVAAAAGPGFPAMADSSGQQAPDYRSILSISDEAARAQALNEHLSTRSYVQGYSLSQADVDAFRQLSAPPADPQLFHVARWFRHIEALLGSPCGKGQPCRLQASKGRRVQPQWSPPAGTQPCRLHLYNSLTRNKCFLHFL

SEQ ID NO: 19443 - protein, 58 aa, Homo sapiens
VSVAAAAGPGFPAMADSSGQQGKGRRVQPQWSPPAGTQPCRLHLYNSLTRNKCFLHFL

SEQ ID NO: 19444 - protein, 26 aa, Homo sapiens
LDPSEPQPLAAMHVIKRVEMGFHHIG

SEQ ID NO: 19445 - protein, 530 aa, Homo sapiens
LGGGRGCFKSLALIQATDSRILQAGNILEIRVGQAGARRVATMTSPVLVDIREEVTCPICLELLTEPLSIDCGHSFCQACITPNGRESVIGQEGERSCPVCQTSYQPGNLRPNRHLANIVRRLREVVLGPGKQLKAVLCADHGEKLQLFCQEDGKVICWLCERSQEHRGHHTFLVEEVAQEYQEKFQESLKKLKNEEQEAEKLTAFIREKKTSWKNQMEPERCRIQTEFNQLRNILDRVEQRELKKLEQEEKKGLRIIEEAENDLVHQTQSLRELISDLERRCQGSTMELLQDVSDVTERSEFWTLRKPEALPTKLRSMFRAPDLKRMLRVCRELTDVQSYWVDVTLNPHTANLNLVLAKNRRQVRFVGAKVSGPSCLEKHYDCSVLGSQHFSSGKHYWEVDVAKKTAWILGVCSNSLGPTFSFNHFAQNHSAYSRYQPQSGYWVIGLQHNHEYRAYEDSSPSLLLSMTVPPRRVGVFLDYEAGTVSFYNVTNHGFPIYTFSKYYFPTTLCPYFNPCNCVIPMTLRRPSS

SEQ ID NO: 19446 - protein, 494 aa, Homo sapiens
LALIQATDSRILQAGNILEIRVGQAGARRVATMTSPVLVDIREEVTCPICLELLTEPLSIDCGHSFCQACITPNGRESVIGQEGERSCPVCQTSYQPGNLRPNRHLANIVRRLREEDGKVICWLCERSQEHRGHHTFLVEEVAQEYQEKFQESLKKLKNEEQEAEKLTAFIREKKTSWKNQMEPERCRIQTEFNQLRNILDRVEQRELKKLEQEEKKGLRIIEEAENDLVHQTQSLRELISDLERRCQGSTMELLQDVSDVTERSEFWTLRKPEALPTKLRSMFRAPDLKRMLRVCRELTDVQSYWVDVTLNPHTANLNLVLAKNRRQVRFVGAKVSGPSCLEKHYDCSVLGSQHFSSGKHYWEVDVAKKTAWILGVCSNSLGPTFSFNHFAQNHSAYSRYQPQSGYWVIGLQHNHEYRAYEDSSPSLLLSMTVPPRRVGVFLDYEAGTVSFYNVTNHGFPIYTFSKYYFPTTLCPYFNPCNCVIPMTLRRPSS

SEQ ID NO: 19447 - protein, 359 aa, Homo sapiens
LASHSPDVRVREEKFQESLKKLKNEEQEAEKLTAFIREKKTSWKNQMEPERCRIQTEFNQLRNILDRVEQRELKKLEQEEKKGLRIIEEAENDLVHQTQSLRELISDLERRCQGSTMELLQDVSDVTERSEFWTLRKPEALPTKLRSMFRAPDLKRMLRVCRELTDVQSYWVDVTLNPHTANLNLVLAKNRRQVRFVGAKVSGPSCLEKHYDCSVLGSQHFSSGKHYWEVDVAKKTAWILGVCSNSLGPTFSFNHFAQNHSAYSRYQPQSGYWVIGLQHNHEYRAYEDSSPSLLLSMTVPPRRVGVFLDYEAGTVSFYNVTNHGFPIYTFSKYYFPTTLCPYFNPCNCVIPMTLRRPSS

SEQ ID NO: 19448 - protein, 258 aa, Homo sapiens
LGRNACDVHCVQALYPCAHLPPNPGPFMAVLFAKLENMLQNSVYVNFLLTGLVAQLACHPQPLLRSFLLNTNMVFQPSVKSLLQVLGSVKNKIENFAASQEDFPALLSKAKKYLIARGKLDWAEGPAAGPAPRRSDPLVKSRRPSLGELLLRHAHSPTRARQAAQLVLQPGRDGAGLGLSGGSPGASTPVLLTRGGAPERQGEALRVKNAVYCAVIFPEFLKELAAISQAHAVTSPFLLETSEEGSGPLISGCGPLNP

SEQ ID NO: 19449 - protein, 161 aa, Homo sapiens
LPCANPLSTSLRMTWWRIGGFYALSPYPGLRLISLNMNFCSRENFWLLINSTDPAGQLQWLVGELQAAEDRGDKVHIIGHIPPGHCLKSWSWNYYRIVARYENTLAAQFFGHTHVDEFEVFYDEETLSRPLAVAFLAPSATTYIGLNPVSPTSLQVTVCTK

SEQ ID NO: 19450 - protein, 329 aa, Homo sapiens
LLWVTMKAHLSIASLPPSLRATTPPAGSMKRWPRLGSPGCLPKPCAPSGTYRPWKPRKGKERIGGFYALSPYPGLRLISLNMNFCSRENFWLLINSTDPAGQLQWLVGELQAAEDRGDKVHIIGHIPPGHCLKSWSWNYYRIVARYENTLAAQFFGHTHVDEFEVFYDEETLSRPLAVAFLAPSATTYIGLNPGYRVYQIDGNYSGSSHVVLDHETYILNLTQANIPGAIPHWQLLYRARETYGLPNTLPTAWHNLVYRMRGDMQLFQTFWFLYHKGHPPSEPCGTPCRLATLCAQLSARADSPALCRHLMPDGSLPEAQSLWPRPLFC

SEQ ID NO: 19451 - protein, 224 aa, Homo sapiens
LGALAACRSPAHPQVHIIGHIPPGHCLKSWSWNYYRIVARYENTLAAQFFGHTHVDEFEVFYDEETLSRPLAVAFLAPSATTYIGLNPGYRVYQIDGNYSGSSHVVLDHETYILNLTQANIPGAIPHWQLLYRARETYGLPNTLPTAWHNLVYRMRGDMQLFQTFWFLYHKGHPPSEPCGTPCRLATLCAQLSARADSPALCRHLMPDGSLPEAQSLWPRPLFC

SEQ ID NO: 19452 - protein, 103 aa, Homo sapiens
LINSTDPAGQLQWLVGELQAAEDRGDKVHIIGHIPPGHCLKSWSWNYYRIVARYENTLAAQFFGHTHVDEFEVFYDEETLSRPLAVAFLAPSATTYIGLNPGE

SEQ ID NO: 19453 - protein, 82 aa, Homo sapiens
LIPKLFQVLAPRYKDQTGGYTRMLQIPNRSLDRAKMAVIEYKGNCLPPLPLPRRDSHLTLLNQLLQGLRQDLRLPFPWVQRL

SEQ ID NO: 19454 - protein, 88 aa, Homo sapiens [sequence omitted]

SEQ ID NO: 19455 - protein, 175 aa, Homo sapiens
VRRFAPPPWPIPRETWRRPSFFVWAANMPSRLRKTRKLRGHVSHGHGRIGKHRKHPGGRGNAGGLHHHRINFDKYHPGYFGKVGMKHYHLKRNQSFCPTVNLDKLWTLVSEQTRVNAAKNKTGAAPIIDVVRSGYYKVLGKGKLPKQPVIVKAKFFSRRAEEKIKSVGGACVLVA

SEQ ID NO: 19456 - protein, 43 aa, Homo sapiens
LRKTRKLRGHVSHGHGRIGKHRKHPGGRGNAGGLHHHRINFDK

SEQ ID NO: 19457 - protein, 106 aa, Homo sapiens
LLPLPSHPGYFGKVGMKHYHLKRNQSFCPTVNLDKLWTLVSEQTRVNAAKNKTGAAPIIDVVRSGYYKVLGKGKLPKQPVIVKAKFFSRRAEEKIKSVGGACVLVA

SEQ ID NO: 19458 - protein, 713 aa, Homo sapiens
LPESPRRRCRHRPQPERPGAAGRRRAETPRLRLGAPSRTWRTRPQARSVLDPAGLRSPVLGPVPRAAMSFLSRQQPPPPRRAGAACTLRQKLIFSPCSDCEEEEEEEEEEGSGHSTGEDSAFQEPDSPLPPARSPTEPGPERRRSPGPAPGSPGELEEDLLLPGACPGADEAGGGAEGDSWEEEGFGSSSPVKSPAAPYFLGSSFSPVRCGGPGDASPRGCGARRAGEGRRSPRPDHPGTPPHKTFRKLRLFDTPHTPKSLLSKARGIDSSSVKLRGSSLFMDTEKSGKREFDVRQTPQVNINPFTPDSLLLHSSGQCRRRKRTYWNDSCGEDMEASDYELEDETRPAKRITITESNMKSRYTTEFHELEKIGSGEFGSVFKCVKRLDGCIYAIKRSKKPLAGSVDEQNALREVYAHAVLGQHSHVVRYFSAWAEDDHMLIQNEYCNGGSLADAISENYRIMSYFKEAELKDLLLQVGRGLRYIHSMSLVHMDIKPSNIFISRTSIPNAASEEGDEDDWASNKVMFKIGDLGHVTRISSPQVEEGDSRFLANEVLQENYTHLPKADIFALALTVVCAAGAEPLPRNGDQWHEIRQGRLPRIPQVLSQEFTELLKVMIHPDPERRPSAMALVKHSVLLSASRKSAEQLRIELNAEKFKNSLLQKELKKAQMAKAAAEERALFTDRMATRSTTQSNRTSRLIGKKMNRSVSLTIY

SEQ ID NO: 19459 - protein, 183 aa, Homo sapiens
LGRRGWRGSRAAAMGSLKEELLKAIWHAFTALDQDHSGKVSKSQLKVLSHNLCTVLKVPHDPVALEEHFRDDDEGPVSNQGYMPYLNRFILEKIEYLLKKLTEAMGGGWQQEQFEHYKINFDDSKNGLSAWELIELIGNGQFSKGMDRQTVSMAINEVFNELILDVLKQVRILLLFFFLIFRI

SEQ ID NO: 19460 - protein, 1890 aa, Homo sapiens
LKRCRCRYCRCRENAEPSRAGWAAAARAATGTRFPSAAAAAMARLADYFIVVGYDHEKPGSGEGLGKIIQRFPQKDWDDTPFPQGIELFCQPGGWQLSRERKQPTFFVVVLTDIDSDRHYCSCLTFYEAEINLQGTKKEEIEGEAKVSGLIQPAEVFAPKSLVLVSRLYYPEIFRACLGLIYTVYVDSLNVSLESLIANLCACLVPAAGGSQKLFSLGAGDRQLIQTPLHDSLPITGTSVALLFQQLGIQNVLSLFCAVLTENKVLFHSASFQRLSDACRALESLMFPLKYSYPYIPILPAQLLEVLSSPTPFIIGVHSVFKTDVHELLDVIIADLDGGTIKIPECIHLSSLPEPLLHQTQSALSLILHPDLEVADHAFPPPRTALSHSKMLDKEVRAVFLRLFAQLFQGYRSCLQLIRIHAEPVIHFHKTAFLGQRGLVENDFLTKVLSGMAFAGFVSERGPPYRSCDLFDELVAFEVERIKVEENNPVKMIKHVRELAEQLFKNENPNPHMAFQKVPRPTEGSHLRVHILPFPEINEARVQELIQENVAKNQNAPPATRIEKKCVVPAGPPVVSIMDKVTTVFNSAQRLEVVRNCISFIFENKILETEKTLPAALRALKGKAARQCLTDELGLHVQQNRAILDHQQFDYIIRMMNCTLQDCSSLEEYNIAAALLPLTSAFYRKLAPGVSQFAYTCVQDHPIWTNQQFWETTFYNAVQEQVRSLYLSAKEDNHAPHLKQKDKLPDDHYQEKTAMDLAAEQLRLWPTLSKSTQQELVQHEESTVFSQAIHFANLMVNLLVPLDTSKNKLLRTSAPGDWESGSNSIVTNSIAGSVAESYDTESGFEDSENTDIANSVVRFITRFIDKVCTESGVTQDHIKSLHCMIPGIVAMHIETLEAVHRESRRLPPIQKPKILRPALLPGEEIVCEGLRVLLDPDGREEATGGLLGGPQLLPAEGALFLTTYRILFRGTPHDQLVGEQTVVRSFPIASITKEKKITMQNQLQQNMQEGLQITSASFQLIKVAFDEEVSPEVVEIFKKQLMKFRYPQSIFSTFAFAAGQTTPQIILPKQKEKNTSFRTFSKTIVKGAKRAGKMTIGRQYLLKKKTGTIVEERVNRPGWNEDDDVSVSDESELPTSTTLKASEKSTMEQLVEKACFRDYQRLGLGTISGSSSRSRPEYFRITASNRMYSLCRSYPGLLVVPQAVQDSSLPRVARCYRHNRLPVVCWKNSRSGTLLLRSGGFHGKGVVGLFKSQNSPQAAPTSSLESSSSIEQEKYLQALLNAVSVHQKLRGNSTLTVRPAFALSPGVWASLRSSTRLISSPTSFIDVGARLAGKDHSASFSNSSYLQNQLLKRQAALYIFGEKSQLRNFKVEFALNCEFVPVEFHEIRQVKASFKKLMRACIPSTIPTDSEVTFLKALGDSEWFPQLHRIMQLAVVVSEVLENGSSVLVCLEEGWDITAQVTSLVQLLSDPFYRTLEGFQMLVEKEWLSFGHKFSQRSSLTLNCQGSGFAPVFLQFLDCVHQVHNQYPTEFEFNLYYLKFLAFHYVSNRFKTFLLDSDYERLEHGTLFDDKGEKHAKKGVCIWECIDRMHKRSPIFFNYLYSPLEIEALKPNVNVSSLKKWDYYIEETLSTGPSYDWMMLTPKHFPSEDSDLAGEAGPRSQRRTVWPCYDDVSCTQPDALTSLFSEIEKLEHKLNQAPEKWQQLWERVTVDLKEEPRTDRSQRHLSRSPGIVSTNLPSYQKRSLLHLPDSSMGEEQNSSISPSNGVERRAATLYSQYTSKNDENRSFEGTLYKRGALLKGWKPRWFVLDVTKHQLRYYDSGEDTSCKGHIDLAEVEMVIPAGPSMGAPKHTSDKAFFDLKTSKRVYNFCAQDGQSAQQWMDKIQSCISDA

SEQ ID NO: 19461 - protein, 11 aa, Homo sapiens
MSAIGRRCTKL

SEQ ID NO: 19462 - protein, 30 aa, Homo sapiens
LFSVPLSPPFPIPDDRILRRQLRWQLLSSR

SEQ ID NO: 19463 - protein, 24 aa, Homo sapiens
VSRSSMEVAAGTERQLRWQLLSSR

SEQ ID NO: 19464 - protein, 116 aa, Homo sapiens
VNLANLPPSYHNETNTDTKVGNNTIHVHREIHKITNNQTGQMVFSETVITSVGDEEGRRSHVSCHFPCTCTPTHSLSFSFSLPTVTQMQTMGRREWSLLTHFYRDSSIPTFLTRQM

SEQ ID NO: 19465 - protein, 46 aa, Homo sapiens
LGQPWGLIWRCFPSLSAAHVSNEEPFVMTMYGIVSEVPLHCTCLCV

SEQ ID NO: 19466 - protein, 27 aa, Homo sapiens
VVSGSELNMATRVCLIPEREDFNHCDA

SEQ ID NO: 19467 - protein, 199 aa, Homo sapiens
MGENEDEKQAQAGQVFENFVQASTCKGTLQAFNILTRHLDLDPLDHRNFYSKLKSKVTTWKAKALWYKLDKRGSHKEYKRGKSCTNTKCLIVGGGPCGLRTAIELAYLGAKVVVVEKRDSFSRNNVLHLWPFTIHDLRGLGAKKFYGKFCAGSIDHISIRQLQLILFKVALMLGVEIHVNVEFVKVLEPPEDQENQSTV

SEQ ID NO: 19468 - protein, 28 aa, Homo sapiens
MGTDCKVTRVEAGRPDRSPDISSKERWP

SEQ ID NO: 19469 - protein, 13 aa, Homo sapiens
MAMTWIRRQRVSR

SEQ ID NO: 19470 - protein, 121 aa, Homo sapiens
LGSNQECGSSKEGGNQNKVKSMANQLLAKFEESTRNPSLMKQESMRKSFPLNLGGSDTCYFCKKRVYVMERLSAEGHFFHRECFRCSICATTLRLAAYTFDCDEGNPRGQGSTGLWPWPQV

SEQ ID NO: 19471 - protein, 126 aa, Homo sapiens
VMERLSAEGHFFHRECFRCSICATTLRLAAYTFDCDEGKFYCKPHFIHCKTNSKQRKRRAELKQQREEEATWQEQEAPRRDTPTESSCAVAAIGTLEGSPPGTQMPLVSSRILFTTRKHNYFRRRE

SEQ ID NO: 19472 - protein, 72 aa, Homo sapiens
LAVGFVEVVLWKTYRQMPSFPSLSQEEATWQEQEAPRRDTPTESSCAVAAIGTLEGSPPVHFSLPVLHPLLG

SEQ ID NO: 19473 - protein, 76 aa, Homo sapiens [sequence omitted]

SEQ ID NO: 19474 - protein, 64 aa, Homo sapiens
MPELQLEPSSSQAGISLRNDSVQPQAPVTLLKAHISADSCTWGSRIITNTLLTRNNTPSTVELS

SEQ ID NO: 19475 - protein, 127 aa, Homo sapiens
VRISPGEEAAGQDVLAVRVLVTSEDSSSDTESDYGGSEGSHTEPCEEKPWRPGSPHLPHTSLGEALSRAVSPQCPEEPRAVHAALQRANSFQSPTPSKYQNWRREFWWSESLALWGWEAGAGQKISG

SEQ ID NO: 19476 - protein, 737 aa, Homo sapiens
LSLSFSTAALQRANSFQSPTPSKYQNWRREFWWSLTPVNKRTMSPPKDPSPSLPLPSSSSHSSSPPSSSSTSVSGNAPDGSSPPQMTASEPLSQVSRGHPSPPTPNFRRRAVAQGAPREIPLYLPHHPKPEWAEYCLVSPGEDGLSDPAEMTSDECQPAEAPLGDIGSNHRDPHPIWGKDRSWTGQELSPLAGEDREKGSTGARKEEEGGPVLVKEKLGLKKLVLTQEQKTMLLDWNDSIPESVHLKAGERISQKSAENGRGGRVLKPVRPLLLPRAAGEPLPTQRGAQEKMGTPAEQAQGERNVPPPKSPLRLIANAIRRSLEPLLSNSEGGKKAWAKQESKTLPAQACTRSFSLRKTNSNKDGDQHSPGRNQSSAFSPPDPALRTHSLPNRPSKVFPALRSPPCSKIEDVPTLLEKVSLQENFPDASKPPKKRISLFSSLRLKDKSFESFLQESRQRKDIRDLFGSPKRKVLPEDSAQALEKLLQPFKSTSLRQAAPPPPPPPPPPPPPPTAGGADSKNFPLRAQVTEASSSASSTSSSSADEEFDPQLSLQLKEKKTLRRRKKLEKAMKQLVKQEELKRLYKAQAIQRQLEEVEERQRASEIQGVRLEKALRGEADSGTQDEAQLLQEWFKLVLEKNKLMRYESELLIMAQELELEDHQSRLEQKLREKMLKEESQKDEKDLNEEQEVFTELMQVIEQRDKLVDSLEEQRIREKAEDQHFESFVFSRGCQLSRT

SEQ ID NO: 19477 - protein, 97 aa, Homo sapiens
LTGPPDASRYPGPQPGRSPAARRPHTSPEPGLGRAAAAARRSQAGLCSVPMAAAGWRDGSGQEKYRLVVVGGGGVGKSALTIQFIQNHLLKKYLHCE

SEQ ID NO: 19478 - protein, 143 aa, Homo sapiens
LEAYLYHQCGLDPQFRNQYDNDVTVWSPQGRIHQIEYAMEAVKQGSATVGLKSKTHAVLVALKRAQSELAAHQKKILHVDNHIGISIAGLTADARLLCNFMRQECLDSRFVFDRPLPVSRLVSLIGSSILFMLAFMDMNFEGF

SEQ ID NO: 19479 - protein, 153 aa, Homo sapiens
LIAAIMGRMHAPGKGLSQSALPYRRSVPTWLKLTSDDVKEQIYKLAKKGLTPSQIGVILRDSHGVAQVRFVTGNKILRILKSKGLAPDLPEDLYHLIKKAVAVRKHLERNRKRAGFTVWLDIIRPSESSLPIGNMNHLQPLPWSHKFVCVLKQ

SEQ ID NO: 19480 - protein, 106 aa, Homo sapiens
VIPFSGVILRDSHGVAQVRFVTGNKILRILKSKGLAPDLPEDLYHLIKKAVAVRKHLERNRKDKDAKFRLILIESRIHRLARYYKTKRVLPPNWKYESSTASALVA

SEQ ID NO: 19481 - protein, 377 aa, Homo sapiens
LFHLRPLPRPAQSAAAAAADSGSHCHAPPTTARRAFPIPFGSKSNMATLKDQLIYNLLKEEQTPQNKITVVGVGAVGMACAISILMKDLADELALVDVIEDKLKGEMMDLQHGSLFLRTPKIVSGKDYNVTANSKLVIITAGARQQEGESRLNLVQRNVNIFKFIIPNVVKYSPNCKLLIVSNPVDILTYVAWKISGFPKNRVIGSGCNLDSARFRYLMGERLGVHPLSCHGWVLGEHGDSSVPVWSGMNVAGVSLKTLHPDLGTDKDKEQWKEVHKQVVESAYEVIKLKGYTSWAIGLSVADLAESIMKNLRRVHPVSTMIKGLYGIKDDVFLSVPCILGQNGISDLVKVTLTSEEEARLKKSADTLWGIQKELQF

SEQ ID NO: 19482 - protein, 28 aa, Homo sapiens
VLQPLPPIPDLIATRPRRPPDVHSRWAP

SEQ ID NO: 19483 - protein, 44 aa, Homo sapiens
VLQPLPPIPDLIATRPRRPPDVHSRYDSFWFQVQYGNSKGSADL

SEQ ID NO: 19484 - protein, 82 aa, Homo sapiens
MATLKDQLIYNLLKEEQTPQNKITVVGVGAVGMACAISILMKDLADELALVDVIEDKLKGEMMDLQHGSLFLRTPKIVSGKG

SEQ ID NO: 19485 - protein, 259 aa, Homo sapiens
LCHQYLNEDYNVTANSKLVIITAGARQQEGESRLNLVQRNVNIFKFIIPNVVKYSPNCKLLIVSNPVDILTYVAWKISGFPKNRVIGSGCNLDSARFRYLMGERLGVHPLSCHGWVLGEHGDSSVPVWSGMNVAGVSLKTLHPDLGTDKDKEQWKEVHKQVVESAYEVIKLKGYTSWAIGLSVADLAESIMKNLRRVHPVSTMIKGLYGIKDDVFLSVPCILGQNGISDLVKVTLTSEEEARLKKSADTLWGIQKELQF

SEQ ID NO: 19486 - protein, 62 aa, Homo sapiens [sequence omitted]

SEQ ID NO: 19487 - protein, 10 aa, Homo sapiens
LPLSAMLKKR

SEQ ID NO: 19488 - protein, 530 aa, Homo sapiens
VVHVVDKHILVFDPKQEEVSFFHGKKTTNQNVIKKQNKDLKFVFDAVFDETSTQSEVFEHTTKPILRSFLNGYNCTVLAYGATGAGKTHTMLGSADEPGVMYLTMLHLYKCMDEIKEEKICSTAVSYLEVYNEQIRDLLVNSGPLAVREDTQKGVVVHGLTLHQPKSSEEILHLLDNGNKNRTQHPTDMNATSSRSHAVFQIYLRQQDKTASINQNVRIAKMSLIDLAGSERASTSGAKGTRFVEGTNINRSLLALGNVINALADSKRKNQHIPYRNSKLTRLLKDSLGGNCQTIMIAAVSPSSVFYDDTYNTLKYANRAKDIKSSLKSNVLNVNNHITQYVKICNEQKAEILLLKEKLKAYEEQKAFTNENDQAKLMISNPQEKEIERFQEILNCLFQNREEIRQEYLKLEMLLKENELKSFYQQQCHKQIEMMCSEDKVEKKESLLLLPKLECSGTTSAHCNLCLPDSSNSPASASQLAGITSVHHYAQLIFVFLVEMMFHNVGHASLELLTSGDPSASASQSAGITG

SEQ ID NO: 19489 - protein, 145 aa, Homo sapiens [sequence omitted]

SEQ ID NO: 19490 - protein, 29 aa, Homo sapiens
MSVPAFIDISEEDQFFRKRTEFEIVLCHS

SEQ ID NO: 19491 - protein, 275 aa, Homo sapiens
VRETQARSSLDLLHPPRQFFFFKSKSLDFLKLLNWMRLLKSELGSFITDYFQNQLLAKGLFFVEEKIKLCEGENRIEVLAEVWDHFFTETLPTLQAIFYPVQSVHEPTGPSESYLQLEELVKQVVSPFLGISGDRSFSGPTYTLARRHSRVRPKVTVLNYASPITAVSRPLNEMVLTPLTEQEGEAYLEKCGSVRRHTVANAHSDIQLLAMATMMHSGLGEEASSENKCLLLPPSFPPPHRQCSSEPNITDNPDGLEEGARGSQEGSELNCASLS

SEQ ID NO: 19492 - protein, 128 aa, Homo sapiens
LERNRGWTGPHLRAELGEEGGTEGGRAGQSATGRTIQVAHFSPVRKLPREDRKLFPRRAESGAEASGGCARLGVIHAGDPKEKRQFGHKEKHQGHECTEERPCDGMATRQPSVNQGERPQRKSTLLTP

SEQ ID NO: 19493 - protein, 210 aa, Homo sapiens
LSPGLMTRGFAPILPVEFHKMGSFRRPRPRFMSSPVLSDLPRFQAARQALQLSSSSAWNSVQTAVINVFKGGGLQSNELYALNENIRRLLKSELGSFITDYFQNQLLAKGLFFVEEKIKLCEGENRIEVLAEVWDHFFTETLPTLQAIFYPVQGQELTIRQISLLGFRDLVLLKVKLGDLLLLAQSKLPSSIVQMLLILQPGGTPGSGPR

SEQ ID NO: 19494 - protein, 373 aa, Homo sapiens
LSPGLMTRGFAPILPVEFHKMGSFRRPRPRFMSSPVLSDLPRFQAARQALQLSSSSAWNSVQTAVINVFKGGGLQSNELYALNENIRRLLKSELGSFITDYFQNQLLAKGLFFVEEKIKLCEGENRIEVLAEVWDHFFTETLPTLQAIFYPVQGQELTIRQISLLGFRDLVLLKVKLGDLLLLAQSKLPSSIVQMLLILQSVHEPTGPSESYLQLEELVKQVVSPFLGISGDRSFSGPTYTLARRHSRVRPKVTVLNYASPITAVSRPLNEMVLTPLTEQEGEAYLEKCGSVRRHTVANAHSDIQLLAMATMMHSGLGEEASSENKCLLLPPSFPPPHRQCSSEPNITDNPDGLEEGARGSQEGSELNCASLS

SEQ ID NO: 19495 - protein, 139 aa, Homo sapiens
MPVFSRAPARRHSRVRPKVTVLNYASPITAVSRPLNEMVLTPLTEQEGEAYLEKCGSVRRHTVANAHSDIQLLAMATMMHSGLGEEASSENKCLLLPPSFPPPHRQCSSEPNITDNPDGLEEGARGSQEGSELNCASLS

SEQ ID NO: 19496 - protein, 943 aa, Homo sapiens
LSQDLNPGTSASMAASFPPTLGLSSAPDEIQHPHIKFSEWKFKLFRVRSFEKTPEEAQKEKKDSFEGKPSLEQSPAVLDKADGQKPVPTQPLLKAHPKFSKKFHDNEKARGKAIHQANLRHLCRICGNSFRADEHNRRYPVHGPVDGKTLGLLRKKEKRATSWPDLIAKVFRIDVKADVDSIHPTEFCHNCWSIMHRKFSSAPCEVYFPRNVTMEWHPHTPSCDICNTARRGLKRKSLQPNLQLSKKLKTVLDQARQARQHKRRAQARISSKDVMKKIANCSKIHLSTKLLAVDFPEHFVKSISCQICEHILADPVETNCKHVFCRVCILRCLKVMGSYCPSCRYPCFPTDLESPVKSFLSVLNSLMVKCPAKECNEEVSLEKYNHHISSHKESKEIFVHINKGGRPRQHLLSLTRRAQKHRLRELKLQVKAFADKEEGGDVKSVCMTLFLLALRARNEHRQADELEAIMQGKGSGLQPAVCLAIRVNTFLSCSQYHKMYRTVKAITGRQIFQPLHALRNAEKVLLPGYHHFEWQPPLKNVSSSTDVGIIDGLSGLSSSVDDYPVDTIAKRFRYDSALVSALMDMEEDILEGMRSQDLDDYLNGPFTVVVKESCDGMGDVSEKHGSGPVVPEKAVRFSFTIMKITIAHSSQNVKVFEEAKPNSELCCKPLCLMLADESDHETLTAILSPLIAEREAMKSSELMLELGGILRTFKFIFRGTGYDEKLVREVEGLEASGSVYICTLCDATRLEASQNLVFHSITRSHAENLERYEVWRSNPYHESVEELRDRVKGVSAKPFIETVPSIDALHCDIGNAAEFYKIFQLEIGEVYKNPNASKEERKRWQATLDKHLRKKMNLKPIMRMNGNFARKLMTKETVDAVCELIPSEERHEALRELMDLYLKMKPVWRSSCPAKECPESLCQYSFNSQRFAELLSTKFKYRN

SEQ ID NO: 19497 - protein, 1056 aa, Homo sapiens
LARQPAEQGTSASMAASFPPTLGLSSAPDEIQHPHIKFSEWKFKLFRVRSFEKTPEEAQKEKKDSFEGKPSLEQSPAVLDKADGQKPVPTQPLLKAHPKFSKKFHDNEKARGKAIHQANLRHLCRICGNSFRADEHNRRYPVHGPVDGKTLGLLRKKEKRATSWPDLIAKVFRIDVKADVDSIHPTEFCHNCWSIMHRKFSSAPCEVYFPRNVTMEWHPHTPSCDICNTARRGLKRKSLQPNLQLSKKLKTVLDQARQARQHKRRAQARISSKDVMKKIANCSKIHLSTKLLAVDFPEHFVKSISCQICEHILADPVETNCKHVFCRVCILRCLKVMGSYCPSCRYPCFPTDLESPVKSFLSVLNSLMVKCPAKECNEEVSLEKYNHHISSHKESKEIFVHINKGGRPRQHLLSLTRRAQKHRLRELKLQVKAFADKEEGGDVKSVCMTLFLLALRARNEHRQADELEAIMQGKGSGLQPAVCLAIRVNTFLSCSQYHKMYRTVKAITGRQIFQPLHALRNAEKVLLPGYHHFEWQPPLKNVSSSTDVGIIDGLSGLSSSVDDYPVDTIAKRFRYDSALVSALMDMEEDILEGMRSQDLDDYLNGPFTVVVKESCDGMGDVSEKHGSGPVVPEKAVRFSFTIMKITIAHSSQNVKVFEEAKPNSELCCKPLCLMLADESDHETLTAILSPLIAEREAMKSSELMLELGGILRTFKFIFRGTGYDEKLVREVEGLEASGSVYICTLCDATRLEASQNLVFHSITRSHAENLERYEVWRSNPYHESVEELRDRVKGVSAKPFIETVPSIDALHCDIGNAAEFYKIFQLEIGEVYKNPNASKEERKRWQATLDKHLRKKMNLKPIMRMNGNFARKLMTKETVDAVCELIPSEERHEALRELMDLYLKMKPVWRSSCPAKECPESLCQYSFNSQRFAELLSTKFKYRYEGKITNYFHKTLAHVPEIIERDGSIGAWASEGNESGNKLFRRFRKMNARQSKCYEMEDVLKHHWLYTSKYLQKFMNAHNALKTSGFTMNPQASLGDPLGIEDSLESQDSMEF

SEQ ID NO: 19498 - protein, 10 aa, Homo sapiens
LGEGTPGMCL

SEQ ID NO: 19499 - protein, 7 aa, Homo sapiens
MGDTVAS

SEQ ID NO: 19500 - protein, 9 aa, Homo sapiens
LGTFEQVTR

SEQ ID NO: 19501 - protein, 22 aa, Homo sapiens
LNRYCGLMNRNVCPYVRIGNNG

SEQ ID NO: 19502 - protein, 122 aa, Homo sapiens
MSAHMSGLEIMDEDQLIKDVLDKFLNCHEQTYDEEFLNTFTHLSQDLLLLPGEVEQDVSTSIPSCIPFVAQPPTCEVKPKPSVKRMDKQTEEVLHREFSHSPHCLDFVIHPFKEMLHASVFF

SEQ ID NO: 19503 - protein, 107 aa, Homo sapiens
MFGRTDLLLLPGEVEQDVSTSIPSCIPFVAQPPTCEVKPKPSVKRMDKQTEEILGDEVQLFSLDEEFDYDNVMLTSKFSPAEIENIKELCKQQKRKDTSPDLEKSCD

SEQ ID NO: 19504 - protein, 46 aa, Homo sapiens
LAAALAAAGGVIVRVVGLEKFRGGGGAGQDKDSGTGPWACRSPCRQ

SEQ ID NO: 19505 - protein, 113 aa, Homo sapiens
MRQEATVNYLKELEKQLVAQKIHIEENEDRDTGLEQRHNKEDPDCIKAKVPLGDLDLYDGTYITLESKDISPEDYIDTESPVPPDPEQPDCTKILELPYSIHAFQHLRVSREL

SEQ ID NO: 19506 - protein, 20 aa, Homo sapiens
VILGPSLYLALDLPGSSRRK

SEQ ID NO: 19507 - protein, 21 aa, Homo sapiens
LILRGGTPSPGLMQVHLDSSD

SEQ ID NO: 19508 - protein, 94 aa, Homo sapiens
VMQMKLHIVALIAQKGNFSKTSAQVVLDGLVDKIGDVKCGNNAKEAMTAIAEACMLPWTAEQVVSMAFSQKNPKNQSETLNWLSNAIKEFGFSG

SEQ ID NO: 19509 - protein, 175 aa, Homo sapiens
MAPKKRPETQKTSEIVLRPRNKRSRSPLELEPEAKKLCAKGSGPSRRCDSDCLWVGLAGPQILPPCRSIVRTLHQHKLGRASWPSVQQGLQQSFLHTLDSYRILQKAAPFDRRATSLAWHPTHPSTVAVGSKGGDIMLWNFGIKDKPTFIKGVSSSPCQVVLKKCLLAGCSGSHL

SEQ ID NO: 19510 - protein, 294 aa, Homo sapiens
MKQGFLSGNSAEKPFVRLERKICLFCLAGPSRRCDSDCLWVGLAGPQILPPCRSIVRTLHQHKLGRASWPSVQQGLQQSFLHTLDSYRILQKAAPFDRRATSLAWHPTHPSTVAVGSKGGDIMLWNFGIKDKPTFIKGIGAGGSITGLKFNPLNTNQFYASSMEGTTRLQDFKGNILRVFASSDTINIWFCSLDVSASSRMVVTGDNVGNVILLNMDGKELWNLRMHKKKVTHVALNPCCDWFLATASVDQTVKIWDLRQVRGKASFLYSLPHRHPVNAGVISQTSSLLQTLPV

SEQ ID NO: 19511 - protein, 224 aa, Homo sapiens
MKQGFLSGNSAEKPFVRLERKICLFCLAGPSRRCDSDCLWVGLAGPQILPPCRSIVRTLHQHKLGRASWPSVQQGLQQSFLHTLDSYRILQKAAPFDRRATSLAWHPTHPSTVAVGSKGGDIMLWNFGIKDKPTFIKGAAWHPRYNLIVVGRYPDPNFKSCTPYELRTIDVFDGNSGKMMCQLYDPESSGISSLNEFNPMGDTLASAMGYHILIWSQEEARTRK

SEQ ID NO: 19512 - protein, 218 aa, Homo sapiens
VDPESHLENGATAQNLRLNALHSLWCNDLTCSWVEAYMDGIFSIKCSGLPKRKWLEKLQNAAGCSGSCLKSQHFGRPSIWFCSLDVSASSRMVVTGDNVGNVILLNMDGKELWNLRMHKKKVTHVALNPCCDWFLATASVDQTVKIWDLRQVRGKASFLYSLPHRHPVNAACFSPDGARLLTTDQKSEIRVYSASQWDCPLGLIPHPHRHFQHLTPIK

SEQ ID NO: 19513 - protein, 162 aa, Homo sapiens
LDVSASSRMVVTGDNVGNVILLNMDGKELWNLRMHKKKVTHVALNPCCDWFLATASVDQTVKIWDLRQVRGKASFLYSLPHRHPVNAACFSPDGARLLTTDQKSEIRVYSASQWDCPLGLIPHPHRHFQHLTPIKVSGGGKELAEGGCDHEAGAGLPTVGKG

SEQ ID NO: 19514 - protein, 448 aa, Homo sapiens
LLRSTAGAGRVKSRDLWGEVFHWSREGFKKDGINLPLRLPPGPIFCPLLQEMNLLPNIESPVTRQEKMATVWDEAEQDGIGEEVLKMSTEEIIQRTRLLDSEIKLLDVDPNDQEEDGANIDLDSQRKGKCAVIKTSTRQTYFLPVIGLVDAEKLKPGDLVGVNKDSYLILETLPTEYDSRVKAMEVDERPTEQYSDIGGLDKQIQELVEAIVLPMNHKEKFENLGIQPPKGVLMYGPPGTGKTLLARACAAQTKATFLKLAGPQLVQMFIGDGAKLVRDAFALAKEKAPSIIFIDELDAIGTKRFDSEKAGDREVQRTMLELLNQLDGFQPNTQVKVIAATNRVDILDPALLRSGRLDRKIEFPMPNEEARARIMQIHSRKMNVSPDVNYEELARCTDDFNGAQCKAVCVEAGMIALRRGATELTHEDYMEGILEVQAKKKANLQYYA

SEQ ID NO: 19515 - protein, 500 aa, Homo sapiens
LVFGIGEADSLLRSTAGAGRVKSRDLWGEVFHWSREGFKKDGINLPLRLPPGPIFCPLLQEMNLLPNIESPVTRQEKMATVWDEAEQDGIGEEVLKMSTEEIIQRTRLLDSEIKIMKSEVLRVTHELQAMKDKIKENSEKIKVNKTLPYLVSNVIELLDVDPNDQEEDGANIDLDSQRKGKCAVIKTSTRQTYFLPVIGLVDAEKLKPGDLVGVNKDSYLILETLPTEYDSRVKAMEVDERPTEQYSDIGGLDKQIQELVEAIVLPMNHKEKFENLGIQPPKGVLMYGPPGTGKTLLARACAAQTKATFLKLAGPQLVQMFIGDGAKLVRDAFALAKEKAPSIIFIDELDAIGTKRFDSEKAGDREVQRTMLELLNQLDGFQPNTQVKVIAATNRVDILDPALLRSGRLDRKIEFPMPNEEARARIMQIHSRKMNVSPDVNYEELARCTDDFNGAQCKAVCVEAGMIALRRGATELTHEDYMEGILEVQAKKKANLQYYA

SEQ ID NO: 19516 - protein, 145 aa, Homo sapiens
VTRQEKMATVWDEAEQDGIGEEVLKMSTEEIIQRTRLLDSEIKIMKSEVLRVTHELQAMKDKIKENSEKIKVNKTLPYLVSNVIELLDVDPNDQEEDGANIDLDSQRKGKCAVIKTSTRQTYFLPVIGLVDAEKLKPGDLVVSGA

SEQ ID NO: 19517 - protein, 126 aa, Homo sapiens
VTRQEKMATVWDEAEQDGIGEEVLKMSTEEIIQRTRLLDSEIKIMKSEVLRVTHELQAMKDKIKENSEKIKVNKTLPYLVSNVIELLDVDPNDQEEDGANIDLDSQRKGKCAVIKTSTRQVSVAQQ

SEQ ID NO: 19518 - protein, 24 aa, Homo sapiens
VGFEDPLHFCSWRARACPCTWPHC

SEQ ID NO: 19519 - protein, 96 aa, Homo sapiens
MGRRARPGPSGSSAGRAGRRLERGAEAGGERPPEAFLVEVDARKGGGDQGTVFRIRAQELRFSTCSRGAIGPPLPAASIFILQDPENHPLMVFAQA

SEQ ID NO: 19520 - protein, 63 aa, Homo sapiens
LARAERARRAPARSRRGTVFRIRAQELRFSTCSRGAIGPPLPAASIFILQDPENHPLMVFAQA

SEQ ID NO: 19521 - protein, 29 aa, Homo sapiens
LARAERARRAPARSRRDPENHPLMVFAQA

SEQ ID NO: 19522 - protein, 41 aa, Homo sapiens
LVEVDARKGGGDQGTVFRIRAQELRFSTCSRGAIGIQRITR

SEQ ID NO: 19523 - protein, 20 aa, Homo sapiens
VRKGRGEPRRGAGGIQRITR

SEQ ID NO: 19524 - protein, 44 aa, Homo sapiens
LARAERARRAPARSRRGTVFRIRAQELRFSTCSRGAIGIQRITR

SEQ ID NO: 19525 - protein, 29 aa, Homo sapiens
LARAERARRAPARSRRPLSLFYRIQRITR

SEQ ID NO: 19526 - protein, 21 aa, Homo sapiens
LSVCPLGAGCDIFPRIQRITR

SEQ ID NO: 19527 - protein, 35 aa, Homo sapiens
LGETVKLGTVFRIRAQELRFSTCSRGAIGIQRITR

SEQ ID NO: 19528 - protein, 29 aa, Homo sapiens
LSEVGVSVGIVIRPRQCPRGRRVNGGGGC

SEQ ID NO: 19529 - protein, 67 aa, Homo sapiens
LYLDLSDCPCFPPATICMCTAYCLSPVFKLYKLCFLIFPSALFWGGGYSSFGITFPPPMCFPSFEIF

SEQ ID NO: 19530 - protein, 717 aa, Homo sapiens
LHRVDRLSGSDTVMKQTHADTPVDHCLSGIRKCSSTFKLKSEVNKHETALEMQNPNLNNKECCFTFTLNGNSRKLDRSVFTAYGKPSESIYSALSANDYFSERIKNQFNKNIIVYEEKTIDGHINLGMPLKCLPSDSHFKITFGQRKSSKEDGHILRQCENPNMECILFHVVAIGRTRKKIVKINELHEKGSKLCIYALKGETIEGALCKDGRFRSDIGEFEWKLKEGHKKIYGKQSMVDEVSGKVLEMDISKKKALQQKDIHKKIKQNESATDEINHQSLIQSKKKVHKPKKDGETKDVEHSREQILPPQDLSHYIKDKTRQTIPRIRNYYFCSLPRKYRQINSQVRRRPHLGRRYAINLDVQKEAINLLKNYQTLNEAIMHQYPNFKEEAQWVRKYFREEQKRMNLSPAKQFNIYKKDFGKMTANSVSVATCEQLTYYSKSVGFMQWDNNGNTGNATCFVFNGGYIFTCRHVVHLMVGKNTHPSLWPDIISKCAKVTFTYTEFCPTPDNWFSIEPWLKVSNENLDYAILKLKENGNAFPPGLWRQISPQPSTGLIYLIGHPEGQIKKIDGCTVIPLNERLKKYPNDCQDGLVDLYDTTSNVYCMFTQRSFLSEVWNTHTLSYDTCFSDGSSGSPVFNASGKLVALHTFGLFYQRGFNVHALIEFGYSMDSILCDIKKTNESLYKSLNDEKLETYDEEKGKQESSLQDHQIEPMEC

SEQ ID NO: 19531 - protein, 732 aa, Homo sapiens
LHRVDRLSGSGEIQSLLLHFGQKFKDTVMKQTHADTPVDHCLSGIRKCSSTFKLKSEVNKHETALEMQNPNLNNKECCFTFTLNGNSRKLDRSVFTAYGKPSESIYSALSANDYFSERIKNQFNKNIIVYEEKTIDGHINLGMPLKCLPSDSHFKITFGQRKSSKEDGHILRQCENPNMECILFHVVAIGRTRKKIVKINELHEKGSKLCIYALKGETIEGALCKDGRFRSDIGEFEWKLKEGHKKIYGKQSMVDEVSGKVLEMDISKKKALQQKDIHKKIKQNESATDEINHQSLIQSKKKVHKPKKDGETKDVEHSREQILPPQDLSHYIKDKTRQTIPRIRNYYFCSLPRKYRQINSQVRRRPHLGRRYAINLDVQKEAINLLKNYQTLNEAIMHQYPNFKEEAQWVRKYFREEQKRMNLSPAKQFNIYKKDFGKMTANSVSVATCEQLTYYSKSVGFMQWDNNGNTGNATCFVFNGGYIFTCRHVVHLMVGKNTHPSLWPDIISKCAKVTFTYTEFCPTPDNWFSIEPWLKVSNENLDYAILKLKENGNAFPPGLWRQISPQPSTGLIYLIGHPEGQIKKIDGCTVIPLNERLKKYPNDCQDGLVDLYDTTSNVYCMFTQRSFLSEVWNTHTLSYDTCFSDGSSGSPVFNASGKLVALHTFGLFYQRGFNVHALIEFGYSMDSILCDIKKTNESLYKSLNDEKLETYDEEKGKQESSLQDHQIEPMEC

SEQ ID NO: 19532 - protein, 38 aa, Homo sapiens [sequence omitted]

SEQ ID NO: 19533 - protein, 30 aa, Homo sapiens
MSCKKQRSRKHSVNEKCNMKIEHYFSPVCL

SEQ ID NO: 19534 - protein, 85 aa, Homo sapiens
LRLQLLRPGGPGRRFRQLTWEALTWDALTWDALPASGRLGFRMKDRLEQLKAKQLTQDDDTDAVEIAIDNTAFMDEFFSEKPRMT

SEQ ID NO: 19535 - protein, 164 aa, Homo sapiens
LRLQLLRPGGPGRRFRQLTWEALTWDALTWDALPASGRLGFRMKDRLEQLKAKQLTQDDDTDAVEIAIDNTAFMDEFFSEIEETRLNIDKISEHVEEAKKLYSIILSAPIPEPKTKDDLEQLTTEIKKRANNVRNKLKSKKGTKKTRPSPPPSISAPLGSSFPN

SEQ ID NO: 19536 - protein, 319 aa, Homo sapiens
LRLQLLRPGGPGRRFRQLTWEALTWDALTWDALPASGRLGFRMKDRLEQLKAKQLTQDDDTDAVEIAIDNTAFMDEFFSEIEETRLNIDKISEHVEEAKKLYSIILSAPIPEPKTKDDLEQLTTEIKKRANNVRNKLKSMEKHIEEDEVRSSADLRIRKSQHSVLSRKFVEVMTKYNEAQVDFRERSKGRIQRQLEITGKKTTDEELEEMLESGNPAIFTSGIIDSQISKQALSEIEGRHKDIVRLESSIKELHDMFMDIAMLVENQGEMLDNIELNVMHTVDHVEKARDETKKAVKYQSQARKKLISLQTGVATLVFR

SEQ ID NO: 19537 - protein, 183 aa, Homo sapiens
LKSMEKHIEEDEVRSSADLRIRKSQHSVLSRKFVEVMTKYNEAQVDFRERSKGRIQRQLEITGKKTTDEELEEMLESGNPAIFTSGIIDSQISKQALSEIEGRHKDIVRLESSIKELHDMFMDIAMLVENQGSMIDRIENNMDQSVGFVERAVADTKKAVKYQSEARRKLISLQTGVATLVFR

SEQ ID NO: 19538 - protein, 230 aa, Homo sapiens
LWSSSRTQKKRGSPGLLRVCSGLAWGPPKGRRRQAQDHPVCSRVQAWSHPKGSQSQAQRPPSHEPSKPPPAGETVTGGFGAKKRKGSSSQAPASKKLNKEELPVIPKGKPKSGRVWKDRSKKRFSQMLQDKPLRTSWQRKMKERQERKLAKDFARHLEEEKERRRQEKKQRRAENLKRRLENERKAEVVQVIRNPAKLKRAKKKQLRSIEKRDTLALLQKQPPQQPAAKI

SEQ ID NO: 19539 - protein, 152 aa, Homo sapiens
VSAPPPEAFTPGPNALGGSNRTLQQGPRSLDSAVADRIQVLTATRFSQMLQDKPLRTSWQRKMKERQERKLAKDFARHLEEEKERRRQEKKQRRAENLKRRLENERKAEVVQVIRNPAKLKRAKKKQLRSIEKRDTLALLQKQPPQQPAAKI

SEQ ID NO: 19540 - protein, 66 aa, Homo sapiens
VLKAVARGCPHSHVKRYASIARLAAPSSPRSSPGSSGGPEVARGGSEASPGARRVAPRSTVTAPCP

SEQ ID NO: 19541 - protein, 833 aa, Homo sapiens
VARVCPVGFSMTETAVGIRCTDIDECVTSSCEGHCVNTEGGFVCECGPGMQLSADRHSCQDTDECLGTPCQQRCKNSIGSYKCSCRTGFHLHGNRHSCVDVNECRRPLERRVCHHSCHNTVGSFLCTCRPGFRLRADRVSCEAFPKAVLAPSAILQPRQHPSKMLLLLPEAGRPALSPGHSPPSGAPGPPAGVRTTRLPSPTPRLPTSSPSAPVWLLSTLLATPVPTASLLGNLRPPSLLQGEVMGTPSSPRGPESPRLAAGPSPCWHLGAMHESRSRWTEPGCSQCWCEDGKVTCEKVRCEAACSHPIPSRDGGCCPSCTGCFHSGVVRAEGDVFSPPNENCTVCVCLAGNVSCISPECPSGPCQTPPQTDCCTCVPVRCYFHGRWYADGAVFSGGGDECTTCVCQNGEVECSFMPCPELACPREEWRLGPGQCCFTCQEPTPSTGCSLDDNGVEFPIGQIWSPGDPCELCICQADGSVSCKRTDCVDSCPHPIRIPGQCCPDCSAGCTYTGRIFYNNETFPSVLDPCLSCICLLGSVACSPVDCPITCTYPFHPDGECCPVCRDCNYEGRKVANGQVFTLDDEPCTRCTCQLGEVSCEKVPCQRACADPALLPGDCCSSCPGFPVSSGRKAGALPSRKCHSAKLVGACMETEAPVNCSSCPGPPTASPSRPVLHLLQLLLRTNLMKTQTLPTSPAGAHGPHSLALGLTATFPGEPGASSTLTRAFDPSRSPHSTSSFPRGSSATSCDSRALVLSLWGPDSVQVASSAWHPPDGSFSTFHDGPQPLEDPITLLGPRVLSPTTSRLSTALAATTHPGPQQPPVGASRGEESTM

SEQ ID NO: 19542 - protein, 64 aa, Homo sapiens
LEPADPEHAPDSPCWPGARRRQASYGPRPGGRRDRGSGTYPALLHLGRGGPALRVRGAVASDRP

SEQ ID NO: 19543 - protein, 28 aa, Homo sapiens
LSVYRKPKWNHLVHKFVIGHLKLWFHTW

SEQ ID NO: 19544 - protein, 100 aa, Homo sapiens
LESHWFVWVTQMNHIVMEIDQEAYRDWFSSQLTATCNVEQSFFNDWFSGHLNFQIEHHLFPTMPRHNLHKIAPLVKSLCAKHGIEYQEKPLLRALLDIIR

SEQ ID NO: 19545 - protein, 157 aa, Homo sapiens
LPACVINPAVRKSYYFDRDDVALKNFAKYFLHQSHEEREHAEKLMKLQNQRGGRIFLQDIKKPDCDDWESGLNAMECALHLEKNVNQSLLELHKLATDKNDPHLCDFIETHYLNEQVKAIKELGDHVTNLRKMGAPESGLAEYLFDKHTLGDSDNES

SEQ ID NO: 19546 - protein, 206 aa, Homo sapiens
VLGRNPALVPHPGRRRRLSLVAAMTTASTSQVRQNYHQDSEAAINRQINLELYASYVYLSMSYYFDRDDVALKNFAKYFLHQSHEEREHAEKLMKLQNQRGGRIFLQDIKKPDCDDWESGLNAMECALHLEKNVNQSLLELHKLATDKNDPHLCDFIETHYLNEQVKAIKELGDHVTNLRKMGAPESGLAEYLFDKHTLGDSDNES

SEQ ID NO: 19547 - protein, 417 aa, Homo sapiens
LLLPCGESRRPGAKWVWASGALPRDTTGLGSEQPSGDVAQSNRATMGTTAPGPIHLLELCDQKLMEFLCNMDNKDLVWLEEIQEEAERMFTREFSKEPELMPKTPSQKNRRKKRRISYVQDENRDPIRRRLSRRKSRSSQLSSRRLRSKDSVEKLATVVGENGSVLRRVTRAAAAAAAATMALAAPSSPTPESPTMLTKKPEDNHTQCQLVPVVEIGISERQNAEQHVTQLMSTEPLPRTLSPTPASATAPTSQGIPTSDEESTPKKSKARILESITVSSLMATPQDPKGQGVGTGRSASKLRIAQVSPGPRDSPAFPDSPWRERVLAPILPDNFSTPTGSRTDSQSVRHSPIAPSSPSPQVLAQKYSLVAKQESVVRRASRRLAKKTAEEPAASGRIICHSYLERLLNVEVPQKVG

SEQ ID NO: 19548 - protein, 963 aa, Homo sapiens
LLLPCGESRRPGAKWVWASGALPRDTTGLGSEQPSGDVAQSNRATMGTTAPGPIHLLELCDQKLMEFLCNMDNKDLVWLEEIQEEAERMFTREFSKEPELMPKTPSQKNRRKKRRISYVQDENRDPIRRRLSRRKSRSSQLSSRRLRSKDSVEKLATVVGENGSVLRRVTRAAAAAAAATMALAAPSSPTPESPTMLTKKPEDNHTQCQLVPVVEIGISERQNAEQHVTQLMSTEPLPRTLSPTPASATAPTSQGIPTSDEESTPKKSKARILESITVSSLMATPQDPKGQGVGTGRSASKLRIAQVSPGPRDSPAFPDSPWRERVLAPILPDNFSTPTGSRTDSQSVRHSPIAPSSPSPQVLAQKYSLVAKQESVVRRASRRLAKKTAEEPAASGRIICHSYLERLLNVEVPQKVGSEQKEPPEEAEPVAAAEPEVPENNGNNSWPHNDTEIANSTPNPKPAASSPETPSAGQQEAKTDQADGPREPPQSARRKRSYKQAVSELDEEQHLEDEELQPPRSKTPSSPCPASKVVRPLRTFLHTVQRNQMLMTPTSAPRSVMKSFIKRNTPLRMDPKCSFVEKERQRLENLRRKEEAEQLRRQKVEEDKRRRLEEVKLKREERLRKVLQARERVEQMKEEKKKQIEQKFAQIDEKTEKAKEERLAEEKAKKKAAAKKMEEVEARRKQEEEARRLRWLQQEEEERRHQELLQKKKEEEQERLRKAAEAKRLAEQREQERREQERREQERREQERREQERREQERQLAEQERRREQERLQAERELQEREKALRLQKEQLQRELEEKKKKEEQQRLAERQLQEEQEKKAKEAAGASKALNVTVDVQSPACTSYQMTPQGHRAPPKINPDNYGMDLNSDDSTDDEAHPRKPIPTWARGTPLSQAIIHQYYHPPNLLELFGTILPLDLEDIFKKSKPRYHKRTSSAVWNSPPLQGARVPSSLAYSLKKH

SEQ ID NO: 19549 - protein, 959 aa, Homo sapiens
LLLPCGESRRPGAKWVWASGALPRDTTGLGSEQPSGDVAQSNRATMGTTAPGPIHLLELCDQKLMEFLCNMDNKDLVWLEEIQEEAERMFTREFSKEPELMPKTPSQKNRRKKRRISYVQDENRDPIRRRLSRRKSRSSQLSSRRLRSKDSVEKLATVVGENGSVLRRVTRAAAAAAAATMALAAPSSPTPESPTMLTKKPEDNHTQCQLVPVVEIGISERQNAEQHVTQLMSTEPLPRTLSPTPASATAPTSQGIPTSDEESTPKKSKARILESITVSSLMATPQDPKGQGVGTGRSASKLRIAQVSPGPRDSPAFPDSPWRERVLAPILPDNFSTPTGSRTDSQSVRHSPIAPSSPSPQVLAQKYSLVAKQESVVRRASRRLAKKTAEEPAASGRIICHSYLERLLNVEVPQKVGSEQKEPPEEAEPVAAAEPEVPENNGNNSWPHNDTEIANSTPNPKPAASSPETPSAGQQEAKTDQADGPREPPQSARRKRSYKQAVSELDEEQHLEDEELQPPRSKTPSSPCPASKVVRPLRTFLHTVQRNQMLMTPTSAPRSVMKSFIKRNTPLRMDPKEKERQRLENLRRKEEAEQLRRQKVEEDKRRRLEEVKLKREERLRKVLQARERVEQMKEEKKKQIEQKFAQIDEKTEKAKEERLAEEKAKKKAAAKKMEEVEARRKQEEEARRLRWLQQEEEERRHQELLQKKKEEEQERLRKAAEAKRLAEQREQERREQERREQERREQERREQERREQERQLAEQERRREQERLQAERELQEREKALRLQKEQLQRELEEKKKKEEQQRLAERQLQEEQEKKAKEAAGASKALNVTVDVQSPACTSYQMTPQGHRAPPKINPDNYGMDLNSDDSTDDEAHPRKPIPTWARGTPLSQAIIHQYYHPPNLLELFGTILPLDLEDIFKKSKPRYHKRTSSAVWNSPPLQGARVPSSLAYSLKKH

SEQ ID NO: 19550 - protein, 185 aa, Homo sapiens
LERLLNVEVPQKVGSEQKEPPEEAEPVAAAEPEVPENNGNNSWPHNDTEIANSTPNPKPAASSPETPSAGQQEAKTDQADGPREPPQSARRKRSYKQAVSELDEEQHLEDEELQPPRSKTPSSPCPASKVVRPLRTFLHTVQRNQMLMTPTSAPRSVMKSFIKRNTPLRMDPKCSFVVSKAFSCR

SEQ ID NO: 19551 - protein, 169 aa, Homo sapiens
LGSADMNPIVVVHGGGAGPISKDRKERVHQGMVRAATVGYGILREGGSAVDAVEGAVVALEDDPEFNAGCGSVLNTNGEVEMDASIMDGKDLSAGAVSAVQCIANPIKLARLVMEKTPHCFLTDQGAAQFAAAMGVPEIPGEKLVTERNKKRLEKEKHEKGAQKTDCQK

SEQ ID NO: 19552 - protein, 83 aa, Homo sapiens
MGNYILLCQGQQTPAVKGIPSARRLFGACMFIAPARPDRGLLHKPCLVHFFTCKGTECGLRFGTRGGFGNYGAQVIILRSFIQ

SEQ ID NO: 19553 - protein, 19 aa, Homo sapiens
MQDCRSGQEENHPLLRLFL

SEQ ID NO: 19554 - protein, 142 aa, Homo sapiens
LKKSKIKMPKFNFSKPKGKGGVTGSPEASISGSKGDLKSSKASLGSLEGEAEAEASSPKGKFSLFKSKKPRHRSNSFSDEREFSGPSTPTGTLEFEEHTTAISTGMQRPEQTEGSQQPSRGSFSLHPKCRTVEAARKKTTPS

SEQ ID NO: 19555 - protein, 11 aa, Homo sapiens
LMLYKANKAVY

SEQ ID NO: 19556 - protein, 14 aa, Homo sapiens
VVVPASLVLTVRGN

SEQ ID NO: 19557 - protein, 15 aa, Homo sapiens
LKNRPPVGSWNYTDR

SEQ ID NO: 19558 - protein, 13 aa, Homo sapiens
VLRVVTEIPDERD

SEQ ID NO: 19559 - protein, 110 aa, Homo sapiens
LSAGTLCPQFRGGIARGRVRVFMVAVGFMIAHFSVFRRFPISRGPSCALWFPAVTRAFSTQRMEGIYTHTHPSPSPQLWNKHSKSSILVGEMAYNRLAQSVLKGPGSKED

SEQ ID NO: 19560 - protein, 322 aa, Homo sapiens
LPRADPSRPPSRHTPGPRGSRGVGAMAELTALESLIEMGFPRGRAEKALALTGNQGIEAAMDWLMEHEDDPDVDEPLETPLGHILGREPTSSEQGGLEGSGSAAGEGKPALSEEERQEQTKRMLELVAQKQREREEREEREALERERQRRRQGQELSAARQRLQEDEMRRAAEERRREKAEELAARQRVREKIERDKAERAKKYGGSVGSQPPPVAPEPGPVPSSPSQEPPTKREYDQCRIQVRLPDGTSLTQTFRAREQLAAVRLYVELHRGEELGGGQDPVQLLSGFPRRAFSEADMERPLQELGLVPSAVLIVAKKCPS

SEQ ID NO: 19561 - protein, 263 aa, Homo sapiens
LPRADPSRPPSRHTPGPRGSRGVGAMAELTALESLIEMGFPRGRAEKALALTGNQGIEAAMDWMLELVAQKQREREEREEREALERERQRRRQGQELSAARQRLQEDEMRRAAEERRREKAEELAARQRVREKIERDKAERAKKYGGSVGSQPPPVAPEPGPVPSSPSQEPPTKREYDQCRIQVRLPDGTSLTQTFRAREQLAAVRLYVELHRGEELGGGQDPVQLLSGFPRRAFSEADMERPLQELGLVPSAVLIVAKKCPS

SEQ ID NO: 19562 - protein, 318 aa, Homo sapiens
LPRADPSRPPSRHTPGPRGSRGVGAMAELTALESLIEMGFPRGRAEKALALTGNQGIEAAMDWLMEHEDDPDVDEPLETPLGHILGREPTSSEQGGLEGSGSAAGEGKPALSEEERQEQTKRMLELVAQKQREREEREEREALERERQRRRQGQELSAARQRLQEDEMRRAAEERRREKAEEQRVREKIERDKAERAKKYGGSVGSQPPPVAPEPGPVPSSPSQEPPTKREYDQCRIQVRLPDGTSLTQTFRAREQLAAVRLYVELHRGEELGGGQDPVQLLSGFPRRAFSEADMERPLQELGLVPSAVLIVAKKCPS

SEQ ID NO: 19563 - protein, 74 aa, Homo sapiens
LLFGFAEQKQLLEVELYADYRENSYVPTTGAIIEIHSKRIQLYGAYLRIHAHFTGLSSEPAGGALRQRPTCSSS

SEQ ID NO: 19564 - protein, 140 aa, Homo sapiens
MAAAAARWNHVWVGTETGILKGVNLQRKQAANFTAGGQPRREEAVSALCWGTGGETQMLVGCADRTVKHFSTEDGIFQGQRHCPGGEGMFRGLAQADGTLITCVDSGILRVWHDKDKDTSSDPVRLPCPDGWGRWAGVGA

SEQ ID NO: 19565 - protein, 31 aa, Homo sapiens
MDPLPFSFPSQALWLLIFLFFKNKQTNCCRL

SEQ ID NO: 19566 - protein, 54 aa, Homo sapiens
LHQGRQSQDPGARRGSSAQAEQPLAQVDRLIICVFLEKDEDIYRSRLPHYFPVA

SEQ ID NO: 19567 - protein, 100 aa, Homo sapiens
MEQVNELKEKGNKALSVGNIDDALQCYSEAIKLDPHNHVLYSNRSAAYAKKGDYQKAYEDGCKTVDLKPDWGKVSCGQWRERGPSDPSRNAFWWPEVYLS

SEQ ID NO: 19568 - protein, 15 aa, Homo sapiens
LCQAPVFLVMTVYFC

SEQ ID NO: 19569 - protein, 184 aa, Homo sapiens
VSLCVPQSVFRNFDVDGDGHISQEEFQIIRGNFPYLSAFGDLDQNQDGCISREEMVSYFLRSSSVLGGRMGFVHNFQESNSLRPVACRHCKALILGIYKQGLKCRACGVNCHKQCKDRLSVECRRRAQSVSLEGSAPSPSPMHSHHHRAFSFSLPRPGRRGSRPPEIREEEVQTVEDGVFDIHL

SEQ ID NO: 19570 - protein, 512 aa, Homo sapiens
MVCLCEWGATSHAHVQQRAHYPCPPSPTYKWKRQVTQRNPVGQKKRKMSLLFDHLEPMELAEHLTYLEYRSFCKILFQDYHSFVTHGCTVDNPVLERFISLFNSVSQWVQLMILSKPTAPQRALVITHFVHVAEKLLQLQNFNTLMAVVGGLSHSSISRLKETHSHVSPETIKLWEGLTELVTATGNYGNYRRRLAACVGFRFPILGVHLKDLVALQLALPDWLDPARTRLNGAKMKQLFSILEELAMVTSLRPPVQANPDLLSLLTVSLDQYQTEDELYQLSLQREPRSKSSPTSPTSCTPPPRPPVLEEWTSAAKPKLDQALVVEHIEKMVESVFRNFDVDGDGHISQEEFQIIRGNFPYLSAFGDLDQNQDGCISREEMVSYFLRSSSVLGGRMGFVHNFQESNSLRPVACRHCKALILGIYKQGLKCRACGVNCHKQCKDRLSVECRRRAQSVSLEGSAPSPSPMHSHHHRAFSFSLPRPGRRGSRPPAEIREEEVQTVEDGVFDIHL

SEQ ID NO: 19571 - protein, 638 aa, Homo sapiens
VAAGLKAGLAQVNSTSRRRPRPRVCILGWTSWGFGPSPVGGSRSAAWAQPTPRRRPWQAPWTWTRAARWRSCSAGASKPSLAAKLLHIYQQSRKDNSNSLQVKTCHLVRYWISAFPAEFDLNPELAEQIKELKALLDQEGNRRHSSLIDIDSVPTYKWKRQVTQRNPVGQKKRKMSLLFDHLEPMELAEHLTYLEYRSFCKILFQDYHSFVTHGCTVDNPVLERFISLFNSVSQWVQLMILSKPTAPQRALVITHFVHVAEKLLQLQNFNTLMAVVGGLSHSSISRLKETHSHVSPETIKLWEGLTELVTATGNYGNYRRRLAACVGFRFPILGVHLKDLVALQLALPDWLDPARTRLNGAKMKQLFSILEELAMVTSLRPPVQANPDLLSLLTVSLDQYQTEDELYQLSLQREPRSKSSPTSPTSCTPPPRPPVLEEWTSAAKPKLDQALVVEHIEKMVESVFRNFDVDGDGHISQEEFQIIRGNFPYLSAFGDLDQNQDGCISREEMVSYFLRSSSVLGGRMGFVHNFQESNSLRPVACRHCKALILGIYKQGLKCRACGVNCHKQCKDRLSVECRRRAQSVSLEGSAPSPSPMHSHHHRAFSFSLPRPGRRGSRPPEIREEEVQTVEDGVFDIHL

SEQ ID NO: 19572 - protein, 666 aa, Homo sapiens
LCGRGTQGWPGSSEQHVQEATSSAGLHSGVDELGVRSEPGGRLPERSLGPAHPAPAAMAGTLDLDKGCTVEELLRGCIEAFDDSGKVRDPQLVRMFLMMHPWYIPSSQLAAKLLHIYQQSRKDNSNSLQVKTCHLVRYWISAFPAEFDLNPELAEQIKELKALLDQEGNRRHSSLIDIDSVPTYKWKRQVTQRNPVGQKKRKMSLLFDHLEPMELAEHLTYLEYRSFCKILFQDYHSFVTHGCTVDNPVLERFISLFNSVSQWVQLMILSKPTAPQRALVITHFVHVAEKLLQLQNFNTLMAVVGGLSHSSISRLKETHSHVSPETIKLWEGLTELVTATGNYGNYRRRLAACVGFRFPILGVHLKDLVALQLALPDWLDPARTRLNGAKMKQLFSILEELAMVTSLRPPVQANPDLLSLLTVSLDQYQTEDELYQLSLQREPRSKSSPTSPTSCTPPPRPPVLEEWTSAAKPKLDQALVVEHIEKMVESVFRNFDVDGDGHISQEEFQIIRGNFPYLSAFGDLDQNQDGCISREEMVSYFLRSSSVLGGRMGFVHNFQESNSLRPVACRHCKALILGIYKQGLKCRACGVNCHKQCKDRLSVECRRRAQSVSLEGSAPSPSPMHSHHHRAFSFSLPRPGRRGSRPPEIREEEVQTVEDGVFDIHL

SEQ ID NO: 19573 - protein, 179 aa, Homo sapiens
LWGYDSSVLCPQLWEGLTELVTATGNYGNYRRRLAACVGFRFPILGVHLKDLVALQLALPDWLDPARTRLNGAKMKQLFSILEELAMVTSLRPPVQANPDLLSLLTVSLDQYQTEDELYQLSLQREPRSKSSPTSPTSCTPPPRPPVLEEWTSAAKPKLDQALVVEHIEKMVEVSSCGA

SEQ ID NO: 19574 - protein, 131 aa, Homo sapiens
VTATGNYGNYRRRLAACVGFRFPILGVHLKDLVALQLALPDWLDPARTRLNGAKMKQLFSILEELAMVTSLRPPVQANPDLLSLLTVSLDQYQTEDELYQLSLQREPRSKSSVRGYSLLSTLPFPPENPRM

SEQ ID NO: 19575 - protein, 136 aa, Homo sapiens
LGPAHPAPAAMAGTLDLDKGCTVEELLRGCIEAFDDSGKVRDPQLVRMFLMMHPWYIPSSQLAAKLLHIYQQSRKDNSNSLQVKTCHLVRYWISAFPAEFDLNPELAEQIKELKALLDQEGNRRHSSLIDIDSVRL

SEQ ID NO: 19576 - protein, 135 aa, Homo sapiens
LGPAHPAPAAMAGTLDLDKGCTVEELLRGCIEAFDDSGKVRDPQLVRMFLMMHPWYIPSSQLAAKLLHIYQQSRKDNSNSLQVKTCHLVRYWISAFPAEFDLNPELAEQIKELKALLDQEGNRRHSSLIDIDSVL

SEQ ID NO: 19577 - protein, 139 aa, Homo sapiens
VGGSRSAAWAQPTPRRRPWQAPWTWTRAARWRSCSAGASKPSLAAKLLHIYQQSRKDNSNSLQVKTCHLVRYWISAFPAEFDLNPELAEQIKELKALLDQEGNRRHSSLIDIDSVCVGGAQRAGGALSILYHLCLINVC

SEQ ID NO: 19578 - protein, 205 aa, Homo sapiens
LCGRGTQGWPGSSEQHVQEATSSAGLHSGVDELGVRSEPGGRLPERSLGPAHPAPAAMAGTLDLDKGCTVEELLRGCIEAFDDSGKVRDPQLVRMFLMMHPWYIPSSQLAAKLLHIYQQSRKDNSNSLQVKTCHLVRYWISAFPAEFDLNPELAEQIKELKALLDQEGNRRHSSLIDIDSVCVGGAQRAGGALSILYHLCLINVC

SEQ ID NO: 19579 - protein, 76 aa, Homo sapiens
LGPAHPAPAAMAGTLDLDKGCTVEELLRGCIEAFELSGLLNPLLHLPTIPEGQLQFPAGENVPPGQVLDLRLPSGV

SEQ ID NO: 19580 - protein, 44 aa, Homo sapiens
LGPAHPAPAAMAGTLDLDKGCTVEELLRGCIEAFGEWLGRAHGA

SEQ ID NO: 19581 - protein, 53 aa, Homo sapiens
MGGGRRNGRAHPWGCVHVCGSVHAWRGTALRVCTRVRMSAPVWPRDSRLAWLK

SEQ ID NO: 19582 - protein, 43 aa, Homo sapiens
VSSLSSFSPHPTPFASPQTGPPGSLPAAAMARAMRVRTFRAHW

SEQ ID NO: 19583 - protein, 116 aa, Homo sapiens
LQARDTVTSELAAVKIVKLDPGDDISSLQQEITILRECRHPNVVAYIGSYLRNDRLWICMEFCGGGSLQEIYHATGPLEERQIAYVCREALKGLHHLHSQGKIHRDIKLTLGCQAS

SEQ ID NO: 19584 - protein, 197 aa, Homo sapiens
LGRNGGREGAPGTMGLLTILKKMKQKERELRLLMLGLDNAGKTTILKKFNGEDIDTISPTLGFNIKTLEHRGFKLNIWDVGGQKSLRSYWRNYFESTDGLIWVVDSADRQRMQDCQRELQSLLVEERLAGATLLIFANKQDLPGALSSNAIREVLELDSIRSHHWCIQGCSAVTGENLLPGIDWLLDDISSRIFTAD

SEQ ID NO: 19585 - protein, 71 aa, Homo sapiens
LGWGGKGLTAGRVCSHWPPPSAPLSSQVLELDSIRSHHWCIQGCSAVTGENLLPGIDWLLDDISSRIFTAD

SEQ ID NO: 19586 - protein, 425 aa, Homo sapiens
LVAAGTTPVYHGSGPGYTLKTLRGAREAELGARWGPLAALERAEPQRRSWTTTQCISGGQLDWTGPLMPGCELPVGTCPDMCPAAERAQREREHRLHRLEVVPGCRQDPPRADPQRAVKEYSRPAAGKPRPPPSQLRPPSVLLATVRYLAGEVAESADIARAEVASFVADRLRAVLLDLALQGAGDAEAAVVLEAALATLLTVVARLGPDAARGPADPVLLQAQVQEGFGSLRRCYARGAGPHPRQPAFQGLFLLYNLGSVEALHEVLQLPAALRACPPLRKALAVDAAFREGNAARLFRLLQTLPYLPSCAVQCHVGHARREALARFARAFSTPKGQTLPLGFMVNLLALDGLREARDLCQAHGLPLDGEERVVFLRGRYVEEGLPPASTCKVLVESKLRGRTLEEVVMAEEEDEGTDRPGSPA

SEQ ID NO: 19587 - protein, 436 aa, Homo sapiens
LDYNAVHLGRPTRLDWVRGQRWLDGRPEGRGSWREGGPRQVQPRPDPPLPTPRPASRAFPQHCRPRDAERPPSPRSPLMPGCELPVGTCPDMCPAAERAQREREHRLHRLEVVPGCRQDPPRADPQRAVKEYSRPAAGKPRPPPSQLRPPSVLLATVRYLAGEVAESADIARAEVASFVADRLRAVLLDLALQGAGDAEAAVVLEAALATLLTVVARLGPDAARGPADPVLLQAQVQEGFGSLRRCYARGAGPHPRQPAFQGLFLLYNLGSVEALHEVLQLPAALRACPPLRKALAVDAAFREGNAARLFRLLQTLPYLPSCAVQCHVGHARREALARFARAFSTPKGQTLPLGFMVNLLALDGLREARDLCQAHGLPLDGEERVVFLRGRYVEEGLPPASTCKVLVESKLRGRTLEEVVMAEEEDEGTDRPGSPA

SEQ ID NO: 19588 - protein, 105 aa, Homo sapiens
MGGPKAGDHGGKAGPDRFSPAPTRRSPPPGRPRVPSRSTAVPGMLSAHRLPAAPSCPAASCPWAPARTCARPPSAPSAKGSTACTAWRWCRVAARTRPARIRSAR

SEQ ID NO: 19589 - protein, 183 aa, Homo sapiens
LAAGQSVGTGAHHDSGGSVEALHEVLQLPAALRACPPLRKALAVDAAFREGNAARLFRLLQTLPYLPSCAVQCHVGHARREALARFARAFSTPKGQTLPLGFMVNLLALDGLREARDLCQAHGLPLDGEERVVFLRGRYVEEGLPPASTCKVLVESKLRGRTLEEVVMAEEEDEGTDRPGSPA

SEQ ID NO: 19590 - protein, 89 aa, Homo sapiens
VEKTRGSEGRRPLALRHFRFLSRRAGPRAPSPTKPLRRSQRKSGSELPSILPEIWPKTPSAAAVRKPIVLKRIVAHAVEVKAKESVVGG

SEQ ID NO: 19591 - protein, 203 aa, Homo sapiens
LRPGLIGWVLINLALLMKEAELRGSPSLAMWLVNGFQLLYVGDALWHEEAVLTTMDITHDGFGFMLAFGDMAWVPFTYSLQAQFLLHHPQPLGLPMASVICLINGQSGRGSRLGPSSPYPFDSCSVYTHHHIGANPQGSLKPGQGPGGPGRVWAADKLGRCSGSGRRLQPLTLTTGSHSLTSYWLLHLPWGEFPEKHFPKESF

SEQ ID NO: 19592 - protein, 43 aa, Homo sapiens
LEVAKQEKKKKKTGRAKRRMQYNRRFVNVVPTFGKKKGPNANS

SEQ ID NO: 19593 - protein, 149 aa, Homo sapiens
LAGSEGLVAGWLRVANMQLFVRAQELHTFEVTGQETVAQIKAHVASLEGIAPEDQVVLLAGAPLEDEATLGQCGVEALTTLEVAGRMLGGKVHGSLARAGKVRGQTPKVAKQEKKKKKTGRAKRRMQYNRRFVNVVPTFGKKKGPNANS

SEQ ID NO: 19594 - protein, 38 aa, Homo sapiens
LSPAPESVGTEEMPEDGEPDAAELRRRRLQKLESPVAH

SEQ ID NO: 19595 - protein, 114 aa, Homo sapiens
LGSRTFSPGERPLEISAPSIQGVWEPPLHFLKKVFLCDRRPGPSDGLRSCLGQSPPVTVRGGGKDKRARSSSLATPVGFLGAGRSWVGRLPGPWLGRPCPHPPSSWRRSCRSSA

SEQ ID NO: 19596 - protein, 271 aa, Homo sapiens
LGGPAPRPLAWATMSASAQQLAEELQIFGLDCEEALIEKLVELCVQYGQNEEGMVGELIAFCTSTHKVGLTSEILNSFEHEFLSKRLSKARHSTCKDSGHAGARDIVSIQELIEVEEEEEILLNSYTTPSKGSQKRAISTPETPLTKRSVSTRSPHQLLSPSSFSPSATPSQKYNSRSNRGEVVTSFGLAQGVSWSGRGGAGNISLKVLGCPEALTGSYKSMFQKLPDIREVLTCKIEELGSELKEHYKIEAFTPLLAPAQVRVVLIVLTN

SEQ ID NO: 19597 - protein, 295 aa, Homo sapiens
VGGYQRGPGEGEGGIQLCLLCWSHQFPQAQTMPVEEFVAGWISGALGLVLGHPFDTVKLLGFFKGMSFPIASIAVVNSVLFGVYSNTLLVLTATSHQERRAQPPSYMHIFLAGCTGGFLQAYCLAPFDLIKVRLQNQTEPRAQPGSPPPRYQGPVHCAASIFREEGPRGLFRGAWALTLRDTPTVGIYFITYEGLCRQYTPEGQNPSSATVLVAGGFAGIASWVAATPLDMIKSRMQMDGLRRRVYQGMLDCMVSSIRQEGLGVFFRGVTINSARAFPVNAVTFLSYEYLLRWWG

SEQ ID NO: 19598 - protein, 295 aa, Homo sapiens
LFPQAQTMPVEEFVAGWISGALGLVLGHPFDTVKVRLQTQTTYRGIVDCMVKIYRHESLLGFFKGMSFPIASIAVVNSVLFGVYSNTLLVLTATSHQERRAQPPSYMHIFLAGCTGGFLQAYCLAPFDLIKVRLQNQTEPRAQPGSPPPRYQGPVHCAASIFREEGPRGLFRGAWALTLRDTPTVGIYFITYEGLCRQYTPEGQNPSSATVLVAGGFAGIASWVAATPLDMIKSRMQMDGLRRRVYQGMLDCMVSSIRQEGLGVFFRGVTINSARAFPVNAVTFLSYEYLLRWWG

SEQ ID NO: 19599 - protein, 283 aa, Homo sapiens
LKRTARPGALGLVLGHPFDTVKVRLQTQTTYRGIVDCMVKIYRHESLLGFFKGMSFPIASIAVVNSVLFGVYSNTLLVLTATSHQERRAQPPSYMHIFLAGCTGGFLQAYCLAPFDLIKVRLQNQTEPRAQPGSPPPRYQGPVHCAASIFREEGPRGLFRGAWALTLRDTPTVGIYFITYEGLCRQYTPEGQNPSSATVLVAGGFAGIASWVAATPLDMIKSRMQMDGLRRRVYQGMLDCMVSSIRQEGLGVFFRGVTINSARAFPVNAVTFLSYEYLLRWWG

SEQ ID NO: 19600 - protein, 12 aa, Homo sapiens
LEDRSTGRRRKE

SEQ ID NO: 19601 - protein, 8 aa, Homo sapiens
LDKIALKK

SEQ ID NO: 19602 - protein, 449 aa, Homo sapiens
LGFQLRYSCPADIDECSQDPSLCLPHGACKNLQGSYVCVCDEGFTPTQDQHGCEEVEQPHHKKECYLNFDDTVFCDSVLATNVTQQECCCSLGAGWGDHCEIYPCPVYSSAEFHSLCPDGKGYTQDNNIVNYGIPAHRDIDECMLFGSEICKEGKCVNTQPGYECYCKQGFYYDGNLLECVDVDECLDESNCRNGVCENTRGGYRCACTPPAEYSPAQRQCLSPEEMDVDECQDPAACRPGRCVNLPGSYRCECRPPWVPGPSGRDCQLPESPAERAPERRDVCWSQRGEDGMCAGPLAGPALTFDDCCCRQGRGWGAQCRPCPPRGAGSHCPTSQSESNSFWDTSPLLLGKPPRDEDSSEEDSDECRCVSGRCVPRPGGAVCECPGGFQLDASRARCVDIDECRELNQRGLLCKSERCVNTSGSFRCVCKAGFARSRPHGACVPQRRR

SEQ ID NO: 19603 - protein, 577 aa, Homo sapiens
VPPPVWLRWGRGGVAVVIGVWGRGLPGVEAALSTPRSREETHTPARCAVRLPVGQSPRLGLSAADVNECAEGSPCSPGWCENLPGSFRCTCAQGYAPAPDGRSCLDVDECEAGDVCDNGICSNTPGSFQCQCLSGYHLSRDRSHCEDIDECDFPAACIGGDCINTNGSYRCLCPQGHRLVGGRKCQDIDECSQDPSLCLPHGACKNLQGSYVCVCDEGFTPTQDQHGCEEVEQPHHKKECYLNFDDTVFCDSVLATNVTQQECCCSLGAGWGDHCEIYPCPVYSSAEFHSLCPDGKGYTQDNNIVNYGIPAHRDIDECMLFGSEICKEGKCVNTQPGYECYCKQGFYYDGNLLECVDVDECLDESNCRNGVCENTRGGYRCACTPPAEYSPAQRQCLSPEEMERAPERRDVCWSQRGEDGMCAGPLAGPALTFDDCCCRQGRGWGAQCRPCPPRGAGSHCPTSQSESNSFWDTSPLLLGKPPRDEDSSEEDSDECRCVSGRCVPRPGGAVCECPGGFQLDASRARCVDIDECRELNQRGLLCKSERCVNTSGSFRCVCKAGFARSRPHGACVPQRRR

SEQ ID NO: 19604 - protein, 739 aa, Homo sapiens
LPLDLAMPAETDECRLNQNICGHGECVPGPPDYSCHCNPGYRSHPQHRYCVDVNECEAEPCGPGRGICMNTGGSYNCHCNRGYRLHVGAGGRSCVDLNECAKPHLCGDGGFCINFPGHYKCNCYPGYRLKASRPPVCEDIDECRDPSSCPDGKCENKPGSFKCIACQPGYRSQGGGACRDVNECAEGSPCSPGWCENLPGSFRCTCAQGYAPAPDGRSCLDVDECEAGDVCDNGICSNTPGSFQCQCLSGYHLSRDRSHCEDIDECDFPAACIGGDCINTNGSYRCLCPQGHRLVGGRKCQDIDECSQDPSLCLPHGACKNLQGSYVCVCDEGFTPTQDQHGCEEVEQPHHKKECYLNFDDTVFCDSVLATNVTQQECCCSLGAGWGDHCEIYPCPVYSSAEFHSLCPDGKGYTQDNNIVNYGIPAHRDIDECMLFGSEICKEGKCVNTQPGYECYCKQGFYYDGNLLECVDVDECLDESNCRNGVCENTRGGYRCACTPPAEYSPAQRQCLSPEEMDVDECQDPAACRPGRCVNLPGSYRCECRPPWVPGPSGRDCQLPESPAERAPERRDVCWSQRGEDGMCAGPLAGPALTFDDCCCRQGRGWGAQCRPCPPRGAGSHCPTSQSESNSFWDTSPLLLGKPPRDEDSSEEDSDECRCVSGRCVPRPGGAVCECPGGFQLDASRARCVDIDECRELNQRGLLCKSERCVNTSGSFRCVCKAGFARSRPHGACVPQRRR

SEQ ID NO: 19605 - protein, 1185 aa, Homo sapiens
LQADLSQGPVSGQLSAGLQHDAHRRERPQHRHAHGLRLPLVCPLPCMNGGQCSSRNQCLCPPDFTGRFCQVPAGGAGGGTGGSGPGLSRTGALSTGALPPLAPEGDSVASKHAIYAVQVIADPPGPGEGPPAQHAAFLVPLGPGQISAEVQAPPPVVNVRVHHPPEASVQVHRIESSNAESAAPSQHLLPHPKPSHPRPPTQKPLGRCFQDTLPKQPCGSNPLPGLTKQEDCCGSIGTAWGQSKCHKCPQLQYTGVQKPGPVRGEVGADCPQGYKRLNSTHCQDINECAMPGVCRHGDCLNNPGSYRCVCPPGHSLGPSRTQCIADKPEEKSLCFRLVSPEHQCQHPLTTRLTRQLCCCSVGKAWGARCQRCPTDGTAAFKEICPAGKGYHILTSHQTLTIQGESDFSLFLHPDGPPKPQQLPESPSQAPPPEDTEEERGVTTDSPVSEERSVQQSHPTATTTPARPYPELISRPSPPTMRWFLPDLPPSRSAVEIAPTQVTETDECRLNQNICGHGECVPGPPDYSCHCNPGYRSHPQHRYCVDVNECEAEPCGPGRGICMNTGGSYNCHCNRGYRLHVGAGGRSCVDLNECAKPHLCGDGGFCINFPGHYKCNCYPGYRLKASRPPVCEDIDECRDPSSCPDGKCENKPGSFKCIACQPGYRSQGGGACRDVNECAEGSPCSPGWCENLPGSFRCTCAQGYAPAPDGRSCLDVDECEAGDVCDNGICSNTPGSFQCQCLSGYHLSRDRSHCEDIDECDFPAACIGGDCINTNGSYRCLCPQGHRLVGGRKCQDIDECSQDPSLCLPHGACKNLQGSYVCVCDEGFTPTQDQHGCEEVEQPHHKKECYLNFDDTVFCDSVLATNVTQQECCCSLGAGWGDHCEIYPCPVYSSAEFHSLCPDGKGYTQDNNIVNYGIPAHRDIDECMLFGSEICKEGKCVNTQPGYECYCKQGFYYDGNLLECVDVDECLDESNCRNGVCENTRGGYRCACTPPAEYSPAQRQCLSPEEMERAPERRDVCWSQRGEDGMCAGPLAGPALTFDDCCCRQGRGWGAQCRPCPPRGAGSHCPTSQSESNSFWDTSPLLLGKPPRDEDSSEEDSDECRCVSGRCVPRPGGAVCECPGGFQLDASRARCVDIDECRELNQRGLLCKSERCVNTSGSFRCVCKAGFARSRPHGACVPQRRR

SEQ ID NO: 19606 - protein, 147 aa, Homo sapiens
LGFQLRYSCPADIDECSQDPSLCLPHGACKNLQGSYVCVCDEGFTPTQDQHGCEEVEQPHHKKECYLNFDDTVFCDSVLATNVTQQECCCSLGAGWGDHCEIYPCPVYSSGQEPGRPLPRSSVSSSGSQMWEMAPPGSWEIGGGLQP

SEQ ID NO: 19607 - protein, 153 aa, Homo sapiens [sequence omitted]

SEQ ID NO: 19608 - protein, 112 aa, Homo sapiens
LVSRGCETRELALPRDGQGRLGFEVDAEGFVTHVERFTFAETAGLRPGARLLRVCGQTLPSLRPEAAAQLLRSAPKVCVTVLPPDESGRPRRPLGKRLPFLSHPCSPQLSVG

SEQ ID NO: 19609 - protein, 11 aa, Homo sapiens
LLQIHAQVPED

SEQ ID NO: 19610 - protein, 98 aa, Homo sapiens
LAQTPTDPALSRTQAQSVREVFARQLMQVRGVSGEKAAALVDRYSTPASLLAAYDACATPKEQETLLSTIKCGRLQRNLGPALSRTLSQLYCSYGPLT

SEQ ID NO: 19611 - protein, 186 aa, Homo sapiens
VSQNPAAVYPAEPPAPGMFRDFGEPGPSSGNGGGYGGPAQPPAAAQAAQQETDKLEDEKSGLQREIEELQKQKERLELVLEAHRPICKIPEGAKEGDTGSTSGTSSPPAPCRPVPCISLSPGPVLEPEALHTPTLMTTPSLTPFTPSLVFTYPSTPEPCASAHRKSSSSSGDPSSDPLGSPTLLAL

SEQ ID NO: 19612 - protein, 288 aa, Homo sapiens
VSQNPAAVYPAEPPAPGMFRDFGEPGPSSGNGGGYGGPAQPPAAAQAAQQKFHLVPSINTMSGSQELQWMVQPHFLGPSSYPRPLTYPQYSPPQPRPGVIRALGPPPGVRRRPCEQISPEEEERRRVRRERNKLAAAKCRNRRKELTDFLQAETDKLEDEKSGLQREIEELQKQKERLELVLEAHRPICKIPEGAKEGDTGSTSGTSSPPAPCRPVPCISLSPGPVLEPEALHTPTLMTTPSLTPFTPSLVFTYPSTPEPCASAHRKSSSSSGDPSSDPLGSPTLLAL

SEQ ID NO: 19613 - protein, 252 aa, Homo sapiens
VSQNPAAVYPAEPPAPGMFRDFGEPGPSSGNGGGYGGPAQPPAAAQAAQQKFHLVPSINTMSGSQELQWMVQPHFLGPSSYPRPLTYPQYSPPQPRPGVIRALGPPPGVRRRPCEQETDKLEDEKSGLQREIEELQKQKERLELVLEAHRPICKIPEGAKEGDTGSTSGTSSPPAPCRPVPCISLSPGPVLEPEALHTPTLMTTPSLTPFTPSLVFTYPSTPEPCASAHRKSSSSSGDPSSDPLGSPTLLAL

SEQ ID NO: 19614 - protein, 152 aa, Homo sapiens
VSQNPAAVYPAEPPAPGMFRDFGEPGPSSGNGGGYGGPAQPPAAAQAAQQKFHLVPSINTMSGSQELQWMVQPHFLGPSSYPRPLTYPQYSPPQPRPGVIRALGPPPGVRRRPCEQPGGRGAPPSKARAEQAGCGQVQEPEEGTDRLPAGGD

SEQ ID NO: 19615 - protein, 77 aa, Homo sapiens
MPSKKKKYNARFPPARIKKIMQTDEEIGKVAAAVPVIICILPGADRVEGRGGGRQRVALSCPGVLLDAPQPGRSSSS

SEQ ID NO: 19616 - protein, 195 aa, Homo sapiens
LPPPACPSSTSALLSPSYIGFIESYRDPFGSRGEFEGFVAVVNKAMSAKFERLVASAEQLLKELPWPPTFEKDKFLTPDFTSLDVLTFAGSGIPAGINIPNYDDLRQTEGFKNVSLGNVLAVAYATQREKLTFLEEDDKDLYILWKGPSFDVQVGLHELLGHGSGKLFVQDEKGAFNFDQETVINPETGEQDLWL

SEQ ID NO: 19617 - protein, 300 aa, Homo sapiens
LLNEDPLSQDLPVKMASIFKNFVITYNRTYESKEEARWRLSVFVNNMVRAQKIQALDRGTAQYGVTKFSDLTEEEFRTIYLNTLLRKEPGNKMKQAKSVGDLAPPEWDWRSKGAVTKVKDQGMCGSCWAFSVTGNVEGQWFLNQGTLLSLSEQELLDCDKMDKACMGGLPSNAYSAIKNLGGLETEDDYSYQGHMQSCNFSAEKAKVYINDSVELSQNEQKLAAWLAKRGPISVAINAFGMQFYRHGISRPLRPLCSPWLIDHAVLLVGYGNREFRCLSCIQPGHRQGWDHSISGPLEGK

SEQ ID NO: 19618 - protein, 251 aa, Homo sapiens
VSRPDGLASFLEGVATPPQCPQLAFLGLQPPRALGASAYCAPLTHSIRSVMQKYLEDRGEVTFEKIFSQKLGYLLFRDFCLNHLEEARPLVEFYEEIKKYEKLETEEERVARSREIFDSYIMKELLACSHPFSKSATEHVQGHLGKKQVPPDLFQPYIEEICQNLRGDVFQKFIESDKFTRFCQWKNVELNIHVSGLGWGMESHAPCCSSPGSWACGLAGRGRSGDVCPLAPRAVAMGVRAGIPAWGGRSR

SEQ ID NO: 19619 - protein, 96 aa, Homo sapiens
MKELLACSHPFSKSATEHVQGHLGKKQVPPDLFQPYIEEICQNLRGDVFQKFIERVALAAGAATLPAVPSCPNPQHPGSGTTARHLQVGPYWPRLA

SEQ ID NO: 19620 - protein, 124 aa, Homo sapiens
LDTRNVAFERNKCGIWGWRSEKMETVSGYEAKVYSATNVELVTRTRTEHLSDQDKSRSKAGKTPFQSFLGMAQQHSSHTGAPVQQAASPTNPTAISPEEYFDPNFSLESRNIGRPIEMSSKVQR

SEQ ID NO: 19621 - protein, 239 aa, Homo sapiens
LAGSGPSHWFSPLSLPVASKAPGTMAQALGEDLVQPPELQDDSSSLGSDSELSGPGPYRQADRYGFIGGSSAEPGPGHPPADLIRQREMKWVEMTSHWEKTMSRRYKKVKMQCRKGIPSALRARCWPLLCGAHVCQKNSPGTYQELAEAPGDPQWMETIGRDLHRQFPLHEMFVSPQGHGRGSCRCSRPTPCIDRSRATARPRGPWLLCCSCTCPQRRPSGAWCRSVRSTSLGTTGPTW

SEQ ID NO: 19622 - protein, 243 aa, Homo sapiens
LAGSGPSHWFSPLSLPVASKAPGTMAQALGEDLVQPPELQDDSSSLGSDSELSGPGPYRQADRYGFIGGSSAEPGPGHPPADLIRQREMKWVEMTSHWEKTMSRRYKKVKMQCRKGIPSALRARCWPLLCGAHVCQKNSPGTYQELAEAPGDPQWMETIGRDLHRQFPLHEMFVSPQGHGQQGLLQVLKAYTLYRPEQGYCQAQGPVAAVLLMHLPPEEAFWCLVQICEVYLPGYYGPHMVRG

SEQ ID NO: 19623 - protein, 140 aa, Homo sapiens
LPSVWIPVPCTPRPGHPPADLIRQREMKWVEMTSHWEKTMSRRYKKVKMQCRKGIPSALRARCWPLLCGAHVCQKNSPGTYQELAEAPGDPQWMETIGRDLHRQFPLHEMFVSPQGHGYEAGDAQGPPAPQAPGAPAHFP

SEQ ID NO: 19624 - protein, 76 aa, Homo sapiens
LGRGPQRVEKGVPAGLAPYGVFRHRQQGLLQVLKAYTLYRPEQGYCQAQGPVAAVLLMHLPPEVSDLDPALGTLVT

SEQ ID NO: 19625 - protein, 241 aa, Homo sapiens
MGAGGRRGRGPEAVRLDAEVFMALLRRLLPHVHKHLQQVGVGPLLYLPEWFLCLFARSLPFPTVLRVWDAFLSEGARVLFRVGLTLVRLALGTAEQRGACPGLLETLGALRAIPPAQLQEEAFMSQVHSVVLSERDLQREIKAQLAQLPDSAPGPPPRPQVRLAGAQAIFEAQQLAGVRRGAKPEVPRIVVQPPEEPRPPRRKPQTRGKTFHGLLTRARGPPIEGPPRPQRGSTSFLDTRF

SEQ ID NO: 19626 - protein, 966 aa, Homo sapiens
LSLCLCHQSLSHSTHEMLSLDPSGPEWDCPLGSKDLEEEGPWGGGSGLPPTGCFPGSWRQDVGLDCKGSPEGAEARAWTVYYYSLLQSCLQQAGLPETQDRGQVPRTGCPGAEVTLCVLGSPSTFLPVLLEGGVQSPGNMLLCLSPAWLMKVPAPGQPGEAALLVSKAVSFHPGGLTFLDDFVPPRRATYFLAGLGLGPGRGREAAELARDLTCPTGASAELARLLEDRLLTRQLLAQQGGVAVPATLAFTYKPPGLLRGGDASLGLRLVELSGKEGQETLVKEEVEAFLRSEALGDILQVAVKLSGWRWRGRQAWRLHPRAELGAVVDTVLALLEKLEEEESVLVEAVYPPAQLPCSDGPSPGPGLAVRICAVVCRTQGDRPLLSKVVCGVGRGDRPLRHHNSLPRTLEVALAQCGLGEEAQVAAVRQRVKAAAEAALAAVLALEAGLSAEQRGGRRAHTDFLGVDFALTAAGGVLTPVALELNGGLCLEACGALEGLWAAPRLGPAADEAVAAPLVETMLRRSARCLMEGKQLLVVGAGGVSKKFVWEAARDYGLQLHLVESDPNHFASQLVQTFIHFDMTEHRRDEENARLLAELVRARGLKLDGCFSYWDDCLVLTALLCQELGLPCSSPAAMRLAKQKSLTQLHLLHHHGPPWPAPSLHAVPCCPLESEADVERAVHQVPLPGVMKLEFGAGAVGVRLVEDAPQCHEHFSRITRDLQGEADHPGIGLGWGNAMLLMEFVEGTEHDVDLVLFGGRLLAAFVSDNGPTRLPGFTETAACMPTGLAPEQEAQMVQAAFRCCLGCGLLDGVFNVELKLTGAGPRLIEINPRMGGFYLRDWILELYGVDLLLAAVMVACGLRPALPTRPRARGHLVGVMCLVSQHLQALSSTASRETLQALHDRGLLRLNLLEEALVPGEYEEPYCSVACAGPSPTEARLRLLGLCQGLGIDGPSYPVAHFLSHFK

SEQ ID NO: 19627 - protein, 970 aa, Homo sapiens
LGDLMCPLAHPAQDLPLLPSQLSLDPSGPEWDCPLGSKDLEEEGPWGGGSGLPPTGCFPGSWRQDVGLDCKGSPEGAEARAWTVYYYSLLQSCLQQAGLPETQDRGQVPRTGCPGAEVTLCVLGSPSTFLPVLLEGGVQSPGNMLLCLSPAWLMKVPAPGQPGEAALLVSKAVSFHPGGLTFLDDFVPPRRATYFLAGLGLGPGRGREAAELARDLTCPTGASAELARLLEDRLLTRQLLAQQGGVAVPATLAFTYKPPGLLRGGDASLGLRLVELSGKEGQETLVKEEVEAFLRSEALGDILQVAVKLSGWRWRGRQAWRLHPRAELGAVVDTVLALLEKLEEEESVLVEAVYPPAQLPCSDGPSPGPGLAVRICAVVCRTQGDRPLLSKVVCGVGRGDRPLRHHNSLPRTLEVALAQCGLGEEAQVAAVRQRVKAAAEAALAAVLALEAGLSAEQRGGRRAHTDFLGVDFALTAAGGVLTPVALELNGGLCLEACGALEGLWAAPRLGPAADEAVAAPLVETMLRRSARCLMEGKQLLVVGAGGVSKKFVWEAARDYGLQLHLVESDPNHFASQLVQTFIHFDMTEHRRDEENARLLAELVRARGLKLDGCFSYWDDCLVLTALLCQELGLPCSSPAAMRLAKQKSLTQLHLLHHHGPPWPAPSLHAVPCCPLESEADVERAVHQVPLPGVMKLEFGAGAVGVRLVEDAPQCHEHFSRITRDLQGEADHPGIGLGWGNAMLLMEFVEGTEHDVDLVLFGGRLLAAFVSDNGPTRLPGFTETAACMPTGLAPEQEAQMVQAAFRCCLGCGLLDGVFNVELKLTGAGPRLIEINPRMGGFYLRDWILELYGVDLLLAAVMVACGLRPALPTRPRARGHLVGVMCLVSQHLQALSSTASRETLQALHDRGLLRLNLLEEALVPGEYEEPYCSVACAGPSPTEARLRLLGLCQGLGIDGPSYPVAHFLSHFK

SEQ ID NO: 19628 - protein, 10 aa, Homo sapiens
MALARKLPRC

SEQ ID NO: 19629 - protein, 75 aa, Homo sapiens
VVYFPVRGRCAALRMLLADQGQSWKEEVVTVETWQEGSLKASCLYGQLPKFQDGDLTLYQSNTILRHLGRTLGES

SEQ ID NO: 19630 - protein, 83 aa, Homo sapiens
LFPCSLPALLTPPRVAARRSRPGPHISYFSLPAGRCAALRMLLADQGQSWKEEVVTVETWQEGSLKASCVSDHARARGGGAGP

SEQ ID NO: 19631 - protein, 64 aa, Homo sapiens
LQISFADYNLLDLLLIHEVLAPGCLDAFPLLSAYVGRLSARPKLKAFLASPEYVNLPINGNGKQ

SEQ ID NO: 19632 - protein, 106 aa, Homo sapiens
LKLKSWWATNYVSDWWEEYIYLRGRGPLMVNSNYYAMDLLYILPTHIQAARAGNAIHAILLYRRKLDREEIKPIRLLGSTIPLCSAQWERMFNTSRIPGEETDDLP

SEQ ID NO: 19633 - protein, 54 aa, Homo sapiens
VPVCMSFAPVTTTPTNHPVTNHPVEVCRAPASVAGSGKATCPTPTIRYYKEKTK

SEQ ID NO: 19634 - protein, 9 aa, Homo sapiens
LSHSYDTLL

SEQ ID NO: 19635 - protein, 26 aa, Homo sapiens
VAVEVGCLGGCVPVKKKKVCILTLPG

SEQ ID NO: 19636 - protein, 33 aa, Homo sapiens
MVDPAGRFCLLWRADTRARSHTGWRGPAPRPRA

SEQ ID NO: 19637 - protein, 42 aa, Homo sapiens
LGAAGAAESRADPGRTDPRRRRNQSPMPGNSSLDYCVLNRIS

SEQ ID NO: 19638 - protein, 54 aa, Homo sapiens
MWKASAGHAVSIAQDDAGADDWETDPDFVNDVSEKEQRWGAKTVQGSGHQEHIK

SEQ ID NO: 19639 - protein, 100 aa, Homo sapiens
MWKASAGHAVSIAQDDAGADDWETDPDFVNDVSEKEQRWGAKTVQGSGHQEHINIHKLRENVFQEHQTLKEKELETGPKASHGYGGKFGVEQDRMDKSVA

SEQ ID NO: 19640 - protein, 198 aa, Homo sapiens
VQGSGHQEHINIHKLRENVFQEHQTLKEKELETGPKASHGYGGKFGVEQDRMDKSAVGHEYQSKLSKHCSQVDSVRGFGGKFGVQMDRVDQSAVGFEYQGKTEKHASQKDYSSGFGGKYGVQADRVDKSAVGFDYQGKTEKHESQRDYSKGFGGKYGIDKDKVDKSAVGFEYQGKTEKHESQKGVFRFILPSSQQLVM

SEQ ID NO: 19641 - protein, 32 aa, Homo sapiens
VSASQYCGFYQGTFVPKLYLTSERFLKYEMSE

SEQ ID NO: 19642 - protein, 46 aa, Homo sapiens
MDRVDQSAVGFEYQGKTEKHASQKGKTRKVQKEPAPGAPMGRVTAT

SEQ ID NO: 19643 - protein, 85 aa, Homo sapiens
LKPFPERWLLPQGGLCPPLHVSGSSGYHMMDVFPVTHPPRSPGICCHCGASPPCSGSRLPFIWAALLLEKRAHRLIGRKLTSPQG

SEQ ID NO: 19644 - protein, 111 aa, Homo sapiens
LQLHESQKDYKTGFGGKFGVQSERQDSAAVGFDYKEKLAKHESQQGTVATSLLPSPRPSCAATSSTDFRAHRQHLQHSPPVSPLVSCQAVRHFKPISSRATLILSGSLSSL

SEQ ID NO: 19645 - protein, 319 aa, Homo sapiens
VQKDRMDKNASTFEDVTQVSSAYQKTVPVEAVTSKTSNIRANFENLAKEKEQEDRRKAEAERAQRMAKERQEQEEARRKLEEQARAKTQTPPVSPAPQPTEERLPSSPVYEDAASFKAELSYRGPVSGTEPEPVYSMEAADYREASSQQGLAYATEAVYESAEAPGHYPAEDSTYDEYENDLGITAVALYDYQAAGDDEISFDPDDIITNIEMIDDGWWRGVCKGRFRELAFSCVRVALVPIKCSRDLPGQARGLRSALWRVGRKDCPRRGASSRVSLLGRRGLGLMEVNPELSHPEHRSCHVRWEICLCHTVTARRIR

SEQ ID NO: 19646 - protein, 98 aa, Homo sapiens
LSRGSFRELAFSCVRVALVPIKCSRDLPGQARGLRSALWRVGRKDCPRRGASSRVSLLGRRGLGLMEVNPELSHPEHRSCHVRWEICLCHTVTARRIR

SEQ ID NO: 19647 - protein, 17 aa, Homo sapiens
LLLRCIFSSSLLYHNEQ

SEQ ID NO: 19648 - protein, 131 aa, Homo sapiens
LLWCANILGYAVSTFAMVKGYFFPTSARDCKFTGNFFYNYMMGIEFNPRIGKWFDFKLFFNGRPGIVAWTLINLSFAAKQRELHSHVTNAMVLVNVLQVPVMAGEGETPMPAGSGGTRKPERIPMTLIYCL

SEQ ID NO: 19649 - protein, 36 aa, Homo sapiens
LEGPMAAKSQPNIPKAKSLDGVTNDRTASQGQWGRA

SEQ ID NO: 19650 - protein, 78 aa, Homo sapiens
VGAASGASSGSQLTSWGWGVAEWPRGPRGERARLITWIIVPQFPPRQMGLQRLATHIDGAYVQAPVHRKEQNRHSSWS

SEQ ID NO: 19651 - protein, 278 aa, Homo sapiens
VGELHPVTSEPCFLLFFQFLDVFPSPWSSLTLNLGVFSRLPDSLELSHSRWCNIASRSSVLPPSPLGPFPQSFFMFANRVAECHLFQKNPMPQVPSSHPPHSSIWINGVLVSVTCLQDLIWISSRSSRDQDWKEWGGTMKCSSKEAKIAEYSGPNTCSFSSHGTEEGQQILKQPVSERLDFVCSFLQKNRKHPSSPECLVSAQKVLEGSELELAKMTMLLLYHSTMSSKSPRDWEQFEYKIQVSPCASMPPSRPSPCFTSPDLFFFEQQILDFLKIQL

SEQ ID NO: 19652 - protein, 41 aa, Homo sapiens
MRLVSPGFWWVLPLRLGEALPGRRRQQPPGAMKTLRLREVK

SEQ ID NO: 19653 - protein, 168 aa, Homo sapiens
MLGSLVLRRKALAPRLLLRLLRSPTLRGHGGASGRNVTTGSLGEPQWLRVATGGRPGTSPALFSGRGAATGGRQGGRFDTKCLAAATWGRLPGPEETLPGQDSWNGVPSRAGLGMCALAAALVVHCYSKSPSNKDAALLEAARANNMQEVSSPKRLQRMMLSQEAGQG

SEQ ID NO: 19654 - protein, 94 aa, Homo sapiens
MAVQISKKRKFVADGIFKAELNEFLTRELAEDGYSGVEVRVTPTRTEIIILATRTQNVLGEKGRRIRELTAVVQKRFGFPEGSVEVSDSGICQR

SEQ ID NO: 19655 - protein, 68 aa, Homo sapiens
LLCGGVLGIKVKIMLPWDPTGKIGPKKPLPDHVSIVEPKDEILPTTPISEQKGGKPEPPAMPQPVPTA

SEQ ID NO: 19656 - protein, 117 aa, Homo sapiens
LFNCRAYSRRAVGERRSRSSAGSTSVKFLMTSPEIASLSWGQMKVKGSNTTYKDCKVWPGGSRTWDWRETGTEHSPGVQPADVKEVVEKGVQTLVIGRGMSEALKDGIQGAQLDLNC

SEQ ID NO: 19657 - protein, 161 aa, Homo sapiens
VRAEHCAVWERNFEETVRWFWRLGSPRPVGSHLTSVKFLMTSPEIASLSWGQMKVKGSNTTYKDCKVWPGGSRTWDWRETGTEHSPGVQPADVKEVVEKGVQTLVIGRGMSEALKVPSSTVEYLKKHGIDVRVLQTEQAVKEYNALVAQGVRVGGVFHSTC

SEQ ID NO: 19658 - protein, 147 aa, Homo sapiens
VRAEHCAVWERNFEETVRWTSVKFLMTSPEIASLSWGQMKVKGSNTTYKDCKVWPGGSRTWDWRETGTEHSPGVQPADVKEVVEKGVQTLVIGRGMSEALKVPSSTVEYLKKHGIDVRVLQTEQAVKEYNALVAQGVRVGGVFHSTC

SEQ ID NO: 19659 - protein, 118 aa, Homo sapiens
VRAEHCAVWERNFEETVRWTSVKFLMTSPEIASLSWGQMKVKGSNTTYKDCKVWPGGSRTWDWRETGTEHSPGVQPADVKEVVEKGVQTLVIGRGMSEALKGLTLPPRLECSGTIITH

SEQ ID NO: 19660 - protein, 176 aa, Homo sapiens
VRAEHCAVWERNFEETVRWFWRLGSPRPVGSHLTSVKFLMTSPEIASLSWGQMKVKGSNTTYKDCKVWPGGSRTWDWRETGTEHSPGVQPADVKEVVEKGVQTLVIGRGMSEALKAPTQQLPSGVHVRAVVQFHLATASWHILERCKTDQELEQLGVFSTLLWTGEGSWTEHQTCL

SEQ ID NO: 19661 - protein, 186 aa, Homo sapiens
VRAEHCAVWERNFEETVRWFWRLGSPRPVGSHLTSVKFLMTSPEIASLSWGQMKVKGSNTTYKDCKVWPGGSRTWDWRETGTEHSPGVQPADVKEVVEKGVQTLVIGRGMSEALKAPTQQLPSGVHVRAVVQFHLATASWHILERCKTGAGLSIKHVCELAMSHLSTFLYQIYDAIILKMHLYFMK

SEQ ID NO: 19662 - protein, 172 aa, Homo sapiens
VRAEHCAVWERNFEETVRWTSVKFLMTSPEIASLSWGQMKVKGSNTTYKDCKVWPGGSRTWDWRETGTEHSPGVQPADVKEVVEKGVQTLVIGRGMSEALKAPTQQLPSGVHVRAVVQFHLATASWHILERCKTGAGLSIKHVCELAMSHLSTFLYQIYDAIILKMHLYFMK

SEQ ID NO: 19663 - protein, 185 aa, Homo sapiens
LGSPRPVGSHLTSVKFLMTSPEIASLSWGQMKVKGSNTTYKDCKVWPGGSRTWDWRETGTESLTLLPRLECSGAISAHCNLHLPGSCHSPASASQVAGTTGACHHTQHSPGVQPADVKEVVEKGVQTLVIGRGMSEALKVPSSTVEYLKKHGIDVRVLQTEQAVKEYNALVAQGVRVGGVFHSTC

SEQ ID NO: 19664 - protein, 1010 aa, Homo sapiens
MAILFCRPRCEHMNRRRKFLLASVLALQNSSFIYPSCQKCFSRIILVSKRSNCPKCGSTGESGNANYRYKLSLKVAESNKLFVITVFGSCLDTFFGLTATGLHRYIQDPNKIPETLDNDTTQNLLTKAVETCFVGQSFIFGVTNFENQPGQGSDASNFLQQCSDHKRKAKALVACQIVLPDPGIAGFTVIDYFHQLLQTFNFRKLQCDSQAPNNHLLALDHSNSDLSSIYTSDSTSDFFKSCSKDTFSKFWQPSLEFTCIVSQLTDNDDFSASEQSKAFGTLQQNRKSISIAEATGSSSCHDPIQDSWSLVSYMDKKSTAEKLGKELGLQAKELSAVHSSHHEIGVNDSNLFSLEMREPLESSNTKSFHSAVEIKNRSQHELPCFQHHGIDTPTSLQKRSACCPPSLLRLEETASSSQDGDPQIWDDLPFSESLNKFLAVLESEIAVTQADVSSRKHHVDNDIDKFHADHSRLSVTPQRTTGALHTPPIALRSSQVIVKANCSKDDFLFNCKGNLSPSVEKESQPDNKVEAVSVNHNGRDMSEYFLPNPYLSALSSSSKDLETIVTLKKTIRISPHRESDHSSLNNKYLNGCGEISVSEMNEKLTTLCYRKYNDVSDLCKLENKQYCRWSKNQDDSFTICRKLTYPLETLCNSPNRSTNTLKEMPWGHINNNVTQSYSIGYEGSYDASADLFDDIAKEMDIATEITKKSQDILLKWGTSLAESHPSESDFSLRSLSEDFIQPSQKLSLQSLSDSRHSRTCSPTPHFQSDSEYNFENSQDFVPCSQSTPISGFHQTRIHGINRAFKKPVFYSDLDGNYEKIRIFPENDKQQASPSCPKNIKTPSQKIRSPIVSGVSQPDVFNHYPFAECHETDSDEWVPPTTQKIFPSDMLGFQGIGLGKCLAAYHFPDQQELPRKKLKHIRQGTNKGLIKKKLKNMLAAVVTKKKTHKYNCKSSGWISKCPDIQVLAAPQLHPILGPDSCSEVKCCLPFSEKGPPSVCETRSAWSPELFS

SEQ ID NO: 19665 - protein, 8 aa, Homo sapiens
LSKMWLYW

SEQ ID NO: 19666 - protein, 100 aa, Homo sapiens
VAAGDRTICQQQGHHCVSNKIDLAERREVSQQRAEEFSEAQDMYYLETSAKESDNVEKLFLDLACRLISEARQNTLVNNVSSPLPGEGKSISYLTCCNFN

SEQ ID NO: 19667 - protein, 24 aa, Homo sapiens
MTLFYQPAKADVQRGYWPESVTLR

SEQ ID NO: 19668 - protein, 43 aa, Homo sapiens
MRLHLPRPKRVMAAGYLGGASCWTMPHCQETGAGRFSDKISLS

SEQ ID NO: 19669 - protein, 305 aa, Homo sapiens
VEFHCCCPGWHDLSSQQPSPPGFKRFSCLSLLTSWNYRYVKAYLLPDKGKMGKKKTLVVKKTLNPVYNEILRYKIEKQILKTQKLNLSIWHRDTFKRNSFLGEVELDLETWDWDNKQNKQLRWYPLKRKTAPVALEAENRGEMKLALQYVPEPVPGKKLPTTGEVHIWVKECLDLPLLRGSHLNSFVKCTILPDTSRKSRQKTRAVGKTTNPIFNHTMVYDGFRPEDLMEACVELTVWDHYKLTNQFLGGLRIGFGTGKSYGTEVDWMDSTSEEVALWEKMVNSPNTWIEATLPLRMLLIAKISK

SEQ ID NO: 19670 - protein, 411 aa, Homo sapiens
LTIVRIILKWKCCCLVSTVPTQPDNPFSHPDKLKRMSKSVPAFLQDESDDRETDTASESSYQLSRHKKSPSSLTNLSSSSGMTSLSSVSGSVMSVYSGDFGNLEVKGNIQFAIEYVESLKELHVFVAQCKDLAAADVKKQRSDPYVKAYLLPDKGKMGKKKTLVVKKTLNPVYNEILRYKIEKQILKTQKLNLSIWHRDTFKRNSFLGEVELDLETWDWDNKQNKQLRWYPLKRKTAPVALEAENRGEMKLALQYVPEPVPGKKLPTTGEVHIWVKECLDLPLLRGSHLNSFVKCTILPDTSRKSRQKTRAVGKTTNPIFNHTMVYDGFRPEDLMEACVELTVWDHYKLTNQFLGGLRIGFGTGKSYGTEVDWMDSTSEEVALWEKMVNSPNTWIEATLPLRMLLIAKISK

SEQ ID NO: 19671 - protein, 368 aa, Homo sapiens
VLKMSDDRETDTASESSYQLSRHKKSPSSLTNLSSSSGMTSLSSVSGSVMSVYSGDFGNLEVKGNIQFAIEYVESLKELHVFVAQCKDLAAADVKKQRSDPYVKAYLLPDKGKMGKKKTLVVKKTLNPVYNEILRYKIEKQILKTQKLNLSIWHRDTFKRNSFLGEVELDLETWDWDNKQNKQLRWYPLKRKTAPVALEAENRGEMKLALQYVPEPVPGKKLPTTGEVHIWVKECLDLPLLRGSHLNSFVKCTILPDTSRKSRQKTRAVGKTTNPIFNHTMVYDGFRPEDLMEACVELTVWDHYKLTNQFLGGLRIGFGTGKSYGTEVDWMDSTSEEVALWEKMVNSPNTWIEATLPLRMLLIAKISK

SEQ ID NO: 19672 - protein, 1780 aa, Homo sapiens
MINSSLSMLFSYLEKYFYVADELSHCVEPEPSQVPGGSSRDRQQGKPPPLPALKAKTSSRSGPYATEIKKSTDDSIFKVLDWFNRSSYSDDNKSFLQHPRGIESKEKTDSKSQVAVDLVTDDTTLRENGSKTLSPSKIELKPVRSDSPFQAEGDMLVSESCQDNNVNIKSKFMNLSQKGTPKEGPGILQPFESYGTPSQGSKNMDYSQDSKSPGKGNGASPSNSNYSYSVLKESDAENQVPCNTNNIGNLGEEEPKFHAHEENRGHSEVNFDSSTVVKEPGLKDNMNAERKSKVGNTYILKASLEPENIKSTPGVANNGSPWKKPEVQFQQEAGEVPKNQVQREKYKRVSDRISFWEGEKAGAKITHEKPTSSCSQEQPSAKAYQPVKKSQGVSSMDSLSTDQSEYNQAIPKRVVLDEDDQASQLSNSYSSNKSKETKPQIAGPSRYYLSAEQSDKVSLFQNKKNEPIKRSQVADSLPSRRNITLPALQPPSNVGSERHAPLEKDRPLVRESNANFKVMSLKERMDEPNAEQVYNPSQFENLRKFWDLEANSNSKDNDKNITTTSQKNSAPFNRQKHKEFSDIKLSGKNTHEAEVLLSPKKVMAREEMEKLNSKGILQVLPDEITFPLSPLRKYTYQLPGNESSKENVEKNTEGIVTPVFKEEKDYSEQEIQESIIKTNVLSKDCKDTFNDSLQKLLSETSTPAIQPSGGKVHGKQVLEPSVSENRTWPQKTDFADTEEEVKGPEKIINEHVDKTVVHPKVKRNSLTASLDKLLKEATGTSPSPLQAKLAPVITGTNSKLEEGRFFGKGIEQSHNTSADKREILAPFPVRDETFGNTALLKKAESGECQLSTQNLIQMAAEDSHPLDPTSQLSRKGSFGDVASPPQDMLFPQDAHLVPQARVHPSQTEISETVEKVILPPRPVLNDVSAALQKLCGEVWLSYPAGREVGPGEVNPEFPEAVQPVCSPLNPPGVISPWATMDTIVPDRKDFYSSNVVPDKTHEVGSYLAAQMSPSDQTLSSFASIVAQYGKGLPQEVEEIVRETIVQPKSEFLEFSAGLEKLLKEETETFPSKYESDTGNLSPSKLIGSTEEPRRATSECHPEELKETVEKAEAPLITESAFDAGFEKLLKEITEAPPYQPQVSVREETHEKESSQSEQTRFLGTVPHFYRAASQTSEMKDKSNGLESQVNQCDKMLGGDALVTDLLVDFCGSRSGVEIPRTPQLYVAHEIGTIKTVTPPEDRDSESGVAGGQGTLQEPGFGEASEAISVSRNRQPIPLLMNKENSTKTSKVELTLASPYMKQEKEEEKEGFSESDFSDGNTSSNAESWRNPSSSEEEPSPVLKTLERSAARKMPSKSLEDISSDSSNQAKVDNQPEELVRSAEDVSTVPTQPDNPFSHPDKLKRMSKSVPAFLQDESDDRETDTASESSYQLSRHKKSPSSLTNLSSSSGMTSLSSVSGSVMSVYSGDFGNLEVKGNIQFAIEYVESLKELHVFVAQCKDLAAADVKKQRSDPYVKAYLLPDKGKMGKKKTLVVKKTLNPVYNEILRYKIEKQILKTQKLNLSIWHRDTFKRNSFLGEVELDLETWDWDNKQNKQLRWYPLKRKTAPVALEAENRGEMKLALQYVPEPVPGKKLPTTGEVHIWVKECLDLPLLRGSHLNSFVKCTILPDTSRKSRQKTRAVGKTTNPIFNHTMVYDGFRPEDLMEACVELTVWDHYKLTNQFLGGLRIGFGTGKSYGTEVDWMDSTSEEVALWEKMVNSPNTWIEATLPLRMLLIAKISK

SEQ ID NO: 19673 - protein, 142 aa, Homo sapiens
VRSAEDDEKPDQKPVTNECVPRISTVPTQPDNPFSHPDKLKRMSKSVPAFLQDEVSGSVMSVYSGDFGNLEVKGNIQFAIEYVESLKELHVFVAQCKDLAAADVKKQRSDPWSFTVVAQAGTISAHSNLRLPGSSDSPASAS

SEQ ID NO: 19674 - protein, 80 aa, Homo sapiens [sequence omitted]

SEQ ID NO: 19675 - protein, 565 aa, Homo sapiens
LSFASSRGGGGKGDILNTALLIQRTLHRVDCREGGGKRARRELGKGRSQEAAREGARARPFFSSVAGSHARPPRRLGAICDSGGGGGGGGGSGNFAASSGRACLTAVWRRPRPRRQEPGGRRRNMSEREVSTAPAGTDMPAAKKQKLSSDENSNPDLSGDENDDAVSIESGTNTERPDTPTNTPNAPGRKSWGKGKWKSKKCKYSFKCVNSLKEDHNQPLFGVQFNWHSKEGDPLVFATVGSNRVTLYECHSQGEIRLLQSYVDADADENFYTCAWTYDSNTSHPLLAVAGSRGIIRIINPITMQCIKHYVGHGNAINELKFHPRDPNLLLSVSKDHALRLWNIQTDTLVAIFGGVEGHRDEVLSADYDLLGEKIMSCGMDHSLKLWRINSKRMMNAIKESYDYNPNKTNRPFISQKIHFPDFSTRDIHRNYVDCVRWLGDLILSKSCENAIVCWKPGKMEDDIDKIKPSESNVTILGRFDYSQCDIWYMRFSMDFWQKMLALGNQVGKLYVWDLEVEDPHKAKCTTLTHHKCGAAIRQTSFSRDSSILIAVCDDASIWRWDRLR

SEQ ID NO: 19676 - protein, 485 aa, Homo sapiens
LSFASSRGGGGKGDILNTALLIQRTLHRVDCREGGGKRARRELGKGRSQEAAREGARARPFFSSVAGSHARPPRRLGAICDSGGGGGGGGGSGNFAASSGRACLTAVWRRPRPRRQEPGGRRRNMSEREVSTAPAGTDMPAAKKQKLSSDENSNPDLSGDENDDAVSIESGTNTERPDTPTNTPNAPGRKSWGKGKWKSKKCKYSFKCVNSLKEDHNQPLFGVQFNWHSKEGDPLVFATVGSNRVTLYECHSQGEIRLLQSYVDADADENFYTCAWTYDSNTSHPLLAVAGSRGIIRIINPITMQCIKHYVGHGNAINELKFHPRDPNLLLSVSKDHALRLWNIQTDTLVAIFGGVEGHRDEVLSASCENAIVCWKPGKMEDDIDKIKPSESNVTILGRFDYSQCDIWYMRFSMDFWQKMLALGNQVGKLYVWDLEVEDPHKAKCTTLTHHKCGAAIRQTSFSRDSSILIAVCDDASIWRWDRLR

SEQ ID NO: 19677 - protein, 70 aa, Homo sapiens
MFIQMLALGNQVGKLYVWDLEVEDPHKAKCTTLTHHKCGAAIRQTSFSRDSSILIAVCDDASIWRWDRLR

SEQ ID NO: 19678 - protein, 41 aa, Homo sapiens
LSSGLLRKRRSEFAGAEAFLPLAQSLCSGGADTLPQILEGS

SEQ ID NO: 19679 - protein, 49 aa, Homo sapiens [sequence omitted]

SEQ ID NO: 19680 - protein, 52 aa, Homo sapiens
LPFLPEKKTALGRDCGASKSPAVGIWNRVHFLTFEYSTQGFLEKNLVPEELD

SEQ ID NO: 19681 - protein, 12 aa, Homo sapiens
MEATSLEEEAAY

SEQ ID NO: 19682 - protein, 36 aa, Homo sapiens
LLIASPDPQIHWPGMECTKVDRKVAGHDSVQFAGSL

SEQ ID NO: 19683 - protein, 43 aa, Homo sapiens
LKRLGLSLLVHASSASGQQVYKGGKRLLLDFFFSFFYKSKLPP

SEQ ID NO: 19684 - protein, 18 aa, Homo sapiens
MRRRPLGSRFTKEENDFF

SEQ ID NO: 19685 - protein, 16 aa, Homo sapiens
LSSWKYRFTKEENDFF

SEQ ID NO: 19686 - protein, 9 aa, Homo sapiens
LCMGKQIKY

SEQ ID NO: 19687 - protein, 20 aa, Homo sapiens
MIELYKVYHNEFDFEFDLWK

SEQ ID NO: 19688 - protein, 22 aa, Homo sapiens
MSLILNLICGNKGKVILAGAYC

SEQ ID NO: 19689 - protein, 29 aa, Homo sapiens
MCNKFRGSKKINVMIGQEIIQLFTRPLIF

SEQ ID NO: 19690 - protein, 30 aa, Homo sapiens
MATVFSILPVPGGPVLLDEFVEWQKVRQTS

SEQ ID NO: 19691 - protein, 72 aa, Homo sapiens
LEEKESGPACRAGAGDSYCRSQPPARLISGEEHFSSKKCLAWFYEYAGPDEVVGPEGMEKFCEDIGVEPENV

SEQ ID NO: 19692 - protein, 104 aa, Homo sapiens
VSTGEEPALSRSEKDDEDTWERAAAGLGRAGAGWRLCSSACCCLWELGASAEGLPADRDPLPRLPCPPCRGGRKMPVKKKRKSPGVAAAVAEDGGLKKCKISRS

SEQ ID NO: 19693 - protein, 145 aa, Homo sapiens
VSTGEEPALSRSEKDDEDTWERAAAGLGRAGAGWRLCSSACCCLWELGASAEGLPADRDPLPRLPCPPCRGGRKMPVKKKRKSPGVAAAVAEDGGLKKCKISRYHLPPPFKLPSSLLCWTTGGKGVGPGLPGWGWRQLLQIPTPC

SEQ ID NO: 19694 - protein, 142 aa, Homo sapiens
VSTGEEPALSRSEKDDEDTWERAAAGLGRAGAGWRLCSSACCCLWELGASAEGLPADRDPLPRLPCPPCRGGRKMPVKKKRKSPGVAAAVAEDGGLKKCKISRYHLPPPFKLPSSLLCWTTGGKGVGPGLPGWGWRQIPTPC

SEQ ID NO: 19695 - protein, 141 aa, Homo sapiens
VSTGEEPALSRSEKDDEDTWERAAAGLGRAGAGWRLCSSACCCLWELGASAEGLPADRDPLPRLPCPPCRGGRKMPVKKKRKSPGVAAAVAEDGGLKKCKISRYHLPPPFKLPSSLLCWTTGGKGVGPGLPGWGWRQVRPL

SEQ ID NO: 19696 - protein, 150 aa, Homo sapiens
LQIDHLFISNLPEIVVELLMTLHEPANSSASQSTDLCDFSGDLDPAPNPPHFPSHVIKATFAYISNCHKTKLKSILEILSKSPDSYQKILLAICEQAAETNNVYKKHRILKIYHLFVSLLLKDIKSGLGGAWAFVLRDVIYTLIHYINQR

SEQ ID NO: 19697 - protein, 1727 aa, Homo sapiens
LQIDHLFISNLPEIVVELLMTLHEPANSSASQSTDLCDFSGDLDPAPNPPHFPSHVIKATFAYISNCHKTKLKSILEILSKSPDSYQKILLAICEQAAETNNVYKKHRILKIYHLFVSLLLKDIKSGLGGAWAFVLRDVIYTLIHYINQRPSCIMDVSLRSFSLCCDLLSQVCQTAVTYCKDALENHLHVIVGTLIPLVYEQVEVQKQVLDLLKYLVIDNKDNENLYITIKLLDPFPDHVVFKDLRITQQKIKYSRGPFSLLEEINHFLSVSVYDALPLTRLEGLKDLRRQLELHKDQMVDIMRASQDNPQDGIMVKLVVNLLQLSKMAINHTGEKEVLEAVGSCLGEVGPIDFSTIAIQHSKDASYTKALKLFEDKELQWTFIMLTYLNNTLVEDCVKVRSAAVTCLKNILATKTGHSFWEIYKMTTDPMLAYLQPFRTSRKKFLEVPRFDKENPFEGLDDINLWIPLSENHDIWIKTLTCAFLDSGGTKCEILQLLKPMCEVKTDFCQTVLPYLIHDILLQDTNESWRNLLSTHVQGFFTSCLRHFSQTSRSTTPANLDSESEHFFRCCLDKKSQRTMLAVVDYMRRQKRPSSGTIFNDAFWLDLNYLEVAKVAQSCAAHFTALLYAEIYADKKSMDDQEKRSLAFEEGSQSTTISSLSEKSKEETGISLQDLLLEIYRSIGEPDSLYGCGGGKMLQPITRLRTYEHEAMWGKALVTYDLETAIPSSTRQAGIIQALQNLGLCHILSVYLKGLDYENKDWCPELEELHYQAAWRNMQWDHCTSVSKEVEGTSYHESLYNALQSLRDREFSTFYESLKYARVKEVEEMCKRSLESVYSLYPTLSRLQAIGELESIGELFSRSVTHRQLSEVYIKWQKHSQLLKDSDFSFQEPIMALRTVILEILMEKEMDNSQRECIKDILTKHLVELSILARTFKNTQLPERAIFQIKQYNSVSCGVSEWQLEEAQVFWAKKEQSLALSILKQMIKKLDASCAANNPSLKLTYTECLRVCGNWLAETCLENPAVIMQTYLEKAVEVAGNYDGESSDELRNGKMKAFLSLARFSDTQYQRIENYMKSSEFENKQALLKRAKEEVGLLREHKIQTNRYTVKVQRELELDELALRALKEDRKRFLCKAVENYINCLLSGEEHDMWVFRLCSLWLENSGVSEVNGMMKRDGMKIPTYKFLPLMYQLAARMGTKMMGGLGFHEVLNNLISRISMDHPHHTLFIILALANANRDEFLTKPEVARRSRITKNVPKQSSQLDEDRTEAANRIICTIRSRRPQMVRSVEALCDAYIILANLDATQWKTQRKGINIPADQPITKLKNLEDVVVPTMEIKVDHTGEYGNLVTIQSFKAEFRLAGGVNLPKIIDCVGSDGKERRQLVKGRDDLRQDAVMQQVFQMCNTLLQRNTETRKRKLTICTYKVVPLSQRSGVLEWCTGTVPIGEFLVNNEDGAHKRYRPNDFSAFQCQKKMMEVQKKSFEEKYEVFMDVCQNFQPVFRYFCMEKFLDPAIWFEKRLAYTRSVATSSIVGYILGLGDRHVQNILINEQSAELVHIDLGVAFEQGKILPTPETVPFRLTRDIVDGMGITGVEGVFRRCCEKTMEVMRNSQETLLTIVEVLLYDPLFDWTMNPLKALYLQQRPEDETELHPTLNADDQECKRNLSDIDQSFNKVAERVLMRLQEKLKGVEEGTVLSVGGQVNLLIQQAIDPKNLSRLFPGWKAWV

SEQ ID NO: 19698 - protein, 99 aa, Homo sapiens
LRVCGNWLAETCLENPAVIMQTYLEKAVEVAGNYDGESSDELRNGKMKAFLSLARFSDTQYQRIENYMKSSEFENKQALLKRAKEEVGLLREHKIQTNR

SEQ ID NO: 19699 - protein, 161 aa, Homo sapiens
MVRSVEALCDAYIILANLDATQWKTQRKGINIPADQPITKLKNLEDVVVPTMEIKVDHTGEYGNLVTIQSFKAEFRLAGGVNLPKIIDCVGSDGKERRQLVKGRDDLRQDAVMQQVFQMCNTLLQRNTETRKRKLTICTYKVTICTSVSSPKTYKRCHLVG

SEQ ID NO: 19700 - protein, 2018 aa, Homo sapiens
VKLVLYRLKNAFLTGGAKELKCNSHTVKKMTKVPPAFDFSFLNDEEARKILQVLERNEELQRAEKDRISKLQKTKRDIRWLQGVTGEWFEEIQRKKFCNETDVSQMLKQPLTYRLSKEMAKNDPIELPTSRSKNVTNQKKPTPFSSRMSFRSSFASLFSFRKSGKETSKLPSLGQKGCDGHAGPPMPVRGAAVQAKIYNSPLENHLVDSTFVPKPAVMREESGMPPPWDASLLENEFFQVLDDLDSKLAQEQSASSVNTRTPLNYGSRTQFGHFYSSGNRHGNITERHKKHYNETSNMSIYDILRPGTPREGFKTFSPRTSTIYDMYRTREPRVFKEDYVQKNTFGSTSLCFDSRQRSALPATGHFTARSLHFPATTQSKSGFIPPRHQQSPKRTPLSSIIWNRSDSSRDRENQEEFLRAPSPMEIDPADKYVYPRGFQENKRYESYHSQNVYQRVSLNAPMENAMSPDTFENSENMPFYHQSNTFTRSFFSNTFGRSGEQRRFGQGPFWGQEKGHSFWSDFHRSRKSFSSSDRDFEMISMEANSVSAIHGHNVSSEHWESFSSGYGTDVSRGQEEPHPWQFDFQRSTLDSMVVSHGNETQLTPHFGTPNVCSMTGSSYHVKSSELVSQQDSSPVEVHINKEASSFGIAQTLASSFKTSFSQISDDRRNPQSPNLQNPTVTLQKIFPNKPASHPMRSHTEVTVTSSNSVDSLPLAKSQPNILVTEVNNEKDLNESISEEDKQLSKMDQTNKAGEIPQPVSQTGISNSLPDFQNPLSQDSAKSNGFGFNASTIISSKKSPRVFSRKDTSKMYIPHTDKSNDIKQDKRFTENRKLGSTASLPFIQEHRTPPSFPRTDQGCHQELTVNNEDISRIITNNHWSSALTDTQNAQYSKCKLTPGHKTSCDSLDLSSAALPDSSPSKNSSLDAPVVPSTTVFSRRSPSDKDPSLGEREEKDNAGKNQKNQFIVSHSENQERNDSPVPTHDEVVDVKCHSHSPFRNERGKGKIRHHISCIEKLSKTESISVPTSDHRSLIEANQSNSKVSELDTIYCTLPRKSSSFLIHGRQSGSKIMAASLRNGPPPFQIKNNVEDAMGNYMLNKFSPSSPESANECSKVLSDSALEAPEATERMTNVKSSGSTSVRKGPLPFLINRAMSCPSGEPHASTGREGRKKPLTSGMDASELTPRAWERIISPVESDSSVRDCSLTKRQHQKENFQEYTEKEGKMAASRRSVFALSNEDPLPFCSDLSGKERGKTLHKVKTTSTFSVSGDEDNVKCLEVVSIYYTLPRKPSKKFCNLLQQYTQNTNLLIESPQVETETFPNALEKDKQNYSTREQSGTPSCENLKMSVNSDQTLTTENMTAFRLSNRGPLAPTLQEMASVEAAVSLPEEESKAREIFSDNLAKTPLGDSENKKERGKKLQSETLHTSLMLQRKNVSEEKSENCQQSINSSNSGPSSLPALSEVNIGNSQTRRSSWECTGSGRAIPFTGSGKCPQKDHTSTAVGDGSSGSQPREGRGDIGTNCQKMTNKTLSHSESQVFALTPALHKLQLGEETQSDEPNLESLQSEPRELPQRSQEANMTESRKAEDEMQKSAWDQPSLPEGNKNKTNLDDLVKGENRSSVKHRLAAMSKASRKFPAKDVSPRRHVATIFPQSGSRSGFDHLSLGTVECNPLFPEPTPKSAESIGESRLSENGKHVKKSENLLPITVLPNREPSTHVSNQKSNSISQRHQNEFKNVSESPSKHENSKDVTAAQNLVRESGAPSPITFTSLREAEFSDNQRRLSPPFPLEPAQKSRVSSPLASFLQQQRSASSLEWEPEPHLYRSKSLKSINVHGDLLRKSHPPKVRERHFSESTSIDNALSRLTLGNEFSVNNGYSRRFRSFSELPSCDGNESWAYRSGTKTGPRSAISIYRPIDYGIFGKEQQLAFLENVKRSLTQGRLWKPSFLKNPGFLKDDLRNPPNPSESLSSNSPSSQVPEDGLSPSEPLNIYEDDPVDSDCDTDTTTDDEYYLDENDKESEL

SEQ ID NO: 19701 - protein, 28 aa, Homo sapiens
LIVNVYLGNWLTHLLIAPSSLLSRHFSW

SEQ ID NO: 19702 - protein, 287 aa, Homo sapiens
VAPLEENTPRSHIKEAKLSASKRKGNILSQAMLWQKPTAPEQAPAPARPYQGVRVKEPVKELLRRKRGHASSGAAPAPTAVVLPHQPLATYTTVGPSCLDMEGSVSAVTEEAALCAGWLSQPTPATLQPLAPWTPYTEYVPHEAVSCPYSADMYVQPVCPSYTVVGPSSVLTYASPPLITNVTTRSSATPAVGPPLEGPEHQAPLTYFPWPQPLSTLPTSTLQYQPPAPALPGPQFVQLPISIPEPVLQDMEDPRRAASSLTIDKLLLEEEDSDAYALNHTLSVEGF

SEQ ID NO: 19703 - protein, 28 aa, Homo sapiens
MWKLLRLQGSGRRVAFVLCQQESRGWKK

SEQ ID NO: 19704 - protein, 77 aa, Homo sapiens
VAPLEENTPRSHIKEAKLSASKRKGNILSQAMLWQKRWCERYQLQVSTCKNTWPLGSFGIVLKLQILIFHEHFAKSL

SEQ ID NO: 19705 - protein, 27 aa, Homo sapiens
MVNFSARKRRSPIRAERLMLRWKDFPP

SEQ ID NO: 19706 - protein, 32 aa, Homo sapiens
LSFHTLHSPVEQQLQDSYFCDVEHVWVCGRGN

SEQ ID NO: 19707 - protein, 51 aa, Homo sapiens
VAPLEENTPRSHIKEAKLSASKRKGNILSQAMLWQKRDGAAAAYPFWDNGS

SEQ ID NO: 19708 - protein, 62 aa, Homo sapiens
LWANHSMKHSWAPWRIPERLGPCLPKAWNRTWHNYMMLECSGTITAHLDLLGSSNPPTSTFK

SEQ ID NO: 19709 - protein, 42 aa, Homo sapiens
LGNPRGDVSKGCKKENKSARRYCPLPPLKEETQMPCEHLPVG

SEQ ID NO: 19710 - protein, 47 aa, Homo sapiens
MRKHSCRKVASLRRTMAELGEADEAELQRLVAAEQQKAQFTAQATCP

SEQ ID NO: 19711 - protein, 213 aa, Homo sapiens
LGRRRLRRETGDPRLGASAMTAELQQDDAAGAADGHGSSCQMLLNQLREITGIQDPSFLHEALKASNGDITQAVSLLTDERVKEPSQDTVATEPSEVEGSAANKEVLAKVIDLTHDNKDDLQAAIALSLLESPKIQADGRDLNRMHEATSAETKRSKRKRCEVWGENPNPNDWRRVDGWPVGLKNVGNTCWFSAVIQDASSGVPPCRPERVFI

SEQ ID NO: 19712 - protein, 19 aa, Homo sapiens
LRAMRAGTANCRAMLSLPP

SEQ ID NO: 19713 - protein, 10 aa, Homo sapiens
MPEPRGAPWI

SEQ ID NO: 19714 - protein, 504 aa, Homo sapiens
MDLTKMGMIQLQNPSHPTGLLCKANQMRLAGTLCDVVIMVDSQEFHAHRTVLACTSKMFEILFHRNSQHYTLDFLSPKTFQQILEYAYTATLQAKAEDLDDLLYAAEILEIEYLEEQCLKMLETIQASDDNDTEATMADGGAEEEEDRKARYLKNIFISKHSSEESGYASVAGQSLPGPMVDQSPSVSTSFGLSAMSPTKAAVDSLMTIGQSLLQGTLQPPAGPEEPTLAGGGRHPGVAEVKTEMMQVDEVPSQDSPGAAESSISGGMGDKVEERGKEGPGTPTRSSVITSARELHYGREESAEQVPPPAEAGQAPTGRPEHPAPPPEKHLGIYSVLPNHKADAVLSMPSSVTSGLHVQPALAVSMDFSTYGGLLPQGFIQRELFSKLGELAVGMKSESRTIGEQCSVCGVELPDNEAVEQHRKLHSGMKTYGCELCGKRFLDSLRLRMHLLAHSAGAKAFVCDQCGAQFSKEDALETHRQTHTGELTWIPVLQVFHSVGSTWT

SEQ ID NO: 19715 - protein, 220 aa, Homo sapiens
VWISHSMFLITTVADKEQMDLVKRMTCSGPQGTDMAVFCLLCGKRFQAQSALQQHMEVHAGVRSYICSECNRTFPSHTALKRHLRSHTGDHPYECEFCGSCFRDESTLKSHKRIHTGEKPYECNGCGKKFSLKHQLETHYRVHTGEKPFECKLCHQRSRDYSAMIKHLRTHNGASPYQCTICTEYCPSLSSMQKHMKGHKPEEIPPDWRIEKTYLYLCYV

SEQ ID NO: 19716 - protein, 27 aa, Homo sapiens
LDTTSSSCHGQVVPGRQPQGGRGPVLL

SEQ ID NO: 19717 - protein, 144 aa, Homo sapiens
VEAAHSPGEMTGLSMDGGECAGVRARACAMLGGSDWPAFVGSAGPYSSLSCHLSLPEYPAPLPVGLLSKKICNLKEDPALTPKKDSLSGRKAADRSWRAERSSSASWHTPALSSMHLARPSELGREADGVHLAGEGAGPSGQPS

SEQ ID NO: 19718 - protein, 21 aa, Homo sapiens
LLPISLPTARTTQEAGAGASV

SEQ ID NO: 19719 - protein, 26 aa, Homo sapiens
LLLRDPGEGPGGLEGVRGHQQPAPVA

SEQ ID NO: 19720 - protein, 41 aa, Homo sapiens
LEARRPAPLRPRTMRRAQDAAVPRSAAGGAPQPPSWLRRSW

SEQ ID NO: 19721 - protein, 50 aa, Homo sapiens
LEARRPAPLRPRTMRRAQDAAVPRSAAGGAPQPPSWLRRSWLTCCGSGRG

SEQ ID NO: 19722 - protein, 81 aa, Homo sapiens
LEARRPAPLRPRTMRRAQDAAVPRSAAGGAPQPPSWLRRSCGEPWLAGPLAERCPGAPLLWQTWISGSPVVEVEEAEIDRN

SEQ ID NO: 19723 - protein, 36 aa, Homo sapiens
MWRALAGWPSGRAVPGCSLTLANLDLRLTCCGSGRG

SEQ ID NO: 19724 - protein, 27 aa, Homo sapiens
LVSACYRKEEERLNQEKKVSVYLEDTD

SEQ ID NO: 19725 - protein, 157 aa, Homo sapiens
LAGWLLRAAPRFCRRTETDMEQGKGLAVLILAIILLQGTLAQSIKGNHLVKVYDYQEDGSVLLTCDAEAKNITWFKDGKMIGFLTEDKKKWNLGSNAKDPRGMYQCKGSQNKSKPLQVYYRTSDKQTLLPNDQLYQPLKDREDDQYSHLQGNQLRRN

SEQ ID NO: 19726 - protein, 115 aa, Homo sapiens
MCTSKFEKHYSNDLLVCRSRENFRGKILNRTTAFLISGNHLVKVYDYQEDGSVLLTCDAEAKNITWFKDGKMIGFLTEDKKKWNLGSNAKDPRGMYQCKGSQNKSKPLQVYYRSM

SEQ ID NO: 19727 - protein, 1430 aa, Homo sapiens
LGKETNGEEENERLQEGAPVLALPPTWGPSGYQCPWRGFLAASPTKELWSLRTMDALNRNQIGPGCQTQTMVQKGPLDLIETGKGLKVQTDKPHLVSLGSGRLSTAITLLPLEEGRTVIGSAARDISLQGPGLAPEHCYIENLRGTLTLYPCGNACTIDGLPVRQPTRLTQGCMLCLGQSTFLRFNHPAEAKWMKSMIPAGGRAPGPPYSPVPAESESLVNGNHTPQTATRGPSACASHSSLVSSIEKDLQEIMDSLVLEEPGAAGKKPAATSPLSPMANGGRYLLSPPTSPGAMSVGSSYENTSPAFSPLSSPASSGSCASHSPSGQEPGPSVPPLVPARSSSYHLALQPPQSRPSGARSESPRLSRKGGHERPPSPGLRGLLTDSPAATVLAEARRATESPRLGGQLPVVAISLSEYPASGALSQPTSIPGSPKFQPPVPAPRNKIGTLQDRPPSPFREPPGSERVLTTSPSRQLVGRTFSDGLATRTLQPPESPRLGRRGLDSMRELPPLSPSLSRRALSPLPTRTTPDPKLNREVAESPRPRRWAAHGASPEDFSLTLGARGRRTRSPSPTLGESLAPHKGSFSGRLSPAYSLGSLTGASPCQSPCVQRKLSSGDLRVPVTRERKNSITEISDNEDDLLEYHRRQRQERLREQEMERLERQRLETILNLCAEYSRADGGPEAGELPSIGEATAALALAGRRPSRGLAGASGRSSEEPGVATQRLWESMERSDEENLKEECSSTESTQQEHEDAPSTKLQGEVLALEEERAQVLGHVEQLKVRVKELEQQLQESAREAEMERALLQGEREAERALLQKEQKAVDQLQEKLVALETGIQKERDKEAEALETETKLFEDLEFQQLERESRVEEERELAGQGLLRSKAELLRSIAKRKERLAILDSQAGQIRAQAVQESERLARDKNASLQLLQKEKEKLTVLERRYHSLTGGRPFPKTTSTLKEMEKLLLPAVDLEQWYQELMAGLGTGPAAASPHSSPPPLPAKASRQLQVYRSKMDGEATSPLPRTRSGPLPSSSGSSSSSSQLSVATLGRSPSPKSALLTQNGTGSLPRNLAATLQDIETKRQLALQQKGQQVIEEQRRRLAELKQKAAAEAQCQWDALHGAAPFPAGPSGFPPLMHHSILHHLPAGRERGEEGEHAYDTLSLESSDSMETSISTGGNSACSPDNMSSASGLDMGKIEEMEKMLKEAHAEKNRLMESREREMELRRQALEEERRRREQVERRLQSESARRQQLVEKEVKMREKQFSQARPLTRYLPIRKEDFDLKTHIESSGHGVDTCLHVVLSSKVCRGYLVKMGGKIKSWKKRWFVFDRLKRTLSYYVDKHETKLKGVIYFQAIEEVYYDHLRSAAKKRFFRFTMVTESPNPALTFCVKTHDRLYYMVAPSAEAMRIWMDVIVTGAEGYTQFMN

SEQ ID NO: 19728 - protein, 1587 aa, Homo sapiens
VREGWGQGWPPGSRPHLVILFFQCHPTLSSSLVPGLLGPPFSPPPLTPPPQVTSFLFGACCCSPCSSTEYLAGPWARTGAVAPLCVGAMRILANKTRLPHPRRREAPGSPPLSPRGHCPPAPAKPMHPENKLTNHGKTGNGGAQSQHQNVNQGPTCNVGSKGVGAGNHGAKANQISPSNSSLKNPQAGVPPFSSLKGKVKRDRSVSVDSGEQREAGTPSLDSEAKEVAPRSKRRCVLERKQPYSGDEWCSGPDSEEDDKPIGATHNCNVADPAMAAPQLGPGQTTQLPLSESSVPGAPHGPPPGLRPDAPGGGGGGGGVPGKPPSQFVYVFTTHLANTAAEAVLQGRADSILAYHQQNVPRAKLDQAPKVPPTPEPLPLSTPSAGTPQSQPPPLPPPPPPAPGSAPPALPPEGPPEDSSQDLAPNSVGAASTGGGTGGTHPNTPTATTANNPLPPGGDPSSAPGPALLGEAAAPGNGQRSLVGSEGLSKEQLEHRERSLQTLRDIERLLLRSGETEPFLKGPPGGAGEGGPPAQAPPPPQQPPTAPPSGLKKYEEPLQSMISQTQSLGGPPLEHEVPGHPPGGDMGQQMNMMIQRLGQDSLTPEQVAWRKLQEEYYEEKRRKEEQIGLHGSRPLQDMMGMGGMMVRGPPPPYHSKPGDQWPPGMGAQLRGPMDVQDPMQLRGGPPFPGPRFPGNQIQRVPGFGGMQSMPMEVPMNAMQRPVRPGMGWTEDLPPMGGPSNFAQNTMPYPGGQGEAERFMTPRVREELLRHQLLEKRSMGMQRPLGMAGSGMGQSMEMERMMQAHRQMDPAMFPGQMAGGEGLAGTPMGMEFGGGRGLLSPPMGQSGLREVDPPMGPGNLNMNMNVNMNMNMNLNVQMTPQQQMLMSQKMRGPGDLMGPQGLSPEEMARVRAQNSSGVMGGPQKMLMPSQFPNQGQQGFSGGQGPYQAMSQDMGNTQDMFSPDQSSMPMSNVGTTRLSHMPLPPASNPPGTVHSAPNRGLGRRPSDLTISINQMGSPGMGHLKSPTLSQVHSPLVTSPSANLKSPQTPSQMVPLPSANPPGPLKSPQVLGSSLSVRSPTGSPSRLKSPSMAVPSPGWVASPKTAMPSPGVSQNKQPPLNMNSSTTLSNMEQGTLPPSGPRSSSSAPPANPPSGLMNPSLPFTSSPDPTPSQNPLSLMMTQMSKYAMPSSTPLYHNAIKTIATSDDELLPDRPLLPPPPPPQGSGPGISNSQPSQMHLNSAAAQSPMGMNLPGQQPLSHEPPPAMLPSPTPLGSNIPLHPNAQGTGGPPQNSMMMAPGGPDSLNAPCGPVPSSSQMMPFPPRLQQPHGAMAPTGGGGGGPGLQQHYPSGMALPPEDLPNQPPGPMPPQQHLMGKAMAGRMGDAYPPGVLPGVASVLNDPELSEVIRPTPTGIPEFDLSRIIPSEKPSSTLQYFPKSENQPPKAQPPNLHLMNLQNMMAEQTPSRPPNLPGQQGVQRGLNMSMCHPGQMSLLGRTGVPPQQGMVPHGLHQGVMSPPQGLMTQQNFMLMKQRGVGGEVYSQPPHMLSPQGSLMGPPPQQNLMVSHPLRQRSVSLDSQMGYLPAPGGMANLPF

SEQ ID NO: 19729 - protein, 1526 aa, Homo sapiens
LHLQLASRRTPIHTTTLTWSWRPAPAWREDPPIRVRLPHPRRREAPGSPPLSPRGHCPPAPAKPMHPENKLTNHGKTGNGGAQSQHQNVNQGPTCNVGSKGVGAGNHGAKANQISPSNSSLKNPQAGVPPFSSLKGKVKRDRSVSVDSGEQREAGTPSLDSEAKEVAPRSKRRCVLERKQPYSGDEWCSGPDSEEDDKPIGATHNCNVADPAMAAPQLGPGQTTQLPLSESSVPGAPHGPPPGLRPDAPGGGGGGGGVPGKPPSQFVYVFTTHLANTAAEAVLQGRADSILAYHQQNVPRAKLDQAPKVPPTPEPLPLSTPSAGTPQSQPPPLPPPPPPAPGSAPPALPPEGPPEDSSQDLAPNSVGAASTGGGTGGTHPNTPTATTANNPLPPGGDPSSAPGPALLGEAAAPGNGQRSLVGSEGLSKEQLEHRERSLQTLRDIERLLLRSGETEPFLKGPPGGAGEGGPPAQAPPPPQQPPTAPPSGLKKYEEPLQSMISQTQSLGGPPLEHEVPGHPPGGDMGQQMNMMIQRLGQDSLTPEQVAWRKLQEEYYEEKRRKEEQIGLHGSRPLQDMMGMGGMMVRGPPPPYHSKPGDQWPPGMGAQLRGPMDVQDPMQLRGGPPFPGPRFPGNQIQRVPGFGGMQSMPMEVPMNAMQRPVRPGMGWTEDLPPMGGPSNFAQNTMPYPGGQGEAERFMTPRVREELLRHQLLEKRSMGMQRPLGMAGSGMGQSMEMERMMQAHRQMDPAMFPGQMAGGEGLAGTPMGMEFGGGRGLLSPPMGQSGLREVDPPMGPGNLNMNMNVNMNMNMNLNVQMTPQQQMLMSQKMRGPGDLMGPQGLSPEEMARVRAQNSSGVMGGPQKMLMPSQFPNQGQQGFSGGQGPYQAMSQDMGNTQDMFSPDQSSMPMSNVGTTRLSHMPLPPASNPPGTVHSAPNRGLGRRPSDLTISINQMGSPGMGHLKSPTLSQVHSPLVTSPSANLKSPQTPSQMVPLPSANPPGPLKSPQVLGSSLSVRSPTGSPSRLKSPSMAVPSPGWVASPKTAMPSPGVSQNKQPPLNMNSSTTLSNMEQGTLPPSGPRSSSSAPPANPPSGLMNPSLPFTSSPDPTPSQNPLSLMMTQMSKYAMPSSTPLYHNAIKTIATSDDELLPDRPLLPPPPPPQGSGPGISNSQPSQMHLNSAAAQSPMGMNLPGQQPLSHEPPPAMLPSPTPLGSNIPLHPNAQGTGGPPQNSMMMAPGGPDSLNAPCGPVPSSSQMMPFPPRLQQPHGAMAPTGGGGGGPGLQQHYPSGMALPPEDLPNQPPGPMPPQQHLMGKAMAGRMGDAYPPGVLPGVASVLNDPELSEVIRPTPTGIPEFDLSRIIPSEKPSSTLQYFPKSENQPPKAQPPNLHLMNLQNMMAEQTPSRPPNLPGQQGVQRGLNMSMCHPGQMSLLGRTGVPPQQGMVPHGLHQGVMSPPQGLMTQQNFMLMKQRGVGGEVYSQPPHMLSPQGSLMGPPPQQNLMVSHPLRQRSVSLDSQMGYLPAPGGMANLPF

SEQ ID NO: 19730 - protein, 195 aa, Homo sapiens
LSPRGHCPPAPAKPMHPENKLTNHGKTGNGGAQSQHQNVNQGPTCNVGSKGVGAGNHGAKANQISPSNSSLKNPQAGVPPFSSLKGKVKRDRSVSVDSGEQREAGTPSLDSEAKEVAPRSKRRCVLERKQPYSGDEWCSGPDSEEDDKPIGATHRLQRQCCRAGPTPSSPTTSRTCPGPSLTRPLKCPPPQNRYP

SEQ ID NO: 19731 - protein, 11 aa, Homo sapiens
VSAAILRASQW

SEQ ID NO: 19732 - protein, 129 aa, Homo sapiens
LVSQASRHDRGGKGRNPGDTGCWPGSQACLLPGPPPPPTVWRSVISCFLVSLRTLGPLGASPGLMIVQKAAIKGAWEAGWRREQKKPNSADLGTVRAASRNCGQRLCVLAGRACSFLPWQPRAMAIIAL

SEQ ID NO: 19733 - protein, 81 aa, Homo sapiens
LVRWWTLGPLGASPGLMIVQKAAIKGAWEAGWRREQKKPNSADLGTVRAASRNCGQRLCVLAGRACSFLPWQPRAMAIIAL

SEQ ID NO: 19734 - protein, 111 aa, Homo sapiens
LGGTVVPCSPKPAGAPSRPRAAQSLCLRPLPTSHRTLGPLGASPGLMIVQKAAIKGAWEAGWRREQKKPNSADLGTVRAASRNCGQRLCVLAGRACSFLPWQPRAMAIIAL

SEQ ID NO: 19735 - protein, 79 aa, Homo sapiens
LGRTLGPLGASPGLMIVQKAAIKGAWEAGWRREQKKPNSADLGTVRAASRNCGQRLCVLAGRACSFLPWQPRAMAIIAL

SEQ ID NO: 19736 - protein, 79 aa, Homo sapiens
LFRTLGPLGASPGLMIVQKAAIKGAWEAGWRREQKKPNSADLGTVRAASRNCGQRLCVLAGRACSFLPWQPRAMAIIAL

SEQ ID NO: 19737 - protein, 155 aa, Homo sapiens
LSRRASPVYLASMSGRGKTGGKARAKAKSRSSRAGLQFPVGRVHRLLRKGHYAERVGAGAPVYLAAVLEYLTAEILELAGNAARDNKKTRIIPRHLQLAIRNDEELNKLLGGVTIAQGGVLPNIQAVLLPKKTSATVGPKAPSGGKKATQASQEY

SEQ ID NO: 19738 - protein, 136 aa, Homo sapiens
LRLVPQRPLAGVLAPVASPGSVRVPTLGKLGAPPPLPPPPAWLWVPEPPPLAQPDSLLLPEPSGSGSFPGDGWPLSHGSVRPPQSARHGCERGAVQQSHPPEEPPTAPRHHQAWIGAGRAPLHGVPQSPRGPPVPT

SEQ ID NO: 19739 - protein, 146 aa, Homo sapiens
LRLVPQRPLAGVLAPVASPGSVRVPTLGKLGAPPPLPPPPAWLWVPEPPPLAQPDSLLLPEPSGSGSFPGDGWPLSHGSVRPPQSARHGCERGAVQQSHPPEEPPTAPRHHQAWIGAGRAPLHGVPQSPRTKSLGIHGRKKCSGSM

SEQ ID NO: 19740 - protein, 685 aa, Homo sapiens
LPGARGSGASVFFHPVPCLVQSHRGSSELFLACFQYGATMSKGPAVGIDLGTTYSCVGVFQHGKVEIIANDQGNRTTPSYVAFTDTERLIGDAAKNQVAMNPTNTVFDAKRLIGRRFDDAVVQSDMKHWPFMVVNDAGRPKVQVEYKGETKSFYPEEVSSMVLTKMKEIAEAYLGKTVTNAVVTVPAYFNDSQRQATKDAGTIAGLNVLRIINEPTAAAIAYGLDKKVGAERNVLIFDLGGGTFDVSILTIEDGIFEVKSTAGDTHLGGEDFDNRMVNHFIAEFKRKHKKDISENKRAVRRLRTACERAKRTLSSSTQASIEIDSLYEGIDFYTSITRARFEELNADLFRGTLDPVEKALRDAKLDKSQIHDIVLVGGSTRIPKIQKLLQDFFNGKELNKSINPDEAVAYGAAVQAAILSGDKSENVQDLLLLDVTPLSLGIETAGGVMTVLIKRNTTIPTKQTQTFTTYSDNQPGVLIQVYEGERAMTKDNNLLGKFELTGIPPAPRGVPQIEVTFDIDANGILNVSAVDKSTGKENKITITNDKGRLSKEDIERMVQEAEKYKAEDEKQRDKVSSKNSLESYAFNMKATVEDEKLQGKINDEDKQKILDKCNEIINWLDKNQTAEKEEFEHQQKELEKVCNPIITKLYQSAGGMPGGMPGGFPGGGAPPSGGASSGPTIEEVD

SEQ ID NO: 19741 - protein, 122 aa, Homo sapiens
MSKGPAVGIDLGTTYSCVGVFQHGKVEIIANDQGNRTTPSYVAFTDTERLIGDAAKNQVAMNPTNTVFDAKRLIGRRFDDAVVQSDMKHWPFMVVNDAGRPSLPILTTSLVCLFRFMKASVP

SEQ ID NO: 19742 - protein, 81 aa, Homo sapiens
MSKGPAVGIDLGTTYSCVGVFQHGKVEIIANDQGNRTTPSYVAFTDTERLIGDAAKNQVAMNPTNTVFDCYQCCGHSASLL

SEQ ID NO: 19743 - protein, 91 aa, Homo sapiens
MSKGPAVGIDLGTTYSCVGVFQHGKVEIIANDQGNRTTPSYVAFTDTERLIGDAAKNQVAMNPTNTVFGEFLILNDRTNITGLGSTKVYET

SEQ ID NO: 19744 - protein, 215 aa, Homo sapiens
LFLRPQDWGVCRGAEGGEQPEGDANQAAGGGLRGSAEATAPMPAANMMENRPLPALQVPEPQGAPEGSPVWSSSSTPTLRRRRFKMRRMKNVQEQSLEAGLARDLPAVLAPGKEFLQLPSIEITPSSDEDTPWSNCSTPSASPRRKRFLLRKWLRVRERKECSESRVLSLNGFVFLCGATESLITFPGIPSPNLFNYIDFNSLKLADFHCTKLKI

SEQ ID NO: 19745 - protein, 144 aa, Homo sapiens
LASRPRGSGYIRERSRARETGPESRAAVSARVGWRPTAPEPPPGTTQTPPPPCASLRPRRGPPDTSMDCCTENACSKPDDDILDIPLDDPGANAAAAKIQASFRGHMARKKIKSGERGRKGPGPGGPGGAGVARGGAGGGPSGD

SEQ ID NO: 19746 - protein, 1015 aa, Homo sapiens
LRADSWPVPSQPEQASGPQKQAFIWPEAPSRSARLPITYTDYWDSRLQTQESQMLGSMARKKPRNTSRLPLALNPLKSKDVLAVLAERNEAIVPVGAWVEPASPGSSEIPAYTSAYLIEEELKEQLRKKQEALKHFQKQVKYRVNQQIRLRKKQQLQKSYERAQKEGSIAMQSSATHLTSKRTSVFPNNLNVAIGSSRLPPSLMPGDGIEDEENQNELFQQQAQALSETMKQARHRLASFKTVIKKKGSVFPDDGRKSFLTREEVLSRKPASTGINTGIRGELPIKVHQGLLAAVPYQNYMENQELDYEEPDYEESSSLVTDEKGKEDLFGRGQQDQQAIHSEDKNKPFSRVQKVKFKNPLFVLMEEEEQKQLHFEGLQDILPEAQDYFLEAQGDLLETQGDLTGIQSVKPDTQAVEMKVQVTEPEGQAIEPEGQPIKTETQGIMLKAQSIELEEGSIVLKTQDFLPTNQALLTKNQDVLLKDHCVLPKDQSILLKYQDQDFLPRDQHVLHKDQDILPKYQDQNFLPKDQNFLSRDQHVLPKDQDILPKYQDQNFLPKDQNFLSRDQHVLPKDQNILPKYQGQDFLPKDQDFLSRDQHVLPKDWNILPKCQDQDFLPRDQGVLPKDQNILPICQDQDFLPRDQGYLPKDQNILPICQDRDFLPRDLHVLSNDQNILPKCQDQDFLPKYQKVHFKEPYSDMTDEKGREDFSLADYQCLPPKSQDQDDIKNQQPASFMREERVREELPLDYHQYVVPKIQDQDSPREQNKHIKLPSSFEKWEIARGNTPGVPLAYDRYQSGLSTEFQAPLAFQSDVDKEEDKKERQKQYLRHRRLFMDIEREQVKEQQRQKEQKKKIEKIKKKREQECYAAEQRILRMNFHEDPYSGEKLSEILAQLQLQEIKGTREKQQREKEYLSSLCLIILYLYRYVEALRAQIQEKMQLYNITLPPLCCCGPDFWDAHPDTCANNCIFYKNHRAYTRALHSFINSCDVPGGNSTLRVAIHNFASAHRRTLKNL

SEQ ID NO: 19747 - protein, 1004 aa, Homo sapiens
LRADSWPVPSQPEQASGPQKQAFIWPEAPSRSARLPITYTDYWDSRLQTQESQMLGSMARKKPRNTSRLPLALNPLKSKDVLAVLAERNEAIVPVGAWVEPASPGSSEIPAYTSAYLIEEELKEQLRKKQEALKHFQKQVKYRVNQQIRLRKKQQLQKSYERAQKEGSIAMQSSATHLTSKRTSVFPNNLNVAIGSSRLPPSLMPGDGIEDEENQNELFQQQAQALSETMKQARHRLASFKTVIKKKGSVFPDDGRKSFLTREEVLSRKPASTGINTGIRGELPIKVHQGLLAAVPYQNYMENQELDYEEPDYEESSSLVTDEKGKEDLFGRGQQDQQAIHSEDKNKPFSRVQKVKFKNPLFVLMEEEEQKQLHFEGLQDILPEAQDYFLEAQGDLLETQGDLTGIQSVKPDTQAVEMKVQVTEPEGQAIEPEGQPIKTETQGIMLKAQSIELEEGSIVLKTQDFLPTNQALLTKNQDVLLKDHCVLPKDQSILLKYQDQDFLPRDQHVLHKDQDILPKYQDQNFLPKDQNFLSRDQHVLPKDQDILPKYQDQNFLPKDQNFLSRDQHVLPKDQNILPKYQGQDFLPKDQDFLSRDQHVLPKDWNILPKCQDQDFLPRDQGVLPKDQNILPICQDQDFLPRDQGYLPKDQNILPICQDRDFLPRDLHVLSNDQNILPKCQDQDFLPKYQKVHFKEPYSDMTDEKGREDFSLADYQCLPPKSQDQDDIKNQQPASFMREERVREELPLDYHQYVVPKIQDQDSPREQNKHIKLPSSFEKWEIARGNTPGVPLAYDRYQSGLSTEFQAPLAFQSDVDKEEDKKERQKQYLRHRRLFMDIEREQVKEQQRQKEQKKKIEKIKKKREQECYAAEQRILRMNFHEDPYSGEKLSEILAQLQLQEIKGTREKQQREKEYLRYVEALRAQIQEKMQLYNITLPPLCCCGPDFWDAHPDTCANNCIFYKNHRAYTRALHSFINSCDVPGGNSTLRVAIHNFASAHRRTLKNL

SEQ ID NO: 19748 - protein, 64 aa, Homo sapiens
LSQAPCMLFVLQYLNTVIPYEKKASPPSVEDLQMLTNILFAMKEDNEKVPTLLTDYILKVLCPT

SEQ ID NO: 19749 - protein, 223 aa, Homo sapiens
VLVNCEGLSWIFKELEGISSEGQSHLDWWWPQEPPQRALVWMQVLCGRRSSPAGLRHMSGSELTELLDQVEGAIRDFSEELVQQLARRDELEFEKEVKNSFITVLIEVQNKQKEQRELMKKRRKEKGLSLQSSRIEKGNQMPLKRFSMEGISNILQSGIRQTFGSSGTDKQYLNTVIPYEKKASPPSVEDLQMLTNILFAMKEDNEKVPTLLTDYILKVLCPT

SEQ ID NO: 19750 - protein, 321 aa, Homo sapiens
MEAPLVSLDEEFEDLRPSCSEDPEEKPQCFYGSSPHHLEDPSLSELENFSSEIISFKSMEDLVNEFDEKLNVCFRNYNAKTENLAPVKNQLQIQEEEETLQDEEVWDALTDNYIPSLSEDWRDPNIEALNGNCSDTEVIEEIEEMMQNSPDPEEEEEVLEEEDGGETSSQADSVLLQEMQALTQTFNNNWSYEGLRHMSGSELTELLDQVEGAIRDFSEELVQQLARRDELEFEKEVKNSFITVLIEVQNKQKEQRELMKKRRKEKGLSLQSSRIEKGNQMPLKVGEQPGGRLGASNLQPCPFQCPTNPAGDSSTFTEQWW

SEQ ID NO: 19751 - protein, 103 aa, Homo sapiens
LQSSPGRERQHLHVTLLEPPTFRGAGHGNARCLALRRGCASLRQRDALKFWREKRCIWIPAVVGKGQSAEVLGGVMAVPFVEDWDLVQTLGEGAYGEARHRHA

SEQ ID NO: 19752 - protein, 517 aa, Homo sapiens
LQSSPGRERQHLHVTLLEPPTFRGAGHGNARCLALRRGCASLRQRDALKFWREKRCIWIPAVVGKGQSAEVLGGVMAVPFVEDWDLVQTLGEGAYGEVQLAVNRVTEEAVAVKIVDMKRAVDCPENIKKEICINKMLNHENVVKFYGHRREGNIQYLFLEYCSGGELFDRIEPDIGMPEPDAQRFFHQLMAGVVYLHGIGITHRDIKPENLLLDERDNLKISDFGLATVFRYNNRERLLNKMCGTLPYVAPELLKRREFHAEPVDVWSCGIVLTAMLAGELPWDQPSDSCQEYSDWKEKKTYLNPWKKIDSAPLALLHKILVENPSARITIPDIKKDRWYNKPLKKGAKRPRVTSGGVSESPSGFSKHIQSNLDFSPVNSASSEENVKYSSSQPEPRTGLSLWDTSPSYIDKLVQGISFSQPTCPDHMLLNSQLLGTPGSSQNPWQRLVKRMTRFFTKLDADKSYQCLKETCEKLGYQWKKSCMNQGDGLEFKRHFLKIKGKLIDIVSSQKIWLPAT

SEQ ID NO: 19753 - protein, 551 aa, Homo sapiens
LQSSPGRERQHLHVTLLEPPTFRGAGHGNARCLALRRGCASLRQRDALKFWREKRCIWIPAVVGKGQSAEVLGGVMAVPFVEDWDLVQTLGEGAYGEVQLAVNRVTEEAVAVKIVDMKRAVDCPENIKKEICINKMLNHENVVKFYGHRREGNIQYLFLEYCSGGELFDRIEPDIGMPEPDAQRFFHQLMAGVVYLHGIGITHRDIKPENLLLDERDNLKISDFGLATVFRYNNRERLLNKMCGTLPYVAPELLKRREFHAEPVDVWSCGIVLTAMLAGELPWDQPSDSCQEYSDWKEKKTYLNPWKKIDSAPLALLHKILVENPSARITIPDIKKDRWYNKPLKKGAKRPRVTSGGVSESPSGFSKHIQSNLDFSPVNSASSEENVKYSSSQPEPRTGLSLWDTSPSYIDKLVQGISFSQPTCPDHMLLNSQLLGTPGSSQNPWQRLVKRMTRFFTKLDADKSYQCLKETCEKLGYQWKKSCMNQVTISTTDRRNNKLIFKVNLLEMDDKILVDFRLSKGDGLEFKRHFLKIKGKLIDIVSSQKIWLPAT

SEQ ID NO: 19754 - protein, 487 aa, Homo sapiens
LPFTAEVLGGVMAVPFVEDWDLVQTLGEGAYGEVQLAVNRVTEEAVAVKIVDMKRAVDCPENIKKEICINKMLNHENVVKFYGHRREGNIQYLFLEYCSGGELFDRIEPDIGMPEPDAQRFFHQLMAGVVYLHGIGITHRDIKPENLLLDERDNLKISDFGLATVFRYNNRERLLNKMCGTLPYVAPELLKRREFHAEPVDVWSCGIVLTAMLAGELPWDQPSDSCQEYSDWKEKKTYLNPWKKIDSAPLALLHKILVENPSARITIPDIKKDRWYNKPLKKGAKRPRVTSGGVSESPSGFSKHIQSNLDFSPVNSASSEENVKYSSSQPEPRTGLSLWDTSPSYIDKLVQGISFSQPTCPDHMLLNSQLLGTPGSSQNPWQRLVKRMTRFFTKLDADKSYQCLKETCEKLGYQWKKSCMNQVTISTTDRRNNKLIFKVNLLEMDDKILVDFRLSKGDGLEFKRHFLKIKGKLIDIVSSQKIWLPAT

SEQ ID NO: 19755 - protein, 27 aa, Homo sapiens
VLGGVMAVPFVEDWDLVQTLGEEFNLL

SEQ ID NO: 19756 - protein, 437 aa, Homo sapiens
VLGGVMAVPFVEDWDLVQTLGEGAYGEVQLAVNRVTEEAVAVKIVDMKRAVDCPENIKKEICINKMLNHENVVKFYGHRREGNIQYLFLEYCSGGELFDRIEPDIGMPEPDAQRFFHQLMAGVVYLHGIGITHRDIKPENLLLDERDNLKISDFGLATVFRYNNRERLLNKMCGTLPYVAPELLKRREFHAEPVDVWSCGIVLTAMLAGELPWDQPSDSCQEYSDWKEKKTYLNPWKKIDSAPLALLHKILVENPSARITIPDIKKDRWYNKPLKKGAKRPRVTSGGVSESPSGFSKHIQSNLDFSPVNSASSEENVKYSSSQPEPRTGLSLWDTSPSYIDKLVQGISFSQPTCPDHMLLNSQLLGTPGSSQVTISTTDRRNNKLIFKVNLLEMDDKILVDFRLSKGDGLEFKRHFLKIKGKLIDIVSSQKIWLPAT

SEQ ID NO: 19757 - protein, 41 aa, Homo sapiens
MLAGELPWDQPSDSCQEYSDWKEKKTYLNPWKKIDSAPLGN

SEQ ID NO: 19758 - protein, 75 aa, Homo sapiens
LSLSLRYNNKRAQGSEGRALAGGTQGGPRAPGRPRRANPKGLRGQAVTGSMCGILGGSAADLAKWTGLLRRLCRW

SEQ ID NO: 19759 - protein, 52 aa, Homo sapiens
LRGQAVTGSMCGILGGSAADLAKWTGLLRNSFSGSSTAEPPPQEVELRLCRW

SEQ ID NO: 19760 - protein, 60 aa, Homo sapiens
LSANFNHKKDLIELRVMLEDAEDRKYPENDLFRKLRDAVKEAETCASVAQLLLSKKQKHR

SEQ ID NO: 19761 - protein, 415 aa, Homo sapiens
VYSSPPAPDLSCFLLGRKMKPLLPRVSSYLVPIQFPVNQSLVLQPSVKVPLPLAASLMSSELARHSKRVRIAPKVLLAEEGIAPLSSAGPGKEEKLLFGEGFSPLLPVQTIKEEEIQPGEEMPHLARPIKVESPPLEEWPSPAPSFKEESSHSWEDSSQSPTPRPKKSYSGLRSPTRCVSEMLVIQHRERRERSRSRRKQHLLPPCVDEPELLFSEGPSTSRWAAELPFPADSSDPASQLSYSQEVGGPFKTPIKETLPISSTPSKSVLPRTPESWRLTPPAKVGGLDFSPVQTSQGASDPLPDPLGLMDLSTTPLQSAPPLESPQRLLSSEPLDLISVPFGNSSPSDIDVPKPGSPEPQVSGLAANRSLTEGLVLDTMNDSLSKILLDISFPGLDEDPLGPDNINWSQFIPELQ

SEQ ID NO: 19762 - protein, 87 aa, Homo sapiens
LGARRKMKPLLPRVSSYLVPIQFPVNQSLVLQPSVKVPLPLAASLMSSELARHSKRVRIAPKVGVLFSSEERFWPIKNVGPSACKAL

SEQ ID NO: 19763 - protein, 161 aa, Homo sapiens
VTLETLGPKPAARDVNLPRPPGALCEQKRETCADGEAAGCTINNSLSNIQWLRKMSSDGLGSRSIKQEMEEKENCHLEQRQVKVEEPSRPSASWQNSVSERPPYSYMAMIQFAINSTERKRMTLKDIYTWIEDHFPYFKHIAKPGWKVMCPTATKIKVSPA

SEQ ID NO: 19764 - protein, 21 aa, Homo sapiens
LRAERAARAGPREAYTPKVMP

SEQ ID NO: 19765 - protein, 55 aa, Homo sapiens
LPFCLLPIFRPRSESQKPEFFPKRSLTWTHHLSSARQPRVQWFLRGAAYIQRCKY

SEQ ID NO: 19766 - protein, 41 aa, Homo sapiens
LLTCRNPSQRSLTWTHHLSSARQPRVQWFLRGAAYIQRCKY

SEQ ID NO: 19767 - protein, 34 aa, Homo sapiens
MQRSLTWTHHLSSARQPRVQWFLRGAAYIQRCKY

SEQ ID NO: 19768 - protein, 84 aa, Homo sapiens
VELKKLRERQGIEMEKVMQELGKSLTDQDVNSLAAQHFESQQDLENKWSNELKQSTAIQKQEYQEWVIKLHQDLKNPNNSSLRY

SEQ ID NO: 19769 - protein, 115 aa, Homo sapiens
LSKNMKKNRERFCNREREFVYKFKVGSQCLELRVPLKFPVQENASHLHGRLMLLHSLPCFIEKDLKEALTQFIEEESLSDYDRDAEASLAAVKSGEVDLHQLASTWAKAYAEVRK

SEQ ID NO: 19770 - protein, 74 aa, Homo sapiens
LKGTMVRPVRHKKPVNYSQFDHSDSDDDFVSATVPLNKKSRTAPKELKQDKPKPNLNNLRKEEIPVQEKTPKKR

SEQ ID NO: 19771 - protein, 78 aa, Homo sapiens
LKGTMVRPVRHKKPVNYSQFDHSDSDDDFVSATVPLNKKSRTAPKELKQDKPKPNLNNLRKEEIPVQEKTPKKSHRKK

SEQ ID NO: 19772 - protein, 75 aa, Homo sapiens
LKGTMVRPVRHKKPVNYSQFDHSDSDDDFVSATVPLNKKSRTAPKELKQDKPKPNLNNLRKEEIPVQEKTPKKRH

SEQ ID NO: 19773 - protein, 356 aa, Homo sapiens
LKGTMVRPVRHKKPVNYSQFDHSDSDDDFVSATVPLNKKSRTAPKELKQDKPKPNLNNLRKEEIPVQEKTPKKRLPEGTFSIPASAVPCTKMALDDKLYQRDLEVALALSVKELPTVTTNVQNSQDKSIEKHGSSKIETMNKSPHISNCSVASDYLDLDKITVEDDVGGVQGKRKAASKAAAQQRKILLEGSDGDSANDTEPDFAPGEDSEDDSDFCESEDNDEDFSMRKSKVKEIKKKEVKVKSPVEKKEKKSKSKCNALVTSVDSAPAAVKSESQSLPKKVSLSSDTTRKPLEIRSPSAESKKPKWVPPAASGGSRSSSSPLVVVSVKSPNQSLRLGLSRLARVKPLHPNATST

SEQ ID NO: 19774 - protein, 339 aa, Homo sapiens
LKGTMVRPVRHKKPVNYSQFDHSDSDDDFVSATVPLNKKSRTAPKELKQDKPKPNLNNLRKEEIPVQEKTPKKRMALDDKLYQRDLEVALALSVKELPTVTTNVQNSQDKSIEKHGSSKIETMNKSPHISNCSVASDYLDLDKITVEDDVGGVQGKRKAASKAAAQQRKILLEGSDGDSANDTEPDFAPGEDSEDDSDFCESEDNDEDFSMRKSKVKEIKKKEVKVKSPVEKKEKKSKSKCNALVTSVDSAPAAVKSESQSLPKKVSLSSDTTRKPLEIRSPSAESKKPKWVPPAASGGSRSSSSPLVVVSVKSPNQSLRLGLSRLARVKPLHPNATST

SEQ ID NO: 19775 - protein, 305 aa, Homo sapiens
LIYTAIWMNLGNIILSERSQIYRLPEGTFSIPASAVPCTKMALDDKLYQRDLEVALALSVKELPTVTTNVQNSQDKSIEKHGSSKIETMNKSPHISNCSVASDYLDLDKITVEDDVGGVQGKRKAASKAAAQQRKILLEGSDGDSANDTEPDFAPGEDSEDDSDFCESEDNDEDFSMRKSKVKEIKKKEVKVKSPVEKKEKKSKSKCNALVTSVDSAPAAVKSESQSLPKKVSLSSDTTRKPLEIRSPSAESKKPKWVPPAASGGSRSSSSPLVVVSVKSPNQSLRLGLSRLARVKPLHPNATST

SEQ ID NO: 19776 - protein, 138 aa, Homo sapiens
LAVPSTSAAASLTGCLAAASGEEQTLTLSVRKMSAPAQPPAEGTEGTAPGGGPPGPPPNMTSNRRLQQTQAQVEEVVDIIRVNVDKVLERDQKLSELDDRADALQAGASQFESSAAKLKRKYWWKNCKLSQIEIYIFK

SEQ ID NO: 19777 - protein, 17 aa, Homo sapiens
LRMGRRWAVRPQLPGCA

SEQ ID NO: 19778 - protein, 22 aa, Homo sapiens
VGGAPTAAWVRPKMAVFALVLV

SEQ ID NO: 19779 - protein, 1356 aa, Homo sapiens
MLCKRYCPSNIFHHSLELFRLPFELRGPWLCCSTLILSTAFCMVSRHSQELPAILDDTTLSGSDRNAHLNALKMNCYALIRLLESFETMASQTNLVDLDLGGKGKKARTKAAHGFDWEEERQPILQLLTQLLQLDIRHLWNHSIIEEEFVSLVTGCCYRLLENPTINHQKNRPTREAITHLLGVALTRYNHMLSATVKIIQMLQHFEHLAPVLVAAVSLWATDYGMKSIVGEIVREIGQKCPQELSRDPSGTKGFAAFLTELAERVPAILMSSMCILLDHLDGENYMMRNAVLAAMAEMVLQVLSGDQLEAAARDTRDQFLDTLQAHGHDVNSFVRSRVLQLFTRIVQQKALPLTRFQAVVALAVGRLADKSVLVCKNAIQLLASFLANNPFSCKLSDADLAGPLQKETQKLQEMRAQRRTAAASAVLDPEEEWEAMLPELKSTLQQLLQLPQGEEEIPEQIANTETTEDVKGRIYQLLAKASYKKAIILTREATGHFQESEPFSHIDPEESEETRLLNILGLIFKGPAASTQEKNPRESTGNMVTGQTVCKNKPNMSDPEESRGNDELVKQEMLVQYLQDAYSFSRKITEAIGIISKMMYENTTTVVQEVIEFFVMVFQFGVPQALFGVRRMLPLIWSKEPGVREAVLNAYRQLYLNPKGDSARAKAQALIQNLSLLLVDASVGTIQCLEEILCEFVQKDELKPAVTQLLWERATEKVACCPLERCSSVMLLGMMARGKPEIVGSNLDTLVSIGLDEKFPQDYRLAQQVCHAIANISDRRKPSLGKRHPPFRLPQEHRLFERLRETVTKGFVHPDPLWIPFKEVAVTLIYQLAEGPEVICAQILQGCAKQALEKLEEKRTSQEDPKESPAMLPTFLLMNLLSLAGDVALQQLVHLEQAVSGELCRRRVLREEQEHKTKDPKEKNTSSETTMEEELGLVGATADDTEAELIRGICEMELLDGKQTLAAFVPLLLKVCNNPGLYSNPDLSAAASLALGKFCMISATFCDSQLRLLFTMLEKSPLPIVRSNLMVATGDLAIRFPNLVDPWTPHLYARLRDPAQQVRKTAGLVMTHLILKDMVKVKGQVSEMAVLLIDPEPQIAALAKNFFNELSHKGNAIYNLLPDIISRLSDPELGVEEEPFHTIMKQLLSYITKDKQTESLVEKLCQRFRTSRTERQQRDLAYCVSQLPLTERGLRKMLDNFDCFGDKLSDESIFSAFLSVVGKLRRGAKPEGKAIIDEFEQKLRACHTRGLDGIKELEIGQAGSQRAPSAKKPSTGSRYQPLASTASDNDFVTPEPRRTTRRHPNTQQRASKKKPKVVFSSDESSEEDLSAEMTEDETPKKTTPILRASARRHRS

SEQ ID NO: 19780 - protein, 69 aa, Homo sapiens
LVTGCCYRLLENPTINHQKNRPTREAITHLLGVALTRYNHMLSKLPVALPRLFCIAHNFSCLMLPQVLQ

SEQ ID NO: 19781 - protein, 132 aa, Homo sapiens
LTRFQAVVALAVGRLADKSVLVCKNAIQLLASFLANNPFSCKLSDADLAGPLQKETQKLQEMRAQRRTAAASAVLDPEEEWEAMLPELKSTLQQLLQLPQGEEEIPEQIANTETTEDVKGRIYQLLAKASYK

SEQ ID NO: 19782 - protein, 51 aa, Homo sapiens
VKQEMLVQYLQDAYSFSRKITEAIGIISKMMYENTTTGPVWGAPYAASHLV

SEQ ID NO: 19783 - protein, 133 aa, Homo sapiens
VLGCSPEVSVPMTRNSIPSLRDPAQQVRKTAGLVMTHLILKDMVKVKGQVSEMAVLLIDPEPQIAALAKNFFNELSHKGNAIYNLLPDIISRLSDPELGVEEEPFHTIMKYCSPGPGAHFPHSTGLGIRHTCI

SEQ ID NO: 19784 - protein, 79 aa, Homo sapiens
MGKVKVGVNGFGRIGRLVTRAAFNSGKVDIVAINDPFIDLNYMVYMFQYDSTHGKFHGTVKAENGKLVINGNPITIFQE

SEQ ID NO: 19785 - protein, 571 aa, Homo sapiens
LHLPAEGAAMNPLFGPNLFLLQQEQQGLAGPLGDSLGGDHFAGGGDLPPAPLSPAGPAAYSPPGPGPAPPAAMALRNDLGSNINVLKTLNLRFRCFLAKVHELERRNRLLEKQLQQALEEGKQGRRGLGRRDQAVQTGFVSPIRPLGLQLGARPAAVCSPSARVLGSPARSPAGPLAPSAASLSSSSTSTSTTYSSSARFMPGTIWSFSHARRLGPGLEPTLVQGPGLSWVHPDGVGVQIDTITPEIRALYNVLAKVKRERDEYKRRWEEEYTVRIQLQDRVNELQEEAQEADACQEELALKVEQLKAELVVFKGLMSNNLSELDTKIQEKAMKVDMDICRRIDITAKLCDVAQQRNCEDMIQMFQKKLVPSMGGRKRERKAAVEEDTSLSESEGPRQPDGDEEESTALSINEEMQRMLNQLREYDFEDDCDSLTWEETEETLLLWEDFSGYAMAAAEAQGEQEDSLEKVIKDTESLFKTREKEYQETIDQIELELATAKNDMNRHLHEYMEMCSMKRGLDVQMETCRRLITQSGDRKSPAFTAVPLSDPPPPPSEAEDSDRDVSSDSSMR

SEQ ID NO: 19786 - protein, 568 aa, Homo sapiens
LHLPAEGAAMNPLFGPNLFLLQQEQQGLAGPLGDSLGGDHFAGGGDLPPAPLSPAGPAAYSPPGPGPAPPAAMALRNDLGSNINVLKTLNLRFRCFLAKVHELERRNRLLEKQLQQALEEGKQGRRGLGRRDQAVQTGFVSPIRPLGLQLGARPAAVCSPSARVLGSPARSPAGPLAPSAASLSSSSTSTSTTYSSSARFMPGTIWSFSHARRLGPGLEPTLVQGPGLSWVHPDGVGVQIDTITPEIRALYNVLAKVKRERDEYKRRWEEEYTVRIQLQDRVNELQEEAQEADACQEELALKVEQLKAELVVFKGLMSNNLSELDTKIQEKAMKVDMDICRRIDITAKLCDVAQQRNCEDMIQMFQVPSMGGRKRERKAAVEEDTSLSESEGPRQPDGDEEESTALSINEEMQRMLNQLREYDFEDDCDSLTWEETEETLLLWEDFSGYAMAAAEAQGEQEDSLEKVIKDTESLFKTREKEYQETIDQIELELATAKNDMNRHLHEYMEMCSMKRGLDVQMETCRRLITQSGDRKSPAFTAVPLSDPPPPPSEAEDSDRDVSSDSSMR

SEQ ID NO: 19787 - protein, 580 aa, Homo sapiens
LHLPAEGAAMNPLFGPNLFLLQQEQQGLAGPLGDSLGGDHFAGGGDLPPAPLSPAGPAAYSPPGPGPAPPAAMALRNDLGSNINVLKTLNLRFRCFLAKVHELERRNRLLEKQLQQALEEGKQGRRGLGRRDQAVQTGFVSPIRPLGLQLGARPAAVCSPSARVLGSPARSPAGPLAPSAASLSSSSTSTSTTYSSSARFMPGTIWSFSHARRLGPGLEPTLVQGPGLSWVHPDGVGVQIDTITPEIRALYNVLAKVKRERDEYKRRWEEEYTVRIQLQDRVNELQEEAQEADACQEELALKVEQLKAELVVFKGLMSNNLSELDTKIQEKAMKVDMDICRRIDITAKLCDVAQQRNCEDMIQMFQKKLSLHLSPIKVPSMGGRKRERKAAVEEDTSLSESEGPRQPDGDEEESTALSINEEMQRMLNQLREYDFEDDCDSLTWEETEETLLLWEDFSGYAMAAAEAQGEQQEDSLEKVIKDTESLFKTREKEYQETIDQIELELATAKNDMNRHLHEYMEMCSMKRGLDVQMETCRRLITQSGDRKSPAFTAVPLSDPPPPPSEAEDSDRDVSSDSSMR

SEQ ID NO: 19788 - protein, 572 aa, Homo sapiens
LHLPAEGAAMNPLFGPNLFLLQQEQQGLAGPLGDSLGGDHFAGGGDLPPAPLSPAGPAAYSPPGPGPAPPAAMALRNDLGSNINVLKTLNLRFRCFLAKVHELERRNRLLEKQLQQALEEGKQGRRGLGRRDQAVQTGFVSPIRPLGLQLGARPAAVCSPSARVLGSPARSPAGPLAPSAASLSSSSTSTSTTYSSSARFMPGTIWSFSHARRLGPGLEPTLVQGPGLSWVHPDGVGVQIDTITPEIRALYNVLAKVKRERDEYKRRWEEEYTVRIQLQDRVNELQEEAQEADACQEELALKVEQLKAELVVFKGLMSNNLSELDTKIQEKAMKVDMDICRRIDITAKLCDVAQQRNCEDMIQMFQKKLVPSMGGRKRERKAAVEEDTSLSESEGPRQPDGDEEESTALSINEEMQRMLNQLREYDFEDDCDSLTWEETEETLLLWEDFSGYAMAAAEAQGEQQEDSLEKVIKDTESLFKTREKEYQETIDQIELELATAKNDMNRHLHEYMEMCSMKRGLDVQMETCRRLITQSGDRKSPAFTAVPLSDPPPPPSEAEDSDRDVSSDSSMR

SEQ ID NO: 19789 - protein, 273 aa, Homo sapiens
LHLPAEGAAMNPLFGPNLFLLQQEQQGLAGPLGDSLGGDHFAGGGDLPPAPLSPAGPAAYSPPGPGPAPPAAMALRNDLGSNINVLKTLNLRFRCFLAKVHELERRNRLLEKQLQQALEEGKQGRRGLGRRDQAVQTGFVSPIRPLGLQLGARPAAVCSPSARVLGSPARSPAGPLAPSAASLSSSSTSTSTTYSSSARFMPGTIWSFSHARRLGPGLEPTLVQGPGLSWVHPDGVGVQIDTITPEIRALYNVLAKVKRERDEYKRRCFYRVK

SEQ ID NO: 19790 - protein, 833 aa, Homo sapiens
LVGLEEIGGRRVAALTWSGTWGEGTMGRKLDPTKEKRGPGRKARKQKGAETELVRFLPAVSDENSKRLSSRARKRAAKRRLGSVEAPKTNKSPEAKPLPGKLPKGAVQTAGKKGPQSLFNAPRGKKRPAPGSDEEEEEEDSEEDGMVNHGDLWGSEDDADTVDDYGADSNSEDEEEGEALLPIERAARKQKAREAAAGIQWSEEETEDEEEEKEVTPESGPPKVEEADGGLQINVDEEPFVLPPAGEMEQDAQAPDLQRVHKRIQDIVGILRDFGAQREEGRSRSEYLNRLKKDLAIYYSYGDFLLGKLMDLFPLSELVEFLEANEVPRPVTLRTNTLKTRRRDLAQALINRGVNLDPLGKWSKTGLVVYDSSVPIGATPEYLAGHYMLQGASSMLPVMALAPQEHERILDMCCAPGGKTSYMAQLMKNTGVILANDANAERLKSVVGNLHRLGVTNTIISHYDGRQFPKVVGGFDRVLLDAPCSGTGVISKDPAVKTNKDEKDILRCAHLQKELLLSAIDSVNATSKTGGYLVYCTCSITVEENEWVVDYALKKRNVRLVPTGLDFGQEGFTRFRERRFHPSLRSTRRFYPHTHNMDGFFIAKFKKFSNSIPQSQTGNSETATPTNVDLPQVIPKSENSSQPAKKAKGAAKTKQQLQKQQHPKKASFQKLNGISKGADSELSTVPSVTKTQASSSFQDSSQPAGKAEGIREPKVTGKLKQRSPKLQSSKKVAFLRQNAPPKGTDTQTPAVLSPSKTQATLKPKDHHQPLGRAKGVEKQQLPEQPFEKAAFQKQNDTPKGPQPPTVSPIRSSRPPPAKRKKSQSRGNSQLLLS

SEQ ID NO: 19791 - protein, 90 aa, Homo sapiens
VVGGFDRVLLDAPCSGTGVISKDPAVKTNKDEKDILRCAHLQKELLLSAIDSVNATSKTGGYLVYCTCSITVRPLPWQSRGGWAGGLFAP

SEQ ID NO: 19792 - protein, 171 aa, Homo sapiens
LKTRRRDLAQALINRGVNLDPLGKWSKTGLVVYDSSVPIGATPEYLAGHYMLQGASSMLPVMALAPQEHERILDMCCAPGGKTSYMAQLMKNTGVILANDANAERLKSVVGNLHRLGVTNTIISHYDGRQFPKVVGGFDRVLLDAPCSGTGVISKDPAVKTNKVRSQVVGP

SEQ ID NO: 19793 - protein, 61 aa, Homo sapiens
VTPESGPPKVEEADGGLQINVDEEPFVLPPAGEMEQDILAGQSEELGGRWLGEGFPGLRTS

SEQ ID NO: 19794 - protein, 86 aa, Homo sapiens
LACRSPEYGMPSVTFGSVHPSDVLDMPVDPNEPTYCLCHQVSYGEMIGCDNPDCSIEWFHFACVGLTTKPRGKWFCPRCSQERKKK

SEQ ID NO: 19795 - protein, 165 aa, Homo sapiens
VGRGLKGRRSQLFIWWEVWHQVGKGERRGLNPSFCLPAFWLSPSSLEGRTQKEKKAARARSKGKNSDEEAPKTAQKKLKLVRTSPEYGMPSVTFGSVHPSDVLDMPVDPNEPTYCLCHQVSYGEMIGCDNPDCSIEWFHFACVGLTTKPRGKWFCPRCSQERKKK

SEQ ID NO: 19796 - protein, 215 aa, Homo sapiens
LPNDLKAEIDKLATEYMSSARSLSSEEKLALLKQIQEAYGKCKEFGDDKVQLAMQTYEMVDKHIRRLDTDLARFEADLKEKQIESSDYDSSSSKGKKSRTQKEKKAARARSKGKNSDEEAPKTAQKKLKLVRTSPEYGMPSVTFGSVHPSDVLDMPVDPNEPTYCLCHQVSYGEMIGCDNPDCSIEWFHFACVGLTTKPRGKWFCPRCSQERKKK

SEQ ID NO: 19797 - protein, 79 aa, Homo sapiens
VDKHIRRLDTDLARFEADLKEKQIESSDYDSSSSKGKKSRTQKEKKAARARSKGKNSDEEAPKTAQKKLKLVRTSPMER

SEQ ID NO: 19798 - protein, 80 aa, Homo sapiens
VDKHIRRLDTDLARFEADLKEKQIESSDYDSSSSKGKKKGRTQKEKKAARARSKGKNSDEEAPKTAQKKLKLVRTSPMER

SEQ ID NO: 19799 - protein, 103 aa, Homo sapiens
LCLGRLEGGLGESQDQMGRAGALRKNRGTQCPSSSASLHPSPPSALRLSLHLFSQWRPRRFSALEQGIHPPQAQSKIEELEQEPEPEPEPEPEPEPEPEPEQL

SEQ ID NO: 19800 - protein, 88 aa, Homo sapiens
LGSWLQSSKSSHRYACLRSSGQERRKPRGPSKLNDRADSRRSLWDQGNFPLIIKNLKIEDSDTYICEVEDQKEEVQLLVFGCEWGRWG

SEQ ID NO: 19801 - protein, 160 aa, Homo sapiens
LGSWLQSSKSSHRYACLRSSGQERRKPRGPSKLNDRADSRRSLWDQGNFPLIIKNLKIEDSDTYICEVEDQKEEVQLLVFGLTANSDTHLLQGQSLTLTLESPPGSSPSVQCRSPRGKNIQGGKTLSVSQLELQDSGTWTCTVLQNQKKVEFKIDIVVLG

SEQ ID NO: 19802 - protein, 63 aa, Homo sapiens
LLPGPSKLNDRADSRRSLWDQGNFPLIIKNLKIEDSDTYICEVEDQKEEVQLLVFGCEWGRWG

SEQ ID NO: 19803 - protein, 47 aa, Homo sapiens
LQPPQVSAPRFLPADQMNVADPQPLASCSPPLQFAIVSPGLGPGFTG

SEQ ID NO: 19804 - protein, 100 aa, Homo sapiens
LLSQPREGKEGARPQPGSSVRAFPPLEIRCPPTIGADLSILLCGSPVPFSPNRIRPRGSWLGFVEKKDYPDQSFLISAPACTLPYSPNPLPHHPELRSTV

SEQ ID NO: 19805 - protein, 71 aa, Homo sapiens
LETRPRSSQSPRARVTPRPVSHGGDGATASGSGAAQEADCSNSRALPLGPQKTAGDMRSVAQGEGAGFALE

SEQ ID NO: 19806 - protein, 39 aa, Homo sapiens
LSAMGEMEQLRQEAEQLKKQIADARKACADVTLAERDLL

SEQ ID NO: 19807 - protein, 15 aa, Homo sapiens
LKAHAPATPTSPLLP

SEQ ID NO: 19808 - protein, 253 aa, Homo sapiens
LSHELLCIQRWNWGPAFPPRPGLALAPTLQLLVEMGSAKSVPVTPARPPPHNKHLARVADPRSPSAGILRTPIQVESSPQPGLPAGEQLEGLKHAQDSDPRSPTLGIARTPMKTSSGDPPSPLVKQLSEVFETEDSKSNLPPEPVLPPEAPLSSELDLPLGTQLSVEEQMPPWNQTEFPSKQVFSKEEARQPTETPVASQSSDKPSRDPETPRSSASSVPDFEEAVPGTCGHSHPVSCDSQAAHPVIVAREDA

SEQ ID NO: 19809 - protein, 34 aa, Homo sapiens
VEGSEHTQQPPARPHLIQVFSSIFRVPFPLSFLL

SEQ ID NO: 19810 - protein, 98 aa, Homo sapiens
LGPCFNALPTPGSMRNRWKPNSSKVLGRSPLTILQDDNSPGTLTLRQGKRPSPLSENVSELKEGAILGTGRLLKTGGRAWEQGQDHDKENQHFPLVES

SEQ ID NO: 19811 - protein, 71 aa, Homo sapiens
LWPARAPTSPQGTLRLPDLQGKRPSPLSENVSELKEGAILGTGRLLKTGGRAWEQGQDHDKENQHFPLVES

SEQ ID NO: 19812 - protein, 126 aa, Homo sapiens
LPPEAPLSSELDLPLGTQLSVEEQMPPWNQTEFPSKQVFSKEEARQPTETPVASQSSDKPSRDPETPRSSGTESKGKRPSPLSENVSELKEGAILGTGRLLKTGGRAWEQGQDHDKENQHFPLVES

SEQ ID NO: 19813 - protein, 293 aa, Homo sapiens
LSHFSQAFPPRPGLALAPTLQLLVEMGSAKSVPVTPARPPPHNKHLARVADPRSPSAGILRTPIQVESSPQPGLPAGEQLEGLKHAQDSDPRSPTLGIARTPMKTSSGDPPSPLVKQLSEVFETEDSKSNLPPEPVLPPEAPLSSELDLPLGTQLSVEEQMPPWNQTEFPSKQVFSKEEARQPTETPVASQSSDKPSRDPETPRSSGSMRNRWKPNSSKVLGRSPLTILQDDNSPGTLTLRQGKRPSPLSENVSELKEGAILGTGRLLKTGGRAWEQGQDHDKENQHFPLVES

SEQ ID NO: 19814 - protein, 272 aa, Homo sapiens
LCIQRWNWGPAFPPRPGLALAPTLQLLVEMGSAKSVPVTPARPPPHNKHLARVADPRSPSAGILRTPIQVESSPQPGLPAGEQLEGLKHAQDSDPRSPTLGIARTPMKTSSGEPVLPPEAPLSSELDLPLGTQLSVEEQMPPWNQTEFPSKQVFSKEEARQPTETPVASQSSDKPSRDPETPRSSGSMRNRWKPNSSKVLGRSPLTILQDDNSPGTLTLRQGKRPSPLSENVSELKEGAILGTGRLLKTGGRAWEQGQDHDKENQHFPLVES

SEQ ID NO: 19815 - protein, 302 aa, Homo sapiens
LSHELLCIQRWNWGPAFPPRPGLALAPTLQLLVEMGSAKSVPVTPARPPPHNKHLARVADPRSPSAGILRTPIQVESSPQPGLPAGEQLEGLKHAQDSDPRSPTLGIARTPMKTSSGDPPSPLVKQLSEVFETEDSKSNLPPEPVLPPEAPLSSELDLPLGTQLSVEEQMPPWNQTEFPSKQVFSKEEARQPTETPVASQSSDKPSRDPETPRSSGSMRNRWKPNSSKVLGRSPLTILQDDNSPGTLTLRQGKRPSPLSENVSELKEGAILGTGRLLKTGGRAWEQGQDHDKENQHFPLVES

SEQ ID NO: 19816 - protein, 194 aa, Homo sapiens
LALAPTLQLLVEMGSAKSVPVTPARPPPHNKHLARVADPRSPSAGILRTPIQVESSPQPGLPAGEQLEGLKHAQDSDPRSPTLGIARTPMKTSSGDPPSPLVKQLSEVFETEDSKSNLPPEPVLPPEAPLSSELDLPLGTQLSVEEQMPPWNQTEFPSKQVFSKEEARQPTETPVASQSSDKPSRDPETPRSSG

SEQ ID NO: 19817 - protein, 157 aa, Homo sapiens
LSHELLCIQRWNWGPVESSPQPGLPAGEQLEGLKHAQDSDPRSPTLGIARTPMKTSSGDPPSPLVKQLSEVFETEDSKSNLPPEPVLPPEAPLSSELDLPLGTQLSVEEQMPPWNQTEFPSKQVFSKEEARQPTETPVASQSSDKPSRDPETPRSSG

SEQ ID NO: 19818 - protein, 113 aa, Homo sapiens
MKTSSGDPPSPLVKQLSEVFETEDSKSNLPPEPVLPPEAPLSSELDLPLGTQLSVEEQMPPWNQTEFPSKQVFSKEEARQPTETPVASQSSDKPSRDPETPRSSDGNQTAARY

SEQ ID NO: 19819 - protein, 155 aa, Homo sapiens
VESSPQPGLPAGEQLEGLKHAQDSDPRSPTLGIARTPMKTSSGDPPSPLVKQLSEVFETEDSKSNLPPEPVLPPEAPLSSELDLPLGTQLSVEEQMPPWNQTEFPSKQVFSKEEARQPTETPVASQSSDKPSRDPETPRSSGTESKARCREDKLG

SEQ ID NO: 19820 - protein, 135 aa, Homo sapiens
LSHELLCIQRWNWGPAFPPRPGLALAPTLQLLVEMGSAKSVPVTPARPPPHNKHLARVADPRSPSAGILRTPIQVESSPQPGLPAGEQLEGLKHAQDSDPRSPTLGIARTPMKTSSGGKRWAQGMLMKLSSIILG

SEQ ID NO: 19821 - protein, 82 aa, Homo sapiens
LLCIQRWNWGPAFPPRPGLALAPTLQLLVEMGSAKSVPVTPARPPPHNKHLARVADPRSPSAGILRTPIQVLWASVGKAENV

SEQ ID NO: 19822 - protein, 87 aa, Homo sapiens
LEQGSVVRTGPGIETCPCVYLNPPHLGEALSKNPGYIKLRKIRAAQNISKTIATSQNRIYLTADNLVLNLQDESFTRGSDSLIKGKK

SEQ ID NO: 19823 - protein, 307 aa, Homo sapiens
VPPASRSDMAQNLKDLAGRLPAGPRGMGTALKLLLGAGAVAYGVRESVFTVEGGHRAIFFNRIGGVQQDTILAEGLHFRIPWFQYPIIYDIRARPRKISSPTGSKDLQMVNISLRVLSRPNAQELPSMYQRLGLDYEERVLPSIVNEVLKSVVAKFNASQLITQRAQVSLLIRRELTERAKDFSLILDDVAITELSFSREYTAAVEAKQVAQQEAQRAQFLVEKAKQEQRQKIVQAEGEAEAAKMLGEALSKNPGYIKLRKIRAAQNISKTIATSQNRIYLTADNLVLNLQDESFTRGSDSLIKGKK

SEQ ID NO: 19824 - protein, 306 aa, Homo sapiens
VPPASRSDMAQNLKDLAGRLPAGPRGMGTALKLLLGAGAVAYGVRESVFTVEGGHRAIFFNRIGGVQQDTILAEGLHFRIPWFQYPIIYDIRARPRKISSPTGSKDLQMVNISLRVLSRPNAQELPSMYQRLGLDYEERVLPSIVNEVLKSVVAKFNASQLITQRAQVSLLIRRELTERAKDFSLILDDVAITELSFSREYTAAVEAKQVAQQEAQRAQFLVEKAKQEQRQKIVQAEGEAEAAKMLGEALSKNPGYIKLRKIRAAQNISKTIATSQNRIYLTADNLVLNLQDESFTRSDSLIKGKK

SEQ ID NO: 19825 - protein, 269 aa, Homo sapiens
VPPASRSDMAQNLKDLAGRLPAGPRGMGTALKLLLGAGAVAYGVRESVFTVEGGHRAIFFNRIGGVQQDTILAEGLHFRIPWFQYPIIYDIRARPRKISSPTGSKDLQMVNISLRVLSRPNAQELPSMYQRLGLDYEERVLPSIVNEVLKSVVAKFNASQLITQRAQVSLLIRRELTERAKDFSLILDDVAITELSFSREYTAAVEAKQVALSKNPGYIKLRKIRAAQNISKTIATSQNRIYLTADNLVLNLQDESFTRGSDSLIKGKK

SEQ ID NO: 19826 - protein, 275 aa, Homo sapiens
VPPASRSDMAQNLKDLAGRLPAGPRGMGTALKLLLGAGAVAYGVRESVFTVEGGHRAIFFNRIGGVQQDTILAEGLHFRIPWFQYPIIYDIRARPRKISSPTGSKDLQMVNISLRVLSRPNAQELPSMYQRLGLDYEERVLPSIVNEVLKSVVAKFNASQLITQRAQVSLLIRRELTERAKDFSLILDDVAITELSFSREYTAAVEAKQVAQQEAQRAQFLVEKAKQEQRQKIVQAEGEAEAAKMLGEALSKNPGYIKLRKIRAAQNISKTPHQG

SEQ ID NO: 19827 - protein, 221 aa, Homo sapiens
VPPASRSDMAQNLKDLAGRLPAGPRGMGTALKLLLGAGAVAYGVRESVFTVEGGHRAIFFNRIGGVQQDTILAEGLHFRIPWFQYPIIYDIRARPRKISSPTGSKDLQMVNISLRVLSRPNAQELPSMYQRLGLDYEERVLPSIVNEVLKSVVAKFNASQLITQRAQVSLLIRRELTERAKDFSLILDDVAITELSFSREYTAAVEAKQVGESQEPWGEGF

SEQ ID NO: 19828 - protein, 120 aa, Homo sapiens
VPPASRSDMAQNLKDLAGRLPAGPRGMGTALKLLLGAGAVAYGVRESVFTVEGGHRAIFFNRIGGVQQDTILAEGLHFRIPWFQYPIIYDIRARPRKISSPTDGEYLPASVVSTQCSGAS

SEQ ID NO: 19829 - protein, 79 aa, Homo sapiens
VPPASRSDMAQNLKDLAGRLPAGPRGMGTALKLLLGAGAVAYGVRESVFTVEGGHRAIFFNRIGGVQQDTILAEGLHFR

SEQ ID NO: 19830 - protein, 78 aa, Homo sapiens
VPPASRSDMAQNLKDLAGRLPAGPRGMGTALKLLLGAGAVAYGVRESVFTGEQPPPARRTLPVPPPNPLPCPRAPPRA

SEQ ID NO: 19831 - protein, 55 aa, Homo sapiens
VLEGASLETVKVGKTYELLNCDKHKSILLKNGRDPGEARPDITHQVTPGTVLTTL

SEQ ID NO: 19832 - protein, 23 aa, Homo sapiens
LTVVEPVLKPETVDVTSFDPGLS

SEQ ID NO: 19833 - protein, 309 aa, Homo sapiens
LPGALLSGRGSSFNSEPISLPLLIYATGALTCATPGTWKDRQDGEEVLQCMPVCGRPVTPIAQNQTTLGSSRAKLGNFPWQAFTSIHGRGGGALLGDRWILTAAHTIYPKDSVSLRKNQSVNVFLGHTAIDEMLKLGNHPVHRVVVHPDYRQNESHNFSGDIALLELQHSIPLGPNVLPVCLPDNETLYRSGLLGYVSGFGMEMGWLTTELKYSRLPVAPREACNAWLQKRQRPEVFSDNMFCVGDETQRHSVCQGDSGSVYVVWDNHAHHWVATGIVSWGIGCGEGYDFYTKVLSYVDWIKGVMNGKN

SEQ ID NO: 19834 - protein, 144 aa, Homo sapiens
VEKVMVLGCELSGSTRVVVGVEALLTGASSPLPGVGPANKHKPWIEAEYQGIVMENDNTVLLNPPLFALDKDAPLRYAGEICGFRLHGSGVPFEAVILDKATGEGLIRAKEPVDCEAQKEHTFTIQAYDCGEGPDGANTKKSHK

SEQ ID NO: 19835 - protein, 223 aa, Homo sapiens
LQYSGERLYKFTVTAYDCGKKRAADDAEVEIQVKPTCKPSWQGWNKRIEYAPGAGSLALFPGIRLETCDEPLWNIQATIELQTSHVAKGCDRDNYSERALRKLCGAATGEVDLLPMPGPNANWTAGLSVHYSQDSSLIYWFNGTQAVQVPLGGPSGLGSGPQDSLSDHFTLSFWMKHGVTPNKGKKEEETIVCNTVQNGEPPLQALARGGNWLLVPPLSLPSV

SEQ ID NO: 19836 - protein, 162 aa, Homo sapiens
LQTSHVAKGCDRDNYSERALRKLCGAATGEVDLLPMPGPNANWTAGLSVHYSQDSSLIYWFNGTQAVQVPLGGPSGLGSGPQDSLSDHFTLSFWMKHGVTPNKGKKEEETIVCNTVQNEDGFSHYSLTVHGCRIAFLYWPLLESARPVKFLWKLEQADHKDQ

SEQ ID NO: 19837 - protein, 95 aa, Homo sapiens
VESITVYEEILRQARYRLRHGAALYTRKFRLSCSEMNGRYSSNEFIVEVNVLHSMNRVAHPSHVLSSQQFLHRGHQPPPEMAGHSLASSHRNSST

SEQ ID NO: 19838 - protein, 94 aa, Homo sapiens
VQRRGRDVRPGFLNDTSPLYFLFPSLLQVFLSEAFCWIGLRNNSGWRWEDGSPLNFSRISSNSFVQTCGAINKNGLQASSCEVPLHWVCKKVRL

SEQ ID NO: 19839 - protein, 22 aa, Homo sapiens
LFLHTSLMPPSSVCHGPTSNIC

SEQ ID NO: 19840 - protein, 38 aa, Homo sapiens
VSTLSDQAMKRKICAMPPHMSRDSDLPLSSEFAELWGT

SEQ ID NO: 19841 - protein, 46 aa, Homo sapiens
LLFFPKKNGMIMYLFFYFLSCRQVLFDGTYFFAFIIFYTVSYREKT

SEQ ID NO: 19842 - protein, 8 aa, Homo sapiens
VDLLFIAE

SEQ ID NO: 19843 - protein, 7 aa, Homo sapiens
LRLTRES

SEQ ID NO: 19844 - protein, 18 aa, Homo sapiens
MLYLIKQNIPVYTHIHSH

SEQ ID NO: 19845 - protein, 45 aa, Homo sapiens
LCFEICRPDRFFIKGPAKENSCAAIKESKIFSETCSSVFKWICQY

SEQ ID NO: 19846 - protein, 78 aa, Homo sapiens
LQTRQAFIQKNLRQLNYVWIGLNFTSLKMTWTWVDGSPIDSKIFFIKGPAKENSCAAIKESKIFSETCSSVFKWICQY

SEQ ID NO: 19847 - protein, 50 aa, Homo sapiens
MKSWSDSYVYCLERKSHLLIIHDQLEMSLVHILGFYTEKPKTIKLRMDWA

SEQ ID NO: 19848 - protein, 171 aa, Homo sapiens
LRERDRVSGEGGRPRAGISEALRCIMKFQYKEDHPFEYRKKEGEKIRKKYPDRVPVIVEKAPKARVPDLDKRKYLVPSDLTVGQFYFLIRKRIHLRPEDALFFFVNNTIPPTSATMGQLYEVMVLVAQYWMPSSAVWHPLALVLDALITHLRSGAEGVIYPDPLTYGSVRL

SEQ ID NO: 19849 - protein, 142 aa, Homo sapiens
LRERDRVSGEGGRPRAGISEALRCIMKFQYKEDHPFEYRKKEGEKIRKKYPDRVPVIVEKAPKARVPDLDKRKYLVPSDLTVGQFYFLIRKRIHLRPEDALFFFVNNTIPPTSATMGQLYEDNHEEDYFLYVAYSDESVYGK

SEQ ID NO: 19850 - protein, 100 aa, Homo sapiens
LAAFKNAGTLCCAVIVEKAPKARVPDLDKRKYLVPSDLTVGQFYFLIRKRIHLRPEDALFFFVNNTIPPTSATMGQLYEDNHEEDYFLYVAYSDESVYGK

SEQ ID NO: 19851 - protein, 96 aa, Homo sapiens
LSEGLWSSRVIVEKAPKARVPDLDKRKYLVPSDLTVGQFYFLIRKRIHLRPEDALFFFVNNTIPPTSATMGQLYEDNHEEDYFLYVAYSDESVYGK

SEQ ID NO: 19852 - protein, 30 aa, Homo sapiens
LAIFLIKVLEMARICPELLASSDTQRWSTA

SEQ ID NO: 19853 - protein, 85 aa, Homo sapiens
MAAFTKLSIEPAFTPGPNIELQKDSDCCSCQEKWVGYRCNCYFISSEQKTWNESRHLCASQKSSLLQLQNTDELACAESDFLHFL

SEQ ID NO: 19854 - protein, 115 aa, Homo sapiens
LGTGATVTSFPVNRKLGTKVGISVLLRNPACFSFKTQMNWHDFMSSSQQFYWIGLSYSEEHTAWLWENGSALSQYLFPSFETFNTKNCIAYNPNGNALDESCEDKNRYICKQQLI

SEQ ID NO: 19855 - protein, 125 aa, Homo sapiens [sequence omitted]

SEQ ID NO: 19856 - protein, 22 aa, Homo sapiens
LPTETKGNKQKQDKMTKDCQIS

SEQ ID NO: 19857 - protein, 141 aa, Homo sapiens [sequence omitted]

SEQ ID NO: 19858 - protein, 29 aa, Homo sapiens
MLLRIIKGMTRHITAKVYCHLQRSSLLRS

SEQ ID NO: 19859 - protein, 82 aa, Homo sapiens
MLTLCRSNLSLLLKEALFRKAKELEIVIGDEHISFTTSKIGSLIDVNQSKDPEGLRVFYYLVQDLKCLVFSLIGLHFKIKPI

SEQ ID NO: 19860 - protein, 126 aa, Homo sapiens
LAAFSAGFPGKLRYANNSNYKNDVMIRKEAYVHKSVMEELKRIIDDSEITKEDDALWPPPDRVGRQELEIVIGDEHISFTTSKIGSLIDVNQSKDPEGLRVFYYLVQDLKCLVFSLIGLHFKIKPI

SEQ ID NO: 19861 - protein, 188 aa, Homo sapiens
LFSFQTAIKKNNPRKYLRSVGDGETVEFDVVEGEKGAEAANVTGPDGVPVEGSRYAADRRRYRRGYYGRRRGPPRNAGEIGEMKDGVPEGAQLQGPVHRNPTYRPRYRSRGPPRPRPAPAVGEAEDKENQQATSGPNQPSVRRGYRRPYNYRRRPRPPNAPSQDGKEAKAGEAPTENPAPPTQQSSAE

SEQ ID NO: 19862 - protein, 156 aa, Homo sapiens
LRECLGKYAGEEEEEGSGSSEGFDPPATDRQFSGARNQLRRPQYRPQYRQRRFPPYHVGQTFDRRSRVLPHPNRIQAGEIGEMKDGVPEGAQLQGPVHRNPTYRPRYRSSLDVCSWTAFQPAQQSETLSENKEIFYSWGLKQGTSSPTTCPSSWRG

SEQ ID NO: 19863 - protein, 88 aa, Homo sapiens
LRRPQYRPQYRQRRFPPYHVGQTFDRRSRVLPHPNRIQAGEIGEMKDGVPEGAQLQGPVHRNPTYRPRYRRYVAFSTNGQLKDLCAQW

SEQ ID NO: 19864 - protein, 218 aa, Homo sapiens
LFGFVFLRVRERRSCRPGRKMSNVRVSNGSPSLERMDARQAEHPKPSACRNLFGPVDHEELTRDLEKHCRDMEEASQRKWNFDFQNHKPLEGKYEWQEVEKGSLPEFYYRPPRPPKGACKVPAQESQDVSGSRPAAPLIGAPANSEDTHLVDPKTDPSDSQTGLAEQCAGIRKRPATDDSSTQNKRANRTEENVSDGSPNAGSVEQTPKKPGLRRRQT

SEQ ID NO: 19865 - protein, 53 aa, Homo sapiens
MFPCLSDTSLLDEARKIYMKILKIHIADFMEWTSCISTEKQQHNNTKILGTLK

SEQ ID NO: 19866 - protein, 43 aa, Homo sapiens [sequence omitted]

SEQ ID NO: 19867 - protein, 69 aa, Homo sapiens
MAAPEEHDSPTEASQPIVEEEETKTFKDLGVTDVLCEACDQLGWTKPTKIQIEAIPLALQGRLYDFVQI

SEQ ID NO: 19868 - protein, 38 aa, Homo sapiens
VPDPQGLLERDTLKTGENLWMRQDCFSVDSMEPGGAHN

SEQ ID NO: 19869 - protein, 41 aa, Homo sapiens
VPTGGLWPVSHCPSLEQIFSSVEFSDKMGGGKRVCKVMLVG

SEQ ID NO: 19870 - protein, 43 aa, Homo sapiens [sequence omitted]

SEQ ID NO: 19871 - protein, 46 aa, Homo sapiens [sequence omitted]

SEQ ID NO: 19872 - protein, 20 aa, Homo sapiens
LIKTHINQNQTTGPWVKGAI

SEQ ID NO: 19873 - protein, 16 aa, Homo sapiens
MVDELSAAAGAPLYRT

SEQ ID NO: 19874 - protein, 12 aa, Homo sapiens
MISLSHDYRRLS

SEQ ID NO: 19875 - protein, 32 aa, Homo sapiens
MKQTCVPSSSSFQSSLEINLIPRENGGSVGCR

SEQ ID NO: 19876 - protein, 12 aa, Homo sapiens
MAVAEGLTERPS

SEQ ID NO: 19877 - protein, 58 aa, Homo sapiens
MHPPLSPPLPPGRILSGVFSTLSLLPVHSWVPLQHCHISLLMHLFPPCHSTWSLEQEA

SEQ ID NO: 19878 - protein, 1278 aa, Homo sapiens
LEDPGRRGGKGAGAGGLERQHALARSNLGAQGLRLQPQFAIVSRRRGSPLAQPCPRVPVRAAMGHLPTGIHGARRLLPLLWLFVLFKNATAFHVTVQDDNNIVVSLEASDVISPASVYVVKITGESKNYFFEFEEFNSTLPPPVIFKASYHGLYYIITLVVVNGNVVTKPSRSITVLTKPLPVTSVSIYDYKPSPETGVLFEIHYPEKYNVFTRVNISYWEGKDFRTMLYKDFFKGKTVFNHWLPGMCYSNITFQLVSEATFNKSTLVEYSGVSHEPKQHRTAPYPPQNISVRIVNLNKNNWEEQSGNFPEESFMRSQDTIGKEKLFHFTEETPEIPSGNISSGWPDFNSSDYETTSQPYWWDSASAAPESEDEFVSVLPMEYENNSTLSETEKSTSGSFSFFPVQMILTWLPPKPPTAFDGFHIHIEREENFTEYLMVDEEAHEFVAELKEPGKYKLSVTTFSSSGSCETRKSQSAKSLSFYISPSGEWIEELTEKPQHVSVHVLSSTTALMSWTSSQENYNSTIVSVVSLTCQKQKESQRLEKQYCTQVNSSKPIIENLVPGAQYQVVIYLRKGPLIGPPSDPVTFAIVPTGIKDLMLYPLGPTAVVLSWTRPYLGVFRKYVVEMFYFNPATMTSEWTTYYEIAATVSLTASVRIANLLPAWYYNFRVTMVTWGDPELSCCDSSTISFITAPVAPEITSVEYFNSLLYISWTYGDDTTDLSHSRMLHWMVVAEGKKKIKKSVTRNVMTAILSLPPGDIYNLSVTACTERGSNTSMLRLVKLEPAPPKSLFAVNKTQTSVTLLWVEEGVADFFEVFCQQVGSSQKTKLQEPVAVSSHVVTISSLLPATAYNCSVTSFSHDSPSVPTFIAVSTMVTEMNPNVVVISVLAILSTLLIGLLLVTLIILRKKHLQMARECGAGTFVNFASLERDGKLPYNWRRSIFAFLTLLPSCLWTDYLLAFYINPWSKNGLKKRKLTNPVQLDDFDAYIKDMAKDSDYKFSLQFEELKLIGLDIPHFAADLPLNRCKNRYTNILPYDFSRVRLVSMNEEEGADYINANYIPGYNSPQEYIATQGPLPETRNDFWKMVLQQKSQIIVMLTQCNEKRRVKCDHYWPFTEEPIAYGDITVEMISEEEQDDWACRHFRINYADEMQDVMHFNYTAWPDHGVPTANAAESILQFVHMVRQQATKSKGPMIIHCSAGVGRTGTFIALDRLLQHIRDHEFVDILGLVSEMRSYRMSMVQTEEQYIFIHQCVQLMWMKKKQQFCISDVIYENVSKS

SEQ ID NO: 19879 - protein, 8 aa, Homo sapiens
LPMPVWTL

SEQ ID NO: 19880 - protein, 139 aa, Homo sapiens [sequence omitted]

SEQ ID NO: 19881 - protein, 23 aa, Homo sapiens
LLTGLLISPFFSMQEDWPPKPVY

SEQ ID NO: 19882 - protein, 89 aa, Homo sapiens
LRVSGRRGGSRLGCFPASFLPTQLPTLGFPRCCRRCPHHCSHDLLNGHAEGFFPVVVGFIRRVPVLGSLLNLPGIRSFVDKVGESNNMV

SEQ ID NO: 19883 - protein, 49 aa, Homo sapiens
LTKHYWLLEMGFFPVVVGFIRRVPVLGSLLNLPGIRSFVDKVGESNNMV

SEQ ID NO: 19884 - protein, 13 aa, Homo sapiens
MFVDKVGESNNMV

SEQ ID NO: 19885 - protein, 87 aa, Homo sapiens
LCKMATLKEKLIAPVAEEEATVPNNKITVVGVGQVGMACAISILGKVHFKNTIDDREVQHVYTVSLGTLEFYYIFKRFLFFLSNLKL

SEQ ID NO: 19886 - protein, 41 aa, Homo sapiens
LEETIHIPTMENGPKLASRILSKLTDIQYGREESDWTIVLS

SEQ ID NO: 19887 - protein, 425 aa, Homo sapiens
VGSAGQRSQDTLVGGSGLGAWLSEPPFLCLPGSWRGAHGIMDCSNGCSAECTGEGGSKEVVGTFKAKDLIVTPATILKEKPDPNNLVFGTVFTDHMLTVEWSSEFGWEKPHIKPLQNLSLHPGSSALHYAVELFEGLKAFRGVDNKIRLFQPNLNMDRMYRSAVRATLPVFDKEELLECIQQLVKLDQEWVPYSTSASLYIRPTFIGTEPSLGVKKPTKALLFVLLSPVGPYFSSGTFNPVSLWANPKYVRAWKGGTGDCKMGGNYGSSLFAQCEAVDNGCQQVLWLYGEDHQITEVGTMNLFLYWINEDGEEELATPPLDGIILPGVTRRCILDLAHQWGEFKVSERYLTMDDLTTALEGNRVREMFGSGTACVVCPVSDILYKGETIHIPTMENGPKLASRILSKLTDIQYGREESDWTIVLS

SEQ ID NO: 19888 - protein, 422 aa, Homo sapiens
LLSLPAARSVPLPLSAAPRPRSLPMASPLRSAAALARQDCSNGCSAECTGEGGSKEVVGTFKAKDLIVTPATILKEKPDPNNLVFGTVFTDHMLTVEWSSEFGWEKPHIKPLQNLSLHPGSSALHYAVELFEGLKAFRGVDNKIRLFQPNLNMDRMYRSAVRATLPVFDKEELLECIQQLVKLDQEWVPYSTSASLYIRPTFIGTEPSLGVKKPTKALLFVLLSPVGPYFSSGTFNPVSLWANPKYVRAWKGGTGDCKMGGNYGSSLFAQCEAVDNGCQQVLWLYGEDHQITEVGTMNLFLYWINEDGEEELATPPLDGIILPGVTRRCILDLAHQWGEFKVSERYLTMDDLTTALEGNRVREMFGSGTACVVCPVSDILYKGETIHIPTMENGPKLASRILSKLTDIQYGREESDWTIVLS

SEQ ID NO: 19889 - protein, 342 aa, Homo sapiens
LGSALRSARASLVADGTMKAKDLIVTPATILKEKPDPNNLVFGTVFTDHMLTVEWSSEFGWEKPHIKPLQNLSLHPGSSALHYAVEVFDKEELLECIQQLVKLDQEWVPYSTSASLYIRPTFIGTEPSLGVKKPTKALLFVLLSPVGPYFSSGTFNPVSLWANPKYVRAWKGGTGDCKMGGNYGSSLFAQCEAVDNGCQQVLWLYGEDHQITEVGTMNLFLYWINEDGEEELATPPLDGIILPGVTRRCILDLAHQWGEFKVSERYLTMDDLTTALEGNRVREMFGSGTACVVCPVSDILYKGETIHIPTMENGPKLASRILSKLTDIQYGREESDWTIVLS

SEQ ID NO: 19890 - protein, 366 aa, Homo sapiens
LGSALRSARASLVADGTMKDCSNGCSAECTGEGGSKEVVGTFKAKDLIVTPATILKEKPDPNNLVFGTVFTDHMLTVEWSSEFGWEKPHIKPLQNLSLHPGSSALHYAVEVFDKEELLECIQQLVKLDQEWVPYSTSASLYIRPTFIGTEPSLGVKKPTKALLFVLLSPVGPYFSSGTFNPVSLWANPKYVRAWKGGTGDCKMGGNYGSSLFAQCEAVDNGCQQVLWLYGEDHQITEVGTMNLFLYWINEDGEEELATPPLDGIILPGVTRRCILDLAHQWGEFKVSERYLTMDDLTTALEGNRVREMFGSGTACVVCPVSDILYKGETIHIPTMENGPKLASRILSKLTDIQYGREESDWTIVLS

SEQ ID NO: 19891 - protein, 443 aa, Homo sapiens
LQSSPPRVLAAASGTAPGLAAAGTALCSRRPGPHGQGLRPLGSALRSARASLVADGTMKDCSNGCSAECTGEGGSKEVVGTFKAKDLIVTPATILKEKPDPNNLVFGTVFTDHMLTVEWSSEFGWEKPHIKPLQNLSLHPGSSALHYAVELFEGLKAFRGVDNKIRLFQPNLNMDRMYRSAVRATLPVFDKEELLECIQQLVKLDQEWVPYSTSASLYIRPTFIGTEPSLGVKKPTKALLFVLLSPVGPYFSSGTFNPVSLWANPKYVRAWKGGTGDCKMGGNYGSSLFAQCEAVDNGCQQVLWLYGEDHQITEVGTMNLFLYWINEDGEEELATPPLDGIILPGVTRRCILDLAHQWGEFKVSERYLTMDDLTTALEGNRVREMFGSGTACVVCPVSDILYKGETIHIPTMENGPKLASRILSKLTDIQYGREESDWTIVLS

SEQ ID NO: 19892 - protein, 360 aa, Homo sapiens
VGSAGQRSQDTLVGGSGLGAWLSEPPFLCLPGSWRGAHGIMDCSNGCSAECTGEGGSKEVVGTFKAKDLIVTPATILKEKPDPNNLVFGTVFTDHMLTVEWSSEFGWEKPHIKPLQNLSLHPGSSALHYAVELFEGLKAFRGVDNKIRLFQPNLNMDRMYRSAVRATLPVFDKEELLECIQQLVKLDQEWVPYSTSASLYIRPTFIGTEPSLGVKKPTKALLFVLLSPVGPYFSSGTFNPVSLWANPKYVRAWKGGTGDCKMGGNYGSSLFAQCEAVDNGCQQVLWLYGEDHQITEVGTMNLFLYWINEDGEEELATPPLDGIILPGVTRRCILDLAHQWDTELSLFSINLPDFLQFIYF

SEQ ID NO: 19893 - protein, 68 aa, Homo sapiens
LGASAAQALKAAAGPEAQRLPGLLKMTEYKLVVVGAGGVGKSALTIQLIQNHFVDEYDPTIEVLLSSM

SEQ ID NO: 19894 - protein, 31 aa, Homo sapiens
LASVCCGRNMADRLTQLQDAVNSSMPSFLQH

SEQ ID NO: 19895 - protein, 926 aa, Homo sapiens
LLFKNTNGHLPGNGDVYQERLARLENDKESLVLQVSVLTDQVEAQGEKIRDLEFCLEEHREKVNATEEMLQQELLSRTSLETQKLDLMAEISNLKLKLTAVEKDRLDYEDKFRDTEGLIQEINDLRLKVSEMDSERLQYEKKLKSTKSLMAKLSSMKIKVGQMQYEKQRMEQKWESLKDELASLKEQLEEKESEVKRLQEKLVCKMKGEGVEIVDRDIEVQKMKKAVESLMAANEEKDRKIEDLRQCLNRYKKMQDTVVLAQGKDGEYEELLNSSSISSLLDAQGFSDLEKSPSPTPVMGSPSCDPFNTSVPEEFHTTILQVSIPSLLPATVSMETSEKSKLTPKPETSFEENDGNIILGATVDTQLCDKLLTSSLQKSSSLGNLKKETSDGEKETIQKTSEDRAPAESRPFGTLPPRPPGQDTSMDDNPFGTRKVRSSFGRGFFKIKSNKRTASAPNLAETEKETAEHLDLAGASSRPKDSQRNSPFQIPPPSPDSKKKSRGIMKLFGKLRRSQSTTFNPDDMSEPEFKRGGTRATAGPRLGWSRDLGQSNSDLDMPFAKWTKEQVCNWLMEQGLGSYLNSGKHWIASGQTLLQASQQDLEKELGIKHSLHRKKLQLALQALGSEEETNHGKLDFNWVTRWLDDIGLPQYKTQFDEGRVDGRMLHYMTVDDLLSLKVVSVLHHLSIKRAIQVLRINNFEPNCLRRRPSDENTIAPSEVQKWTNHRVMEWLRSVDLAEYAPNLRGSGVHGGLMVLEPRFNVETMAQLLNIPPNKTLLRRHLATHFNLLIGAEAQHQKRDAMELPDYVLLTATAKVKPKKLAFSNFGNLRKKKQEDGEEYVCPMELGQASGSASKKGFKPGLDMRLYEEDDLDRLEQMEDSEGTVRQIGAFSEGINNLTHMLKEDDMFKDFAARSPSASITDEDSNV

SEQ ID NO: 19896 - protein, 120 aa, Homo sapiens
LGWNLPLTNNKMMSDASDMLAAALEQMDGIIAGSKALEYSNGIFDCQSPTSPFMGSLRALHLVEDLRGLLEMMETDEKEGLRCQIPDSTAETLVEWLQSQMVGSACSKFCYKSFVAYSKI

SEQ ID NO: 19897 - protein, 181 aa, Homo sapiens
LGWNLPLTNNKMMSDASDMLAAALEQMDGIIAGSKALEYSNGIFDCQSPTSPFMGSLRALHLVEDLRGLLEMMETDEKEGLRCQIPDSTAETLVEWLQSQMTNGHLPGNGDVYQERLARLENDKESLVLQVSVLTDQVEAQGEKIRDLEFCLEEHREKVNATEEMLQQVCAEARTKMGFPC

SEQ ID NO: 19898 - protein, 1022 aa, Homo sapiens
LGWNLPLTNNKMMSDASDMLAAALEQMDGIIAGSKALEYSNGIFDCQSPTSPFMGSLRALHLVEDLRGLLEMMETDEKEGLRCQIPDSTAETLVEWLQSQMTNGHLPGNGDVYQERLARLENDKESLVLQVSVLTDQVEAQGEKIRDLEFCLEEHREKVNATEEMLQQELLSRTSLETQKLDLMAEISNLKLKLTAVEKDRLDYEDKFRDTEGLIQEINDLRLKVSEMDSERLQYEKKLKSTKSLMAKLSSMKIKVGQMQYEKQRMEQKWESLKDELASLKEQLEEKESEVKRLQEKLVCKMKGEGVEIVDRDIEVQKMKKAVESLMAANEEKDRKIEDLRQCLNRYKKMQDTVVLAQGKDGEYEELLNSSSISSLLDAQGFSDLEKSPSPTPVMGSPSCDPFNTSVPEEFHTTILQVSIPSLLPATVSMETSEKSKLTPKPETSFEENDGNIILGATVDTQLCDKLLTSSLQKSSSLGNLKKETSDGEKETIQKTSEDRAPAESRPFGTLPPRPPGQDTSMDDNPFGTRKVRSSFGRGFFKIKSNKRTASAPNLAETEKETAEHLDLAGASSRPKDSQRNSPFQIPPPSPDSKKKSRGIMKLFGKLRRSQSTTFNPDDMSEPEFKRGGTRATAGPRLGWSRDLGQSNSDLDMPFAKWTKEQVCNWLMEQGLGSYLNSGKHWIASGQTLLQASQQDLEKELGIKHSLHRKKLQLALQALGSEEETNHGKLDFNWVTRWLDDIGLPQYKTQFDEGRVDGRMLHYMTVDDLLSLKVVSVLHHLSIKRAIQVLRINNFEPNCLRRRPSDENTIAPSEVQKWTNHRVMEWLRSVDLAEYAPNLRGSGVHGGLMVLEPRFNVETMAQLLNIPPNKTLLRRHLATHFNLLIGAEAQHQKRDAMELPDYVLLTATAKVKPKKLAFSNFGNLRKKKQEDGEEYVCPMELGQASGSASKKGFKPGLDMRLYEEDDLDRLEQMEDSEGTVRQIGAFSEGINNLTHMLKEDDMFKDFAARSPSASITDEDSNV

SEQ ID NO: 19899 - protein, 991 aa, Homo sapiens
LGWNLPLTNNKMMSDASDMLAAALEQMDGIIAGSKALEYSNGIFDCQSPTSPFMGSLRALHLVEDLRGLLEMMETDEKEGLRCQIPDSTAETLVEWLQSQMTNGHLPGNGDVYQERLARLENDKESLVLQVSVLTDQVEAQGEKIRDLEFCLEEHREKVNATEEMLQQELLSRTSLETQKLDLMAEISNLKLKLTAVEKDRLDYEDKFRDTEGLIQEINDLRLKVSEMDSERLQYEKKLKSTKDELASLKEQLEEKESEVKRLQEKLVCKMKGEGVEIVDRDIEVQKMKKAVESLMAANEEKDRKIEDLRQCLNRYKKMQDTVVLAQGKDGEYEELLNSSSISSLLDAQGFSDLEKSPSPTPVMGSPSCDPFNTSVPEEFHTTILQVSIPSLLPATVSMETSEKSKLTPKPETSFEENDGNIILGATVDTQLCDKLLTSSLQKSSSLGNLKKETSDGEKETIQKTSEDRAPAESRPFGTLPPRPPGQDTSMDDNPFGTRKVRSSFGRGFFKIKSNKRTASAPNLAETEKETAEHLDLAGASSRPKDSQRNSPFQIPPPSPDSKKKSRGIMKLFGKLRRSQSTTFNPDDMSEPEFKRGGTRATAGPRLGWSRDLGQSNSDLDMPFAKWTKEQVCNWLMEQGLGSYLNSGKHWIASGQTLLQASQQDLEKELGIKHSLHRKKLQLALQALGSEEETNHGKLDFNWVTRWLDDIGLPQYKTQFDEGRVDGRMLHYMTVDDLLSLKVVSVLHHLSIKRAIQVLRINNFEPNCLRRRPSDENTIAPSEVQKWTNHRVMEWLRSVDLAEYAPNLRGSGVHGGLMVLEPRFNVETMAQLLNIPPNKTLLRRHLATHFNLLIGAEAQHQKRDAMELPDYVLLTATAKVKPKKLAFSNFGNLRKKKQEDGEEYVCPMELGQASGSASKKGFKPGLDMRLYEEDDLDRLEQMEDSEGTVRQIGAFSEGINNLTHMLKEDDMFKDFAARSPSASITDEDSNV

SEQ ID NO: 19900 - protein, 1016 aa, Homo sapiens
LGWNLPLTNNKMMSDASDMLAAALEQMDGIIAGSKALEYSNGIFDCQSPTSPFMGSLRALHLVEDLRGLLEMMETDEKEGLRCQIPDSTAETLVEWLQSQMTNGHLPGNGDVYQERLARLENDKESLVLQVSVLTDQVEAQGEKIRDLEFCLEEHREKVNATEEMLQQELLSRTSLETQKLDLMAEISNLKLKLTAVEKDRLDYEDKFRDTEGLIQEINDLRLKVSEMDSERLQYEKKLKSTKDELASLKEQLEEKESEVKRLQEKLVCKMKGEGVEIVDRDENFKKKLKEKNIEVQKMKKAVESLMAANEEKDRKIEDLRQCLNRYKKMQDTVVLAQGKKGKDGEYEELLNSSSISSLLDAQGFSDLEKSPSPTPVMGSPSCDPFNTSVPEEFHTTILQVSIPSLLPATVSMETSEKSKLTPKPETSFEENDGNIILGATVDTQLCDKLLTSSLQKSSSLGNLKKETSDGEKETIQKTSEDRAPAESRPFGTLPPRPPGQDTSMDDNPFGTRKVRSSFGRGFFKIKSNKRTASAPNLDRKRSASAPTLAETEKETAEHLDLAGASSRPKDSQRNSPFQIPPPSPDSKKKSRGIMKLFGKLRRSQSTTFNPDDMSEPEFKRGGTRATAGPRLGWSRDLGQSNSDLDMPFAKWTKEQVCNWLMEQGLGSYLNSGKHWIASGQTLLQASQQDLEKELGIKHSLHRKKLQLALQALGSEEETNHGKLDFNWVTRWLDDIGLPQYKTQFDEGRVDGRMLHYMTVDDLLSLKVVSVLHHLSIKRAIQVLRINNFEPNCLRRRPSDENTIAPSEVQKWTNHRVMEWLRSVDLAEYAPNLRGSGVHGGLMVLEPRFNVETMAQLLNIPPNKTLLRRHLATHFNLLIGAEAQHQKRDAMELPDYVLLTATAKVKPKKLAFSNFGNLRKKKQEDGEEYVCPMELGQASGSASKKGFKPGLDMRLYEEDDLDRLEQMEDSEGTVRQIGAFSEGINNLTHMLKEDDMFKDFAARSPSASITDEDSNV

SEQ ID NO: 19901 - protein, 16 aa, Homo sapiens
LRFLCRRGTKKKISEF

SEQ ID NO: 19902 - protein, 82 aa, Homo sapiens
LLQGQREQVERESEPRAGARQTQGETAVTRPGRHGGRASLNKQNPEPLATRGRRSPGHAARLLTARRGRPRGHMRRPLPPRP

SEQ ID NO: 19903 - protein, 14 aa, Homo sapiens
VMPRPLRAATKSRG

SEQ ID NO: 19904 - protein, 20 aa, Homo sapiens
LIFAAGVGEFEAGISKNGQT

SEQ ID NO: 19905 - protein, 132 aa, Homo sapiens
LSIDIDECGTGRHSCANDTICFNLDGGYDCRCPHGKNCTGDCIHDGKVKHNGQIWVLENDRCSVCSCQNGFVMCRRMVCDCENPTVDLFCCPECDPRLSSQCLHQNGETLYNSGDTWVQNCQQCRCLVNLAT

SEQ ID NO: 19906 - protein, 153 aa, Homo sapiens
MCVNTPGSFMCICKTGYIRIDDYSCTEHDECITNQHNCDENALCFNTVGGHNCVCKPGYTGNGTTCKAFCKDGCRNGGACIAANVCACPQGFTGPSCETDIDECSDGFVQCDSRANCINLPGWYHCECRDGYHDNGMFSPSGESCEGQYKEKT

SEQ ID NO: 19907 - protein, 14 aa, Homo sapiens
MGRKPFSFKILPEA

SEQ ID NO: 19908 - protein, 67 aa, Homo sapiens
VRGRRAECEWGLVVRGDSDAIGPERRRARRARTGAATPLRQKVARSLRPSPSSEIRQATPSSLPNPY

SEQ ID NO: 19909 - protein, 61 aa, Homo sapiens
MTLGSYCSCWCGMFTAEKMVRRGKEEVRRKKQGNDPACDGSADTIQIGKLVHLILCPPPRN

SEQ ID NO: 19910 - protein, 70 aa, Homo sapiens
MCHHAPLARLVSNTLPQVILPPLGLQQAEELPRRQEVEQNTPSLVPIIDNIMTLHVMDQLTPSRSVNWFI

SEQ ID NO: 19911 - protein, 108 aa, Homo sapiens
VQWHDLGSLQPPPPGFKRFSCLSLPSSWDYRLECDGMILAHGKLRLPGSSDSPASASRVAGITGMCHHAPLARLVSNTLPQVILPPLGLQTLHVMDQLTPSRSVNWFI

SEQ ID NO: 19912 - protein, 45 aa, Homo sapiens
MQAEELPRRQEVEQNTPSLVPIIDNIMTLHVMDQLTPSRSVNWFI

SEQ ID NO: 19913 - protein, 48 aa, Homo sapiens
MTLGSYCSCWCGMFTAEKMVRRGKEEVRRKKQGNDRVLLSYPGWSAMA

SEQ ID NO: 19914 - protein, 11 aa, Homo sapiens
LREMLKNHQLL

SEQ ID NO: 19915 - protein, 31 aa, Homo sapiens
MQPVARALFNHIDKSGLKDSSVEELKKRYGG

SEQ ID NO: 19916 - protein, 68 aa, Homo sapiens
LTWHLTPGKYWGCMQRLASCPDSWVPRVPGADKEEVEAVTALASLSVGILAEDRPSEQLVEEEEPMNL

SEQ ID NO: 19917 - protein, 77 aa, Homo sapiens
LLLVWSKIPVSDPGSNGKYWGCMQRLASCPDSWVPRVPGADKEEVEAVTALASLSVGILAEDRPSEQLVEEEEPMNL

SEQ ID NO: 19918 - protein, 117 aa, Homo sapiens
LETETQPQCHPLSGGRDPGAHGCPHTEPDSRTWFLTAAGRRSILLAWAPMQSGRGDGKYWGCMQRLASCPDSWVPRVPGADKEEVEAVTALASLSVGILAEDRPSEQLVEEEEPMNL

SEQ ID NO: 19919 - protein, 435 aa, Homo sapiens
LQRLLQVSPPPRLSPVEREGEEARCFHEGSPCIFHISFLTMSMEHAALTATGAGGSWRSMKRKALFTCPFNGDCRITKDNRRHCQACRLKRCVDIGMMKEFILTDEEVQRKREMILKRKEEEALKDSLRPKLSEEQQRIIAILLDAHHKTYDPTYSDFCQFRPPVRVNDGGGSHPSRPNSRHTPSFSGDSSSSCSDHCITSSDMMDSSSFSNLDLSEEDSDDPSVTLELSQLSMLPHLADLVSYSIQKVIGFAKMIPGFRDLTSEDQIVLLKSSAIEVIMLRSNESFTMDDMSWTCGNQDYKYRVSDVTKAGHSLELIEPLIKFQVGLKKLNLHEEEHVLLMAICIVSPDRPGVQDAALIEAIQDRLSNTLQTYIRCRHPPPGSHLLYAKMIQKLADLRSLNEEHSKQYRCLSFQPECSMKLTPLVLEVFGNEIS

SEQ ID NO: 19920 - protein, 479 aa, Homo sapiens
LIASCQAPCTLLCLPPSILIASLWEAFGSEVSVRPHRRAPLGSTYLPPAPSGMEAMAASTSLPDPGDFDRNVPRICGVCGDRATGFHFNAMTCEGCKGFFRRSMKRKALFTCPFNGDCRITKDNRRHCQACRLKRCVDIGMMKEFILTDEEVQRKREMILKRKEEEALKDSLRPKLSEEQQRIIAILLDAHHKTYDPTYSDFCQFRPPVRVNDGGGSHPSRPNSRHTPSFSGDSSSSCSDHCITSSDMMDSSSFSNLDLSEEDSDDPSVTLELSQLSMLPHLADLVSYSIQKVIGFAKMIPGFRDLTSEDQIVLLKSSAIEVIMLRSNESFTMDDMSWTCGNQDYKYRVSDVTKAGHSLELIEPLIKFQVGLKKLNLHEEEHVLLMAICIVSPDRPGVQDAALIEAIQDRLSNTLQTYIRCRHPPPGSHLLYAKMIQKLADLRSLNEEHSKQYRCLSFQPECSMKLTPLVLEVFGNEIS

SEQ ID NO: 19921 - protein, 497 aa, Homo sapiens
VLSTWATRSICFLLLSGRLGMEWRNKKRSDWLSMVLRTAGVEEAFGSEVSVRPHRRAPLGSTYLPPAPSGMEAMAASTSLPDPGDFDRNVPRICGVCGDRATGFHFNAMTCEGCKGFFRRSMKRKALFTCPFNGDCRITKDNRRHCQACRLKRCVDIGMMKEFILTDEEVQRKREMILKRKEEEALKDSLRPKLSEEQQRIIAILLDAHHKTYDPTYSDFCQFRPPVRVNDGGGSHPSRPNSRHTPSFSGDSSSSCSDHCITSSDMMDSSSFSNLDLSEEDSDDPSVTLELSQLSMLPHLADLVSYSIQKVIGFAKMIPGFRDLTSEDQIVLLKSSAIEVIMLRSNESFTMDDMSWTCGNQDYKYRVSDVTKAGHSLELIEPLIKFQVGLKKLNLHEEEHVLLMAICIVSPDRPGVQDAALIEAIQDRLSNTLQTYIRCRHPPPGSHLLYAKMIQKLADLRSLNEEHSKQYRCLSFQPECSMKLTPLVLEVFGNEIS

SEQ ID NO: 19922 - protein, 471 aa, Homo sapiens
VCAGSAEQLVHPPAGPEAFGSEVSVRPHRRAPLGSTYLPPAPSGMEAMAASTSLPDPGDFDRNVPRICGVCGDRATGFHFNAMTCEGCKGFFRRSMKRKALFTCPFNGDCRITKDNRRHCQACRLKRCVDIGMMKEFILTDEEVQRKREMILKRKEEEALKDSLRPKLSEEQQRIIAILLDAHHKTYDPTYSDFCQFRPPVRVNDGGGSHPSRPNSRHTPSFSGDSSSSCSDHCITSSDMMDSSSFSNLDLSEEDSDDPSVTLELSQLSMLPHLADLVSYSIQKVIGFAKMIPGFRDLTSEDQIVLLKSSAIEVIMLRSNESFTMDDMSWTCGNQDYKYRVSDVTKAGHSLELIEPLIKFQVGLKKLNLHEEEHVLLMAICIVSPDRPGVQDAALIEAIQDRLSNTLQTYIRCRHPPPGSHLLYAKMIQKLADLRSLNEEHSKQYRCLSFQPECSMKLTPLVLEVFGNEIS

SEQ ID NO: 19923 - protein, 486 aa, Homo sapiens
VCSPAAQSITQQLLDAGRKFLRGACHPVVRAEAFGSEVSVRPHRRAPLGSTYLPPAPSGMEAMAASTSLPDPGDFDRNVPRICGVCGDRATGFHFNAMTCEGCKGFFRRSMKRKALFTCPFNGDCRITKDNRRHCQACRLKRCVDIGMMKEFILTDEEVQRKREMILKRKEEEALKDSLRPKLSEEQQRIIAILLDAHHKTYDPTYSDFCQFRPPVRVNDGGGSHPSRPNSRHTPSFSGDSSSSCSDHCITSSDMMDSSSFSNLDLSEEDSDDPSVTLELSQLSMLPHLADLVSYSIQKVIGFAKMIPGFRDLTSEDQIVLLKSSAIEVIMLRSNESFTMDDMSWTCGNQDYKYRVSDVTKAGHSLELIEPLIKFQVGLKKLNLHEEEHVLLMAICIVSPDRPGVQDAALIEAIQDRLSNTLQTYIRCRHPPPGSHLLYAKMIQKLADLRSLNEEHSKQYRCLSFQPECSMKLTPLVLEVFGNEIS

SEQ ID NO: 19924 - protein, 66 aa, Homo sapiens
VCAGSAEQLVHPPAGPGMEAMAASTSLPDPGDFDRNVPRICGVCGDRATGFHFNAMTCEGCKGFFR

SEQ ID NO: 19925 - protein, 121 aa, Homo sapiens
LQESSGGGELRLKEWIMTHEEHHAAKTLGIGKAIAVLTSGGDAQGMNAAVRAVVRVGIFTGARVFFVHEGYQGLVDGGDHIKEATWESVSMMLQLVCSRELPVPYLLCPCFIPLCFGLMVS

SEQ ID NO: 19926 - protein, 118 aa, Homo sapiens
LQESSGGGELRLKEWIMTHEEHHAAKTLGIGKAIAVLTSGGDAQGMNAAVRAVVRVGIFTGARVFFVHEGYQGLVDGGDHIKEATWESVSMMLQLGHREGLALKITLPEDWSQSQKWS

SEQ ID NO: 19927 - protein, 118 aa, Homo sapiens
LQESSGGGELRLKEWIMTHEEHHAAKTLGIGKAIAVLTSGGDAQGMNAAVRAVVRVGIFTGARVFFVHEGYQGLVDGGDHIKEATWESVSMMLQLLSSLKIHGQKFNMQCLVKALPRC

SEQ ID NO: 19928 - protein, 338 aa, Homo sapiens
LQESSGGGELRLKEWIMTHEEHHAAKTLGIGKAIAVLTSGGDAQGMNAAVRAVVRVGIFTGARVFFVHEGYQGLVDGGDHIKEATWESVSMMLQLGGTVIGSARCKDFREREGRLRAAYNLVKRGITNLCVIGGDGSLTGADTFRSEWSDLLSDLQKAGKITDEEATKSSYLNIVGLVGSIDNDFCGTDMTIGTDSALHRIMEIVDAITTTAQSHQRTFVLEVMGRHCGYLALVTSLSCGADWVFIPECPPDDDWEEHLCRRLSETRTRGSRLNIIIVAEGAIDKNGKPITSEDIKNVRMNEAREALESIAHSLLASESPDIASPLGPSAHLSLVPCP

SEQ ID NO: 19929 - protein, 308 aa, Homo sapiens
LRQENRLNPGGRGCGMNAAVRAVVRVGIFTGARVFFVHEGYQGLVDGGDHIKEATWESVSMMLQLGGTVIGSARCKDFREREGRLRAAYNLVKRGITNLCVIGGDGSLTGADTFRSEWSDLLSDLQKAGKITDEEATKSSYLNIVGLVGSIDNDFCGTDMTIGTDSALHRIMEIVDAITTTAQSHQRTFVLEVMGRHCGYLALVTSLSCGADWVFIPECPPDDDWEEHLCRRLSETRTRGSRLNIIIVAEGAIDKNGKPITSEDIKNVRMNEAREALESIAHSLLASESPDIASPLGPSAHLSLVPCP

SEQ ID NO: 19930 - protein, 40 aa, Homo sapiens
MTGNLFLSGMHLRTHPLTTTPCTKNGTILTKKRREETIFA

SEQ ID NO: 19931 - protein, 7 aa, Homo sapiens
MATAPRR

SEQ ID NO: 19932 - protein, 21 aa, Homo sapiens
MYSRITLMPQRIERLPLRPCR

SEQ ID NO: 19933 - protein, 66 aa, Homo sapiens
LAAAASSPLVLPGPRGTSASVMLSRVWKHLTTKCYPCENSYSTRGSASVLYQHFCLQHCTSSATSS

SEQ ID NO: 19934 - protein, 82 aa, Homo sapiens [sequence omitted]

SEQ ID NO: 19935 - protein, 9 aa, Homo sapiens
VSAPVAFAS

SEQ ID NO: 19936 - protein, 310 aa, Homo sapiens
VRRGPGEPRSKEAPGTIEFVADPAALATILSGEGVKSCHLGRQPSLAKRVLVRGSQGGTTQRVQGVRASAYLAPRTPTHRLDPARASCFSRLEGPGPRGRTLCPQRLQALISPSGPSFHPSTRPSFQELRRETAGSSRTSVSQASGLLLETPVQPAFSLPKGEREVVTHSDEGGVASLGLAQRVPLRENREMSHTRDSHDSHLMPSPAPVAQPLPGHVVPCPSPFGRAQRVPSPGPPTLTSYSVLRRLTVQPKTRFTPMPSTPRVQQAQWLRGVSPQSCSEDPALPWVSIRSFPLLRSLALCCQPGGPGV

SEQ ID NO: 19937 - protein, 259 aa, Homo sapiens
LWLTLQPWPPSCQGVRASAYLAPRTPTHRLDPARASCFSRLEGPGPRGRTLCPQRLQALISPSGPSFHPSTRPSFQELRRETAGSSRTSVSQASGLLLETPVQPAFSLPKGEREVVTHSDEGGVASLGLAQRVPLRENREMSHTRDSHDSHLMPSPAPVAQPLPGHVVPCPSPFGRAQRVPSPGPPTLTSYSVLRRLTVQPKTRFTPMPSTPRVQQAQWLRGVSPQSCSEDPALPWVSIRSFPLLRSLALCCQPGGPGV

SEQ ID NO: 19938 - protein, 635 aa, Homo sapiens
LKKMDTMMLNVRNLFEQLVRRVEILSEGNEVQFIQLAKDFEDFRKKWQRTDHELGKYKDLLMKAETERSALDVKLKHARNQVDVEIKRRQRAEADCEKLERQIQLIREMLMCDTSGSIQLSEEQKSALAFLNRGQPSSSNAGNKRLSTIDESGSILSDISFDKTDESLDWDSSLVKTFKLKKREKRRSTSRQFVDGPPGPVKKTRSIGSAVDQGNESIVAKTTVTVPNDGGPIEAVSTIETVPYWTRSRRKTGTLQPWNSDSTLNSRQLEPRTETDSVGTPQSNGGMRLHDFVSKTVIKPESCVPCGKRIKFGKLSLKCRDCRVVSHPECRDRCPLPCIPTLIGTPVKIGEGMLADFVSQTSPMIPSIVVHCVNEIEQRGLTETGLYRISGCDRTVKELKEKFLRVKTVPLLSKVDDIHAICSLLKDFLRNLKEPLLTFRLNRAFMEAAEITDEDNSIAAMYQAVGELPQANRDTLAFLMIHLQRVAQSPHTKMDVANLAKVFGPTIVAHAVPNPDPVTMLQDIKRQPKVVERLLSLPLEYWSQFMMVEQENIDPLHVIENSNAFSTPQTPDIKVSLLGPVTTPEHQLLKTPSSSSLSQRVRSTLTKNTPRFGSKSKSATNLGRQGNFFASPMLK

SEQ ID NO: 19939 - protein, 90 aa, Homo sapiens
LDWDSSLVKTFKLKKREKRRSTSRQFVDGPPGPVKKTRSIGSAVDQGNESIVAKTTVTVPNDGGPIEAVSTIETVPYWTRSRRKTGPLNL

SEQ ID NO: 19940 - protein, 52 aa, Homo sapiens
LKKMDTMMLNVRNLFEQLVRRVEILSEGNEVRLGLFFGEDFQTEEERKEALY

SEQ ID NO: 19941 - protein, 44 aa, Homo sapiens
LKKMDTMMLNVRNLFEQLVRRVEILSEGNEVRTTDSADSRDAHV

SEQ ID NO: 19942 - protein, 65 aa, Homo sapiens
VLREFMPKARTQASAFKFKLSRGKMDTMMLNVRNLFEQLVRRVEILSEGNEVRTTDSADSRDAHV

SEQ ID NO: 19943 - protein, 485 aa, Homo sapiens
LGISLVGSCCWEVEPSPASDSILQNNDLLWEDYEEKLADQAVRTMEIYVAQFSEIKERIAKRGRKLVDYDSARHHLEAVQNAKKKDEAKTAKAEEEFNKAQTVFEDLNQELLEELPILYNSRIGCYVTIFQNISNLRDVFYREMSKLNHNLYEVMSKLEKQHSNKVFVVKGLSSSSRRSLVISPPVRTATVSSPLTSPTSPSTLSLKSESESVSATEDLAPDAAQGEDNSEIKELLEEEEIEKEGSEASSSEEDEPLPACNGPAQAQPSPTTERAKSQEEVLPSSTTPSPGGALSPSGQPSSSATEVVLRTRTASEGSEQPKKRASIQRTSAPPSRPPPPRATASPRPSSGNIPSSPTASGGGSPTSPRASLGTGTASPRTSLEVSPNPEPPEKPVRTPEAKENENIHNQNPEELCTSPTLMTSQVASEPGEAKKMEDKEKDNKLISANSSEGQDQLQVSMVPENNNLTAPEPQEEVSTSENPQL

SEQ ID NO: 19944 - protein, 50 aa, Homo sapiens
LTHLCPRLGWRPPPWTEARPCPSQAAWLLLLGPEGRRDNVVGQGLLVHPE

SEQ ID NO: 19945 - protein, 341 aa, Homo sapiens
LGPFSRVKADREEEAEMPCIQAQYGTPAPSPGPRDHLASDPLTPEFIKPTMDLASPEAAPAAPTALPSFSTFMDGYTGEFDTFLYQLPGTVQPCSSASSSASSTSSSSATSPASASFKFEDFQVYGCYPGPLSGPVDEALSSSGSDYYGSPCSAPSPSTPSFQPPQLSPWDGSFGHFSPSQTYEGLRAWTEQLPKASGPPQPPAFFSFSPPTGPSPSLAQSPLKLFPSQATHQLGEGESYSMPTAFPGLAPTSPHLEGSGILDTPVTSTKARSGAPGGSEGRCAVCGDNASCQHYGVRTCEGCKGFFKVPRSPRWGLLLEMERGWPHPIGTCGLPLGSPPS

SEQ ID NO: 19946 - protein, 24 aa, Homo sapiens
MTVGEPRPQAVLHLDVEPLLSIVN

SEQ ID NO: 19947 - protein, 66 aa, Homo sapiens
VAEATKLGGVHRRTSGAHAGPGTRLRLGAPVRAGAAGAGRRCPVSKPNMGHQHRVRDPVTTWQATP

SEQ ID NO: 19948 - protein, 116 aa, Homo sapiens
VAEATKLGGVHRRTSGAHAGPGTRLRLGAPVRAGAAGAGRVGCSLRLVQQNRCKPHCCQDLPEAGFSPLPPSTPPLPPPVGLLPPPVRLDRCPVSKPNMGHQHRVRDPVTTWQATP

SEQ ID NO: 19949 - protein, 31 aa, Homo sapiens
VHRRTSGAHAGPGTRLRLGAPVRAGAAGAGR

SEQ ID NO: 19950 - protein, 37 aa, Homo sapiens
VHRRTSGAHAGPGTRLRLGAPVRAGAAGAGRLSEQTA

SEQ ID NO: 19951 - protein, 333 aa, Homo sapiens
LGSPLSPEMPCIQAQYGTPAPSPGPRDHLASDPLTPEFIKPTMDLASPEAAPAAPTALPSFSTFMDGYTGEFDTFLYQLPGTVQPCSSASSSASSTSSSSATSPASASFKFEDFQVYGCYPGPLSGPVDEALSSSGSDYYGSPCSAPSPSTPSFQPPQLSPWDGSFGHFSPSQTYEGLRAWTEQLPKASGPPQPPAFFSFSPPTGPSPSLAQSPLKLFPSQATHQLGEGESYSMPTAFPGLAPTSPHLEGSGILDTPVTSTKARSGAPGGSEGRCAVCGDNASCQHYGVRTCEGCKGFFKVPRSPRWGLLLEMERGWPHPIGTCGLPLGSPPS

SEQ ID NO: 19952 - protein, 68 aa, Homo sapiens
LRRVWFLRAGGGLGNRLCVCPSDGACLASRPHPPAPWPSPVCPREKAGGQGPMKKYRCLDCQGDPGPQ

SEQ ID NO: 19953 - protein, 53 aa, Homo sapiens
VQKNAKYICLANKDCPVDKRRRNRCQFCRFQKCLAVGMVKEGVWLGCGPAGQG

SEQ ID NO: 19954 - protein, 48 aa, Homo sapiens
VQKNAKYICLANKDCPVDKRRRNRCQFCRFQKCLAVGMVKEGLSEQTA

SEQ ID NO: 19955 - protein, 124 aa, Homo sapiens
VQKNAKYICLANKDCPVDKRRRNRCQFCRFQKCLAVGMVKEVVRTDSLKGRRGRLPSKPKQPPDASPANLLTSLVRAHLDSGPSTAKLDYSKVRSHPVSALGRSMSTCSAFVRVRRATPSGRTE

SEQ ID NO: 19956 - protein, 111 aa, Homo sapiens
LPCGQEAAKPLPVLPLPEVPGGGHGEGRFVRTDSLKGRRGRLPSKPKQPPDASPANLLTSLVRAHLDSGPSTAKLDYSKVRSHPVSALGRSMSTCSAFVRVRRATPSGRTE

SEQ ID NO: 19957 - protein, 65 aa, Homo sapiens
VAGVRPSGARVGLSGVGPAGPPGFCPGGPRGGHVRSHPVSALGRSMSTCSAFVRVRRATPSGRTE

SEQ ID NO: 19958 - protein, 21 aa, Homo sapiens
LDSGPSTAKLDYSKLQPWVNM

SEQ ID NO: 19959 - protein, 12 aa, Homo sapiens
LGLQVCSHEQDG

SEQ ID NO: 19960 - protein, 34 aa, Homo sapiens
MCVVAAAEELVCGAERPMDEEDAAAPVCSHEQDG

SEQ ID NO: 19961 - protein, 12 aa, Homo sapiens
LQMWKLKPREKV

SEQ ID NO: 19962 - protein, 474 aa, Homo sapiens
LLERGAAGGGGGIGCGSLVFPAPSFPSSRVAMYDCMETFAPGPRRLYGAAGPGAGLLRRATGGSCFAGLESFAWPQPASLQSVETQSTSSEEMVPSSPSPPPPPRVYKPCFVCNDKSSGYHYGVSSCEGCKGFFRRSIQKNMVYTCHRDKNCIINKVTRNRCQYCRLQKCFEVGMSKEAVRNDRNKKKKEVKEEGSPDSYELSPQLEELITKVSKAHQETFPSLCQLGKYTTNSSADHRVQLDLGLWDKFSELATKCIIKIVEFAKRLPGFTGLSIADQITLLKAACLDILMLRICTRYTPEQDTMTFSDGLTLNRTQMHNAGFGPLTDLVFAFAGQLLPLEMDDTETGLLSAICLICGDRMDLEEPEKVDKLQEPLLEALRLYARRRRPSQPYMFPRMLMKITDLRGISTKGAERAITLKMEIPGPMPPLIREMLENPEMFEDDSSQPGPHPNASSEDEVPGGQGKGGLKSPA

SEQ ID NO: 19963 - protein, 478 aa, Homo sapiens
LPKHPDKSWTEAKAAAPASRPAQSLSPAGDPPSSPPTPYPHAAQRPMLALPLPPCWSGAPPGEEGESAAGPWCFQHPVSLQAGSRCTTVWKRLPRVRDGCTGRPGPGPACCAEPPAAPVSPDLNLLPGRNPPACNGFFRRSIQKNMVYTCHRDKNCIINKVTRNRCQYCRLQKCFEVGMSKEAVRNDRNKKKKEVKEEGSPDSYELSPQLEELITKVSKAHQETFPSLCQLGKYTTNSSADHRVQLDLGLWDKFSELATKCIIKIVEFAKRLPGFTGLSIADQITLLKAACLDILMLRICTRYTPEQDTMTFSDGLTLNRTQMHNAGFGPLTDLVFAFAGQLLPLEMDDTETGLLSAICLICGDRMDLEEPEKVDKLQEPLLEALRLYARRRRPSQPYMFPRMLMKITDLRGISTKGAERAITLKMEIPGPMPPLIREMLENPEMFEDDSSQPGPHPNASSEDEVPGGQGKGGLKSPA

SEQ ID NO: 19964 - protein, 441 aa, Homo sapiens
LRRSIQETARRRDLGAPPPPFPLPLQQLRPSSLNLTQYVEASLCRRPAAVETQSTSSEEMVPSSPSPPPPPRVYKPCFVCNDKSSGYHYGVSSCEGCKGFFRRSIQKNMVYTCHRDKNCIINKVTRNRCQYCRLQKCFEVGMSKEAVRNDRNKKKKEVKEEGSPDSYELSPQLEELITKVSKAHQETFPSLCQLGKYTTNSSADHRVQLDLGLWDKFSELATKCIIKIVEFAKRLPGFTGLSIADQITLLKAACLDILMLRICTRYTPEQDTMTFSDGLTLNRTQMHNAGFGPLTDLVFAFAGQLLPLEMDDTETGLLSAICLICGDRMDLEEPEKVDKLQEPLLEALRLYARRRRPSQPYMFPRMLMKITDLRGISTKGAERAITLKMEIPGPMPPLIREMLENPEMFEDDSSQPGPHPNASSEDEVPGGQGKGGLKSPA

SEQ ID NO: 19965 - protein, 285 aa, Homo sapiens
LAASADQPMQALEVLLLLRIVSERLKDHSKAAGSSCHITQLLLTLGCPSYAQLHLEEAASSLKHLDQTTDTYLLLSLTCDLLRSQLYWTHQKVTKGVSLLLSVLRDPALQKSSKAWYLLRVQVLQLVAAYLSLPSNNLSHSLWEQLCAQGWQTPEIALIDSHKLLRSIILLLMGSDILSTQKAAVETSFLDYGENLVQKWQVLSEVLSCSEKLVCHLGRLGSVSEAKAFCLEALKLTTKLQIPRQCALFLVLKGELELARNDIDLCQSDLQQVLFLLESCTGELQ

SEQ ID NO: 19966 - protein, 30 aa, Homo sapiens
MYVPGKLHDVEHVLIDVGTGYYVEKPLIHL

SEQ ID NO: 19967 - protein, 102 aa, Homo sapiens
LLMGHQFLRGLLTLLLPPPPLYTRHRMLGPESVPPPKRSRSKLMAPPRIGTHNGTFHCDEALACALLRLLPEYRVRSAKSDPGTACMHASGVDGIPPTGSLR

SEQ ID NO: 19968 - protein, 161 aa, Homo sapiens
LRGLLTLLLPPPPLYTRHRMLGPESVPPPKRSRSKLMAPPRIGTHNGTFHCDEALACALLRLLPEYRDAEIVRTRDPEKLASCDIVVDVGGEYDPRRHRYDHHQRSFTETMSSLSPGKPWQTKLSSAGLIYLHFGHKLLAQLLGTSEEDSMVGTLYDKVGT

SEQ ID NO: 19969 - protein, 99 aa, Homo sapiens
LCTSQDAEIVRTRDPEKLASCDIVVDVGGEYDPRRHRYDHHQRSFTETMSSLSPGKPWQTKLSSAGLIYLHFGHKLLAQLLGTSEEDSMVGTLYDKVGT

SEQ ID NO: 19970 - protein, 50 aa, Homo sapiens
LLDMDTGVIEGGLNVTLTIRLLMHGKEVGSIIGKVRQFHFNFNYHLVILD

SEQ ID NO: 19971 - protein, 35 aa, Homo sapiens
LKMFACSKFVSTPSLTLLKGRMIQNSNVHVKMERP

SEQ ID NO: 19972 - protein, 314 aa, Homo sapiens
LRSRATKSPESPDSVNSLLWPQNESEFRDKLSPIHIALNFSLDPQAPVDSHGLRPALHYQSKSRIEDKAQILLDCGEDNICVPDLQLEVFGEQNHVYLGDKNALNLTFHAQNVGEGGAYEAELRVTAPPEAEYSGLVRHPGNFSSLSCDYFAVNQSRLLVCDLGNPMKAGASLWGGLRFTVPHLRDTKKTIQFDFQILSKNLNNSQSDVVSFRLSVEAQAQVTLNGVSKPEAVLFPVSDWHPRDQPQKEEDLGPAVHHVYELINQGPSSISQGVLELSCPQALEGQQLLYVTRVTGLNCTTNHPINPKGLEVRS

SEQ ID NO: 19973 - protein, 85 aa, Homo sapiens
MRLSSGIWEDTPLEGTPKPDQCPPHLQNFSSLSCDYFAVNQSRLLVCDLGNPMKAGASLWGGLRFTVPHLRDTKKTIQFDFQILR

SEQ ID NO: 19974 - protein, 137 aa, Homo sapiens
LIVGSFGVDKAVVYRGRPIVSASASLTIFPAMFNPEERSCSLEGNPVACINLSFCLNASGKHVADSIGFTVELQLDWQKQKGGVRRALFLASRQATLTQTLLIQNGAREDCREMKIYLRVWPRGRGVDWPGRVATQN

SEQ ID NO: 19975 - protein, 67 aa, Homo sapiens [sequence omitted]

SEQ ID NO: 19976 - protein, 26 aa, Homo sapiens
MSPRALKANLGLGLGNQVWQEEGCMI

SEQ ID NO: 19977 - protein, 117 aa, Homo sapiens
LPTGSGPLGNTPVPSATPPIPDLPHLSPAPAPERPAYWPWEPLVLAAGRSDSGGRRVWGTPQRWASWRPETTGTEVGHLFPESGLEISELPILRPSSGERVPGSQESWALPLTSWRP

SEQ ID NO: 19978 - protein, 64 aa, Homo sapiens [sequence omitted]

SEQ ID NO: 19979 - protein, 57 aa, Homo sapiens
VRGNKMATETVELHKLKLAELKQECLARGLETKGIKQDLIHRLQAYLEEHGRRNKAH

SEQ ID NO: 19980 - protein, 48 aa, Homo sapiens
VTTIGQPCISTPKAGAPGGGGRGWGPSGVRGNKMATETVELHKLKSTS

SEQ ID NO: 19981 - protein, 78 aa, Homo sapiens
LLKELNHPNIVKLLDVIHTENKLYLVFEFLHQDLKKFMDASALTGIPLPLIKVMLLISSSHHGHVLGDWWQAIQGDIL

SEQ ID NO: 19982 - protein, 15 aa, Homo sapiens
MLNVKEYLSKVSCRS

SEQ ID NO: 19983 - protein, 304 aa, Homo sapiens
LWGTMSQSLLSPSSGYMPMNQGNLGESCQESAVSGSSERCPRPVSLHPMPRGCLASESSEGHVTGSEAELQEKVSMCRSRSRSRSPRPRGDSAYHSQRHSLLTPVTPLSPPGLEEEDVNGYVMPDTHLKGTPSSREGTLSSVGLSSVLGTEEEDEDEEYEYMNRRRRHSPPHPPRPSSLEELGYEYMDVGSDLSASLGSTQSCPLHPVPIMPTAGTTPDEDYEYMNRQRDGGGPGGDYAAMGACPASEQGYEEMRAFQGPGHQAPHVHYARLKTLRSLEATDSAFDNPDYWHSRLFPKANAQRT

SEQ ID NO: 19984 - protein, 667 aa, Homo sapiens
LSNSFPFAPQSIEPLDPSEKANKVLARIFKETELRKLKVLGSGVFGTVHKGVWIPEGESIKIPVCIKVIEDKSGRQSFQAVTDHMLAIGSLDHAHIVRLLGLCPGSSLQLVTQYLPLGSLLDHVRQHRGALGPQLLLNWGVQIAKGMYYLEEHGMVHRNLAARNVLLKSPSQVQVADFGVADLLPPDDKQLLYSEAKTPIKWMALESIHFGKYTHQSDVWSYGVTVWELMTFGAEPYAGLRLAEVPDLLEKGERLAQPQICTIDVYMVMVKCWMIDENIRPTFKELANEFTRMARDPPRYLVIKRESGPGIAPGPEPHGLTNKKLEEVELEPELDLDLDLEAEEDNLATTTLGSALSLPVGTLNRPRGSQSLLSPSSGYMPMNQGNLGESCQESAVSGSSERCPRPVSLHPMPRGCLASESSEGHVTGSEAELQEKVSMCRSRSRSRSPRPRGDSAYHSQRHSLLTPVTPLSPPGLEEEDVNGYVMPDTHLKGTPSSREGTLSSVGLSSVLGTEEEDEDEEYEYMNRRRRHSPPHPPRPSSLEELGYEYMDVGSDLSASLGSTQSCPLHPVPIMPTAGTTPDEDYEYMNRQRDGGGPGGDYAAMGACPASEQGYEEMRAFQGPGHQAPHVHYARLKTLRSLEATDSAFDNPDYWHSRLFPKANAQRT

SEQ ID NO: 19985 - protein, 468 aa, Homo sapiens
LPSLHFMPMSTILPVTSPCLPATGVTVWELMTFGAEPYAGLRLAEVPDLLEKGERLAQPQICTIDVYMVMVKCWMIDENIRPTFKELANEFTRMARDPPRYLVIKRESGPGIAPGPEPHGLTNKKLEEVELEPELDLDLDLEAEEDNLATTTLGSALSLPVGTLNRPRGSQSLLSPSSGYMPMNQGNLGESCQESAVSGSSERCPRPVSLHPMPRGCLASESSEGHVTGSEAELQEKVSMCRSRSRSRSPRPRGDSAYHSQRHSLLTPVTPLSPPGLEEEDVNGYVMPDTHLKGTPSSREGTLSSVGLSSVLGTEEEDEDEEYEYMNRRRRHSPPHPPRPSSLEELGYEYMDVGSDLSASLGSTQSCPLHPVPIMPTAGTTPDEDYEYMNRQRDGGGPGGDYAAMGACPASEQGYEEMRAFQGPGHQAPHVHYARLKTLRSLEATDSAFDNPDYWHSRLFPKANAQRT

SEQ ID NO: 19986 - protein, 26 aa, Homo sapiens
LKMKTSRAFFSEVERRFDAMPFTLRY

SEQ ID NO: 19987 - protein, 72 aa, Homo sapiens [sequence omitted]

SEQ ID NO: 19988 - protein, 59 aa, Homo sapiens
LEISKQHHQNEILSQKIKEITSFPYHLPTQVQLDLAETDLSQGVARWYDLMDNKDKGSS

SEQ ID NO: 19989 - protein, 265 aa, Homo sapiens
LKDILADLIPKEQARIKTFRQQHGKTVVGQITVDMMYGGMRGMKGLVYETSVLDPDEGIRFRGFSIPECQKLLPKAKGGEEPLPEGLFWLLVTGHIPTEEQVSWLSKEWAKRAALPSHVVTMLDNFPTNLHPMSQLSAAVTALNSESNFARAYAQGISRTKYWELIYEDSMDLIAKLPCVAAKIYRNLYREGSGIGAIDSNLDWSHNFTNMLGYTDHQFTELTRLYLTIHSSHERAGRASPWTGKSGSACLANTAAEGSWQRCVR

SEQ ID NO: 19990 - protein, 57 aa, Homo sapiens
VRVQRSSSAWATAAALGAEVERPHYAKDERLGLAGPASGGPAGNRLGSEEPGSPLWR

SEQ ID NO: 19991 - protein, 126 aa, Homo sapiens [sequence omitted]

SEQ ID NO: 19992 - protein, 41 aa, Homo sapiens
LNRENQAQSKWKWAEIPPGLVQGAEPARFEKKAKRCWGAEL

SEQ ID NO: 19993 - protein, 645 aa, Homo sapiens
MNGLATSLGKGQESAIGGSSAIGEYIRPLPQPGDRPEPLSAKPTFLSRSGSARCRSESDMENERNSNTSKQRYSGKVHLCVARYSYNPFDGPNENPEAELPLTAGKYLYVYGDMDEDGFYEGELLDGQRGLVPSNFVDFVQDNESRLASTLGNEQDQNFINHSGIGLEGEHILDLHSPTHIDAGITDNSAGTLDVNIDDIGEDIVPYPRKITLIKQLAKSVIVGWEPPAVPPGWGTVSSYNVLVDKETRMNLTLGSRTKALIEKLNMAACTYRISVQCVTSRGSSDELQCTLLVGKDVVVAPSHLRVDNITQISAQLSWLPTNSNYSHVIFLNEEEFDIVKAARYKYQFFNLRPNMAYKVKVLAKPHQMPWQLPLEQREKKEAFVEFSTLPAGPPAPPQDVTVQAGVTPATIRVSWRPPVLTPTGLSNGANVTGYGVYAKGQRVAEVIFPTADSTAVELVRLRSLEAKGVTVRTLSAQGESVDSAVAAVPPELLVPPTPHPRPAPQSKPLASSGVPETKDEHLGPHARMDEAWEQSRAPGPVHGHMLEPPVGPGRRSPSPSRILPQPQGTPVSTTVAKAMAREAAQRVAESSRLEKRSVFLERSSAGQYAASDEEDAYDSPDFKRRGASVDDFLKGSELGKQMVS

SEQ ID NO: 19994 - protein, 657 aa, Homo sapiens
LPQPQPHPPGPHSPSSRSSAPSQNSPAPCLARSAPPSQPQLEVPGAPAEPEACWGMRSMKALQKALSRAGSHCGRGGWGHPSRSPLLGGGVRHHLSEAAAQGRETPHSHQPQHQDHDSSESGMLSRLGDLLFYTIAEGQERIPIHKFTTALKATGLQTSDPRLRDCMSEMHRVVQESSSGGLLDRDLFRKCVSSNIVLLTQAFRKKFVIPDFEEFTGHVDRIFEDVKELTGGKVAAYIPQLAKSNPDLWGVSLCTVDGQRHSVGHTKIPFCLQSCVKPLTYAISISTLGTDYVHKFVGKEPSGLRYNKLSLNEEGIPHNPMVNAGAIVVSSLIKMDCNKAEKFDFVLQYLNKMAGNEYMGFSNATFQSEKETGDRNYAIGYYLKEKKCFPKGVDMMAALDLYFQLCSVEVTCESGSVMAATLANGGICPITGESVLSAEAVRNTLSLMHSCGMYDFSGQFAFHVGLPAKSAVSGAILLVVPNVMGMMCLSPPLDKLGNSHRGTSFCQKLVSLFNFHNYDNLRHCARKLDPRREGAEIRNKTVVNLLFAAYSGDVSALRRFALSAMDMEQKDYDSRTALHVAAAEGHIEVVKFLIEACKVNPFAKDRWGNIPLDDAVQFNHLEVVKLLQDYQDSYTLSETQAEAAAEALSKENLESMV

SEQ ID NO: 19995 - protein, 7 aa, Homo sapiens
LLQELTM

SEQ ID NO: 19996 - protein, 96 aa, Homo sapiens
LVPRSLHKMPGEATETVPATEQELPQPQAETGSGTESDSDESVPELEEQDSTQATTQQAQLAAAAEIDEEPVSKAKQSRSEKKARKVRFEKDFRIL

SEQ ID NO: 19997 - protein, 75 aa, Homo sapiens
LVPRSLHKMPGEATETVPATEQELPQPQAETGSGTESDSDESVPELEEQDSTQATTQQAQVGILLLTGIGSKKQG

SEQ ID NO: 19998 - protein, 105 aa, Homo sapiens
LEALLGHRVPTRPWASGQNGVCGWCPGKSRVEGLRGGPRIRACRDGSSCSVEGGRGVRLVLGTASQDPEKEMPGEATETVPATEQELPQPQAETVVSHLRVWNRI

SEQ ID NO: 19999 - protein, 42 aa, Homo sapiens
LVPRSLHKMPGEATETVPATEQELPQPQAETVVSHLRVWNRI

SEQ ID NO: 20000 - protein, 621 aa, Homo sapiens
LPTPSARQPGSQRSSGPRSLCVLRGRRRGEAASAAGEGGGAEAQTEARRLGERRRGGRDRAWTAVDTASCAGKRAARSRRRAPGTEKGSPGDLRPSMHRAPSPTAEQPPGGGDSARRTLQPRLKPSARAMALPRTLGELQLYRVLQRANLLSYYETFIQQGGDDVQQLCEAGEEEFLEIMALVGMATKPLHVRRLQKALREWATNPGLFSQPVPAVPVSSIPLFKISETAGTRKGSMSNGHGSPGEKAGSARSFSPKSPLELGEKLSPLPGGPGAGDPRIWPGRSTPESDVGAGGEEEAGSPPFSPPAGGGVPEGTGAGGLAAGGTGGGPDRLEPEMVRMVVESVERIFRSFPRGDAGEVTSLLKLNKKLARSVGHIFEMDDNDSQKEEEIRKYSIIYGRFDSKRREGKQLSLHELTINEAAAQFCMRDNTLLLRRVELFSLSRQVARESTYLSSLKGSRLHPEELGGPPLKKLKQEVGEQSHPEIQQPPPGPESYVPPYRPSLEEDSASLSGESLDGHLQAVGSCPRLTPPPADLPLALPAHGLWSRHILQQTLMDEGLRLARLVSHDRVGRLSPCVPAKPPLAEFEEGLLDRCPAPGPHPALVEGRRSSVKVEAEASRQ

SEQ ID NO: 20001 - protein, 493 aa, Homo sapiens
VDTASCAGKRAARSRRRAPGTEKGSPGDLRPSMHRAPSPTAEQPPGGGDSARRTLQPRLKPSARAMALPRTLGELQLYRVLQRANLLSYYETFIQQGGDDVQQLCEAGEEEFLEIMALVGMATKPLHVRRLQKALREWATNPGLFSQPVPAVPVSSIPLFKISETAGTRKGSMSNGHGSPGEKAGSARSFSPKSPLELGEKLSPLPGGPGAGDPRIWPGRSTPESDVGAGGEEEAGSPPFSPPAGGGVPEGTGAGGLAAGGTGGGPDRLEPEMVRMVVESVERIFRSFPRGDAGEVTSLLKLNKKLARSVGHIFEMDDNDSQKEEEIRKYSIIYGRFDSKRREGKQLSLHELTINEAAAQFCMRDNTLLLRRVELFSLSRQVARESTYLSSLKGSRLHPEELGGPPLKKLKQEVGEQSHPEIQQPPPGPESYVPPYRPSLEEDSASLSGESLDGHLQEFEEGLLDRCPAPGPHPALVEGRRSSVKVEAEASRQ

SEQ ID NO: 20002 - protein, 106 aa, Homo sapiens
LDWCLQTQDLRLLAHTDPHALHPRNLVTTLDPSSALLLPPHLLHGHKTVGLQAITSRGLERGHKEGAWCPHPCPERGGKDSASRASGVFPSLTQHTPILFRFAPVV

SEQ ID NO: 20003 - protein, 42 aa, Homo sapiens
LSLGGNLQVPDHVSVGSGLQDAPRKSAAALCRLSPTPAASSG

SEQ ID NO: 20004 - protein, 56 aa, Homo sapiens
LRKGEDSRGVAEVRGCLRGNLQVPDHVSVGSGLQDAPRKSAAALCRLSPTPAASSG

SEQ ID NO: 20005 - protein, 61 aa, Homo sapiens
LRKGEDSRGVAERKAYWRNLSRRGNLQVPDHVSVGSGLQDAPRKSAAALCRLSPTPAASSG

SEQ ID NO: 20006 - protein, 57 aa, Homo sapiens
LHPDAPRAMSPHAELEDLKGNLQVPDHVSVGSGLQDAPRKSAAALCRLSPTPAASSG

SEQ ID NO: 20007 - protein, 191 aa, Homo sapiens
LGKNCSFHPDNLFHEEFCTRKNYFVLLKNSKTNKNGAKGLVLVPRPGSDFPPHDPVVPTANPSYVPPPQCQPGEFACANSRCIQERWKCDGDNDCLDNSDEAPALCHQHTCPSDRFKCENNRCIPNRWLCDGDNDCGNSEDESNATCSGVERGSDHTRHPSVKEAGETRGPGSVAHAYNLSTLGGQGERIT

SEQ ID NO: 20008 - protein, 506 aa, Homo sapiens
MRSPNGLLPTACCPRPELVAGPPATSELRCCTSLCFGRLGLCRDVGSWSGWPFGLSTATQPRLRLGKQTGAGQARRACRTVILRCGSCCRGRRTGSVVAWSSLPQRYYGGAEVVDEIELLCQRRALEAFDLDPAQWGVNVQPYSGSPANLAVYTALLQPHDRIMGLDLPDGGHLTHGYMSDVKRISATSIFFESMPYKLNPKTGLIDYNQLALTARLFRPRLIIAGTSAYARLIDYARMREVCDEVKAHLLADMAHISGLVAAKVIPSPFKHADIVTTTTHKTLRGARSGLIFYRKGVKAVDPKTGREIPYTFEDRINFAVFPSLQGGPHNHAIAAVAVALKQACTPMFREYSLQVLKNARAMADALLERGYSLVSGGTDNHLVLVDLRPKGLDGARAERVLELVSITANKNTCPGDRSAITPGGLRLGAPALTSRQFREDDFRRVVDFIDEGVNIGLEVKSKTAKLQDFKSFLLKDSETSQRLANLRQRVEQFARAFPMPGFDEH

SEQ ID NO: 20009 - protein, 132 aa, Homo sapiens
LVAGPPATSELRCCTSLCFGRLGYYGGAEVVDEIELLCQRRALEAFDLDPAQWGVNVQPYSGSPANLAVYTALLQPHDRIMGLDLPDGGHLTHGYMSDVKRISATSIFFESMPYKLNGFSCLCVCPAQNWPH

SEQ ID NO: 20010 - protein, 138 aa, Homo sapiens
MLYFSLFWAARPLQRCGQLVRMAIRAQHSNAAQTQTGEANRGWTGQESLSDSDPEMWELLQREKDRQCRGLELIASEVGPGEMGRGWATMGTGSNKVILTDISPKPPFTLRTFLWALSSFLISLKQRQCKSSLWGWDI

SEQ ID NO: 20011 - protein, 71 aa, Homo sapiens
MLYFSLFWAARPLQRCGQLVRMAIRAQHSNAAQTQTGEANRGWTGQESLSDSDPEMWELLQREKDRPWGPV

SEQ ID NO: 20012 - protein, 104 aa, Homo sapiens
MLYFSLFWAARPLQRCGQLVRMAIRAQHSNAAQTQTGEANRGWTGQESLSDSDPEMWELLQREKDRQCRGLELIASENFCSRAALEALGSCLNNKYSEGYPGKR

SEQ ID NO: 20013 - protein, 213 aa, Homo sapiens [sequence omitted]

SEQ ID NO: 20014 - protein, 513 aa, Homo sapiens
MSGVFGLVSQAEPFRPALSPADDATELHCLHQAGVPAAVRAGRRWNGLCRDVGSWSGWPFGLSTATQPRLRLGKQTGAGQARRACRTVILRCGSCCRGRRTGSVVAWSSLPQRYYGGAEVVDEIELLCQRRALEAFDLDPAQWGVNVQPYSGSPANLAVYTALLQPHDRIMGLDLPDGGHLTHGYMSDVKRISATSIFFESMPYKLNPKTGLIDYNQLALTARLFRPRLIIAGTSAYARLIDYARMREVCDEVKAHLLADMAHISGLVAAKVIPSPFKHADIVTTTTHKTLRGARSGLIFYRKGVKAVDPKTGREIPYTFEDRINFAVFPSLQGGPHNHAIAAVAVALKQACTPMFREYSLQVLKNARAMADALLERGYSLVSGGTDNHLVLVDLRPKGLDGARAERVLELVSITANKNTCPGDRSAITPGGLRLGAPALTSRQFREDDFRRVVDFIDEGVNIGLEVKSKTAKLQDFKSFLLKDSETSQRLANLRQRVEQFARAFPMPGFDEH

SEQ ID NO: 20015 - protein, 94 aa, Homo sapiens
LLASGRGPGGSEGWKEVERPLQRCGQLVRMAIRAQHSNAAQTQTGEANRGWTGQESLSDSDPEMWELLQREKDRQCRGLELIASEILWGSRGGG

SEQ ID NO: 20016 - protein, 512 aa, Homo sapiens
LLASGRGPGGSEGWKEVERPLQRCGQLVRMAIRAQHSNAAQTQTGEANRGWTGQESLSDSDPEMWELLQREKDRQCRGLELIASENFCSRAALEALGSCLNNKYSEGYPGKRYYGGAEVVDEIELLCQRRALEAFDLDPAQWGVNVQPYSGSPANLAVYTALLQPHDRIMGLDLPDGGHLTHGYMSDVKRISATSIFFESMPYKLNPKTGLIDYNQLALTARLFRPRLIIAGTSAYARLIDYARMREVCDEVKAHLLADMAHISGLVAAKVIPSPFKHADIVTTTTHKTLRGARSGLIFYRKGVKAVDPKTGREIPYTFEDRINFAVFPSLQGGPHNHAIAAVAVALKQACTPMFREYSLQVLKNARAMADALLERGYSLVSGGTDNHLVLVDLRPKGLDGARAERVLELVSITANKNTCPGDRSAITPGGLRLGAPALTSRQFREDDFRRVVDFIDEGVNIGLEVKSKTAKLQDFKSFLLKDSETSQRLANLRQRVEQFARAFPMPGFDEH

SEQ ID NO: 20017 - protein, 222 aa, Homo sapiens
LLYNLWPQPLPTLPLPPLTGPLQRCGQLVRMAIRAQHSNAAQTQTGEANRGWTGQESLSDSDPEMWELLQREKDRQCRGLELIASENFCSRAALEALGSCLNNKYSEGYPGKRYYGGAEVVDEIELLCQRRALEAFDLDPAQWGVNVQPYSGSPANLAVYTALLQPHDRIMGLDLPDGGHLTHGYMSDVKRISATSIFFESMPYKLNGFSCLCVCPAQNWPH

SEQ ID NO: 20018 - protein, 513 aa, Homo sapiens
LLYNLWPQPLPTLPLPPLTGPLQRCGQLVRMAIRAQHSNAAQTQTGEANRGWTGQESLSDSDPEMWELLQREKDRQCRGLELIASENFCSRAALEALGSCLNNKYSEGYPGKRYYGGAEVVDEIELLCQRRALEAFDLDPAQWGVNVQPYSGSPANLAVYTALLQPHDRIMGLDLPDGGHLTHGYMSDVKRISATSIFFESMPYKLNPKTGLIDYNQLALTARLFRPRLIIAGTSAYARLIDYARMREVCDEVKAHLLADMAHISGLVAAKVIPSPFKHADIVTTTTHKTLRGARSGLIFYRKGVKAVDPKTGREIPYTFEDRINFAVFPSLQGGPHNHAIAAVAVALKQACTPMFREYSLQVLKNARAMADALLERGYSLVSGGTDNHLVLVDLRPKGLDGARAERVLELVSITANKNTCPGDRSAITPGGLRLGAPALTSRQFREDDFRRVVDFIDEGVNIGLEVKSKTAKLQDFKSFLLKDSETSQRLANLRQRVEQFARAFPMPGFDEH

SEQ ID NO: 20019 - protein, 91 aa, Homo sapiens
LWPQPLPTLPLPPLTGPLQRCGQLVRMAIRAQHSNAAQTQTGEANRGWTGQESLSDSDPEMWELLQREKDRQCRGLELIASEILWGSRGGG

SEQ ID NO: 20020 - protein, 79 aa, Homo sapiens
LKVEPLQRCGQLVRMAIRAQHSNAAQTQTGEANRGWTGQESLSDSDPEMWELLQREKDRQCRGLELIASEILWGSRGGG

SEQ ID NO: 20021 - protein, 204 aa, Homo sapiens
LKPLQRCGQLVRMAIRAQHSNAAQTQTGEANRGWTGQESLSDSDPEMWELLQREKDRQCRGLELIASENFCSRAALEALGSCLNNKYSEGYPGKRYYGGAEVVDEIELLCQRRALEAFDLDPAQWGVNVQPYSGSPANLAVYTALLQPHDRIMGLDLPDGGHLTHGYMSDVKRISATSIFFESMPYKLNGFSCLCVCPAQNWPH

SEQ ID NO: 20022 - protein, 495 aa, Homo sapiens
LKPLQRCGQLVRMAIRAQHSNAAQTQTGEANRGWTGQESLSDSDPEMWELLQREKDRQCRGLELIASENFCSRAALEALGSCLNNKYSEGYPGKRYYGGAEVVDEIELLCQRRALEAFDLDPAQWGVNVQPYSGSPANLAVYTALLQPHDRIMGLDLPDGGHLTHGYMSDVKRISATSIFFESMPYKLNPKTGLIDYNQLALTARLFRPRLIIAGTSAYARLIDYARMREVCDEVKAHLLADMAHISGLVAAKVIPSPFKHADIVTTTTHKTLRGARSGLIFYRKGVKAVDPKTGREIPYTFEDRINFAVFPSLQGGPHNHAIAAVAVALKQACTPMFREYSLQVLKNARAMADALLERGYSLVSGGTDNHLVLVDLRPKGLDGARAERVLELVSITANKNTCPGDRSAITPGGLRLGAPALTSRQFREDDFRRVVDFIDEGVNIGLEVKSKTAKLQDFKSFLLKDSETSQRLANLRQRVEQFARAFPMPGFDEH

SEQ ID NO: 20023 - protein, 420 aa, Homo sapiens
VSWPGAHCLRDTMGEQRWWMKLSCCASAGPWKPLTWILHSGESMSSPTPGPQPTWPSTQPFCNLTTGSWGWTCPMGAISPTATCLTSSGYQPRPSSSSLCPISSTALAVCVSVQPKTGLIDYNQLALTARLFRPRLIIAGTSAYARLIDYARMREVCDEVKAHLLADMAHISGLVAAKVIPSPFKHADIVTTTTHKTLRGARSGLIFYRKGVKAVDPKTGREIPYTFEDRINFAVFPSLQGGPHNHAIAAVAVALKQACTPMFREYSLQVLKNARAMADALLERGYSLVSGGTDNHLVLVDLRPKGLDGARAERVLELVSITANKNTCPGDRSAITPGGLRLGAPALTSRQFREDDFRRVVDFIDEGVNIGLEVKSKTAKLQDFKSFLLKDSETSQRLANLRQRVEQFARAFPMPGFDEH

SEQ ID NO: 20024 - protein, 195 aa, Homo sapiens
LTLPPTTPELLQPSCAGGPGVLSEQQVLGGLSWQEVRAGGQCQGWCSQWGNPPVPSQCSLRSELPSPLLMVESPFSVPSLPLSHGRYYGGAEVVDEIELLCQRRALEAFDLDPAQWGVNVQPYSGSPANLAVYTALLQPHDRIMGLDLPDGGHLTHGYMSDVKRISATSIFFESMPYKLNGFSCLCVCPAQNWPH

SEQ ID NO: 20025 - protein, 405 aa, Homo sapiens
LARDTMGEQRWWMKLSCCASAGPWKPLTWILHSGESMSSPTPGPQPTWPSTQPFCNLTTGSWGWTCPMGASDLTHGYMSDVKRISATSIFFESMPYKLNPKTGLIDYNQLALTARLFRPRLIIAGTSAYARLIDYARMREVCDEVKAHLLADMAHISGLVAAKVIPSPFKHADIVTTTTHKTLRGARSGLIFYRKGVKAVDPKTGREIPYTFEDRINFAVFPSLQGGPHNHAIAAVAVALKQACTPMFREYSLQVLKNARAMADALLERGYSLVSGGTDNHLVLVDLRPKGLDGARAERVLELVSITANKNTCPGDRSAITPGGLRLGAPALTSRQFREDDFRRVVDFIDEGVNIGLEVKSKTAKLQDFKSFLLKDSETSQRLANLRQRVEQFARAFPMPGFDEH

SEQ ID NO: 20026 - protein, 413 aa, Homo sapiens
LARDTMGEQRWWMKLSCCASAGPWKPLTWILHSGESMSSPTPGPQPTWPSTQPFCNLTTGSWGWTCPMGAISPTATCLTSSGYQPRPSSSSLCPISSTALAVCVSVQPKTGLIDYNQLALTARLFRPRLIIAGTSAYARLIDYARMREVCDEVKAHLLADMAHISGLVAAKVIPSPFKHADIVTTTTHKTLRGARSGLIFYRKGVKAVDPKTGREIPYTFEDRINFAVFPSLQGGPHNHAIAAVAVALKQACTPMFREYSLQVLKNARAMADALLERGYSLVSGGTDNHLVLVDLRPKGLDGARAERVLELVSITANKNTCPGDRSAITPGGLRLGAPALTSRQFREDDFRRVVDFIDEGVNIGLEVKSKTAKLQDFKSFLLKDSETSQRLANLRQRVEQFARAFPMPGFDEH

SEQ ID NO: 20027 - protein, 159 aa, Homo sapiens
LERRAVLRVKEESELPCFLLRALAVCVSVQPKTGLIDYNQLALTARLFRPRLIIAGTSAYARLIDYARMREVCDEVKAHLLADMAHISGLVAAKVIPSPFKHADIVTTTTHKTLRGARSGSLRSGLAFPCLQAYSWGTVGLDLRGIHSHLQPLRLLPSL

SEQ ID NO: 20028 - protein, 171 aa, Homo sapiens
LTIHLSHRSGLIFYRKGVKAVDPKTGREIPYTFEDRINFAVFPSLQGGPHNHAIAAVAVALKQVGDPVFVGCGGAMAWRLRPCTLLTDAGADGREMPGWKESRLGSQSYAEGAGPEGSAGLGSRPRVTAATVSSPGLHPHVPGVLPAGSEECSGHGRCPARARLLTGIRWY

SEQ ID NO: 20029 - protein, 130 aa, Homo sapiens
LLLSHLQACTPMFREYSLQVLKNARAMADALLERGYSLVSGGTDNHLVLVDLRPKGLDGARAERVLELVSITANKNTCPGDRSAITPGGLRLGAPALTSRQFREDDFRRVVDFIDEGVNIGLEVKSKTGE

SEQ ID NO: 20030 - protein, 92 aa, Homo sapiens
LVSGGTDNHLVLVDLRPKGLDGARAERVLELVSITANKNTCPGDRSAITPGGLRLGETWGLRREGAPMLDDCQVTLGYAHPSPCASFQGPQP

SEQ ID NO: 20031 - protein, 55 aa, Homo sapiens
LPGDLGLCSSLPLCLVPGAPALTSRQFREDDFRRVVDFIDEGVNIGLEVKSKTGE

SEQ ID NO: 20032 - protein, 50 aa, Homo sapiens
LFPHPLSLAKLQDFKSFLLKDSETSQRLANLRQRVEQFARAFPMPGFDEH

SEQ ID NO: 20033 - protein, 108 aa, Homo sapiens
MLRRAPVSDAGTGFPPHSTSPDQVFGCQLESLCQREGDTVPSFLRLCIAAVDKRGLDVDGIYRVSGNLAVVQKLRFLVDRERAVTSDGRYVFPEQPGQGTYMEDPSDP

SEQ ID NO: 20034 - protein, 76 aa, Homo sapiens
VALFAAIVSLCDEKWAKWAPLSPSSVALSLGRYFFLLSGWEQDDLTNQWLEWEATELQVGLRYGGCQAGPCSAWPS

SEQ ID NO: 20035 - protein, 102 aa, Homo sapiens
LLPYIPSHLRPLFCGNSEADQLGKIFDLIGLPPEDDWPRDVSLPRGAFPPRGPRPVQSVVPEMEESGAQLLLEMLTFNPHKRISAFRALQHSYLHKDEGNPE

SEQ ID NO: 20036 - protein, 311 aa, Homo sapiens [sequence omitted]

SEQ ID NO: 20037 - protein, 94 aa, Homo sapiens
VRPLFCGNSEADQLGKIFDLIGLPPEDDWPRDVSLPRGAFPPRGPRPVQSVVPEMEESGAQLLLEMLTFNPHKRISAFRALQHSYLHKDEGNPE

SEQ ID NO: 20038 - protein, 82 aa, Homo sapiens
VRVSLDLRMATSRYEPVAEIGVGAYGTVYKARDPHSGHFVALKSVRVPNGGGGGGGLPISTVREVALLRRLEAFEHPNVVRI

SEQ ID NO: 20039 - protein, 81 aa, Homo sapiens
VRVSLDLRMATSRYEPVAEIGVGAYGTVYKARDPHSGHFVALKSVRVPNGGGGGGGLPISTVREVALLRRLEAFEHPNVVR

SEQ ID NO: 20040 - protein, 11 aa, Homo sapiens
LLRTELGCMGP

SEQ ID NO: 20041 - protein, 93 aa, Homo sapiens
LGVILPMQGLVYTITDVLELHDWMCTHFEEHPLFERVPLEDLSEDPVVGHLGTSTEEGKKVLRNGGKNFPAIFRRIQDPVLQAVTSQTSLPGH

SEQ ID NO: 20042 - protein, 306 aa, Homo sapiens
LPPTRMAASLTCASGLRLHVDLVEKPRTGIMAAETRNVAGAEAPPPQKRYYRQRAHSNPMADHTLRYPVKPEEMDWSELYPEFFAPLTQNQSHDDPKDKKEKRAQAQVEFADIGCGYGGLLVELSPLFPDTLILGLEIRVKVSDYVQDRIRALRAAPAGGFQNIACLRSNAMKHLPNFFYKGQLTKMFFLFPDPHFKRTKHKWRIISPTLLAEYAYVLRVGGLVYTITDVLELHDWMCTHFEEHPLFERVPLEDLSEDPVVGHLGTSTEEGKKVLRNGGKNFPAIFRRIQDPVLQAVTSQTSLPGH

SEQ ID NO: 20043 - protein, 166 aa, Homo sapiens
VDLVEKPRTGIMAAETRNVAGAEAPPPQKRYYRQRAHSNPMADHTLRYPVKPEEMDWSELYPEFFAPLTQNQSHDDPKDKKEKRAQAQVEFADIGCGYGGLLADKDVLPLPRPTFQADKAQVANHQSHPASRICLRAKSWGAGVYHNRCAGATRLDVHSFRRAPTV

SEQ ID NO: 20044 - protein, 118 aa, Homo sapiens
LVEKPRTGIMAAETRNVAGAEAPPPQKRYYRQRAHSNPMADHTLRYPVKPEEMDWSELYPEFFAPLTQNQSHDDPKDKKEKRAQAQVEFADIGCGYGGLLDTGDISMERLHLPSTLGL

SEQ ID NO: 20045 - protein, 100 aa, Homo sapiens [sequence omitted]

SEQ ID NO: 20046 - protein, 47 aa, Homo sapiens
VDLVEKPRTGIMAAETRNVAGAEAPPPQKRYYRQRAHSNPMADHTLR

SEQ ID NO: 20047 - protein, 252 aa, Homo sapiens
LHKDCPGLRDGTGSMSSGYSSLEEDAEDFFFTARTSFFRRAPQGKPRSGQQDVEKEKETHSYLSKEEIKEKVHKYNLAVTDKLKMTLNSNGIYTGFIKVQMELCKPPQTSPNSGKLSPSSNGCMNTLHISSTNTVGEVIEALLKKFLVTESPAKFALYKRCHREDQVYACKLSDREHPLYLRLVAGPRTDTLSFVLREHEIGEWEAFSLPELQNFLRILDKEEDEQLQNLKRRYTAYRQKLEEALREVWKPD

SEQ ID NO: 20048 - protein, 126 aa, Homo sapiens
LPGAARREPRGAGGRRTPSLAACAPGRPPARDGTGSMSSGYSSLEEDAEDFFFTARTSFFRRAPQGKPRSGQQDVEKEKETHSYLSKEEIKEKVHKYNLAVTDKLKMTLSTPASSQTGNIHSTCVW

SEQ ID NO: 20049 - protein, 274 aa, Homo sapiens
LPGAARREPRGAGGRRTPSLAACAPGRPPARDGTGSMSSGYSSLEEDAEDFFFTARTSFFRRAPQGKPRSGQQDVEKEKETHSYLSKEEIKEKVHKYNLAVTDKLKMTLNSNGIYTGFIKVQMELCKPPQTSPNSGKLSPSSNGCMNTLHISSTNTVGEVIEALLKKFLVTESPAKFALYKRCHREDQVYACKLSDREHPLYLRLVAGPRTDTLSFVLREHEIGEWEAFSLPELQNFLRILDKEEDEQLQNLKRRYTAYRQKLEEALREVWKPD

SEQ ID NO: 20050 - protein, 83 aa, Homo sapiens
MLVANIDLGPTILDIAGYDLNKTQMDGMSLLPILRGASNLTWRSDVLVEYQGEGRNVTDPTCPSLSPGVSVSNSLNQLRQLSH

SEQ ID NO: 20051 - protein, 21 aa, Homo sapiens
MPAKTVVIWEGISLEEKDTTN

SEQ ID NO: 20052 - protein, 12 aa, Homo sapiens
MSNAKQYMNSSK

SEQ ID NO: 20053 - protein, 62 aa, Homo sapiens
MAQSNDSRRPHKKYTIIKKENKKAVYEKLSISRTASVLLHGRRFWSTAIARLQENTLCGGLS

SEQ ID NO: 20054 - protein, 111 aa, Homo sapiens
LCVEKALAMDRSGFGEISSPVIREAEVTRTARKQSAQKRVLLQASQDENFGNTTPRNQVIPRTPSSFRQPFTPTSRSLLRQPDISCILGTGGKSPRLTQSSGFFGNLSMHP

SEQ ID NO: 20055 - protein, 94 aa, Homo sapiens
VTRTARKQSAQKRVLLQASQDENFGNTTPRNQVIPRTPSSFRQPCSFYQPFVYSYPNKPKLTKAARYFLHSWNRREVAPTYAVFRVLWKSLHGY

SEQ ID NO: 20056 - protein, 164 aa, Homo sapiens
LNRNFPDAFEYNNVSRQPETVAVMKWLKTETFVLSANLHGGALVASYPFDNGVQATGALYSRSLTPDDDVFQYLAHTYASRNPNMKKGDECKNKMNFPNGVTNGYSWYPLQGGMQDYNYIWAQCFEITLELSCCKYPREEKLPSFWNNNKASLIEYIKQVHLGL

SEQ ID NO: 20057 - protein, 28 aa, Homo sapiens
LSFILQWVAWRNRCQNRDVRQYVQGCGV

SEQ ID NO: 20058 - protein, 10 aa, Homo sapiens
VSPSNSPSFG

SEQ ID NO: 20059 - protein, 80 aa, Homo sapiens
LVPSTSCEGIHLCAELLGTMASLSLAPVNIFKAGADEERAETARLTSFIGAIAIGDLVKSTLGPKGMVRKIEKFYILILF

SEQ ID NO: 20060 - protein, 114 aa, Homo sapiens
LVPSTSCEGIHLCAELLGTMASLSLAPVNIFKAGADEERAETARLTSFIGAIAIGDLVKSTLGPKGMDKILLSSGRDASLMVTNDGATILKNIGVDNPAAKVLVGKSEYTFSPT

SEQ ID NO: 20061 - protein, 168 aa, Homo sapiens
LVPSTSCEGIHLCAELLGTMASLSLAPVNIFKAGADEERAETARLTSFIGAIAIGDLVKSTLGPKGMDKILLSSGRDASLMVTNDGATILKNIGVDNPAAKVLVDMSRVQDDEVGDGTTSVTVLAAELLRVRATKQLFFPTVFLSIRGNLVLTSSVFTIEECLIIFYL

SEQ ID NO: 20062 - protein, 170 aa, Homo sapiens
LVPSTSCEGIHLCAELLGTMASLSLAPVNIFKAGADEERAETARLTSFIGAIAIGDLVKSTLGPKGMDKILLSSGRDASLMVTNDGATILKNIGVDNPAAKVLVDMSRVQDDEVGDGTTSVTVLAAELLREAESLIAKKIHPQTIIAGWREATKAAREALLSSAVDHGFV

SEQ ID NO: 20063 - protein, 249 aa, Homo sapiens
LVPSTSCEGIHLCAELLGTMASLSLAPVNIFKAGADEERAETARLTSFIGAIAIGDLVKSTLGPKGMDKILLSSGRDASLMVTNDGATILKNIGVDNPAAKVLVDMSRVQDDEVGDGTTSVTVLAAELLREAESLIAKKIHPQTIIAGWREATKAAREALLSSAVDHGSDEVKFRQDLMNIAGTTLSSKLLTHHKDHFTKLAVEAVLRLKGSGNLEAIHIIKKLGGSLADSYLDEGMYECQIQEALIRC

SEQ ID NO: 20064 - protein, 554 aa, Homo sapiens
LVPSTSCEGIHLCAELLGTMASLSLAPVNIFKAGADEERAETARLTSFIGAIAIGDLVKSTLGPKGMDKILLSSGRDASLMVTNDGATILKNIGVDNPAAKVLVDMSRVQDDEVGDGTTSVTVLAAELLREAESLIAKKIHPQTIIAGWREATKAAREALLSSAVDHGSDEVKFRQDLMNIAGTTLSSKLLTHHKDHFTKLAVEAVLRLKGSGNLEAIHIIKKLGGSLADSYLDEGFLLDKKIGVNQPKRIENAKILIANTGMDTDKIKIFGSRVRVDSTAKVAEIEHAEKEKMKEKVERILKHGINCFINRQLIYNYPEQLFGAAGVMAIEHADFAGVERLALVTGGEIASTFDHPELVKLGSCKLIEEVMIGEDKLIHFSGVALGEACTIVLRGATQQILDEAERSLHDALCVLAQTVKDSRTVYGGGCSEMLMAHAVTQLANRTPGKEAVAMESYAKALRMLPTIIADNAGYDSADLVAQLRAAHSEGNTTAGLDMREGTIGDMAILGITESFQVKRQVLLSAAEAAEVILRVDNIIKAAPRKRVPDHHPC

SEQ ID NO: 20065 - protein, 549 aa, Homo sapiens
LVPSTSCEGIHLCAELLGTMASLSLAPVNIFKAGADEERAETARLTSFIGAIAIGDLVKSTLGPKGMDKILLSSGRDASLMVTNDGATILKNIGVDNPAAKVLVDMSRVQDDEVGDGTTSVTVLAAELLREAESLIAKKIHPQTIIAGWREATKAAREALLSSAVDHGSDEVKFRQDLMNIAGTTLSSKLLTHHKDHFTKLAVEAVLRLKGSGNLEAIHIIKKLGGSLADSYLDEGFLLDKKIGVNQPKRIENAKILIANTGMDTDKIKIFGSRVRVDSTAKVAEIEHAEKEKMKEKVERILKHGINCFINRQLIYNYPEQLFGAAGVMAIEHADFAGVERLALVTGGEIASTFDHPELVKLGSCKLIEEVMIGEDKLIHFSGVALGEACTIVLRGATQQILDEAERSLHDALCVLAQTVKDSRTVYGGGCSEMLMAHAVTQLANRTPGKEAVAMESYAKALRMLPTIIADNAGYDSADLVAQLRAAHSEGNTTAGLGNVSLITTPVKHSHVLSIFGPVSSKVVFERYSIKEDCGICLSVPIISLSLDI

SEQ ID NO: 20066 - protein, 424 aa, Homo sapiens
LCAELLGTMASLSLAPVNIFKAGADEERAETARLTSFIGAIAIGDLVKSTLGPKGMDKILLSSGRDASLMVTNDGATILKNIGVDNPAAKVLVDMSRVQDDEVGDGTTSVTVLAAELLREAESLIAKKIHPQTIIAGWREATKAAREALLSSAVDHGSDEVKFRQDLMNIAGTTLSSKLLTHHKDHFTKLAVEAVLRLKGSGNLEAIHIIKKLGGSLADSYLDEGFLLDKKIGVNQPKRIENAKILIANTGMDTDKIKIFGSRVRVDSTAKVAEIEHAEKEKMKEKVERILKHGINCFINRQLIYNYPEQLFGAAGVMAIEHADFAGVERLALVTGGEIASTFDHPELVKLGSCKLIEEVMIGEDKLIHFSGVALGEACTIVLRGATQQILDEAERSLHDALCVLAQTVKDSRTVYGGVANHHS

SEQ ID NO: 20067 - protein, 62 aa, Homo sapiens
LFFFADMREGTIGDMAILGITESFQVKRQVLLSAAEAAEVILRVDNIIKAAPRKRVPDHHPC

SEQ ID NO: 20068 - protein, 55 aa, Homo sapiens
MRRTKITSVCNFFTYIRYIQQGLVKQQDVDQMFWEVMQLRKEMSLAKLGYFKEEL

SEQ ID NO: 20069 - protein, 64 aa, Homo sapiens
MTSRLGYAKKSVATTLRGNYPTWPYKRGATCSACPNNDKCLDNLCVNRQRDQVKRTYINLKLFH

SEQ ID NO: 20070 - protein, 36 aa, Homo sapiens
LAPSLIHSELNNCWDKGRKDKMCNFPASGRCCLLPH

SEQ ID NO: 20071 - protein, 28 aa, Homo sapiens
MLLKVEQTFFCVKSKGCSKSTRTDATWV

SEQ ID NO: 20072 - protein, 26 aa, Homo sapiens
LLCEKFEDSVLLLGKLNSEIEKEKTG

SEQ ID NO: 20073 - protein, 12 aa, Homo sapiens
LDITLLKTCDSS

SEQ ID NO: 20074 - protein, 25 aa, Homo sapiens
VGRAHFYCLHLDQKQNSLSAPHQIK

SEQ ID NO: 20075 - protein, 100 aa, Homo sapiens
LEAAPASAPPSSLSEAVSRESRGPGRSGTRGMASQRPVSVGSSQAARAPWAIALGRGEEFPGLGSGSPSRGTSAEASGRREAEQETLEGVDAAGFGKAPS

SEQ ID NO: 20076 - protein, 40 aa, Homo sapiens
MRFQNQDLARPWKEGPARPTRRLELRLAVWDLSTGYYPGL

SEQ ID NO: 20077 - protein, 393 aa, Homo sapiens
LLAAPPPAPPAAAAAAALSHCLRSSGRLAPHTSRRKEQSELDQDLDDVEEVEEEETGEETKLKARQLTVQMMQNPQILAALQERLDGLVETPTGYIESLPRVVKRRVNALKNLQVKCAQIEAKFYEEVHDLERKYAVLYQPLFDKEELKEKAKIEDEKKDEEKEDPKGIPEFWLTVFKNVDLLSDMVQEHDEPILKHLKDIKVKFSDAGQPMSFVLEFHFEPNEYFTNEVLTKTYRMRSEPDDSDPFSFDGPEIMGCTGCQIDWKKGKNVTLKTIKKKQKHKGRGTVRTVTKTVSNDSFFNFFAPPEVPESGDLDDDAEAILAADFEIGHFLRERIIPRSVLYFTGEAIEDDDDDYDEEGEEADEEGEEEGDEENDPDYDPKKDQNPAECKQQ

SEQ ID NO: 20078 - protein, 357 aa, Homo sapiens
LLAAPPPAPPAAAAAAALSHCLRSSGRLAPHTSRRLPRVVKRRVNALKNLQVKCAQIEAKFYEEVHDLERKYAVLYQPLFDKRFEIINAIYEPTEEECEWKPDEEDEISEELKEKAKIEDEKKDEEKEDPKGIPEFWLTVFKNVDLLSDMVQEHDEPILKHLKDIKVKFSDAGQPMSFVLEFHFEPNEYFTNEVLTKTYRMRSEPDDSDPFSFDGPEIMGCTGCQIDWKKGKNVTLKTIKKKQKHKGRGTVRTVTKTVSNDSFFNFFAPPEVPESGDLDDDAEAILAADFEIGHFLRERIIPRSVLYFTGEAIEDDDDDYDEEGEEADEEGEEEGDEENDPDYDPKKDQNPAECKQQ

SEQ ID NO: 20079 - protein, 168 aa, Homo sapiens
LPRVVKRRVNALKNLQVKCAQIEAKFYEEVHDLERKYAVLYQPLFDKRFEIINAIYEPTEEECEWKPDEEDEISEELKEKAKIEDEKKDEEKEDPKGIPEFWLTVFKNVDLLSDMVQEHDEPILKHLKDIKVKFSDAGQPMSFVLEFHFEPNEYFTNEVLTKTYRMSS

SEQ ID NO: 20080 - protein, 119 aa, Homo sapiens
LLAAPPPAPPAAAAAAALSHCLRSSGRLAPHTSRRLPRVVKRRVNALKNLQVKCAQIEAKFYEEVHDLERKYAVLYQPLFDKRFEIINAIYEPTEEECEWKPDEEDEISVSTNFILVCF

SEQ ID NO: 20081 - protein, 56 aa, Homo sapiens
LLAAPPPAPPAAAAAAALSHCLRSSGRLAPHTSRRTSANCSDDAKSSDSCSPSRKT

SEQ ID NO: 20082 - protein, 45 aa, Homo sapiens
LLAAPPPAPPAAAAAAALSHCLRSSGRLAPHTSRRYLEFLQHGRH

SEQ ID NO: 20083 - protein, 972 aa, Homo sapiens
LALPGRRGVPASPGHSARGSARLALPSRCRRPAADRRTTFPHRLGSVEVPAEAGSLLRKAGMEVNCLTLKDLISPRQPRLDFAVEDGENAQKENIFVDRSRMAPKTPIKNEPIDLSKQKKFTPERNPITPVKFVDRQQAEPWTPTANLKMLISAASPDIRDREKKKGLFRPIENKDDAFTDSLQLDVVGDSAVDEFEKQRPSRKQKSLGLLCQKFLARYPSYPLSTEKTTISLDEVAVSLGVERRRIYDIVNVLESLHLVSRVAKNQYGWHGRHSLPKTLRNLQRLGEEQKYEEQMAYLQQKELDLIDYKFGERKKDGDPDSQEQQLLDFSEPDCPSSSANSRKDKSLRIMSQKFVMLFLVSKTKIVTLDVAAKILIEESQDAPDHSKFKTKVRRLYDIANVLTSLALIKKVHVTEERGRKPAFKWIGPVDFSSSDEELVDVSASVLPELKRETYGQIQVCAKQKLARHGSFNTVQASERIQRKVNSEPSSPYREEQGSGGYSLEIGSLAAVYRQKIEDNSQGKAFASKRVVPPSSSLDPVAPFPVLSVDPEYCVNPLAHPVFSVAQTDLQAFSMQNGLNGQVDVSLASAASAVESLKPALLAGQPLVYVPSASLFMLYGSLQEGPASGSGSERDDRSSEAPATVELSSAPSAQKRLCEERKPQEEDEPATKRQSREYEDGPLSLVMPKKPSDSTDLASPKTMGNRASIPLKDIHVNGQLPAAEEISGKATANSLVSSEWGNPSRNTDVEKPSKENESTKEPSLLQYLCVQSPAGLNGFNVLLSGSQTPPTVGPSSGQLPSFSVPCMVLPSPPLGPFPVLYSPAMPGPVSSTLGALPNTGPVNFSLPGLGSIAQLLVGPTAVVNPKSSTLPSADPQLQSQPSLNLSPVMSRSHSVVQQPESPVYVGHPVSVVKLHQSPVPVTPKSIQRTHRETFFKTPGSLGDPVLKRRERNQSRNTSSAQRRLEIPSGGAD

SEQ ID NO: 20084 - protein, 789 aa, Homo sapiens
LALPGRRGVPASPGHSARGSARLALPSRCRRPAADRRTTFPHRLGSVEVPAEAGSLLRKAGMEVNCLTLKDLISPRQPRLDFAVEDGENAQKENIFVDRSRMAPKTPIKNEPIDLSKQKKFTPERNPITPVKFVDRQQAEPWTPTANLKMLISAASPDIRDREKKKGLFRPIENKDDAFTDSLQLDVVGDSAVDEFEKQRPSRKQKSLGLLCQKFLARYPSYPLSTEKTTISLDEVAVSLGVERRRIYDIVNVLESLHLVSRVAKNQYGWHGRHSLPKTLRNLQRLGEEQKYEEQMAYLQQKELDLIDYKFGERKKDGDPDSQEQQLLDFSEPDCPSSSANSRKDKSLRIMSQKFVMLFLVSKTKIVTLDVAAKILIEESQDAPDHSKFKTKVRRLYDIANVLTSLALIKKVHVTEERGRKPAFKWIGPVDFSSSDEELVDVSASVLPELKRETYGQIQVCAKQKLARHGSFNTVQASERIQRKVNSEPSSPYREEQGSGGYSLEIGSLAAVYRQKIEDNSQGKAFASKRVVPPSSSLDPVAPFPVLSVDPEYCVNPLAHPVFSVAQTDLQAFSMQNGLNGQVDVSLASAASAVESLKPALLAGQPLVYVPSASLFMLYGSLQEGPASGSGSERDDRSSEAPATVELSSAPSAQKRLCEERKPQEEDEPATKRQSREYEDGPLSLVMPKKPSDSTDLASPKTMGNRASIPLKDIHVNGQLPAAEEISGKATANSLVSSEWGNPSRNTDVEKPSKENESTKEPSLLQYLCVQSPAVTSSSDPQEHPTHTS

SEQ ID NO: 20085 - protein, 344 aa, Homo sapiens
LALPGRRGVPASPGHSARGSARLALPSRCRRPAADRRTTFPHRLGSVEVPAEAGSLLRKAGMEVNCLTLKDLISPRQPRLDFAVEDGENAQKENIFVDRSRMAPKTPIKNEPIDLSKQKKFTPERNPITPVKFVDRQQAEPWTPTANLKMLISAASPDIRDREKKKGLFRPIENKDDAFTDSLQLDVVGDSAVDEFEKQRPSRKQKSLGLLCQKFLARYPSYPLSTEKTTISLDEVAVSLGVERRRIYDIVNVLESLHLVSRVAKNQYGWHGRHSLPKTLRNLQRLGEEQKYEEQMAYLQQKELDLIDYKFGERKKDGDPDSQEQQLLDFSEPDCPSCESIVTS

SEQ ID NO: 20086 - protein, 46 aa, Homo sapiens
LGWFLSFKKICIKLEVCVCEHGYPFDKRNAFDCEEGRVKFSIMFVV

SEQ ID NO: 20087 - protein, 8 aa, Homo sapiens
LLVLSQRG

SEQ ID NO: 20088 - protein, 27 aa, Homo sapiens
MPLLKTEQNKKRKLCSFLIQRVYLQHA

SEQ ID NO: 20089 - protein, 17 aa, Homo sapiens
MGLKEIIQREKEQYATS

SEQ ID NO: 20090 - protein, 19 aa, Homo sapiens
MCTAYPCRDWDSRTSRRIG

SEQ ID NO: 20091 - protein, 323 aa, Homo sapiens
LGRNKNYLGSFIERDSLTLRASGCSWVQREPPALLLSRLPQPLASAWVRRGGIKPRSESGSFARGALGLCLPRGASGRHPALSRSSTPMIDTLRPVPFASEMAISKTVAWLNEQLELGNERLLLMDCRPQELYESSHIESAINVAIPGIMLRRLQKGNLPVRALFTRGEDRDRFTRRCGTDTVVLYDESSSDWNENTGGESVLGLLLKKLKDEGCRAFYLEDEARGKNCGVLVHCLAGISRSVTVTVAYLMQKLNLSMNDAYDIVKMKKSNISPNFNFMGQLLDFERTLGLSSPCDNRVPAQQLYFTTPSNQNVYQVDSLQST

SEQ ID NO: 20092 - protein, 22 aa, Homo sapiens
LWCFLRRAAVLTSCENYYGFSG

SEQ ID NO: 20093 - protein, 8 aa, Homo sapiens
LEGGIRSR

SEQ ID NO: 20094 - protein, 100 aa, Homo sapiens
LPALGQRAGPGNVHFKGAAVPAMRWTLGSANRAFCGLCGESWRRRLPVAGLGAAPVGGLLPGPAAQPSRRLGGHSQAGLRGSGSVDPSRQNSRSAAAFKT

SEQ ID NO: 20095 - protein, 42 aa, Homo sapiens
LWMDHLMMMDKFDFCFGWAPLGDGLWNLNHVTAVKIWHKIEW

SEQ ID NO: 20096 - protein, 32 aa, Homo sapiens
MRTGEPVTESRYNADPVKSGVYPKKKNLYNVF

SEQ ID NO: 20097 - protein, 33 aa, Homo sapiens
MRTGEPVTESRYNADPVKSERRRPLLVASLLAP

SEQ ID NO: 20098 - protein, 33 aa, Homo sapiens
VVCIQKKKICTMYFKTCVHKTEDFLFYLVQMPS

SEQ ID NO: 20099 - protein, 18 aa, Homo sapiens
LFLSTARAWTRLYAMNNI

SEQ ID NO: 20100 - protein, 8 aa, Homo sapiens
MVLMGQVP

SEQ ID NO: 20101 - protein, 156 aa, Homo sapiens
LGLNQKEGDQPERVQPIASSTLIHSDLTSVYGTVVMNRTVLFLGTGDGQLLKVILGENLTSNCPEVIYEIKEETPVFYKLVPDPVKNIYIYLTAGKEVRRIRVANCNKHKSCSECLTATDPHCGWCHSLQRYLLNSFSPTRIFEKVSCGRTLVALL

SEQ ID NO: 20102 - protein, 37 aa, Homo sapiens
LHLLACSRNGLLRILDSDSTHYIPSCNRKSCYKRMWS

SEQ ID NO: 20103 - protein, 64 aa, Homo sapiens
LLKVAETIKSWIFFSQCNKKDDLLHKLVEPSHSSVILGLWILDSDSTHYIPSCNRKSCYKRMWS

SEQ ID NO: 20104 - protein, 47 aa, Homo sapiens
LKPSKVGFFFLSAIRKMTYFTSWILDSDSTHYIPSCNRKSCYKRMWS

SEQ ID NO: 20105 - protein, 46 aa, Homo sapiens
VDEVARQLERSALEDKERDEDDEDGDGDGDGATGKKKKKKKKKRGR

SEQ ID NO: 20106 - protein, 39 aa, Homo sapiens
VSVAGPSPVAGVGSGAQSSCGAAALAVGPAGSSLFRRPP

SEQ ID NO: 20107 - protein, 696 aa, Homo sapiens
VTMQPAIQVWFGEDLPLSPRSPLTPRHGPGLANVCQYDEWIAVRHEATLLPMQEDLSIWLSGLLGIKVKAEKLLEELDNGVLLCQLIDVLQNMVKTCNSEESGNFPMRKVPCKKDAASGSFFARDNTANFLHWCRDIGVDETYLFESEGLVLHKDPRQVYLCLLEIGRIVSRYGVEPPVLVKLEKEIELEETLLNTSGPEDSISIPKSCCRHEELHEAVKHIAEDPPCSCSHRFSIEYLSEGRYRLGDKILFIRMLHGKHVMVRVGGGWDTLQGFLLKYDPCRILQFATLEQKILAFQKGVSNESVPDSPARTPQPPEMNPLSAVNMFQKQNSKPSVPVSIPKSKEKQGRPPGALVPASSLKGGNLGSMSVRSKLPNSPAASSHPKLKSSKGITKKPQAPSNNASSSLASLNPVGKNTSSPALPRTAPCISESPRKCISSPNTPKAKVIPAQNSADLPESTLLPNKCSGKTQPKYLKHNHISSRDNAVSHLAAHSNSSSKCPKLPKANIPVRPKPSFQSSAKMTKTSSKTIATGLGTQSQPSDGAPQAKPVPAQKLKSALNLNQPVSVSSVSPVKATQKSKDKNIVSATKKQPQNKSAFQKTGPSSLKSPGRTPLSIVSLPQSSTKTQTAPKSAQTVAKSQHSTKGPPRSGKTPASIRKPPSSVKDADSGDKKPTAKKKEDDDHYFVMTGSKKPRK

SEQ ID NO: 20108 - protein, 604 aa, Homo sapiens
LLQPPKVLGLQNFPMRKVPCKKDAASGSFFARDNTANFLHWCRDIGVDETYLFESEGLVLHKDPRQVYLCLLEIGRIVSRYGVEPPVLVKLEKEIELEETLLNTSGPEDSISIPKSCCRHEELHEAVKHIAEDPPCSCSHRFSIEYLSEGRYRLGDKILFIRMLHGKHVMVRVGGGWDTLQGFLLKYDPCRILQFATLEQKILAFQKGVSNESVPDSPARTPQPPEMNPLSAVNMFQKQNSKPSVPVSIPKSKEKQGRPPGALVPASSLKGGNLGSMSVRSKLPNSPAASSHPKLKSSKGITKKPQAPSNNASSSLASLNPVGKNTSSPALPRTAPCISESPRKCISSPNTPKAKVIPAQNSADLPESTLLPNKCSGKTQPKYLKHNHISSRDNAVSHLAAHSNSSSKCPKLPKANIPVRPKPSFQSSAKMTKTSSKTIATGLGTQSQPSDGAPQAKPVPAQKLKSALNLNQPVSVSSVSPVKATQKSKDKNIVSATKKQPQNKSAFQKTGPSSLKSPGRTPLSIVSLPQSSTKTQTAPKSAQTVAKSQHSTKGPPRSGKTPASIRKPPSSVKDADSGDKKPTAKKKEDDDHYFVMTGSKKPRK

SEQ ID NO: 20109 - protein, 9 aa, Homo sapiens
LESDVEVAG

SEQ ID NO: 20110 - protein, 172 aa, Homo sapiens
LRRPREGIPLGILPHTEEYVFGSTPNHIMAVFNQKSVSDMIKEFRKNWRALCNSERTTLCGADSMLLALQLSMAENNKQHSGEFTVSLSDVLLTWKYLLHEKLNLPVENMDVTDHYEDVRKIYDDFLKNSNMLDLIDVYQKCRALTSNCENYNTVSPGNFQCGEKVDRKIYP

SEQ ID NO: 20111 - protein, 211 aa, Homo sapiens
LRRPREGIPLGILPHTEEYVFGSTPNHIMAVFNQKSVSDMIKEFRKNWRALCNSERTTLCGADSMLLALQLSMAENNKQVQLLARKIIFSYLNLLVNSKNDLAVAYILNIPDRGLGREAFTDLKHAAREKQMSIFLVATSFIRTIELGGKGYAPPPSDPLRTHVKGLSNFINFIDKLDEILGEIPNPRGCKSICWKINNWNEFWKCSSGQK

SEQ ID NO: 20112 - protein, 684 aa, Homo sapiens
LRRPREGIPLGILPHTEEYVFGSTPNHIMAVFNQKSVSDMIKEFRKNWRALCNSERTTLCGADSMLLALQLSMAENNKQHSGEFTVSLSDVLLTWKYLLHEKLNLPVENMDVTDHYEDVRKIYDDFLKNSNMLDLIDVYQKCRALTSNCENYNTVSPGSTIQPPSERGSLLLSRPDLLAPGEDPPVSASLTLERQKGESLLAWSWSLNFRLPGIPITVQKKRRDLKKLAAVMRQSQLLDFLSGKQYAVGDETDLSIPTSPTSKYNRDNEKVQLLARKIIFSYLNLLVNSKNDLAVAYILNIPDRGLGREAFTDLKHAAREKQMSIFLVATSFIRTIELGGKGYAPPPSDPLRTHVKGLSNFINFIDKLDEILGEIPNPSIAGGQILSVIKMQLIKGQNSRDPFCKAIEEVAQDLDLRIKNIINSQEGVVALSTTDISPARPKSHAINHGTAYCGRDTVKALLVLLDEEAANAPTKNKAELLYDEENTIHHHGTSILTLFRSPTQVNNSIKPLRERICVSMQEKKIKMKQTLIRSQFACTYKDDYMISKDNWNNVNLASKPLCVLYMENDLSEGVNPSVGRSTIGTSFGNVHLDRSKNEKVSRKSTSQTGNKSSKRKQVDLDGENILCDNRNEPPQHKNAKIPKKSNDSQNRLYGKLAKVAKSNKCTAKDKLISGQAKLTQFFRL

SEQ ID NO: 20113 - protein, 191 aa, Homo sapiens
LVGPGGCRRSSQYLAMELIMAVFNQKSVSDMIKEFRKNWRALCNSERTTLCGADSMLLALQLSMAENNKQHSGEFTVSLSDVLLTWKYLLHEKLNLPVENMDVTDHYEDVRKIYDDFLKNSNMLDLIDVYQKCRALTSNCENYNTVSPSQLLDFLSGKQYAVGDETDLSIPTSPTSKYNRDNEKALPVLKR

SEQ ID NO: 20114 - protein, 59 aa, Homo sapiens
MAVFNQKSVSDMIKEFRKNWRALCNSERTTLCGADSMLLALQLSMAENNKQWRIYSLSQ

SEQ ID NO: 20115 - protein, 242 aa, Homo sapiens
MAVFNQKSVSDMIKEFRKNWRALCNSERTTLCGADSMLLALQLSMAENNKQHSGEFTVSLSDVLLTWKYLLHEKLNLPVENMDVTDHYEDVRKIYDDFLKNSNMLDLIDVYQKCRALTSNCENYNTVSPGSTIQPPSERGSLLLSRPDLLAPGEDPPVSASLTLERQKGESLLAWSWSLNFRLPGIPITVQKKRRDLKKLAAVMRQVRQWESHPLQNIEEATWHQLTVQAEKKEPGTQGASV

SEQ ID NO: 20116 - protein, 557 aa, Homo sapiens
VLFVTLRELLYVVQTPCSWHCSFLWRRTTNSGEFTVSLSDVLLTWKYLLHEKLNLPVENMDVTDHYEDVRKIYDDFLKNSNMLDLIDVYQKCRALTSNCENYNTVSPSQLLDFLSGKQYAVGDETDLSIPTSPTSKYNRDNEKVQLLARKIIFSYLNLLVNSKNDLAVAYILNIPDRGLGREAFTDLKHAAREKQMSIFLVATSFIRTIELGGKGYAPPPSDPLRTHVKGLSNFINFIDKLDEILGEIPNPSIAGGQILSVIKMQLIKGQNSRDPFCKAIEEVAQDLDLRIKNIINSQEGVVALSTTDISPARPKSHAINHGTAYCGRDTVKALLVLLDEEAANAPTKNKAELLYDEENTIHHHGTSILTLFRSPTQVNNSIKPLRERICVSMQEKKIKMKQTLIRSQFACTYKDDYMISKDNWNNVNLASKPLCVLYMENDLSEGVNPSVGRSTIGTSFGNVHLDRSKNEKVSRKSTSQTGNKSSKRKQVDLDGENILCDNRNEPPQHKNAKIPKKSNDSQNRLYGKLAKVAKSNKCTAKDKLISGQAKLTQFFRL

SEQ ID NO: 20117 - protein, 173 aa, Homo sapiens
LYANIKLRMAKMNLSSYILILTFSLFSQGILLSASKSIRNLDDDMVFNTFRLGKGFQKEDTAEKSVIAPSLEQYKNDESSFMNEEENKVSKNTGSKHNFLNHGLPLNLAIKPYLALKGSVAFPAENGVQNTESTQEKREIGDEENSAKFPIGRRDFDMLRCMLGRVYRPCWQV

SEQ ID NO: 20118 - protein, 416 aa, Homo sapiens
LQLQVDAGSAGLAPWQGEVEPDRLLSAAPRDSSRAREKRQHGSKGQGAEGVELVKLMSTVICMKQREEEFLLTIRPFANRMQKSPCYIPIVSSATLWDRSTPSAKHIPCYERTSVPCSRFINHMKNFSESPKFRSLHFLNFPVFPERTQNSMACKRLLHTCQYIVPRCSVSTVSFDEESYEEFRSSPAPSSETDEAPLIFTARGETEERARGAPKQAWNSSFLEQLVKKPNWAHSVNPVHLEAQGIHISRHTRPKGQPLSSPKKNSGSAARPSTAIGLCRRSQTPGALQSTGPSNTELEPEERMAVPAGAQAHPDDIQSRLLGASGNPVGKGAVAMAPEMLPKHPHTPRDRRPQADTSLHGNLAGAPLPLLAGASTHFPSKRLIKVCSSAPPRPTRRFHTVCSQALSRPVVNAHLH

SEQ ID NO: 20119 - protein, 156 aa, Homo sapiens
VKSTVPLLQEPADHARGRAHVHLPENVRSQSPGHVRRGRSGAQVLPTGPDEKQVEKSEVDFSKSHSLVRRFEDLKPKLSVCKTGSQVFRSENWKVWAESSRGDHDDCLDLCSVLCWGELLQTIPEIPPKRGELKTELLGLKERKHKPQVSQQEELK

SEQ ID NO: 20120 - protein, 29 aa, Homo sapiens
LKEGLMSSSFSNSCLSGGQTSKATKNERP

SEQ ID NO: 20121 - protein, 121 aa, Homo sapiens
VPGGFRPAARSPLRPGPRLPAVGGGGPHSVPGPSRPRQPPARGAPPFVWVSAPRTRGRELRSAASPAGCAMGCGNSTATSAGAGQGPAGAAKDVNYGGVYVGLPSEAVNMVSSQTKTVRKN

SEQ ID NO: 20122 - protein, 133 aa, Homo sapiens
VPGGFRPAARSPLRPGPRLPAVGGGGPHSVPGPSRPRQPPARGAPPFVWVSAPRTRGRELRSAASPAGCAMGCGNSTATSAGAGQGPAGAAKDVTEESVTEDDKRRNYGGVYVGLPSEAVNMVSSQTKTVRKN

SEQ ID NO: 20123 - protein, 65 aa, Homo sapiens
LGLRPQDPRPRAPERGFPGRLRDGLRELHRHQRGRGPRNYGGVYVGLPSEAVNMVSSQTKTVRKN

SEQ ID NO: 20124 - protein, 44 aa, Homo sapiens
MGCGNSTATSAGAGQGPAGAAKDVTEESVTEDDKRRYVWYCSWL

SEQ ID NO: 20125 - protein, 51 aa, Homo sapiens
LGCRYQKKGEKLTEESVTEDDKRRNYGGVYVGLPSEAVNMVSSQTKTVRKN

SEQ ID NO: 20126 - protein, 80 aa, Homo sapiens
MTQESRACSSVWKEFGSVGRCNVHRHFQGNSKQSPFPFAFPQILSVYIKPWVHIVVVIEGNWLNSTLVYGTFCGHLRKTS

SEQ ID NO: 20127 - protein, 97 aa, Homo sapiens
LANYVISTMGKLCAPVRDNDIRELKATGNIVEVLRQIFHVLDLMQMDMANFTIMSLRPHLQRQLVEYERTKFQEILEETPRTVLSTIRFFIHSRYIY

SEQ ID NO: 20128 - protein, 464 aa, Homo sapiens
LLFLYGEHSYVDSRFLLQCLEDLDANLRKLNSRLFVIRGQPADVFPRLFKEWNITKLSIEYDSEPFGKERDAAIKKLATEAGVEVIVRISHTLYDLDKIIELNGGQPPLTYKRFQTLISKMEPLEIPVETITSEVIEKCTTPLSDDHDEKYGVPSLEELGFDTDGLSSAVWPGGETEALTRLERHLERKAWVANFERPRMNANSLLASPTGLSPYLRFGCLSCRLFYFKLTDLYKKVKKNSSPPLSLYGQLLWREFFYTAATNNPRFDKMEGNPICVQIPWDKNPEALAKWAEGRTGFPWIDAIMTQLRQEGWIHHLARHAVACFLTRGDLWISWEEGMKVFEELLLDADWSINAGSWMWLSCSSFFQQFFHCYCPVGFGRRTDPNGDYIRRYLPVLRGFPAKYIYDPWNAPEGIQKVAKCLIGVNYPKPMVNHAEASRLNIERMKQIYQQLSRYRGLENFFVL

SEQ ID NO: 20129 - protein, 114 aa, Homo sapiens [sequence omitted]

SEQ ID NO: 20130 - protein, 37 aa, Homo sapiens
LPKQEPAHALCPGSGPVQIPERVAAVRSWSLPMQPGF

SEQ ID NO: 20131 - protein, 29 aa, Homo sapiens
VPGSVGWDLVTKAEKPLLLGPRGSCPMLC

SEQ ID NO: 20132 - protein, 176 aa, Homo sapiens
LQRGLRRRRLRHLGPDTMRRVVRQSKFRHVFGQAVKNDQCYDDIRVSRVTWDSSFCAVNPRFVAIIIEASGGGAFLVLPLHKTGRIDKSYPTVCGHTGPVLDIDWCPHNDQVIASGSEDCTVMVWQIPENGLTLSLTEPVVILEGHSKRVGIVAWHPTARNVLLSAEKYAGTNCSS

SEQ ID NO: 20133 - protein, 102 aa, Homo sapiens
LQRGLRRRRLRHLGPDTMRRVVRQSKFRHVFGQAVKNDQCYDDIRVSRVTWDSSFCAVNPRFVAIIIEASGGGAFLVLPLHKVGNLIFHSGRHPLIVSILFP

SEQ ID NO: 20134 - protein, 737 aa, Homo sapiens
MRCYLSWDRWTSPPLSSIIFISVDYILNVTREIDNFFPGLFAYHNIRVYDEETTDLLAHWNEAYHFINKAKRNHSKCLVHCKMGVSRSASTVIAYAMKEFGWPLEKAYNYVKQKRSITRPNAGFMRQLSEYEGILDASKQRHNKLWRQQTDSSLQQPVDDPAGPGDFLPETPDGTPESQLPFLDDAAQPGLGPPLPCCFRRLSDPLLPSPEDETGSLVHLEDPEREALLEEAAPPAEVHRPARQPQQGSGLCEKDVKKKLEFGSPKGRSGSLLQVEETEREEGLGAGRWGQLPTQLDQNLLNSENLNNNSKRSCPNGMEDDAIFGILNKVKPSYKSCADCMYPTASGAPEASRERCEDPNAPAICTQPAFLPHITSSPVAHLASRSRVPEKPASGPTEPPPFLPPAGSRRADTSGPGAGAALEPPASLLEPSRETPKVLPKSLLLKNSHCDKNPPSTEVVIKEESSPKKDMKPAKDLRLLFSNESEKPTTNSYLMQHQESIIQLQKAGLVRKHTKELERLKSVPADPAPPSRDGPASRLEASIPEESQDPAALHELGPLVMPSQAGSDEKSEAAPASLEGGSLKSPPPFFYRLDHTSSFSKDFLKTICYTPTSSSMSSNLTRSSSSDSIHSVRGKPGLVKQRTQEIETRLRLAGLTVSSPLKRSHSLAKLGSLTFSTEDLSSEADPSTVADSQDTTLSESSFLHEPQGTPRDPAATSKPSGKPAPENLKSPSWMSKS

SEQ ID NO: 20135 - protein, 97 aa, Homo sapiens
VATLETPFLCKMTSRGEWWGLRMKRSGFSSQLCYEEALDGPVGRGHRRLGPGAQHCSRTGGLKPSPPLPPPPPPDRGIRRFPRQRNLRPQSQHLGGT

SEQ ID NO: 20136 - protein, 33 aa, Homo sapiens
MPVCLPRSVLKTTKFKMETEGKSVKGMGERTCP

SEQ ID NO: 20137 - protein, 150 aa, Homo sapiens
MIGQKTLYSFFSPSPARKRHAPSPEPAVQGTGVAGVPEESGDAAAIPAKKAPAGQEEPGTPPSSPLSAEQLDRIQRNKAAALLRLAARNVPVGFGESWKKHLSGEFGKPYFIKLMGFVAEERKHYTVYPPPHQVFTWTQMCDIKDVSTTC

SEQ ID NO: 20138 - protein, 326 aa, Homo sapiens
LGCGSWGAAPASARRGGGRGGGGGGRIPRSHVVRSPTGVCSGESHPSWRTCRGTWQGSTGCILELENIPPASTPQQWESGPQLTQHWYQAGLGCGQASVTGHKLSGWTKEDLELINKWAFQGERMIHGNPSGVDNAVSTWGGALRYHQGKISSLKRSPALQILLTNTKVPRNTRALVAGVRNRLLKFPEIVAPLLTSIDAISLECERVLGEMGEAPAPEQYLVLEELIDMNQHHLNALGVGHASLDQLCQVTRARGLHSKLTGAGGGGCGITLLKPGLEQPEVEATKQALTSCGFDCLETSIGAPGVSIHSATSLDSRVQQALDGL

SEQ ID NO: 20139 - protein, 140 aa, Homo sapiens
LLRLRRGGAAAGEAAAAAGFPGAMLSEVLLVSAPGKVILHGEHAVVHGKVALAVSLNLRTFLRLQPHSNGKVDLSLPNIGIKRAWDVARLQSLDTSFLGSHSVMQPGVQWCDHSSLFLQPPGLKRSSCLSLLSSWDHRAR

SEQ ID NO: 20140 - protein, 419 aa, Homo sapiens
LLRLRRGGAAAGEAAAAAGFPGAMLSEVLLVSAPGKVILHGEHAVVHGKVALAVSLNLRTFLRLQPHSNGKVDLSLPNIGIKRAWDVARLQSLDTSFLEQGDVTTPTSEQVEKLKEVAGLPDDCAVTERLAVLAFLYLYLSICRKQRALPSLDIVVWSELPPGAGLGSSAAYSVCLAAALLTVCEEIPNPLKDGDCVNRWTKEDLELINKWAFQGERMIHGNPSGVDNAVSTWGGALRYHQGKISSLKRSPALQILLTNTKVPRNTRALVAGVRNRLLKFPEIVAPLLTSIDAISLECERVLGEMGEAPAPEQYLVLEELIDMNQHHLNALGVGHASLDQLCQVTRARGLHSKLTGAGGGGCGITLLKPGLEQPEVEATKQALTSCGFDCLETSIGAPGVSIHSATSLDSRVQQALDGL

SEQ ID NO: 20141 - protein, 77 aa, Homo sapiens
LVSAPGKVILHGEHAVVHGKVALAVSLNLRTFLRLQPHSNGKVDLSLPNIGIKRAWDVARLQSLDTSFLGPCRAWIS

SEQ ID NO: 20142 - protein, 99 aa, Homo sapiens
LRDPGERAAHRPAGSPPSPRSALSGLPGAPSSGPGGASDRLKRAGRGLGGRGLPSRRAAEGEGGPPFWRGEGGWVRSPQPALRSSGPREGRLSGGGGAG

SEQ ID NO: 20143 - protein, 179 aa, Homo sapiens
VVCRAPPPPARAGPLIASRERGGGSGAAACPPGGRLRAREALPSGEGREGGSGAPNPPCGARGRARGGCLGEGARGDSAPGEAEAAARGGGESPSAPGLPGWHEPAAGVRGGGEEAAGTGGEAGRAPEAMENAHTKTVEEVLGHFGVNESTGLSLEQVKKLKERWGSNGRCREKPCWNL

SEQ ID NO: 20144 - protein, 9 aa, Homo sapiens
LTVFHKEDV

SEQ ID NO: 20145 - protein, 168 aa, Homo sapiens
LRHVLRSAGYSCYQNSKGSDRIKDGYKVNSHIAKLQELWKTPQNQTIHLSKSMMEASFFKHPDLTTGQKRYLCSIAKIYNANYLKMLMKRQYMHVLQHSSQKPGVLTHHRSRLSSRYSQKQHYPCTTWRHQLEREDSGSSDIAAASAPEMLIQHSLWRPVRNKEGSVS

SEQ ID NO: 20146 - protein, 175 aa, Homo sapiens
VLSGEGCWDSCSRTRLAVSAPRRCPARVRGPTGRSVALLQSRPLWPGPRVAAADQLDTLVTRIPKVLHPDLTTGQKRYLCSIAKIYNANYLKMLMKRQYMHVLQHSSQKPGVLTHHRSRLSSRYSQKQHYPCTTWRHQLEREDSGSSDIAAASAPEMLIQHSLWRPVRNKEGSVS

SEQ ID NO: 20147 - protein, 210 aa, Homo sapiens [sequence omitted]

SEQ ID NO: 20148 - protein, 494 aa, Homo sapiens
LQMLEYLSLTFLISVKIQGDYIPRQVRTWVKQYRASETSTIPAMERLIEWLPLHLPRQQRTTVVHGDFRLDNLVFHPEEPEVLAVLDWELSTLGDPLADVAYSCLAHYLPSSFPVLRGINDCDLTQLGIPAAEEYFRMYCLQMGLPPTENWNFYMAFSFFRVAAILQGVYKRSLTGQASSTYAEQTGKLTEFVSNLAWDFAVKEGFRVFKEMPFTNPLTRSYHTWARPQSQWCPTGSRSYSSVPEASPAHTSRGGLVISPESLSPPVRELYHRLKHFMEQRVYPAEPELQSHQASAARWSPSPLIEDLKEKAKAEGLWNLFLPLEADPEKKYGAGLTNVEYAHLCELMGTSLYAPEVCNCSAPDTGNMELLVRYGTEAQKARWLIPLLEGKARSCFAMTEPQVASSDATNIEASIREEDSFYVINGHKWWITGILDPRCQLCVFMGKTDPHAPRHRQQSVLLVPMDTPGIKIIRPLTVYGLEDAPGCFLPSFSL

SEQ ID NO: 20149 - protein, 40 aa, Homo sapiens
LAEKMDLRHILEVTLSGLPEGLDVEGKDKKQTKDNFQMYA

SEQ ID NO: 20150 - protein, 87 aa, Homo sapiens
LRLRRARLVCAQPRSGQARMGPQVCAPYSPPITYQRALQELLTNRLSMVLHSRINCTSVCAKSTRHWRNSRNNTWYRHMDLSGKRSR

SEQ ID NO: 20151 - protein, 297 aa, Homo sapiens
LGLRQGTKRMAGEKVEKPDTKEKKPEAKKVDAGGKVKKGNLKAKKPKKGKPHCSRNPVLVRGIGRYSRSAMYSRKAMYKRKYSAAKSKVEKKKKEKVLATVTKPVGGDKNGGTRVVKLRKMPRYYPTEDVPRKLLSHGKKPFSQHVRKLRASITPGTILIILTGRHRGKRVVFLKQLASGLLLVTGPLVLNRVPLRRTHQKFVIATSTKIDISNVKIPKHLTDAYFKKKKLRKPRHQEGEIFDTEKEKYEITEQRKIDQKAVDSQILPKIKAIPQLQGYLRSVFALTNGIYPHKLVF

SEQ ID NO: 20152 - protein, 147 aa, Homo sapiens
MAGEKVEKPDTKEKKPEAKKVDAGGKVKKGNLKAKKPKKGKPHCSRNPVLVRGIGRYSRSAMYSRKAMYKRKYSAAKSKVEKKKKEKVLATVTKPVGGDKNGGTRVVKLRKMVRCGDCKLDFLFMLEYCEDVFEYLDTVSFCIPENF

SEQ ID NO: 20153 - protein, 971 aa, Homo sapiens
VLESKQRGPCAMSRLIVKNLPNGMKEERFRQLFAAFGTLTDCSLKFTKDGKFRKFGFIGFKSEEEAQKAQKHFNKSFIDTSRITVEFCKSFGDPAKPRAWSKHAQKPSQPKQPPKDSTTPEIKKDEKKKKVAGQLEKLKEDTEFQEFLSVHQRRAQAATWANDGLDAEPSKGKSKPASDYLNFDSDSGQESEEEGAGEDLEEEASLEPKAAVQKELSDMDYLKSKMVKAGSSSSSEEEESEDEAVHCDEGSEAEEEDSSATPVLQERDSKGAGQEQGMPAGKKRPPEARAETEKPANQKEPTTCHTVKLRGAPFNVTEKNVMEFLAPLKPVAIRIVRNAHGNKTGYIFVDFSNEEEVKQALKCNREYMGGRYIEVFREKNVPTTKGAPKNTTKSWQGRILGENEEEEDLAESGRLFVRNLPYTSTEEDLEKLFSKYGPLSELHYPIDSLTKKPKGFAFITFMFPEHAVKAYSEVDGQVFQGRMLHVLPSTIKKEASEDASALGSSSYKKKKEAQDKANSASSHNWNTLFMGPNAVADAIAQKYNATKSQVFDHETKGSVAVRVALGETQLVQEVRRFLIDNGVSLDSFSQAAAERSKTVILVKNLPAGTLAAQLQETFGHFGSLGRVLLPEGGITAIVEFLEPLEARKAFRHLAYSKFHHVPLYLEWAPVGVFSSTAPQKKKLQDTPSEPMEKDPAEPETVPDGETPEDENPTEEGADNSSAKMEEEEEEEEEEEESLPGCTLFIKNLNFDTTEEKLKEVFSKVGTVKSCSISKKKNKAGVLLSMGFGFVEYRKPEQAQKALKQLQGHVVDGHKLEVRISERATKPAVTLARKKQVPRKQTTSKILVRNIPFQAHSREIRELFSTFGELKTVRLPKKMTGTGTHRGFGFVDFLTKQDAKRAFNALCHSTHLYGRRLVLEWADSEVTLQALRRKTAAHFHEPPKKKRSVVLDEILEQLEGSDSDSEEQTLQL

SEQ ID NO: 20154 - protein, 142 aa, Homo sapiens
MRPAGSCEMKEERFRQLFAAFGTLTDCSLKFTKDGKFRKFGFIGFKSEEEAQKAQKHFNKSFIDTSRITVEFCKSFGDPAKPRAWSKHAQKPSQPKQPPKDSTTPEIKKDEKKKKVAGQLEKKRQASNQRQLCRRSCRTWIT

SEQ ID NO: 20155 - protein, 267 aa, Homo sapiens
MRPRSGPTRNPRLRAFAGVPTRGRTRGQSRRCAAEASAGPERDARPGAPAAGTMGAAHSASEEVRELEGKTGFSSDQIEQLHRRFKQLSGDQPTIRKENFNNVPDLELNPIRSKIVRAFFDNRNLRKGPSGLADEINFEDFLTIMSYFRPIDTTMDEEQVELSRKEKLRFLFHMYDSDSDGRITLEEYRNVVEELLSGNPHIEKESARSIADGAMMEAASVCMGQMEPDQVYEGITFEDFLKIWQGIDIETKMHVRFLNMETMALCH

SEQ ID NO: 20156 - protein, 240 aa, Homo sapiens
MRPRSGPTRNPRLRAFAGVPTRGRTRGQSRRCAAEASAGPERDARPGAPAAGTMGAAHSASEEVRELEGKTGFSSDQIEQLHRRFKQLSGDQPTIRNLRKGPSGLADEINFEDFLTIMSYFRPIDTTMDEEQVELSRKEKLRFLFHMYDSDSDGRITLEEYRNVVEELLSGNPHIEKESARSIADGAMMEAASVCMGQMEPDQVYEGITFEDFLKIWQGIDIETKMHVRFLNMETMALCH

SEQ ID NO: 20157 - protein, 216 aa, Homo sapiens
MRPRSGPTRNPRLRAFAGVPTRGRTRGQSRRCAAEASAGPERDARPGAPAAGTMGAAHSASEEVRELEGKTGFSSDQIEQLHRRFKQLSGDQPTIRKENFNNVPDLELNPIRSKIVRAFFDNRNLRKGPSGLADEINFEDFLTIMSYFRPIDTTMDEEQVELSRKEKLRFLFHMYDSDSDGRITLEEYRNVKWSRSCCRETLTSRRSPLAPSPTGP

SEQ ID NO: 20158 - protein, 137 aa, Homo sapiens
LPPRLEFSGAISAHCNLRLLGSNDSPASASPEAGTTVSSDQIEQLHRRFKQLSGDQPTIRKENFNNVPDLELNPIRSKIVRAFFDNRNLRKGPSGLADEINFEDFLTIMSYFRPIDTTMDEEQVELSRKEKLRCACH

SEQ ID NO: 20159 - protein, 50 aa, Homo sapiens
METSALKQQEQPAATKIRNLPCPWQPLICFLSMDLPILDISWLKNTGHRP

SEQ ID NO: 20160 - protein, 413 aa, Homo sapiens
LPRGPLASSMEAGEEPLLLAELKPGRPHQFDWKSSCETWSVAFSPDGSWFAWSQGHCIVKLIPWPLEEQFIPKGFEAKSRSSKNETKGRGSPKEKTLDCGQIVWGLAFSPWPSPPSRKLWARHHPQVPDVSCLVLATGLNDGQIKIWEVQTGLLLLNLSGHQDVVRDLSFTPSGSLILVSASRDKTLRIWDLNKHGKQIQVLSGHLQWVYCCSISPDCSMLCSAAGEKSVFLWSMRSYTLIRKLEGHQSSVVSCDFSPDSALLVTASYDTNVIMWDPYTGERLRSLHHTQVDPAMDDSDVHISSLRSVCFSPEGLYLATVADDRLLRIWALELKTPIAFAPMTNGLCCTFFPHGGVIATGTRDGHVQFWTAPRVLSSLKHLCRKALRSFLTTYQVLALPIPKKMKEFLTYRTF

SEQ ID NO: 20161 - protein, 324 aa, Homo sapiens
LPRGPLASSMEAGEEPLLLAELKPGRPHQFDWKSSCETWSVAFSPDGSWFAWSQGHCIVKLIPWPLEEQFIPKGFEAKSRSSKNETKGRGSPKEKTLDCGQIVWGLAFSPWPSPPSRKLWARHHPQVPDVSCLVLATGLNDGQIKIWEVQTGLLLLNLSGHQDVVRDLSFTPSGSLILVSASRDKTLRIWDLNKHGKQIQVLSGHLQWVYCCSISPDCSMLCSAAGEKSVFLWSMRSYTLIRKLEGHQSSVVSCDFSPDSALLVTASYDTNVIMWDPYTGERLRSLHHTQVDPAMDDSDVHISSLRSVCFSPEGLYLATVADDR

SEQ ID NO: 20162 - protein, 220 aa, Homo sapiens
LPRGPLASSMEAGEEPLLLAELKPGRPHQFDWKSSCETWSVAFSPDGSWFAWSQGHCIVKLIPWPLEEQFIPKGFEAKSRSSKNETKGRGSPKEKTLDCGQIVWGLAFSPWPSPPSRKLWARHHPQVPDVSCLVLATGLNDGQIKIWEVQTGLLLLNLSGHQDVVRDLSFTPSGSLILVSASRDKTLRIWDLNKHGLSMEHEVLHVNSEARGPSKQCCLL

SEQ ID NO: 20163 - protein, 222 aa, Homo sapiens
LPRGPLASSMEAGEEPLLLAELKPGRPHQFDWKSSCETWSVAFSPDGSWFAWSQGHCIVKLIPWPLEEQFIPKGFEAKSRSSKNETKGRGSPKEKTLDCGQIVWGLAFSPWPSPPSRKLWARHHPQVPDVSCLVLATGLNDGQIKIWEVQTGLLLLNLSGHQDVVRDLSFTPSGSLILVSASRDKTLRIWDLNKHGMGSEGTTRQLQKYCICFLHFTSVIFI

SEQ ID NO: 20164 - protein, 492 aa, Homo sapiens
LGVRRAASGEMLKFKYGARNPLDAGAAEPIASRASRLNLFFQGKPPFMTQQQMSPLSREGILDALFVLFEECSQPALMKIKHVSNFVRKYSDTIAELQELQPSAKDFEVRSLVGCGHFAEVQVVREKATGDIYAMKVMKKKALLAQEQVSFFEEERNILSRSTSPWIPQLQYAFQDKNHLYLVMEYQPGGDLLSLLNRYEDQLDENLIQFYLAELILAVHSVHLMGYVHRDIKPENILVDRTGHIKLVDFGSAAKMNSNKMVNAKLPIGTPDYMAPEVLTVMNGDGKGTYGLDCDWWSVGVIAYEMIYGRSPFAEGTSARTFNNIMNFQRFLKFPDDPKVSSDFLDLIQSLLCGQKERLKFEGLCCHPFFSKIDWNNIRNSPPPFVPTLKSDDDTSNFDEPEKNSWVSSSPCQLSPSGFSGEELPFVGFSYSKALGILGRSESVVSGLDSPAKTSSMEKKLLIKSKELQDSQDKCHKMEQEMTRLHRRVSGG

SEQ ID NO: 20165 - protein, 1560 aa, Homo sapiens
LSLTKNCALLGEETMMEQEMTRLHRRVSEVEAVLSQKEVELKASETQRSLLEQDLATYITECSSLKRSLEQARMEVSQEDDKALQLLHDIREQSRKLQEIKEQEYQAQVEEMRLMMNQLEEDLVSARRRSDLYESELRESRLAAEEFKRKATECQHKLLKAKDQGKPEVGEYAKLEKINAEQQLKIQELQEKLEKAVKASTEATELLQNIRQAKERAERELEKLQNREDSSEGIRKKLVEAEELEEKHREAQVSAQHLEVHLKQKEQHYEEKIKVLDNQIKKDLADKETLENMMQRHEEEAHEKGKILSEQKAMINAMDSKIRSLEQRIVELSEANKLAANSSLFTQRNMKAQEEMISELRQQKFYLETQAGKLEAQNRKLEEQLEKISHQDHSDKNRLLELETRLREVSLEHEEQKLELKRQLTELQLSLQERESQLTALQAARAALESQLRQAKTELEETTAEAEEEIQALTAHRDEIQRKFDALRNSCTVITDLEEQLNQLTEDNAELNNQNFYLSKQLDEASGANDEIVQLRSEVDHLRREITEREMQLTSQKQTMEALKTTCTMLEEQVMDLEALNDELLEKERQWEAWRSVLGDEKSQFECRVRELQRMLDTEKQSRARADQRITESRQVVELAVKEHKAEILALQQALKEQKLKAESLSDKLNDLEKKHAMLEMNARSLQQKLETERELKQRLLEEQAKLQQQMDLQKNHIFRLTQGLQEALDRADLLKTERSDLEYQLENIQVLYSHEKVKMEGTISQQTKLIDFLQAKMDQPAKKKKVPLQYNELKLALEKEKARCAELEEALQKTRIELRSAREEAAHRKATDHPHPSTPATARQQIAMSAIVRSPEHQPSAMSLLAPPSSRRKESSTPEEFSRRLKERMHHNIPHRFNVGLNMRATKCAVCLDTVHFGRQASKCLECQVMCHPKCSTCLPATCGLPAEYATHFTEAFCRDKMNSPGLQTKEPSSSLHLEGWMKVPRNNKRGQQGWDRKYIVLEGSKVLIYDNEAREAGQRPVEEFELCLPDGDVSIHGAVGASELANTAKADVPYILKMESHPHTTCWPGRTLYLLAPSFPDKQRWVTALESVVAGGRVSREKAEADAKLLGNSLLKLEGDDRLDMNCTLPFSDQVVLVGTEEGLYALNVLKNSLTHVPGIGAVFQIYIIKDLEKLLMIAGEERALCLVDVKKVKQSLAQSHLPAQPDISPNIFEAVKGCHLFGAGKIENGLCICAAMPSKVVILRYNENLSKYCIRKEIETSEPCSCIHFTNYSILIGTNKFYEIDMKQYTLEEFLDKNDHSLAPAVFAASSNSFPVSIVQVNSAGQREEYLLCFHEFGVFVDSYGRRSRTDDLKWSRLPLAFAYREPYLFVTHFNSLEVIEIQARSSAGTPARAYLDIPNPRYLGPAISSGAIYLASSYQDKLRVICCKGNLVKESGTEHHRGPSTSRSSPNKRGPPTYNEHITKRVASSPAPPEGPSHPREPSTPHRYREGRTELRRDKSPGRPLEREKSPGRMLSTRRERSPGRLFEDSSRGRLPAGAVRTPLSQVNKVWDQSSV

SEQ ID NO: 20166 - protein, 1602 aa, Homo sapiens
LSLTKNCALLGEETMMEQEMTRLHRRVSEVEAVLSQKEVELKASETQRSLLEQDLATYITECSSLKRSLEQARMEVSQEDDKALQLLHDIREQSRKLQEIKEQEYQAQVEEMRLMMNQLEEDLVSARRRSDLYESELRESRLAAEEFKRKATECQHKLLKAKDQGKPEVGEYAKLEKINAEQQLKIQELQEKLEKAVKASTEATELLQNIRQAKERAERELEKLQNREDSSEGIRKKLVEAEERRHSLENKVKRLETMERRENRLKDDIQTKSQQIQQMADKILELEEKHREAQVSAQHLEVHLKQKEQHYEEKIKVLDNQIKKDLADKETLENMMQRHEEEAHEKGKILSEQKAMINAMDSKIRSLEQRIVELSEANKLAANSSLFTQRNMKAQEEMISELRQQKFYLETQAGKLEAQNRKLEEQLEKISHQDHSDKNRLLELETRLREVSLEHEEQKLELKRQLTELQLSLQERESQLTALQAARAALESQLRQAKTELEETTAEAEEEIQALTAHRDEIQRKFDALRNSCTVITDLEEQLNQLTEDNAELNNQNFYLSKQLDEASGANDEIVQLRSEVDHLRREITEREMQLTSQKQTMEALKTTCTMLEEQVMDLEALNDELLEKERQWEAWRSVLGDEKSQFECRVRELQRMLDTEKQSRARADQRITESRQVVELAVKEHKAEILALQQALKEQKLKAESLSDKLNDLEKKHAMLEMNARSLQQKLETERELKQRLLEEQAKLQQQMDLQKNHIFRLTQGLQEALDRADLLKTERSDLEYQLENIQVLYSHEKVKMEGTISQQTKLIDFLQAKMDQPAKKKKVPLQYNELKLALEKEKARCAELEEALQKTRIELRSAREEAAHRKATDHPHPSTPATARQQIAMSAIVRSPEHQPSAMSLLAPPSSRRKESSTPEEFSRRLKERMHHNIPHRFNVGLNMRATKCAVCLDTVHFGRQASKCLECQVMCHPKCSTCLPATCGLPAEYATHFTEAFCRDKMNSPGLQTKEPSSSLHLEGWMKVPRNNKRGQQGWDRKYIVLEGSKVLIYDNEAREAGQRPVEEFELCLPDGDVSIHGAVGASELANTAKADVPYILKMESHPHTTCWPGRTLYLLAPSFPDKQRWVTALESVVAGGRVSREKAEADAKLLGNSLLKLEGDDRLDMNCTLPFSDQVVLVGTEEGLYALNVLKNSLTHVPGIGAVFQIYIIKDLEKLLMIAGEERALCLVDVKKVKQSLAQSHLPAQPDISPNIFEAVKGCHLFGAGKIENGLCICAAMPSKVVILRYNENLSKYCIRKEIETSEPCSCIHFTNYSILIGTNKFYEIDMKQYTLEEFLDKNDHSLAPAVFAASSNSFPVSIVQVNSAGQREEYLLCFHEFGVFVDSYGRRSRTDDLKWSRLPLAFAYREPYLFVTHFNSLEVIEIQARSSAGTPARAYLDIPNPRYLGPAISSGAIYLASSYQDKLRVICCKGNLVKESGTEHHRGPSTSRSSPNKRGPPTYNEHITKRVASSPAPPEGPSHPREPSTPHRYREGRTELRRDKSPGRPLEREKSPGRMLSTRRERSPGRLFEDSSRGRLPAGAVRTPLSQVNKVWDQSSV

SEQ ID NO: 20167 - protein, 2079 aa, Homo sapiens
LGVRRAASGEMLKFKYGARNPLDAGAAEPIASRASRLNLFFQGKPPFMTQQQMSPLSREGILDALFVLFEECSQPALMKIKHVSNFVRKYSDTIAELQELQPSAKDFEVRSLVGCGHFAEVQVVREKATGDIYAMKVMKKKALLAQEQVSFFEEERNILSRSTSPWIPQLQYAFQDKNHLYLVMEYQPGGDLLSLLNRYEDQLDENLIQFYLAELILAVHSVHLMGYVHRDIKPENILVDRTGHIKLVDFGSAAKMNSNKMVNAKLPIGTPDYMAPEVLTVMNGDGKGTYGLDCDWWSVGVIAYEMIYGRSPFAEGTSARTFNNIMNFQRFLKFPDDPKVSSDFLDLIQSLLCGQKERLKFEGLCCHPFFSKIDWNNIRNSPPPFVPTLKSDDDTSNFDEPEKNSWVSSSPCQLSPSGFSGEELPFVGFSYSKALGILGRSESVVSGLDSPAKTSSMEKKLLIKSKELQDSQDKCHKMEQEMTRLHRRVSEVEAVLSQKEVELKASETQRSLLEQDLATYITECSSLKRSLEQARMEVSQEDDKALQLLHDIREQSRKLQEIKEQEYQAQVEEMRLMMNQLEEDLVSARRRSDLYESELRESRLAAEEFKRKATECQHKLLKAKDQGKPEVGEYAKLEKINAEQQLKIQELQEKLEKAVKASTEATELLQNIRQAKERAERELEKLQNREDSSEGIRKKLVEAEERRHSLENKVKRLETMERRENRLKDDIQTKSQQIQQMADKILELEEKHREAQVSAQHLEVHLKQKEQHYEEKIKVLDNQIKKDLADKETLENMMQRHEEEAHEKGKILSEQKAMINAMDSKIRSLEQRIVELSEANKLAANSSLFTQRNMKAQEEMISELRQQKFYLETQAGKLEAQNRKLEEQLEKISHQDHSDKNRLLELETRLREVSLEHEEQKLELKRQLTELQLSLQERESQLTALQAARAALESQLRQAKTELEETTAEAEEEIQALTAHRDEIQRKFDALRNSCTVITDLEEQLNQLTEDNAELNNQNFYLSKQLDEASGANDEIVQLRSEVDHLRREITEREMQLTSQKQTMEALKTTCTMLEEQVMDLEALNDELLEKERQWEAWRSVLGDEKSQFECRVRELQRMLDTEKQSRARADQRITESRQVVELAVKEHKAEILALQQALKEQKLKAESLSDKLNDLEKKHAMLEMNARSLQQKLETERELKQRLLEEQAKLQQQMDLQKNHIFRLTQGLQEALDRADLLKTERSDLEYQLENIQVLYSHEKVKMEGTISQQTKLIDFLQAKMDQPAKKKKGLFSRRKEDPALPTQVPLQYNELKLALEKEKARCAELEEALQKTRIELRSAREEAAHRKATDHPHPSTPATARQQIAMSAIVRSPEHQPSAMSLLAPPSSRRKESSTPEEFSRRLKERMHHNIPHRFNVGLNMRATKCAVCLDTVHFGRQASKCLECQVMCHPKCSTCLPATCGLPAEYATHFTEAFCRDKMNSPGLQTKEPSSSLHLEGWMKVPRNNKRGQQGWDRKYIVLEGSKVLIYDNEAREAGQRPVEEFELCLPDGDVSIHGAVGASELANTAKADVPYILKMESHPHTTCWPGRTLYLLAPSFPDKQRWVTALESVVAGGRVSREKAEADAKLLGNSLLKLEGDDRLDMNCTLPFSDQVVLVGTEEGLYALNVLKNSLTHVPGIGAVFQIYIIKDLEKLLMIAGEERALCLVDVKKVKQSLAQSHLPAQPDISPNIFEAVKGCHLFGAGKIENGLCICAAMPSKVVILRYNENLSKYCIRKEIETSEPCSCIHFTNYSILIGTNKFYEIDMKQYTLEEFLDKNDHSLAPAVFAASSNSFPVSIVQVNSAGQREEYLLCFHEFGVFVDSYGRRSRTDDLKWSRLPLAFAYREPYLFVTHFNSLEVIEIQARSSAGTPARAYLDIPNPRYLGPAISSGAIYLASSYQDKLRVICCKGNLVKESGTEHHRGPSTSRSSPNKRGPPTYNEHITKRVASSPAPPEGPSHPREPSTPHRYREGRTELRRDKSPGRPLEREKSPGRMLSTRRERSPGRLFEDSSRGRLPAGAVRTPLSQVNKVWDQSSV

SEQ ID NO: 20168 - protein, 2037 aa, Homo sapiens
LGVRRAASGEMLKFKYGARNPLDAGAAEPIASRASRLNLFFQGKPPFMTQQQMSPLSREGILDALFVLFEECSQPALMKIKHVSNFVRKYSDTIAELQELQPSAKDFEVRSLVGCGHFAEVQVVREKATGDIYAMKVMKKKALLAQEQVSFFEEERNILSRSTSPWIPQLQYAFQDKNHLYLVMEYQPGGDLLSLLNRYEDQLDENLIQFYLAELILAVHSVHLMGYVHRDIKPENILVDRTGHIKLVDFGSAAKMNSNKMVNAKLPIGTPDYMAPEVLTVMNGDGKGTYGLDCDWWSVGVIAYEMIYGRSPFAEGTSARTFNNIMNFQRFLKFPDDPKVSSDFLDLIQSLLCGQKERLKFEGLCCHPFFSKIDWNNIRNSPPPFVPTLKSDDDTSNFDEPEKNSWVSSSPCQLSPSGFSGEELPFVGFSYSKALGILGRSESVVSGLDSPAKTSSMEKKLLIKSKELQDSQDKCHKMEQEMTRLHRRVSEVEAVLSQKEVELKASETQRSLLEQDLATYITECSSLKRSLEQARMEVSQEDDKALQLLHDIREQSRKLQEIKEQEYQAQVEEMRLMMNQLEEDLVSARRRSDLYESELRESRLAAEEFKRKATECQHKLLKAKDQGKPEVGEYAKLEKINAEQQLKIQELQEKLEKAVKASTEATELLQNIRQAKERAERELEKLQNREDSSEGIRKKLVEAEELEEKHREAQVSAQHLEVHLKQKEQHYEEKIKVLDNQIKKDLADKETLENMMQRHEEEAHEKGKILSEQKAMINAMDSKIRSLEQRIVELSEANKLAANSSLFTQRNMKAQEEMISELRQQKFYLETQAGKLEAQNRKLEEQLEKISHQDHSDKNRLLELETRLREVSLEHEEQKLELKRQLTELQLSLQERESQLTALQAARAALESQLRQAKTELEETTAEAEEEIQALTAHRDEIQRKFDALRNSCTVITDLEEQLNQLTEDNAELNNQNFYLSKQLDEASGANDEIVQLRSEVDHLRREITEREMQLTSQKQTMEALKTTCTMLEEQVMDLEALNDELLEKERQWEAWRSVLGDEKSQFECRVRELQRMLDTEKQSRARADQRITESRQVVELAVKEHKAEILALQQALKEQKLKAESLSDKLNDLEKKHAMLEMNARSLQQKLETERELKQRLLEEQAKLQQQMDLQKNHIFRLTQGLQEALDRADLLKTERSDLEYQLENIQVLYSHEKVKMEGTISQQTKLIDFLQAKMDQPAKKKKGLFSRRKEDPALPTQVPLQYNELKLALEKEKARCAELEEALQKTRIELRSAREEAAHRKATDHPHPSTPATARQQIAMSAIVRSPEHQPSAMSLLAPPSSRRKESSTPEEFSRRLKERMHHNIPHRFNVGLNMRATKCAVCLDTVHFGRQASKCLECQVMCHPKCSTCLPATCGLPAEYATHFTEAFCRDKMNSPGLQTKEPSSSLHLEGWMKVPRNNKRGQQGWDRKYIVLEGSKVLIYDNEAREAGQRPVEEFELCLPDGDVSIHGAVGASELANTAKADVPYILKMESHPHTTCWPGRTLYLLAPSFPDKQRWVTALESVVAGGRVSREKAEADAKLLGNSLLKLEGDDRLDMNCTLPFSDQVVLVGTEEGLYALNVLKNSLTHVPGIGAVFQIYIIKDLEKLLMIAGEERALCLVDVKKVKQSLAQSHLPAQPDISPNIFEAVKGCHLFGAGKIENGLCICAAMPSKVVILRYNENLSKYCIRKEIETSEPCSCIHFTNYSILIGTNKFYEIDMKQYTLEEFLDKNDHSLAPAVFAASSNSFPVSIVQVNSAGQREEYLLCFHEFGVFVDSYGRRSRTDDLKWSRLPLAFAYREPYLFVTHFNSLEVIEIQARSSAGTPARAYLDIPNPRYLGPAISSGAIYLASSYQDKLRVICCKGNLVKESGTEHHRGPSTSRSSPNKRGPPTYNEHITKRVASSPAPPEGPSHPREPSTPHRYREGRTELRRDKSPGRPLEREKSPGRMLSTRRERSPGRLFEDSSRGRLPAGAVRTPLSQVNKVWDQSSV

SEQ ID NO: 20169 - protein, 66 aa, Homo sapiens
LEEQLNQLTEDNAELNNQNFYLSKQLDEASGANDEIVQLRSEVDHLRREITEREMQLTSQKQEILV

SEQ ID NO: 20170 - protein, 116 aa, Homo sapiens
LSPSGFSGEELPFVGFSYSKALGILGRSESVVSGLDSPAKTSSMEKKLLIKSKELQDSQDKCHKMEQEMTRLHRRVSEVEAVLSQKEVELKASETQRSLLEQDLATYITECSVSLP

SEQ ID NO: 20171 - protein, 94 aa, Homo sapiens
LSPSGFSGEELPFVGFSYSKALGILGRSESVVSGLDSPAKTSSMEKKLLIKSKELQDSQDKCHKVFISAAGLLPCSRILPSVYAKGSARGRCWL

SEQ ID NO: 20172 - protein, 256 aa, Homo sapiens
VMPREDRATWKSNYFLKIIQLLDDYPKCFIVGADNVGSKQMQQIRMSLRGKAVVLMGKNTMMRKAIRGHLENNPALEKLLPHIRGNVGFVFTKEDLTEIRDMLLANKVPAAARAGAIAPCEVTVPAQNTGLGPEKTSFFQALGITTKISRGTIEILGVRNVASVCLQIGYPTVASVPHSIINGYKRVLALSVETDYTFPLAEKVKAFLADPSAFVAAAPVAAATTAAPAAAAAPAKVEAKEESEESDEDMGFGLFD

SEQ ID NO: 20173 - protein, 282 aa, Homo sapiens
VMPREDRATWKSNYFLKIIQLLDDYPKCFIVGADNVGSKQMQQIRMSLRGKAVVLMGKNTMMRKAIRGHLENNPALEKLLPHIRGNVGFVFTKEDLTEIRDMLLANKVPAAARAGAIAPCEVTVPAQNTGLGPEKTSFFQALGITTKISRGTIEILVFDNGSIYNPEVLDITEETLHSRFLEGVRNVASVCLQIGYPTVASVPHSIINGYKRVLALSVETDYTFPLAEKVKAFLADPSAFVAAAPVAAATTAAPAAAAAPAKVEAKEESEESDEDMGFGLFD

SEQ ID NO: 20174 - protein, 89 aa, Homo sapiens
LSNRCLLPHYYLVQSDVQLIKTGDKVGASEATLLNMLNISPFSFGLVIQQVFDNGSIYNPEVLDITEETLHSRFLEVYAVSLAPSYTDG

SEQ ID NO: 20175 - protein, 157 aa, Homo sapiens
VMPREDRATWKSNYFLKIIQLLDDYPKCFIVGADNVGSKQMQQIRMSLRGKAVVLMGKNTMMRKAIRGHLENNPALEKLLPHIRGNVGFVFTKEDLTEIRDMLLANKVPAAARAGAIAPCEVTVPAQNTGLGPEKTSFFQALGVYCPTIIWFRVMCS

SEQ ID NO: 20176 - protein, 143 aa, Homo sapiens
VMPREDRATWKSNYFLKIIQLLDDYPKCFIVGADNVGSKQMQQIRMSLRGKAVVLMGKNTMMRKAIRGHLENNPALEKLLPHIRGNVGFVFTKEDLTEIRDMLLANKVPAAARAGAIAPCEVTVPAQNTGLGPEKTSFFQALE

SEQ ID NO: 20177 - protein, 167 aa, Homo sapiens
VMPREDRATWKSNYFLKIIQLLDDYPKCFIVGADNVGSKQMQQIRMSLRGKAVVLMGKNTMMRKAIRGHLENNPALEKLLPHIRGNVGFVFTKEDLTEIRDMLLANKVPAAARAGAIAPCEVTVPAQNTGLGPEKTSFFQALGITTKISRGTIEILVFTAPLLSGSE

SEQ ID NO: 20178 - protein, 100 aa, Homo sapiens
VMPREDRATWKSNYFLKIIQLLDDYPKCFIVGADNVGSKQMQQIRMSLRGKAVVLMGKNTMMRKAIRGHLENNPALEKSVPLAVLSFLPSARLPLPGEWC

SEQ ID NO: 20179 - protein, 488 aa, Homo sapiens
LGSGFFPGPSAGRRGDLGRGWGFLASCDFGRLAPLLVQSGKAQGEPGEVPPPLWAELAISSSSLSLLSSPQVVFPPGSPIPLRRTISVLASPSVPLLQHRTDAAASSSSPLPSLLASSPLGPSAYTCGSSGVQSAGEEPHDEGVQGPALPIPAPHTMRSVGCQTDEDPLFPPMQIQGLEQRADGERCWAAGWPRDGGRSSPGGQDEGGFMAQGKTGSSSPPGGPPKPGSQLDSMLGSLQSDLNKLGVATVAKGVCGACKKPIAGQVVTAMGKTWHPEHFVCTHCQEEIGSRNFFERDGQPYCEKDYHNLFSPRCYYCNGPILDKVVTALDRTWHPEHFFCAQCGAFFGPEGFHEKDGKAYCRKDYFDMFAPKCGGCARAILENYISALNTLWHPECFVCRECFTPFVNGSFFEHDGQPYCEVHYHERRGSLCSGCQKPITGRCITAMAKKFHPEHFVCAFCLKQLNKGTFKEQNDKPYCQNCFLKLFC

SEQ ID NO: 20180 - protein, 618 aa, Homo sapiens
LSLHPALAVWDVTLPLNRSYTICAGGVVRMADALLADLESTTSHISKRPVFLSEETPYSYPTGNHTYQEIAVPPPVPPPPSSEALNGTILDPLDQWQPSSSRFIHQQPQSSSPVYGSSAKTSSVSNPQDSVGSPCSRVGEEEHVYSFPNKQKSAEPSPTVMSTSLGSNLSELDRLLLELNAVQHNPPGFPADEANSSPPLPGALSPLYGVPETNSPLGGKAGPLTKEKPKRNGGRGLEDVRPSVESLLDELESSVPSPVPAITVNQGEMSSPQRVTSTQQQTRISASSATRELDELMASLSDFKIQGLEQRADGERCWAAGWPRDGGRSSPGGQDEGGFMAQGKTGSSSPPGGPPKPGSQLDSMLGSLQSDLNKLGVATVAKGVCGACKKPIAGQVVTAMGKTWHPEHFVCTHCQEEIGSRNFFERDGQPYCEKDYHNLFSPRCYYCNGPILDKVVTALDRTWHPEHFFCAQCGAFFGPEGFHEKDGKAYCRKDYFDMFAPKCGGCARAILENYISALNTLWHPECFVCRECFTPFVNGSFFEHDGQPYCEVHYHERRGSLCSGCQKPITGRCITAMAKKFHPEHFVCAFCLKQLNKGTFKEQNDKPYCQNCFLKLFC

SEQ ID NO: 20181 - protein, 11 aa, Homo sapiens
MRFIRGAIIAN

SEQ ID NO: 20182 - protein, 40 aa, Homo sapiens
VLKLNNFFEIMVAILGVESALHKYTLYANDDKLVRMSRAA

SEQ ID NO: 20183 - protein, 24 aa, Homo sapiens
LRRRRPESDMSPAAQAERPVALFF

SEQ ID NO: 20184 - protein, 278 aa, Homo sapiens
VCARELGRSLAIYLPSSGTLGTEMALMQELYSTPASRLDSFVAQWLQPHREWKEEVLDAVRTVEEFLRQEHFQGKRGLDQDVRVLKVVKVGSFGNGTVLRSTREVELVAFLSCFHSFQEAAKHHKDVLRLIWKTMWQSQDLLDLGLEDLRMEQRVPDALVFTIQTRGTAEPITVTIVPAYRALGPSLPNSQPPPEVYVSLIKACGGPGNFCPSFSELQRNFVKHRPTKLKSLLRLVKHWYQQAHHPGSGRPHPQRGRRVQMGHRCSEGLPVPETGLLL

SEQ ID NO: 20185 - protein, 66 aa, Homo sapiens
LDSFVAQWLQPHREWKEEVLDAVRTVEEFLRQEHFQGKRGLDQDVRVLKVVKGLLFPTPSHPLRSM

SEQ ID NO: 20186 - protein, 138 aa, Homo sapiens
MMSLLENVLSAVLSHLWFYDALTPIGIQTGRCVVYEGNQKTCEVSAWCPIEAVEEAPRPALLNSAENFTVLIKNNIDFPGHNYTTRNILPGLNITCTFHKTQNPQCPIFRLGDIFRETGDNFSDVAIQIRQVLQGKQC

SEQ ID NO: 20187 - protein, 139 aa, Homo sapiens
LVTGRGSDSGPQPLAGKGATSWVGMPSSSVGPARPSLRGSSEQLAWLRGIFSYRSSPPPSPQQSSPNQTRSRQVGLGFCQPPGQQGWVGRLGPVSAVLPGPRPGWEGTLVLISRLHFCASLCCHKQRSQPHFLDGESGH

SEQ ID NO: 20188 - protein, 47 aa, Homo sapiens
LYFRLLSLNDDHTIAISRAVNSPQRSRLFAYPTLESLQKWKEQNVRV

SEQ ID NO: 20189 - protein, 42 aa, Homo sapiens
LISKHPSSDTKERPTDEGSHFSAMELNGQAQGLTVGRLEKTF

SEQ ID NO: 20190 - protein, 133 aa, Homo sapiens
MEKLRTGGRGACLRSHSQEWHSWGWHEVQWGGQKRGAGSVHSPSTSMATSSQYRQLLSDYGPPSLGYTQGTGNSQVPQSKYAELLAIIEELGKEIRPTYAGSKSAMERLKRGIIHARGLVRECLAETERNARS

SEQ ID NO: 20191 - protein, 65 aa, Homo sapiens
LAWQKDLAPRLLASFLPPEESPWAQGHPDTVLLPSPADLLAEYCEWLPQAMHPDIEKAWPPTTVH

SEQ ID NO: 20192 - protein, 112 aa, Homo sapiens
LGLQVHVTMPSQLFTLLGGAGGVVMPALLSGPQQQPVCALAACHQRAFLPHRLQPRTESLLRALVAEKADCHEALLAAWKKNPKYLLAEYCEWLPQAMHPDIEKAWPPTTVH

SEQ ID NO: 20193 - protein, 209 aa, Homo sapiens
VPRPADSPLSPDGDANGGVAGTLGQRHGSPSHGGCRCNPSFLPRPPGVSSVEVQWIPALLPSYCQFDKPLEEPAPTYCPERGRVLCHRASVFYRVGWPLPAIEVDFPEGIDRYKHFARFLLEGQVFRKLASYRSCLLSSPGTMLKTWARLQPRTESLLRALVAEKADCHEALLAAWKKNPKYLLAEYCEWLPQAMHPDIEKAWPPTTVH

SEQ ID NO: 20194 - protein, 266 aa, Homo sapiens
LFPAAAVADPARQALLTVASSGPRSPALASAPAPGPQPSSQPRPPAAAMSKEERPGREEILECQVMWEPDSKKNTQMDRFRAAVGAACGLALESYDDLYHWSVESYSDFWAEFWKFSGIVFSRVYDEVVDTSKGIADVPEWFKGSRLNYAENLLRHKENDRVALYIANQHKKPNHWKQAVSGPAQATEQGLPSAIVGRTSSPCAVGKDHGSPVPTETYWDTSSGAGAQASMYFQSPWALLMHIPGEEPWSNVSTYHMGLGKAKRKL

SEQ ID NO: 20195 - protein, 263 aa, Homo sapiens
LLSLGFCKLVRNKSLTLESFGARALKSFWCFLSRLHPSITVLVTGAKWLSVLEEKAMKPVETHSLQMLHTILSTGSPLKAQSYEYVYRCIKSSILLGSISGGTDIISCFMGHNFSLPVYKGEIQARNLGMAVEAWNEEGKAVWGESGELVCTKPIPCQPTHFWNDENGNKYRKAYFSKFPGIWAHGDYCRINPKTGGIVMLGRSDGTLNPNGVRFGSSEIYNIVYAQRQESGSCRQTDHRWKSRGARRCFLEPRDPGSVPGHP

SEQ ID NO: 20196 - protein, 172 aa, Homo sapiens
VCGRGPSLYLCICLEYCIISNSLRKRERQPGCVAVVCVGLIFNSPIPGKAVWGESGELVCTKPIPCQPTHFWNDENGNKYRKAYFSKFPGIWAHGDYCRINPKTGGIVMLGRSDGTLNPNGVRFGSSEIYNIVYAQRQESGSCRQTDHRWKSRGARRCFLEPRDPGSVPGHP

SEQ ID NO: 20197 - protein, 53 aa, Homo sapiens
LKDEVQEKGQTAKHKLESFRETVEWNDSPELQIEGIFSSDFDLNGGNTFMAPL

SEQ ID NO: 20198 - protein, 38 aa, Homo sapiens
LEQQRETVEWNDSPELQIEGIFSSDFDLNGGNTFMAPL

SEQ ID NO: 20199 - protein, 34 aa, Homo sapiens
LNFITLERETVEWNDSPELQIEDLNGGNTFMAPL

SEQ ID NO: 20200 - protein, 110 aa, Homo sapiens
LPIRQRERMIEMLEERALGRYRPDLNPHSSCFGPCNSRLPLNPLSSINTWLSRNNYDLGPGPSGIFTPNLNFITLERETVEWNDSPELQIEGIFSSDFDLNGGNTFMAPL

SEQ ID NO: 20201 - protein, 36 aa, Homo sapiens
LKSCSLGPGEEHSRLPCPLHLQPQNKHVEKVIDHLD

SEQ ID NO: 20202 - protein, 56 aa, Homo sapiens
LGPLSGVLWERTFASHGILQQLKEQMNPPDLSWWETGTVRCYQVNSVVGAHTLNKL

SEQ ID NO: 20203 - protein, 1094 aa, Homo sapiens
VKAEYVHLNHPLTLVTRERDLAVKEKHQLQAKLENLEQVLKHMREAAERRQQLQLEHDQALAVLSAKQQEIDLLQKSKVRELEEKCRTQSEQFNLLSRDLEKFRQHAGKIDLLGGSAVAPLDISTAPSKPFPQFMNGLATSLGKGQESAIGGSSAIGEYIRPLPQPGDRPEPLSAKPTFLSRSGSARCRSESDMENERNSNTSKQRYSGKVHLCVARYSYNPFDGPNENPEAELPLTAGKYLYVYGDMDEDGFYEGELLDGQRGLVPSNFVDFVQDNESRLASTLGNEQDQNFINHSGIGLEGEHILDLHSPTHIDAGITDNSAGTLDVNIDDIGEDIVPYPRKITLIKQLAKSVIVGWEPPAVPPGWGTVSSYNVLVDKETRMNLTLGSRTKALIEKLNMAACTYRISVQCVTSRGSSDELQCTLLVGKDVVVAPSHLRVDNITQISAQLSWLPTNSNYSHVIFLNEEEFDIVKAARYKYQFFNLRPNMAYKVKVLAKPHQMPWQLPLEQREKKEAFVEFSTLPAGPPAPPQDVTVQAGVTPATIRVSWRPPVLTPTGLSNGANVTGYGVYAKGQRVAEVIFPTADSTAVELVRLRSLEAKGVTVRTLSAQGESVDSAVAAVPPELLVPPTPHPRPAPQSKPLASSGVPETKDEHLGPHARMDEAWEQSRAPGPVHGHMLEPPVGPGRRSPSPSRILPQPQGTPVSTTVAKAMAREAAQRVAESSRLEKRSVFLERSSAGQYAASDEEDAYDSPDFKRRGASVDDFLKGSELGKQPHCCHGDEYHTESSRGSDLSDIMEEDEEELYSEMQLEDGGRRRPSGTSHNALKILGNPASAGRVDHMGRRFPRGSAGPQRSRPVTVPSIDDYGRDRLSPDFYEESETDPGAEELPARIFVALFDYDPLTMSPNPDAAEEELPFKEGQIIKVYGDKDADGFYRGETCARLGLIPCNMVSEIQADDEEMMDQLLRQGFLPLNTPVEKIERSRRSGRRHSVSTRRMVALYDYDPRESSPNVDVEAELTFCTGDIITVFGEIDEDGFYYGELNGQKGLVPSNFLEEVPDDVEVYLSDAPSHYSQDTPMRSKAKRKKSVHFTP

SEQ ID NO: 20204 - protein, 730 aa, Homo sapiens
LLPRGSAIQEAQVEAKKEHEGAVRLLESKVRELEEKCRTQSEQFNLLSRDLEKFRQHAGKIDLLGGSAVAPLDISTAPSKPFPQFMNGLATSLGKGQESAIGGSSAIGEYIRPLPQPGDRPEPLSAKPTFLSRSGSARCRSESDMENERNSNTSKQRYSGKVHLCVARYSYNPFDGPNENPEAELPLTAGKYLYVYGDMDEDGFYEGELLDGQRGLVPSNFVDFVQDNESRLASTLGNEQDQNFINHSGIGLEGEHILDLHSPTHIDAGITDNSAGTLDVNIDDIGEDIVPYPRKITLIKQLAKSVIVGWEPPAVPPGWGTVSSYNVLVDKETRMNLTLGSRTKALIEKLNMAACTYRISVQCVTSRGSSDELQCTLLVGKDVVVAPSHLRVDNITQISAQLSWLPTNSNYSHVIFLNEEEFDIVKAARYKYQFFNLRPNMAYKVKVLAKPHQMPWQLPLEQREKKEAFVEFSTLPAGPPAPPQDVTVQAGVTPATIRVSWRPPVLTPTGLSNGANVTGYGVYAKGQRVAEVIFPTADSTAVELVRLRSLEAKGVTVRTLSAQGESVDSAVAAVPPELLVPPTPHPRPAPQSKPLASSGVPETKDEHLGPHARMDEAWEQSRAPGPVHGHMLEPPVGPGRRSPSPSRILPQPQGTPVSTTVAKAMAREAAQRVAESSRLEKRSVFLERSSAGQYAASDEEDAYDSPDFKRRGASVDDFLKGSELGKQMVS

SEQ ID NO: 20205 - protein, 106 aa, Homo sapiens
VTRERDLAVKEKHQLQAKLENLEQVLKHMREAAERRQQLQLEHDQALAVLSAKQQEIDLLQKAQVEAKKEHEGAVRLLEVRSVPLLSARGWGTLGRVALMPARNNR

SEQ ID NO: 20206 - protein, 13 aa, Homo sapiens
MQAFPQGPGSMTR

SEQ ID NO: 20207 - protein, 7 aa, Homo sapiens
LEMTRHT

SEQ ID NO: 20208 - protein, 58 aa, Homo sapiens
LVGDGGTGKTTFVKRHLTGEFEKKYVGMCWKTLLVEICEKWVSSSTQSHRFRFSHLGC

SEQ ID NO: 20209 - protein, 28 aa, Homo sapiens
LVGDGGTGKTTFVKRHLTGEFEKNHLGC

SEQ ID NO: 20210 - protein, 46 aa, Homo sapiens
LVGDGGTGKTTFVKRHLTGEFEKKYVGMCWKTLLVEICEKWPSVPS

SEQ ID NO: 20211 - protein, 182 aa, Homo sapiens
LVNLRRTTLGVEVHPLVFHTNRGPIKFNVWDTAGQEKFGGLRDGYYIQAQCAIIMFDVTSRVTYKNVPNWHRDLVRVCENIPIVLCGNKVDIKDRKVKAKSIVFHRKKNLQYYDISAKSNYNFEKPFLWLARKLIGDPNLEFVAMPALAPPEVVMDPALAAQYEHDLEVAQTTALPDEDDDL

SEQ ID NO: 20212 - protein, 44 aa, Homo sapiens
LGVEVHPLVFHTNRGPIKFNVWDTAGQEKFGGLRDGYYIQGRHL

SEQ ID NO: 20213 - protein, 523 aa, Homo sapiens
LFRVGGGMEREPGAAGVRRALGRRLEAVLASRSEANAVFDILAVLQSEDQEEIQEAVRTCSRLFGALLERGELFVGQLPSEEMVMTGSQGATRKYKVWMRHRYHSCCNRLGELLGHPSFQVKELALSALLKFVQLEGAHPLEKSKWEGNYLFPRELFKLVVGGLLSPEEDQSLLLSQFREYLDYDDTRYHTMQAAVDAVARVTGQHPEVPPAFWNNAFTLLSAVSLPRREPTVSSFYVKRAELWDTWKVAHLKEHRRVFQAMWLSFLKHKLPLSLYKKVLLIVHDAILPQLAQPTLMIDFLTRACDLGGALSLLALNGLFILIHKHNLEYPDFYRKLYGLLDPSVFHVKYRARFFHLADLFLSSSHLPAYLVAAFAKRLARLALTAPPEALLMVLPFICNLLRRHPACRVLVHRPHGPELDADPYDPGEEDPAQSRALESSLWELQALQRHYHPEVSKAASVINQALSMPEVSIAPLLELTAYEIFERDLKKKGPEPVPLEFIPAQGLLGRPGELCAQHFTLS

SEQ ID NO: 20214 - protein, 191 aa, Homo sapiens
LLLSQFREYLDYDDTRYHTMQAAVDAVARVTGQHPEVPPAFWNNAFTLLSAVSLPRREPTVSSFYVKRAELWDTWKVAHLKEHRRVFQAMWLSFLKHKLPLSLYKKVLLIVHDAILPQLAQPTLMIDFLTRACDLGSTLTSTGSSTASWTPLSFTSSTAPASSTWLTSSCPPPTSPPTWWPPSPSGWPAWP

SEQ ID NO: 20215 - protein, 219 aa, Homo sapiens
LSAGGALSLLALNGLFILIHKHNLEYPDFYRKLYGLLDPSVFHVKYRARFFHLADLFLSSSHLPAYLVAAFAKRLARLALTAPPEALLMVLPFICNLLRRHPACRVLVHRPHGPELDADPYDPGEEDPAQSRALESSLWELQALQRHYHPEVSKAASVINQALSMPEVSIAPLLELTAYEIFERDLKKKGPEPVPLEFIPAQGLLGRPGELCAQHFTLS

SEQ ID NO: 20216 - protein, 67 aa, Homo sapiens
LDLAELCLSPKRGGLVRSAQPQPEPGDAYPRCLSSPGPLRVGVAGSSAASGGGGGGRGPGITFKPMS

SEQ ID NO: 20217 - protein, 411 aa, Homo sapiens
VAGGCELSGGVCVRLESFPAVLSMDPIRSFCGKLRSLASTLDCETARLQRALDGEESDFEDYPMRILYDLHSEVQTLKDDVNILLDKARLENQEGIDFIKATKVLMEKNSMDIMKIREYFQKYGYSPRVKKNSVHEQEAINSDPELSNCENFQKTDVKDDLSDPPVASSCISEKSPRSPQLSDFGLERYIVSQVLPNPPQAVNNYKEEPVIVTPPTKQSLVKVLKTPKCALKMDDFECVTPKLEHFGISEYTMCLNEDYTMGLKNARNNKSEEAIDTESRLNDNVFATPSPIIQQLEKSDAEYTNSPLVPTFCTPGLKIPSTKNSIALVSTNYPLSKTNSSSNDLEVEDRTSLVLNSDTCFENLTDPSSPTISSYENLLRTPTPPEVTKIPEDILQKFQWIYPTQKLNKMR

SEQ ID NO: 20218 - protein, 406 aa, Homo sapiens
VGSAYAWSPSPLCSAWTLSGASAGSCGLWPARWTARRPGCSERWTERKADDVNILLDKARLENQEGIDFIKATKVLMEKNSMDIMKIREYFQKYGYSPRVKKNSVHEQEAINSDPELSNCENFQKTDVKDDLSDPPVASSCISEKSPRSPQLSDFGLERYIVSQVLPNPPQAVNNYKEEPVIVTPPTKQSLVKVLKTPKCALKMDDFECVTPKLEHFGISEYTMCLNEDYTMGLKNARNNKSEEAIDTESRLNDNVFATPSPIIQQLEKSDAEYTNSPLVPTFCTPGLKIPSTKNSIALVSTNYPLSKTNSSSNDLEVEDRTSLVLNSDTCFENLTDPSSPTISSYENLLRTPTPPEVTKIPEDILQLLSKYNSNLATPIAIKAVPPSKRFLKHGQNIRDVSNKEN

SEQ ID NO: 20219 - protein, 72 aa, Homo sapiens
VAGGCELSGGVCVRLESFPAVLSMDPIRSFCGKLRSLASTLDCETARLQRALDGEESAFIKIQLKPSYSNSN

SEQ ID NO: 20220 - protein, 107 aa, Homo sapiens
LRSLASTLDCETARLQRALDGEESDFEDYPMRILYDLHSEVQTLKDDVNILLDKARLENQEGIDFIKATKVLMEKNSMDIMKIREYFQKYGYSPRVKKNSGLNNFIL

SEQ ID NO: 20221 - protein, 58 aa, Homo sapiens
VAGGCELSGGVCVRLESFPAVLSMDPIRSFCGKLRSLASTLDCETARLQRALDGEESG

SEQ ID NO: 20222 - protein, 127 aa, Homo sapiens
MNEKGELYGSVSTGGTSSSFISMFDLNSCLFSGLKRARNATESVWKEKLTQECVFREQFEENWYNTYSSNLYKHVDTGRRYYVALNKDGTPREGTRTKRHQKFTHFLPRPVDPDKVPELYKDILSQS

SEQ ID NO: 20223 - protein, 14 aa, Homo sapiens
MLGDRLLGHTPVLL

SEQ ID NO: 20224 - protein, 113 aa, Homo sapiens
MPNAAAVAMAATLTQQQQPATGPQPSLGVSFGTPFGSGIGTGLQSSGLGSSNLGGFGTSSGFGCSTTGASTFGFGTTNKPSGSLSAGNKSQVLTEFRKPSVTETNEIGRKIQF

SEQ ID NO: 20225 - protein, 16 aa, Homo sapiens
LLLQRRGAPGPGRLRQ

SEQ ID NO: 20226 - protein, 82 aa, Homo sapiens
LSDTMQVSACVGRLPFFRKRGKYPHRLSVFSETIFFPRKKSLTVGVSLRQRRGQPTGPCKARAAAPPLSFRPEPPSSSNSPK

SEQ ID NO: 20227 - protein, 360 aa, Homo sapiens
VAVSPGSEPRSRSPAAERLEPRAASSPAKRTASAIVSSAASAPAPPGRSGKGRRRGGAGTAAALPGAPSPLKAAGLDSSAGSRRGPGPLVPHSQLASRLRVRRGPALSDCAPDPGTRSMRPLSMSGHFLLAPIPESSSDYLLPKDIKLAVLGAGRVGKSAMIVRFLTKRFIGDYEPNTGKLYSRLVYVEGDQLSLQIQDTPGGVQIQDSLPQVVDSLSKCVQWAEGFLLVYSITDYDSYLSIRPLYQHIRKVHPDSKAPVIIVGNKGDLLHARQVQTQDGIQLANELGSLFLEISTSENYEDVCDVFQHLCKEVSKMHGLSGERRRASIIPRPRSPNMQDLKRRFKQALSPKVKAPSALG

SEQ ID NO: 20228 - protein, 102 aa, Homo sapiens
LNCHTAHVASRFAELKVKIYCHFGNKLEDGPKFLKSGDAAIVDIVPGKPMCAESFSDHPLLSCFAVGDVRQTVAVGVIKAVDKKAAGAGKVTRFAQKSQKAK

SEQ ID NO: 20229 - protein, 33 aa, Homo sapiens
LWRKIVGSLRFDSETFLVSLLRHLCCKIEAVLW

SEQ ID NO: 20230 - protein, 112 aa, Homo sapiens
LLMKPGAGTRQPSAPIQSAQAGVSSGSTTWQARTRPRAPANRSLHSSPRAPRPRPAPPRPVSPAERPLVLERVRQSVCSRSCRSPAAAGLDSETFLVSLLRHLCCKIEAVLW

SEQ ID NO: 20231 - protein, 47 aa, Homo sapiens
LHRVGAKLCDGIHGFFAHKVEHESRTQNGRSFQRTGTLAFERVYTAK

SEQ ID NO: 20232 - protein, 414 aa, Homo sapiens
LGTAFDPFLGGKNFDEKLVEHFCAEFKTKYKLDAKSKIRALLRLYQECEKLKKLMSSNSTDLPLNIECFMNDKDVSGKMNRSQFEELCAELLQKIEVPLYSLLEQTHLKVEDVSAVEIVGGATRIPAVKERIAKFFGKDISTTLNADEAVARGCALQCAILSPAFKVREFSVTDAVPFPISLIWNHDSEDTEGVHEVFSRNHAAPFSKVLTFLRRGPFELEAFYSDPQGVPYPEAKIGRFVVQNVSAQKDGEKSRVKVKVRVNTHGIFTISTASMVEKVPTEENEMSSEADMECLNQRPPENPDTDKNVQQDNSEAGTQPQVQTDAQQTSQSPPSPELTSEENKIPDADKANEKKVDQPPEAKKPKIKVVNVELPIEANLVWQLGKDLLNMYIETEVSTSIKYFYFEICLVSWP

SEQ ID NO: 20233 - protein, 5938 aa, Homo sapiens
MQKGLLDQDTGLVLLESQVIMSGLIAPETGENLSLEEGIARNLINPQMYQQLRELQDALALISRLTESRGPLSVVEAIEKRIISETVGLKILEAHLATGGFSLSPSENCINLEEAFHQGLISAWLHSVLESYLRTSKNLIDPNTAEKIGLLDLMQRCIVHQESGFKLLPVKQLAGGMVSLKSGRKVSIFRAVQEGLIDRQVTVRLLEAQLFAGGIVDPRTGHRLTVEEAVRHNLIDQDMACAILIRQLQTGGIIDTVTGQRLTIDEAVSNDLVAAKIALVILESLWSFMGLLWPESGEILPITDALEQGIVSTELAHKILSNRQHIKALFLPATTEILSWKKAIESGILDRDLANNLKSICIPDVMPHMQLADSAEQNINPGAAVLPCSKSHPKATASQSENLLFQLMTHSYINVQNGQRLLLLDKELMETLTSRDEYQTSPPKVVEIGHQRQKTPEGLQESANVKISGTFSSGWTVRLPEFQFSSQNKEYPDREDCTTEKGKKTTVETEDSSVENPEQDLFVEQKERNPNIDALKVINKVKLEVQRQLIGTQREDQTAVSVRENASRGHLLTIPPAEAEGVPLVVDKDVFSVETPKKEHQPLRNTSFTCQNEQAHTLETEYIHDETGGSHIKPQSKKLQVQVKKTLGIKLELKSETDGNVHPLDKKEMLKKTFLAKDDHKESQEAQNIAGGSMMMSEKTDEEDSGREIFLSCSHPLELLEEATLNVLSAQLLDGGIFHEQTGQKLLLNEAISRGIVPSHTAVKLMEKLNMFQGFFDSQTCESLTTEEVINEGLMDEKLLHNVLMADKAISGVLDPRTQTLCSVKDAVTVGLLDKETATRILERQVVTGGIIDLKRGKKVSVTLASTLGLVDVADQPELINLEKASKGRDAEKTVRERLISLQMETTGLIDPDSKAPLTVVQSIDRGLLEREEAVRLLTKQVVDGGIIHHISGMRLSVDNAFRHGLIGEDLAEKLKRVENLNIHQIFNPETKENISLPKAIKLDLITSDLKREIQEVQAFTGNFVDLISGQRLTLAEAKKEGLLTNEAVLSPGMMHGIVDPENCRIVPYSELVKKCKIDIESGQRYLEVIPFSDIKDGVSDKVLTLSQAIQLGKVDFASTLKVLEAQANTGGIIDTATGKRLTLASALEEKLVDENMVRIIASHQVLNGGIVDIFSDQRVTLVEAIEKRLISPELANMIQIDSSEFSDHRAQIEKQEGIEVCALQNEFLGKDMLIACNQTAEMSCNKVEESERLFQVENQSAQEKVKVRVSDGEQAKKSREISLKEFGCKDQRKPRMSSDAKEFISIINPHNLKGKSLGQVSLTHPYSECDFKLKEVARNNMGNDTNEEQEKAVTKIEIISHMKQSTSCLDSEEIRENQGEVILEVQETYCETSGKLPSEQVLQQPMNARVKSKREKREVIVEESIRTCKPAFLSEEKLYQETAIRDEHDSHIKSQPREMTSSEKGKEADTEMGFSITFKIEESSSQVVPQGISVKHLDALTLFSSKQANEGKVNNLSLCLTLKPEENLSREIACGAQSEPFPCMTPRPEGLHYQESDGKAQVTGPSQISKTDKSFQGTTRQETNYQDSWVTSKTKETKHQISSSNECKEKSYQEVSFDPARGLKLEEITVSRPDSKEVRYLEFSDRKDLHHQGSKSDDKLCGTLKSEIATQELTGEKFLEMANPNVAGLEAGSIEDIVTQRGSRVLGSFLPEKLFKGVSQKENTGQQNAIISPTVLETSEEKTVSLTVCSAVKTEKTPQEKLRESPGSEQTPFMTAPEGKGNGGVNPEPFRATQNVFTRQLCLEHDEKLVSYLSLLRNIEMRTKQIQPLELNLAELQDLLCQAKVLERELKDLTTLVSQELECVNQIIISQPQEVPAQLLKALEKDAKNLQKSLSSVSDTWNSRLLHFQNAVEIEKTKVLNQHTQLEGRLQDLRAWVGNKNLILNSKGSNSEIDVDSLNLCLQQYEDLKQPMAERKAQLDALAFDIQFFISEHAQDLSPQQNRQMLRLLNELQRSFQDILEQTAAQVDALQGHLQQMEQEALVKTLQKQQNTCHQQLEDLCSWVGQAERALAGHQGRTTQQDLSALQKNQSDLKDLQDDIQNRATSFATVVKDIEGFMEENQTKLSPRELTALREKLHQAKEQYEALQEETRVAQKELEEAVTSALQQETEKSKAAKELAENKKKIDALLDWVTSVGSSGGQLLTNLPGMEQLSGASLEKGALDTTDGYMGVNQAPEKLDKQCEMMKARHQELLSQQQNFILATQSAQAFLDQHGHNLTPEEQQMLQQKLGELKEQYSTSLAQSEAELKQVQTLQDELQKFLQDHKEFESWLERSEKELENMHKGGSSPETLPSLLKRQGSFSEDVISHKGDLRFVTISGQKVLDMENSFKEGKEPSEIGNLVKDKLKDATERYTALHSKCTRLGSHLNMLLGQYHQFQNSADSLQAWMQACEANVEKLLSDTVASDPGVLQEQLATTKQLQEELAEHQVPVEKLQKVARDIMEIEGEPAPDHRHVQETTDSILSHFQSLSYSLAERSSLLQKAIAQSQSVQESLESLLQSIGEVEQNLEGKQVSSLSSGVIQEALATNMKLKQDIARQKSSLEATREMVTRFMETADSTTAAVLQGKLAEVSQRFEQLCLQQQEKESSLKKLLPQAEMFEHLSGKLQQFMENKSRMLASGNQPDQDITHFFQQIQELNLEMEDQQENLDTLEHLVTELSSCGFALDLCQHQDRVQNLRKDFTELQKTVKEREKDASSCQEQLDEFRKLVRTFQKWLKETEGSIPPTETSMSAKELEKQIEHLKSLLDDWASKGTLVEEINCKGTSLENLIMEITAPDSQGKTGSILPSVGSSVGSVNGYHTCKDLTEIQCDMSDVNLKYEKLGGVLHERQESLQAILNRMEEVHKEANSVLQWLESKEEVLKSMDAMSSPTKTETVKAQAESNKAFLAELEQNSPKIQKVKEALAGLLVTYPNSQEAENWKKIQEELNSRWERATEVTVARQRQLEESASHLACFQAAESQLRPWLMEKELMMGVLGPLSIDPNMLNAQKQQVQFMLKEFEARRQQHEQLNEAAQGILTGPGDVSLSTSQVQKELQSINQKWVELTDKLNSRSSQIDQAIVKSTQYQELLQDLSEKVRAVGQRLSVQSAISTQPEAVKQQLEETSEIRSDLEQLDHEVKEAQTLCDELSVLIGEQYLKDELKKRLETVALPLQGLEDLAADRINRLQAALASTQQFQQMFDELRTWLDDKQSQQAKNCPISAKLERLQSQLQENEEFQKSLNQHSGSYEVIVAEGESLLLSVPPGEEKRTLQNQLVELKNHWEELSKKTADRQSRLKDCMQKAQKYQWHVEDLVPWIEDCKAKMSELRVTLDPVQLESSLLRSKAMLNEVEKRRSLLEILNSAADILINSSEADEDGIRDEKAGINQNMDAVTEELQAKTGSLEEMTQRLREFQESFKNIEKKVEGAKHQLEIFDALGSQACSNKNLEKLRAQQEVLQALEPQVDYLRNFTQGLVEDAPDGSDASQLLHQAEVAQQEFLEVKQRVNSGCVMMENKLEGIGQFHCRVREMFSQLADLDDELDGMGAIGRDTDSLQSQIEDVRLFLNKIHVLKLDIEASEAECRHMLEEEGTLDLLGLKRELEALNKQCGKLTERGKARQEQLELTLGRVEDFYRKLKGLNDATTAAEEAEALQWVVGTEVEIINQQLADFKMFQKEQVDPLQMKLQQVNGLGQGLIQSAGKDCDVQGLEHDMEEINARWNTLNKKVAQRIAQLQEALLHCGKFQDALEPLLSWLADTEELIANQKPPSAEYKVVKAQIQEQKLLQRLLDDRKATVDMLQAEGGRIAQSAELADREKITGQLESLESRWTELLSKAAARQKQLEDILVLAKQFHETAEPISDFLSVTEKKLANSEPVGTQTAKIQQQIIRHKALEEDIENHATDVHQAVKIGQSLSSLTSPAEQGVLSEKIDSLQARYSEIQDRCCRKAALLDQALSNARLFGEDEVEVLNWLAEVEDKLSSVFVKDFKQDVLHRQHADHLALNEEIVNRKKNVDQAIKNGQALLKQTTGEEVLLIQEKLDGIKTRYADITVTSSKALRTLEQARQLATKFQSTYEELTGWLREVEEELATSGGQSPTGEQIPQFQQRQKELKKEVMEHRLVLDTVNEVSRALLELVPWRAREGLDKLVSDANEQYKLVSDTIGQRVDEIDAAIQRSQQYEQAADAELAWVAETKRKLMALGPIRLEQDQTTAQLQVQKAFSIDIIRHKDSMDELFSHRSEIFGTCGEEQKTVLQEKTESLIQQYEAISLLNSERYARLERAQVLVNQFWETYEELSPWIEETRALIAQLPSPAIDHEQLRQQQEEMRQLRESIAEHKPHIDKLLKIGPQLKELNPEEGEMVEEKYQKAENMYAQIKEEVRQRALALDEAVSQSTQITEFHDKIEPMLETLENLSSRLRMPPLIPAEVDKIRECISDNKSATVELEKLQPSFEALKRRGEELIGRSQGADKDLAAKEIQDKLDQMVFFWEDIKARAEEREIKFLDVLELAEKFWYDMAALLTTIKDTQDIVHDLESPGIDPSIIKQQVEAAETIKEETDGLHEELEFIRILGADLIFACGETEKPEVRKSIDEMNNAWENLNKTWKERLEKLEDAMQAAVQYQDTLQAMFDWLDNTVIKLCTMPPVGTDLNTVKDQLNEMKEFKVEVYQQQIEMEKLNHQGELMLKKATDETDRDIIREPLTELKHLWENLGEKIAHRQHKLEGALLALGQFQHALEELMSWLTHTEELLDAQRPISGDPKVIEVELAKHHVLKNDVLAHQATVETVNKAGNELLESSAGDDASSLRSRLEAMNQCWESVLQKTEEREQQLQSTLQQAQGFHSEIEDFLLELTRMESQLSASKPTGGLPETAREQLDTHMELYSQLKAKEETYNQLLDKGRLMLLSRDDSGSGSKTEQSVALLEQKWHVVSSKMEERKSKLEEALNLATEFQNSLQEFINWLTLAEQSLNIASPPSLILNTVLSQIEEHKVFANEVNAHRDQIIELDQTGNQLKFLSQKQDVVLIKNLLVSVQSRWEKVVQRSIERGRSLDDARKRAKQFHEAWKKLIDWLEDAESHLDSELEISNDPDKIKLQLSKHKEFQKTLGGKQPVYDTTIRTGRALKEKTLLPEDSQKLDNFLGEVRDKWDTVCGKSVERQHKLEEALLFSGQFMDALQALVDWLYKVEPQLAEDQPVHGDLDLVMNLMDAHKVFQKELGKRTGTVQVLKRSGRELIENSRDDTTWVKGQLQELSTRWDTVCKLSVSKQSRLEQALKQAEVFRDTVHMLLEWLSEAEQTLRFRGALPDDTEALQSLIDTHKEFMKKVEEKRVDVNSAVAMGEVILAVCHPDCITTIKHWITIIRARFEEVLTWAKQHQQRLETALSELVANAELLEELLAWIQWAETTLIQRDQEPIPQNIDRVKALIAEHQTFMEEMTRKQPDVDRVTKTYKRKNIEPTHAPFIEKSRSGGRKSLSQPTPPPMPILSQSEAKNPRINQLSARWQQVWLLALERQRKLNDALDRLEELKEFANFDFDVWRKKYMRWMNHKKSRVMDFFRRIDKDQDGKITRQEFIDGILASKFPTTKLEMTAVADIFDRDGDGYIDYYEFVAALHPNKDAYRPTTDADKIEDEVTRQVAQCKCAKRFQVEQIGENKYRFFLGNQFGDSQQLRLVRILRSTVMVRVGGGWMALDEFLVKNDPCRARGRTNIELREKFILPEGASQGMTPFRSRGRRSKPSSRAASPTRSSSSASQSNHSCTSMPSSPATPASGTKVIPSSGSKLKRPTPTFHSSRTSLAGDTSNSSSPASTGAKTNRADPKKSASRPGSRAGSRAGSRASSRRGSDASDFDLLETQSACSDTSESSAAGGQGNSRRGLNKPSKIPTMSKKTTTASPRTPGPKR

SEQ ID NO: 20234 - protein, 175 aa, Homo sapiens
LPMEDSFLQSFGRLSLQPQQQQQRQRPPRPPPRGTPPRRHSFRKHLYLLRGLPGSGKTTLARQLQHDFPRALIFSTDDFFFREDGAYEFNPDFLEEAHEWNQKRARKAMRNGISPIIIDNTNLHAWEMKPYAVMVFQTEQKNLFRLEMDMVVFRPEMKKHSWCLKRKNPPNERTV

SEQ ID NO: 20235 - protein, 119 aa, Homo sapiens
LRGLPGSGKTTLARQLQHDFPRALIFSTDDFFFREDGAYEFNPDFLEEAHEWNQKRGDKFLPKLLGNPDVHIDCSCCRMNKFYGRSLTESSANFSPKTEHQSITSLDSRERKLLIDSGL

SEQ ID NO: 20236 - protein, 474 aa, Homo sapiens
VCRRPRSAPPRPGGDAQLELEGRRPLGPQGPERPGVAASPPGASQQQPVESEAMHCSNPKSGVVLATVARGPDACQILTRAPLGQDPPQRTVLGLLTANGQYRRTCGQGITRIRCYSGSENAFPPAGKKALPDCGVQEPPKQGFDIYMDELEQGDRDSCSVREGMAFEDVYEVDTGTLKSDLHFLLDFNTVSPMLVDSSLLSQSEDISSLGTDVINVTEYAEEIYQYLREAEIRHRPKAHYMKKQPDITEGMRTILVDWLVEVGEEYKLRAETLYLAVNFLDRFLSCMSVLRGKLQLVGTAAMLLASKYEEIYPPEVDEFVYITDDTYTKRQLLKMEHLLLKVLAFDLTVPTTNQFLLQYLRRQGVCVRTENLAKYVAELSLLEADPFLKYLPSLIAAAAFCLANYTVNKHFWPETLAAFTGYSLSEIVPCLSELHKAYLDIPHRPQQAIREKYKASKYLCVSLMEPPAVLLLQ

SEQ ID NO: 20237 - protein, 480 aa, Homo sapiens
LVGGGRSAAPCSSLGMETGFPAIMYPGSFIGGWGEEYLSWEGPGLPDFVFQQQPVESEAMHCSNPKSGVVLATVARGPDACQILTRAPLGQDPPQRTVLGLLTANGQYRRTCGQGITRIRCYSGSENAFPPAGKKALPDCGVQEPPKQGFDIYMDELEQGDRDSCSVREGMAFEDVYEVDTGTLKSDLHFLLDFNTVSPMLVDSSLLSQSEDISSLGTDVINVTEYAEEIYQYLREAEIRHRPKAHYMKKQPDITEGMRTILVDWLVEVGEEYKLRAETLYLAVNFLDRFLSCMSVLRGKLQLVGTAAMLLASKYEEIYPPEVDEFVYITDDTYTKRQLLKMEHLLLKVLAFDLTVPTTNQFLLQYLRRQGVCVRTENLAKYVAELSLLEADPFLKYLPSLIAAAAFCLANYTVNKHFWPETLAAFTGYSLSEIVPCLSELHKAYLDIPHRPQQAIREKYKASKYLCVSLMEPPAVLLLQ

SEQ ID NO: 20238 - protein, 479 aa, Homo sapiens
LVGGGRSAAPCSSLGMETGFPAIMYPGSFIGGWGEEYLSWEGPGLPDFVFQQPVESEAMHCSNPKSGVVLATVARGPDACQILTRAPLGQDPPQRTVLGLLTANGQYRRTCGQGITRIRCYSGSENAFPPAGKKALPDCGVQEPPKQGFDIYMDELEQGDRDSCSVREGMAFEDVYEVDTGTLKSDLHFLLDFNTVSPMLVDSSLLSQSEDISSLGTDVINVTEYAEEIYQYLREAEIRHRPKAHYMKKQPDITEGMRTILVDWLVEVGEEYKLRAETLYLAVNFLDRFLSCMSVLRGKLQLVGTAAMLLASKYEEIYPPEVDEFVYITDDTYTKRQLLKMEHLLLKVLAFDLTVPTTNQFLLQYLRRQGVCVRTENLAKYVAELSLLEADPFLKYLPSLIAAAAFCLANYTVNKHFWPETLAAFTGYSLSEIVPCLSELHKAYLDIPHRPQQAIREKYKASKYLCVSLMEPPAVLLLQ

SEQ ID NO: 20239 - protein, 471 aa, Homo sapiens
LMPLNKHLFLMKIQLFSSRSVESLQQNSIRHNLSLHSKFIRVQNEGTGKSSWWMLNPEGGKSGKSPRRRAASMDNNSKFAKSRSRAAKKKASLQSGQEGAGDSPGSQFSKWPASPGSHSNDDFDNWSTFRPRTSSNASTISGRLSPIMTEQDDLGEGDVHSMVYPPSAAKMASTLPSLSEISNPENMENLLDNLNLLSSPTSLTVSTQSSPGTMMQQTPCYSFAPPNTSLNSPSPNYQKYTYGQSSMSPLPQMPIQTLQDNKSSYGGMSQYNCAPGLLKELLTSDSPPHNDIMTPVDPGVAQPNSRVLGQNVMMGPNSVMSTYGSQASHNKMMNPSSHTHPGHAQQTSAVNGRPLPHTVSTMPHTSGMNRLTQVKTPVQVPLPHPMQMSALGGYSSVSSCNGYGRMGLLHQEKLPSDLDGMFIERLDCDMESIIRNDLMDGDTLDFNFDNVLPNQSFPHSVKTTTHSWVSG

SEQ ID NO: 20240 - protein, 769 aa, Homo sapiens
LGRASGPRRPSVLPSAALSAGARRRLCPGPAALAGRPVRAADPEEPRCGWPREVKFWARASTPPRLPPSFRPLAAPASFPQISDRPFAPPPRPPPVLRSPPLGSPAAGGGAGVTMAEAPQVVEIDPDFEPLPRPRSCTWPLPRPEFSQSNSATSSPAPSGSAAANPDAAAGLPSASAAAVSADFMSNLSLLEESEDFPQAPGSVAAAVAAAAAAAATGGLCGDFQGPEAGCLHPAPPQPPPPGPLSQHPPVPPAAAGPLAGQPRKSSSSRRNAWGNLSYADLITKAIESSAEKRLTLSQIYEWMVKSVPYFKDKGDSNSSAGWKNSIRHNLSLHSKFIRVQNEGTGKSSWWMLNPEGGKSGKSPRRRAASMDNNSKFAKSRSRAAKKKASLQSGQEGAGDSPGSQFSKWPASPGSHSNDDFDNWSTFRPRTSSNASTISGRLSPIMTEQDDLGEGDVHSMVYPPSAAKMASTLPSLSEISNPENMENLLDNLNLLSSPTSLTVSTQSSPGTMMQQTPCYSFAPPNTSLNSPSPNYQKYTYGQSSMSPLPQMPIQTLQDNKSSYGGMSQYNCAPGLLKELLTSDSPPHNDIMTPVDPGVAQPNSRVLGQNVMMGPNSVMSTYGSQASHNKMMNPSSHTHPGHAQQTSAVNGRPLPHTVSTMPHTSGMNRLTQVKTPVQVPLPHPMQMSALGGYSSVSSCNGYGRMGLLHQEKLPSDLDGMFIERLDCDMESIIRNDLMDGDTLDFNFDNVLPNQSFPHSVKTTTHSWVSG

SEQ ID NO: 20241 - protein, 49 aa, Homo sapiens
LAELKKKEVKLRDRRCESLGFASNFAVAAERPRPSSPLRRPRARMGLVP

SEQ ID NO: 20242 - protein, 52 aa, Homo sapiens
LDRREVRVGIGRLEELDSSRWESASLSGTLDDLQSGWRSHGGLLEVTAKEIL

SEQ ID NO: 20243 - protein, 336 aa, Homo sapiens
VPTPAKRSARAPSLPAGHLASLPATMPNVLLPPKESNLFKRILKCYEQKQYKNGLKFCKMILSNPKFAEHGETLAMKGLTLNCLGKKEEAYEFVRKGLRNDVKSHVCWHVYGLLQRSDKKYDEAIKCYRNALKLDKDNLQILRDLSLLQIQMRDLEGYRETRYQLLQLRPTQRASWIGYAIAYHLLKDYDMALKLLEEFRQTQQVPPNKIDYEYSELILYQNQVMREADLLQESLEHIEMYEKQICDKLLVEEIKGEILLKLGRLKEASEVFKNLIDRNAENWCYYEGLEKALQISTLEERLQIYEEISKQHPKAITPRRLPLTLVPGFYNPGTCY

SEQ ID NO: 20244 - protein, 104 aa, Homo sapiens
LYSHVCIQISPSVIEPTLKDLVKSHLMYAVREEVEVLKEQIKELIEKNSQLEQENNLLKTLASPEQLAQFQAQLQTGSPPATTQPQGTTQPPAQPASQGSGPTA

SEQ ID NO: 20245 - protein, 179 aa, Homo sapiens
LFLPGLRKARRFYLAYTRLLVFPLFFHEGVFGCNCMKSQWCRPVAMDLGVYQLRHFSISFLSSLLGTENASVRLDNSSSGASVVAIDNKIEQAMDLVKSHLMYAVREEVEVLKEQIKELIEKNSQLEQENNLLKTLASPEQLAQFQAQLQTGSPPATTQPQGTTQPPAQPASQGSGPTA

SEQ ID NO: 20246 - protein, 107 aa, Homo sapiens
VIILLSSGASVVAIDNKIEQAMDLVKSHLMYAVREEVEVLKEQIKELIEKNSQLEQENNLLKTLASPEQLAQFQAQLQTGSPPATTQPQGTTQPPAQPASQGSGPTA

SEQ ID NO: 20247 - protein, 43 aa, Homo sapiens
LLPKFFIGENMNPDGMVALLDYREDGVTPYMIFFKDGLEMEKC

SEQ ID NO: 20248 - protein, 92 aa, Homo sapiens
LILLKIQYFNLLMKCCFRIKGKLEEQRPERVKPFMTGAAEQIKHILANFKNYQFFIGENMNPDGMVALLDYREDGVTPYMIFFKDGLEMEKC

SEQ ID NO: 20249 - protein, 164 aa, Homo sapiens
VNDEMFSDIYKIREIADGLCLEVEGKMVSRTEGNIDDSLIGGNASAEGPEGEGTESTVITGVDIVMNHHLQETSFTKEAYKKYIKDYMKSIKGKLEEQRPERVKPFMTGAAEQIKHILANFKNYQFFIGENMNPDGMVALLDYREDGVTPYMIFFKDGLEMEKC

SEQ ID NO: 20250 - protein, 64 aa, Homo sapiens
MVSRTEGNIDDSLIGGNASAEGPEGEGTESTVITGVDIVMNHHLQETSFTKEAYKKYIKDYMKS

SEQ ID NO: 20251 - protein, 153 aa, Homo sapiens
MIIYRDLISHDEMFSDIYKIREIADGLCLEVEGKVSRSGLRVGESGPSGLGFPPLPRLRLCNPPRRLLAEETLFPGLGFSRKLEAELILEIGPPPRRPSSSRGCPGHDASGLGAWSPFVFVLSPLTNRRHHMPATGNNFLMTPFFVPANRQLF

SEQ ID NO: 20252 - protein, 12 aa, Homo sapiens
MIIYRDLISRER

SEQ ID NO: 20253 - protein, 12 aa, Homo sapiens
MIIYRDLISRAR

SEQ ID NO: 20254 - protein, 208 aa, Homo sapiens
LERPRRSRFDFGASALAGRDWLRPRDGVVSASLPAAARRVLPRAMTASAQPRGRRPGVGVGVVVTSCKHPRCVLLGKRKGSVGAGSFQLPGGHLEFGETWEECAQRETWEEAALHLKNVHFASVVNSFIEKENYHYVTILMKGEVDVTHDSEPKNVEPEKNESWEWVPWEELPPLDQLFWGLRCLKEQGYDPFKEDLNHLVGYKGNHL

SEQ ID NO: 20255 - protein, 27 aa, Homo sapiens
LPRLEYSGVNTAHCSLNLLDSEMSAYL

SEQ ID NO: 20256 - protein, 71 aa, Homo sapiens
LALKRRRIPRPEATMSTPAVPQDLQLPPSQRAQSAFKEQRRQKLKEHLLRRKTLFAYKQENEMLSRLIKKT

SEQ ID NO: 20257 - protein, 508 aa, Homo sapiens
LALKRRRIPRPEATMSTPAVPQDLQLPPSQRAQSAFKEQRRQKLKEHLLRRKTLFAYKQENEMLSSRDQRVVTSEDQVQEGTKVLKLKTKMADKENMKRPAESKNNTVVGKHCIPLKPSNELTNSTVVIDTHKPKDSNQTPHLLLTEDDPQSQHMTLSQAFHLKNNSKKKQMTTEKQKQDANMPKKPVLGSYRGQIVQSKINSFRKPLQVKDESSAATKKLSATIPKATKPQPVNTSSVTVKSNRSSNMTATTKFVSTTSQNTQLVRPPIRSHHSNTRDTVKQGISRTSANVTIRKGPHEKELLQSKTALSSVKTSSSQGIIRNKTLSRSIASEVIARPASLSNDKLMEKSEPVDQRRHTAGKAIVDSRSAQPKETSEERKARLSEWKAGKGRVLKRPPNSVVTQHEPAGQNEKPVGSFWTTMAEEDEQRLFTEKVNNTFSECLNLINEGCPKEDILVTLNDLIKNIPDAKKLVKYWICLALIEPITSPIENIIAIYEKAILAGAQVR

SEQ ID NO: 20258 - protein, 696 aa, Homo sapiens
LALKRRRIPRPEATMSTPAVPQDLQLPPSQRAQSAFKEQRRQKLKEHLLRRKTLFAYKQENEMLSSRDQRVVTSEDQVQEGTKVLKLKTKMADKENMKRPAESKNNTVVGKHCIPLKPSNELTNSTVVIDTHKPKDSNQTPHLLLTEDDPQSQHMTLSQAFHLKNNSKKKQMTTEKQKQDANMPKKPVLGSYRGQIVQSKINSFRKPLQVKDESSAATKKLSATIPKATKPQPVNTSSVTVKSNRSSNMTATTKFVSTTSQNTQLVRPPIRSHHSNTRDTVKQGISRTSANVTIRKGPHEKELLQSKTALSSVKTSSSQGIIRNKTLSRSIASEVIARPASLSNDKLMEKSEPVDQRRHTAGKAIVDSRSAQPKETSEERKARLSEWKAGKGRVLKRPPNSVVTQHEPAGQNEKPVGSFWTTMAEEDEQRLFTEKVNNTFSECLNLINEGCPKEDILVTLNDLIKNIPDAKKLVKYWICLALIEPITSPIENIIAIYEKAILAGAQPIEEMRHTIVDILTMKSQEKANLGENMEKSCASKEEVKEVSIEDTGVDVDPEKLEMESKLHRNLLFQDCEKEQDNKTKDPTHDVKTPNTETRTSCLIKYNVSTTPYLQSVKKKVQFDGTNSAFKELKFLTPVRRSRRLQEKTSKLPDMLKDHYPCVSSLEQLTELGRETDAFVCRPNAALCRVYYEADTT

SEQ ID NO: 20259 - protein, 697 aa, Homo sapiens
LALKRRRIPRPEATMSTPAVPQDLQLPPSQRAQSAFKEQRRQKLKEHLLRRKTLFAYKQENEMLSSSRDQRVVTSEDQVQEGTKVLKLKTKMADKENMKRPAESKNNTVVGKHCIPLKPSNELTNSTVVIDTHKPKDSNQTPHLLLTEDDPQSQHMTLSQAFHLKNNSKKKQMTTEKQKQDANMPKKPVLGSYRGQIVQSKINSFRKPLQVKDESSAATKKLSATIPKATKPQPVNTSSVTVKSNRSSNMTATTKFVSTTSQNTQLVRPPIRSHHSNTRDTVKQGISRTSANVTIRKGPHEKELLQSKTALSSVKTSSSQGIIRNKTLSRSIASEVIARPASLSNDKLMEKSEPVDQRRHTAGKAIVDSRSAQPKETSEERKARLSEWKAGKGRVLKRPPNSVVTQHEPAGQNEKPVGSFWTTMAEEDEQRLFTEKVNNTFSECLNLINEGCPKEDILVTLNDLIKNIPDAKKLVKYWICLALIEPITSPIENIIAIYEKAILAGAQPIEEMRHTIVDILTMKSQEKANLGENMEKSCASKEEVKEVSIEDTGVDVDPEKLEMESKLHRNLLFQDCEKEQDNKTKDPTHDVKTPNTETRTSCLIKYNVSTTPYLQSVKKKVQFDGTNSAFKELKFLTPVRRSRRLQEKTSKLPDMLKDHYPCVSSLEQLTELGRETDAFVCRPNAALCRVYYEADTT

SEQ ID NO: 20260 - protein, 89 aa, Homo sapiens
VSPPVPLAARCVAARWLFRTEARLVFLQKFPPWAVVEVVTVIVAAPAAATATTRDGGGCSRNCNIPEVFPELLGCPNRRGPPGGVRGAD

SEQ ID NO: 20261 - protein, 212 aa, Homo sapiens
LFVSYPTLPPLPFPYSLLQPYGASPGFGKEPAPPVAVWKGHSFNTISGREAEKFSGKDSGKGDSDFNDSDSDISGDALKKDLINHMQSGLWACTAECKILGHSDRCWSPSCSGPNAHPSPHPPAQMSTFCKSTSLPRDPLRRDNYYQAQLPKTVGLQSVYEKVLHRDYDRTVTLLSPPRPGRLPDLQEIGVPLYQSPPGRYLSPKKGANENV

SEQ ID NO: 20262 - protein, 856 aa, Homo sapiens
LYGLERIMSEERSLSLLAKAVDPRHPNMMTDVVKLLSAVCIVGEESILEEVLEALTSAGEEKKIDRFFCIVEGLRHNSVQLQVACMQLINALVTSPDDLDFRLHIRNEFMRCGLKEILPNLKCIKNDGLDIQLKVFDEHKEEDLFELSHRLEDIRAELDEAYDVYNMVWSTVKETRAEGYFISILQHLLLIRNDYFIRQQYFKLIDECVSQIVLHRDGMDPDFTYRKRLDLDLTQFVDICIDQAKLEEFEEKASELYKKFEKEFTDHQETQAELQKKEAKINELQAELQAFKSQFGALPADCNIPLPPSKEGGTGHSALPPPPPLPSGGGVPPPPPPPPPPPLPGMRMPFSGPVPPPPPLGFLGGQNSPPLPILPFGLKPKKEFKPEISMRRLNWLKIRPHEMTENCFWIKVNENKYENVDLLCKLENTFCCQQKERREEEDIEEKKSIKKKIKELKFLDSKIAQNLSIFLSSFRVPYEEIRMMILEVDETRLAESMIQNLIKHLPDQEQLNSLSQFKSEYSNLCEPEQFVVVMSNVKRLRPRLSAILFKLQFEEQVNNIKPDIMAVSTACEEIKKSKSFSKLLELVLLMGNYMNAGSRNAQTFGFNLSSLCKLKDTKSADQKTTLLHFLVEICEEKYPDILNFVDDLEPLDKASKVSVETLEKNLRQMGRQLQQLEKELETFPPPEDLHDKFVTKMSRFVISAKEQYETLSKLHENMEKLYQSIIGYYAIDVKKVSVEDFLTDLNNFRTTFMQAIKENIKKREAEEKEKRVRIAKELAERERLERQQKKKRLLEMKTEGDETGVMDNLLEALQSGAAFRDRRKRTPMPKDVRQSLSPMSQRPVLKVCNHGNKPYL

SEQ ID NO: 20263 - protein, 40 aa, Homo sapiens
LEKNLRQMGRQLQQLEKELETFPPPEDLHDKFVTKMSISF

SEQ ID NO: 20264 - protein, 698 aa, Homo sapiens
LYGLERIMSEERSLSLLAKAVDPRHPNMMTDVVKLLSAVCIVGEESILEEVLEALTSAGEEKKIDRFFCIVEGLRHNSVQLQVACMQLINALVTSPDDLDFRLHIRNEFMRCGLKEILPNLKCIKNDGLDIQLKVFDEHKEEDLFELSHRLEDIRAELDEAYDVYNMVWSTVKETRAEGYFISILQHLLLIRNDYFIRQQYFKLIDECVSQIVLHRDGMDPDFTYRKRLDLDLTQFVDICIDQAKLEEFEEKASELYKKFEKEFTDHQETQAELQKKEAKINELQAELQAFKSQFGALPADCNIPLPPSKEGGTGHSALPPPPPLPSGGGVPPPPPPPPPPPLPGMRMPFSGPVPPPPPLGFLGGQNSPPLPILPFGLKPKKEFKPEISMRRLNWLKIRPHEMTENCFWIKVNENKYENVDLLCKLENTFCCQQKERREEEDIEEKKSIKKKIKELKFLDSKIAQNLSIFLSSFRVPYEEIRMMILEVDETRLAESMIQNLIKHLPDQEQLNSLSQFKSEYSNLCEPEQFVVVMSNVKRLRPRLSAILFKLQFEEQVNNIKPDIMAVSTACEEIKKSKSFSKLLELVLLMGNYMNAGSRNAQTFGFNLSSLCKLKDTKSADQKTTLLHFLVEICEEKYPDILNFVDDLEPLDKASKGLCLFKKHFMALIFSAKRLKIIPFICMYFPLSHSVFIPNISF

SEQ ID NO: 20265 - protein, 13 aa, Homo sapiens
MVVLVTGPNGPLP

SEQ ID NO: 20266 - protein, 15 aa, Homo sapiens
VMSLFAVSMRLRAWA

SEQ ID NO: 20267 - protein, 32 aa, Homo sapiens
VDMEAWQPAWIFLRASFLHTIFRLLFRDILST

SEQ ID NO: 20268 - protein, 1285 aa, Homo sapiens
MPGHKIARLCMLWRTERLYKPYVFFFKYTYAWVLLLPLLLTDNINVFLKACEQIGLKEAQLFHPGDLQDLSNRVTVKQEETDRRVKNVLITLYWLGRKAQSNPYYNGPHLNLKAFENLLGQALTKALEDSSFLKRSGRDSGYGDIWCPERGEFLAPPRHHKREDSFESLDSLGSRSLTSCSSDITLRGGREGFESDTDSEFTFKMQDYNKDDMSYRRISAVEPKTALPFNRFLPNKSRQPSYVPAPLRKKKPDKHEDNRRSWASPVYTEADGTFSRSKSMSDVSAEDVQNLRQLRYEEMQKIKSQLKEQDQKWQDDLAKWKDRRKSYTSDLQKKKEEREEIEKQALEKSKRSSKTFKEMLQDRESQNQKSTVPSRRRMYSFDDVLEEGKRPPTMTVSEASYQSERVEEKGATYPSEIPKEDSTTFAKREDRVTTEIQLPSQSPVEEQSPASLSSLRSRSTQMESTRVSASLPRSYRKTDTVRLTSVVTPRPFGSQTRGISSLPRSYTMDDAWKYNGDVEDIKRTPNNVVSTPAPSPDASQLASSLSSQKEVAATEEDVTRLPSPTSPFSSLSQDQAATSKATLSSTSGLDLMSESGEGEISPQREVSRSQDQFSDMRISINQTPGKSLDFGFTIKWDIPGIFVASVEAGSPAEFSQLQVDDEIIAINNTKFSYNDSKEWEEAMAKAQETGHLVMDVRRYGKADWGKDQPSLPFIRHKTLNLTSMATKIIGSPETKWIDATSGIYNSEKSSNLSVTTDFSESLQSSNIESKEINGIHDESNAFESKASESISLKNLKRRSQFFEQGSSDSVVPDLPVPTISAPSRWVWDQEEERKRQERWQKEQDRLLQEKYQREQEKLREEWQRAKQEAERENSKYLDEELMVLSSNSMSLTTREPSLATWEATWSEGSKSSDREGTRAGEEERRQPQEEVVHEDQGKKPQDQLVIERERKWEQQLQEEQEQKRLQAEAEEQKRPAEEQKRQAEIERETSVRIYQYRRPVDSYDIPKTEEASSGFLPGDRNKSRSTTELDDYSTNKNGNNKYLDQIGNMTSSQRRSKKEQVPSGAELERQQILQEMRKRTPLHNDNSWIRQRSASVNKEPVSLPGIMRRGESLDNLDSPRSNSWRQPPWLNQPTGFYASSSVQDFSRPPPQLVSTSNRAYMRNPSSSVPPPSAGSVKTSTTGVATTQSPTPRSHSPSASQSGSQLRNRSVSGKRICSYCNNILGKGAAMIIESLGLCYHLHCFKCVACECDLGGSSSGAEVRIRNHQLYCNDCYLRFKSGRPTAM

SEQ ID NO: 20269 - protein, 253 aa, Homo sapiens [sequence omitted]

SEQ ID NO: 20270 - protein, 83 aa, Homo sapiens
LLFQPGLGAGDGELLAPRALVACGGPCRAVRRPGPAGTCHRRLPPRPTRAARGGGGGGSGGCSGRDLGGRRSVTGLRAAVDGF

SEQ ID NO: 20271 - protein, 23 aa, Homo sapiens
LHQPDIPFLYQCEISRSSVNLQL

SEQ ID NO: 20272 - protein, 20 aa, Homo sapiens
VFDIIERVEWINSLPACKCH

SEQ ID NO: 20273 - protein, 20 aa, Homo sapiens
MGSCIFRIAHLKRSCRKRLY

SEQ ID NO: 20274 - protein, 41 aa, Homo sapiens
MICPLEEKTSVLPNSLHIFNAISGTPTSTMVHGMTSSSSVV

SEQ ID NO: 20275 - protein, 33 aa, Homo sapiens
LCTRKQLIYCSNSLVLDLLTMTQNIAVSQPMII

SEQ ID NO: 20276 - protein, 28 aa, Homo sapiens
LKSQNLEDLALRTPNCALENSSSIALTV

SEQ ID NO: 20277 - protein, 8 aa, Homo sapiens
MLISHTDF

SEQ ID NO: 20278 - protein, 64 aa, Homo sapiens
LQTLGLGSHGTSVVPGLISLPSLIYDDADFKHQSTQTEETLSFVYNYLKYMPSFQGELMLSVTS

SEQ ID NO: 20279 - protein, 9 aa, Homo sapiens
LQDFPYKAK

SEQ ID NO: 20280 - protein, 115 aa, Homo sapiens
VKMSHTEVKLKIPFGNKLLDAVCLVPNKSLTYGIILTHGASGDMNLPHLMSLASHLASHGFFCLRFTCKGLNIVHRIKAYKSVLNYLKTSGEYKLAGVFLGELVGESGTENASSP

SEQ ID NO: 20281 - protein, 125 aa, Homo sapiens
LKGVTAVGCPRPLLPSRVKLKIPFGNKLLDAVCLVPNKSLTYGIILTHGASGDMNLPHLMSLASHLASHGFFCLRFTCKGLNIVHRIKAYKSVLNYLKTSGEYKLAGVFLGELVGESGTENASSP

SEQ ID NO: 20282 - protein, 224 aa, Homo sapiens
LSSRVSLDMMSVQANTGPPWESKNSTAVWRGRDSRKERLELVKLSRKHPELIDAAFTNFFFFKHDENLYGPIVKHISFFDFFKHKYQINIDGTVAAYRLPYLLVGDSVVLKQDSIYYEHFYNELQPWKHYIPVKSNLSDLLEKLKWAKDHDEEAKKIAKAGQEFARNNLMGDDIFCYYFKLFQEYANLQVSEPQIREGMKRVEPQTEDDLFPCTCHRKKTKDEL

SEQ ID NO: 20283 - protein, 100 aa, Homo sapiens
LEDSEDFGVKKARTEAQSLDSAVPLTNGDTEDDADKMHVDREFAVVTGGSGQFPVSCNNNPMVEDTKQQESGSVGPKEIEIYTVSAMQTPCRCRNQYEKQ

SEQ ID NO: 20284 - protein, 151 aa, Homo sapiens
LRNASGLTAADIAQTQGFQECAQFLLNLQNCHLNHFYNNGILNGGHQNVFPNHISVGTNRKRCLEDSEDFGVKKARTEGETALRVGRAHLFFLSVICFLFMAERTFEMRPSLQVVMRLVDCAVTVEISPVLPLRRWDLTKGNVREILMAQV

SEQ ID NO: 20285 - protein, 59 aa, Homo sapiens
LVWLIQAGANINKPDCEGETPIHKAARSGSLECISALVANGAHVDNPKKGIRVLEWLFE

SEQ ID NO: 20286 - protein, 102 aa, Homo sapiens
LECLVQLVRAGATLNVSTTRYAQTPAHIAAFGGHPQCLVWLIQAGANINKPDCEGETPIHKAARSGSLECISALVANGAHVDYVIRIDLIFSSNPRKGEHSI

SEQ ID NO: 20287 - protein, 106 aa, Homo sapiens
LASEDSFYGWTPVHWAAHFGKLECLVQLVRAGATLNVSTTRYAQTPAHIAAFGGHPQCLVWLIQAGANINKPDCEGETPIHKAARSGSLECISALVANGAHVDSQH

SEQ ID NO: 20288 - protein, 1170 aa, Homo sapiens
LEAESAAVAPSPPPPRPLRTRTAPPAGAPRAEEADLPGSFLLCRRMRFWLRTEEMALEEMVQRLNAVSKHTDEIMHQDIVPLCAADIQDQLKKRFAYLSGGRGQDGSPVITFPDYPAFSEIPDKEFQNVMTYLTSIPSLQDAGIGFILVIDRRRDKWTSVKASVLRIAASFPANLQLVLVLRPTGFFQRTLSDIAFKFNRDDFKMKVPVIMLSSVPDLHGYIDKSQLTEDLGGTLDYCHSRWLCQRTAIESFALMVKQTAQMLQSFGTELAETELPNDVQSTSSVLCAHTEKKDKAKEDLRLALKEGHSVLESLRELQAEGSEPSVNQDQLDNQATVQRLLAQLNETEAAFDEFWAKHQQKLEQCLQLRHFEQGFREVKAILDAASQKIATFTDIGNSLAHVEHLLRDLASFEEKSGVAVERARALSLDGEQLIGNKHYAVDSIRPKCQELRHLCDQFSAEIARRRGLLSKSLELHRRLETSMKWCDEGIYLLASQPVDKCQSQDGAEAALQEIEKFLETGAENKIQELNAIYKEYESILNQDLMEHVRKVFQKQASMEEVFHRRQASLKKLAARQTRPVQPVAPRPEALAKSPCPSPGIRRGSENSSSEGGALRRGPYRRAKSEMSESRQGRGSAGEEEESLAILRRHVMSELLDTERAYVEELLCVLEGYAAEMDNPLMAHLLSTGLHNKKDVLFGNMEEIYHFHNRIFLRELENYTDCPELVGRCFLERMEDFQIYEKYCQNKPRSESLWRQCSDCPFFQECQRKLDHKLSLDSYLLKPVQRITKYQLLLKEMLKYSRNCEGAEDLQEALSSILGILKAVNDSMHLIAITGYDGNLGDLGKLLMQGSFSVWTDHKRGHTKVKELARFKPMQRHLFLHEKAVLFCKKREENGEGYEKAPSYSYKQSLNMAAVGITENVKGDAKKFEIWYNAREEVYIVQAPTPEIKAAWVNEIRKVLTSQLQACREASQHRALEQSQSLPLPAPTSTSPSRGNSRNIKKLEERKTDPLSLEGYVSSAPLTKPPEKGKGWSKTSHSLEAPEDDGGWSSAEEQINSSDAEEDGGLGPKKLVPGKYTVVADHEKGGPDALRVRSGDVVELVQEGDEGLWYVRDPTTGKEGWVPASSLSVRLGPSGSAQCLSSSESSPGSAVLSNSSSCSEGGQAPFSDLQG

SEQ ID NO: 20289 - protein, 15 aa, Homo sapiens
LSASCHSTPMSLGKV

SEQ ID NO: 20290 - protein, 91 aa, Homo sapiens
VQIRGCSFAHKRGFAGSLNGNAVKILLRWVTRYSCPRAFVTGMPKRGKKGAVAEDGDELRTGKGMKSALLPRSCGGGVCHSLDVRARGQEE

SEQ ID NO: 20291 - protein, 11 aa, Homo sapiens
LAGGQISRATR

SEQ ID NO: 20292 - protein, 15 aa, Homo sapiens
LAGGQISRVGYKATR

SEQ ID NO: 20293 - protein, 163 aa, Homo sapiens
LFSAGAPTLRPEKMVLCFPLLLLLLVLWGPVCPLHAWPKRLTKAHWFEIQHIQPSPLQCNRAMSGINNYTQHCKHQNTFLHDSFQNVAAVCDLLSIVCKNRRHNCHQSSKPVNMTDCRLTSGKYPQCRYSAAAQYKFFIVACDPPQKSDPPYKLVPVHLDSIL

SEQ ID NO: 20294 - protein, 77 aa, Homo sapiens
LCCNKMCVVLLNTYDRDGIFPESHLPPVSLEIPSCFSCTLPLTNHKLQQHGCPAWSSSSQDDLEPGGPSEQMHTLPG

SEQ ID NO: 20295 - protein, 44 aa, Homo sapiens
LMMWKGLCLSATENFILAVFVETAFGKRKEMNFTDLTFLHLPFF

SEQ ID NO: 20296 - protein, 65 aa, Homo sapiens
LHCPSSPSPNRGNSPTPKEVKAATTSVPPRQCTNWILPEFMIKIAEELPNTAATPSVPLLLLVTA

SEQ ID NO: 20297 - protein, 16 aa, Homo sapiens
MLCIWACCMSCCRCLH

SEQ ID NO: 20298 - protein, 46 aa, Homo sapiens
LREEEALYLQCCFSCLDSRNYPSSTPHNILKGTERTGTPLRGPGTG

SEQ ID NO: 20299 - protein, 634 aa, Homo sapiens
LWPSRGEGRTSTSGMRGPNSGTEKGRLVIPEKQGFDFLCMPVFHPRFKREFIQEPAKNRPGPQTRSDLLLSGRDWNTLIVGKLSPWIRPDSKVEKIRRNSEAAMLQELNFGAYLGLPAFLLPLNQEDNTNLARVLTNHIHTGHHSSMFWMRVPLVAPEDLRDDIIENAPTTHTEEYSGEEKTWMWWHNFRTLCDYSKRIAVALEIGADLPSNHVIDRWLGEPIKAAILPTSIFLTNKKGFPVLSKMHQRLIFRLLKLEVQFIITGTNHHSEKEFCSYLQYLEYLSQNRPPPNAYELFAKGYEDYLQSPLQPLMDNLESQTYEVFEKDPIKYSQYQQAIYKCLLDRVPEEEKDTNVQVLMVLGAGRGPLVNASLRAAKQADRRIKLYAVEKNPNAVVTLENWQFEEWGSQVTVVSSDMREWVAPEKADIIVSELLGSFADNELSPECLDGAQHFLKDDGVSIPGEYTSFLAPISSSKLYNEVRACREKDRDPEAQFEMPYVVRLHNFHQLSAPQPCFTFSHPNRDPMIDNNRYCTLEFPVEVNTVLHGFAGYFETVLYQDITLSIRPETHSPGMFSWFPILFPIKQPITVREGQTICVRFWRCSNSKKVWYEWAVTAPVCSAIHNPTGRSYTIGL

SEQ ID NO: 20300 - protein, 480 aa, Homo sapiens
LWPSRGEGRTSTSGMRGPNSGTEKGRLVIPEKQGFDFLCMPVFHPRFKREFIQEPAKNRPGPQTRSDLLLSGRDWNTLIVGKLSPWIRPDSKVEKIRRNSEALEVQFIITGTNHHSEKEFCSYLQYLEYLSQNRPPPNAYELFAKGYEDYLQSPLQPLMDNLESQTYEVFEKDPIKYSQYQQAIYKCLLDRVPEEEKDTNVQVLMVLGAGRGPLVNASLRAAKQADRRIKLYAVEKNPNAVVTLENWQFEEWGSQVTVVSSDMREWVAPEKADIIVSELLGSFADNELSPECLDGAQHFLKDDGVSIPGEYTSFLAPISSSKLYNEVRACREKDRDPEAQFEMPYVVRLHNFHQLSAPQPCFTFSHPNRDPMIDNNRYCTLEFPVEVNTVLHGFAGYFETVLYQDITLSIRPETHSPGMFSWFPILFPIKQPITVREGQTICVRFWRCSNSKKVWYEWAVTAPVCSAIHNPTGRSYTIGL

SEQ ID NO: 20301 - protein, 590 aa, Homo sapiens
LWPSRGEGRTSTSGMRGPNSGTEKGRLVIPEKQGFDFLCMPVFHPRFKREFIQEPAKNRPGPQTRSDLLLSGRAFLLPLNQEDNTNLARVLTNHIHTGHHSSMFWMRVPLVAPEDLRDDIIENAPTTHTEEYSGEEKTWMWWHNFRTLCDYSKRIAVALEIGADLPSNHVIDRWLGEPIKAAILPTSIFLTNKKGFPVLSKMHQRLIFRLLKLEVQFIITGTNHHSEKEFCSYLQYLEYLSQNRPPPNAYELFAKGYEDYLQSPLQPLMDNLESQTYEVFEKDPIKYSQYQQAIYKCLLDRVPEEEKDTNVQVLMVLGAGRGPLVNASLRAAKQADRRIKLYAVEKNPNAVVTLENWQFEEWGSQVTVVSSDMREWVAPEKADIIVSELLGSFADNELSPECLDGAQHFLKDDGVSIPGEYTSFLAPISSSKLYNEVRACREKDRDPEAQFEMPYVVRLHNFHQLSAPQPCFTFSHPNRDPMIDNNRYCTLEFPVEVNTVLHGFAGYFETVLYQDITLSIRPETHSPGMFSWFPILFPIKQPITVREGQTICVRFWRCSNSKKVWYEWAVTAPVCSAIHNPTGRSYTIGL

SEQ ID NO: 20302 - protein, 644 aa, Homo sapiens
VDSARRKMAAMAVGGAGGSRVSSGRDLNCVPEIADTLGAVAKQGFDFLCMPVFHPRFKREFIQEPAKNRPGPQTRSDLLLSGRDWNTLIVGKLSPWIRPDSKVEKIRRNSEAAMLQELNFGAYLGLPAFLLPLNQEDNTNLARVLTNHIHTGHHSSMFWMRVPLVAPEDLRDDIIENAPTTHTEEYSGEEKTWMWWHNFRTLCDYSKRIAVALEIGADLPSNHVIDRWLGEPIKAAILPTSIFLTNKKGFPVLSKMHQRLIFRLLKLEVQFIITGTNHHSEKEFCSYLQYLEYLSQNRPPPNAYELFAKGYEDYLQSPLQPLMDNLESQTYEVFEKDPIKYSQYQQAIYKCLLDRVPEEEKDTNVQVLMVLGAGRGPLVNASLRAAKQADRRIKLYAVEKNPNAVVTLENWQFEEWGSQVTVVSSDMREWVAPEKADIIVSELLGSFADNELSPECLDGAQHFLKDDGVSIPGEYTSFLAPISSSKLYNEVRACREKDRDPEAQFEMPYVVRLHNFHQLSAPQPCFTFSHPNRDPMIDNNRYCTLEFPVEVNTVLHGFAGYFETVLYQDITLSIRPETHSPGMFSWFPILFPIKQPITVREGQTICVRFWRCSNSKKVWYEWAVTAPVCSAIHNPTGRSYTIGL

SEQ ID NO: 20303 - protein, 600 aa, Homo sapiens
VDSARRKMAAMAVGGAGGSRVSSGRDLNCVPEIADTLGAVAKQGFDFLCMPVFHPRFKREFIQEPAKNRPGPQTRSDLLLSGRAFLLPLNQEDNTNLARVLTNHIHTGHHSSMFWMRVPLVAPEDLRDDIIENAPTTHTEEYSGEEKTWMWWHNFRTLCDYSKRIAVALEIGADLPSNHVIDRWLGEPIKAAILPTSIFLTNKKGFPVLSKMHQRLIFRLLKLEVQFIITGTNHHSEKEFCSYLQYLEYLSQNRPPPNAYELFAKGYEDYLQSPLQPLMDNLESQTYEVFEKDPIKYSQYQQAIYKCLLDRVPEEEKDTNVQVLMVLGAGRGPLVNASLRAAKQADRRIKLYAVEKNPNAVVTLENWQFEEWGSQVTVVSSDMREWVAPEKADIIVSELLGSFADNELSPECLDGAQHFLKDDGVSIPGEYTSFLAPISSSKLYNEVRACREKDRDPEAQFEMPYVVRLHNFHQLSAPQPCFTFSHPNRDPMIDNNRYCTLEFPVEVNTVLHGFAGYFETVLYQDITLSIRPETHSPGMFSWFPILFPIKQPITVREGQTICVRFWRCSNSKKVWYEWAVTAPVCSAIHNPTGRSYTIGL

SEQ ID NO: 20304 - protein, 101 aa, Homo sapiens
LWPSRGEGRTSTSGMRGPNSGTEKGRLVIPEKQGFDFLCMPVFHPRFKREFIQEPAKNRPGPQTRSDLLLSGRGRDHPICPLIIRGNNNFCFIGALILLLF

SEQ ID NO: 20305 - protein, 111 aa, Homo sapiens
VDSARRKMAAMAVGGAGGSRVSSGRDLNCVPEIADTLGAVAKQGFDFLCMPVFHPRFKREFIQEPAKNRPGPQTRSDLLLSGRGRDHPICPLIIRGNNNFCFIGALILLLF

SEQ ID NO: 20306 - protein, 44 aa, Homo sapiens
VDSARRKMAAMAVGGAGGSRVSSGRDLNCVPEIADTLGAVAKQG

SEQ ID NO: 20307 - protein, 112 aa, Homo sapiens
LECTCFVGVLRGSATWQGLYYVDSEGNRISGATFSVGSGSVYAYGVMDRGYSYDLEVEQAYDLARRAIYQATYRDAYSGGAVNLYHVREDGWIRVSSDNVADLHEKYSGSTP

SEQ ID NO: 20308 - protein, 116 aa, Homo sapiens
LGCPRRARNRNASWNNHPGLQGLYYVDSEGNRISGATFSVGSGSVYAYGVMDRGYSYDLEVEQAYDLARRAIYQATYRDAYSGGAVNLYHVREDGWIRVSSDNVADLHEKYSGSTP

SEQ ID NO: 20309 - protein, 268 aa, Homo sapiens
LPTLDMALASVLERPLPVNQRGFFGLGGRADLLDLGPGSLSDGLSLAAPGWGVPEEPGIEMLHGTTTLAFKFRHGVIVAADSRATAGAYIASQTVKKVIEINPYLLGTMAGGAADCSFWERLLARQCRIYELRNKERISVAAASKLLANMVYQYKGMGLSMGTMICGWDKRGPGLYYVDSEGNRISGATFSVGSGSVYAYGVMDRGYSYDLEVEQAYDLARRAIYQATYRDAYSGGAVNLYHVREDGWIRVSSDNVADLHEKYSGSTP

SEQ ID NO: 20310 - protein, 22 aa, Homo sapiens
MGCSSFPRLPGRARATSWYSPY

SEQ ID NO: 20311 - protein, 43 aa, Homo sapiens
MLALRTTVPFHHFSICLQDQNPIKKRKKIPQKGRKKKGFRRRR

SEQ ID NO: 20312 - protein, 12 aa, Homo sapiens
LGLAFPGWCHFG

SEQ ID NO: 20313 - protein, 152 aa, Homo sapiens
LSPLGWPSCRSIQTLRVLSGDLGQLPTGIRDFVEHSARLCQPEGIHICDGTEAENTATLTLLEQQGLIRKLPKYNNCWLARTDPKDVARVESKTVIVTPSQRDTVPLPPGGARGQLGNWMSPADFQRAVDERFPGCMQGNQGRGTVARARKM

SEQ ID NO: 20314 - protein, 225 aa, Homo sapiens
LSPLGWPSCRSIQTLRVLSGDLGQLPTGIRDFVEHSARLCQPEGIHICDGTEAENTATLTLLEQQGLIRKLPKYNNCWLARTDPKDVARVESKTVIVTPSQRDTVPLPPGGARGQLGNWMSPADFQRAVDERFPGCMQGRTMYVLPFSMGPVGSPLSRIGVQLTDSAYVVASMRIMTRLGTPVLQALGDGDFVKCLHSVGQPLTGQDPGHHQPCREEALCGSRLP

SEQ ID NO: 20315 - protein, 296 aa, Homo sapiens
LEPFIQGMPSSTGRTMYVLPFSMGPVGSPLSRIGVQLTDSAYVVASMRIMTRLGTPVLQALGDGDFVKCLHSVGQPLTGQGEPVSQWPCNPEKTLIGHVPDQREIISFGSGYGGNSLLGKKCFALRIASRLARDEGWLAEHMLILGITSPAGKKRYVAAAFPSACGKTNLAMMRPALPGWKVECVGDDIAWMRFDSEGEGLSDHTLGSGSCQSLGVSSLVFTMTLSVRKFPEHPTLLHSSGSPATRETAFPHQILGPSQDRGGWSRTFFGLTSQVFLVWSFLSFTSPNRSTPGHQP

SEQ ID NO: 20316 - protein, 21 aa, Homo sapiens
VRAPYRFRFPFAVPTPLLVRR

SEQ ID NO: 20317 - protein, 168 aa, Homo sapiens
VHQASSRPDPRRPPTGKGHSCAHTYETWEAQLKWMGFAHSWLLTPLIFPLHSPGPLALKIAGRIAEFFPDAVLIMLDNQKLVPQPRVPPVIVLENQGLRWVPKDKNLVMWRDWEESRQMVGALLEDRAHQHLVDFDCHLDDIRQDWTNQRLNTQITQWVGPTNGNGNA

SEQ ID NO: 20318 - protein, 133 aa, Homo sapiens
LLLPVQASLAMGEVEISALAYVKMCLHAARYPHAAVNGLFLAPAPRSGECLCLTDCVPLFHSHLALSVMLEVALNQVDVWGAQAGLVVAGYYHANAAVNDQSTQASSSRASSIQQARSPQATYRERPQLRPHL

SEQ ID NO: 20319 - protein, 59 aa, Homo sapiens
MRKGLNPLFLTVHKCGFLPGNEKVLSLLALVKPEVWTLKEKCILVSLGNGGSRKRRHTR

SEQ ID NO: 20320 - protein, 52 aa, Homo sapiens
LTVSSVQEDSLNVADLTSLRAPLDIPIPDPPPKDDEMETDKQEKKEGKRDKR

SEQ ID NO: 20321 - protein, 58 aa, Homo sapiens
LTVSSVQEDSLNVADLTSLRAPLDIPIPDPPPKDDEVRHSGCRTWTINPMEKIALQPL

SEQ ID NO: 20322 - protein, 44 aa, Homo sapiens
MAKPCGVRLSGEARKQVEVFRQNLFQESFHFQVFSFLICKSWTQ

SEQ ID NO: 20323 - protein, 32 aa, Homo sapiens
MAKPCGVRLSGEARKQVEVFRQNLFQEVSLWI

SEQ ID NO: 20324 - protein, 261 aa, Homo sapiens
LAPQAEYDAMLLEHAGEAIPALAAAAGGDSFAPFFAGFLPLLVCKTKQGCTVAEKSFAVGTLAETIQGLGAASAQFVSRLLPVLLSTAQEADPEVRSNAIFGMGVLAEHGGHPAQEHFPKLLGLLFPLLARERHDRVRDNICGALARLLMASPTRKPEPQVLAALLHALPLKEDLEEWVTIGRLFSFLYQSSPDQVIDVAPELLRICSLILADNKIPPDTKAALLLLLTFLAKQHTDSFQAALGSLPVDKAQELQAVLGLS

SEQ ID NO: 20325 - protein, 367 aa, Homo sapiens
MCGRQPMRLWVSFAVHCTRPVKAAPRNPTLLAALARVVPSYMQAVNRERERQVVMAVLEALTGVLRSCGTLTLKPPGRLAELCGVLKAVLQRKTACQDTDEEEEEEDDDQAEYDAMLLEHAGEAIPALAAAAGGDSFAPFFAGFLPLLVCKTKQGCTVAEKSFAVGTLAETIQGLGAASAQFVSRLLPVLLSTAQEADPEVRSNAIFGMGVLAEHGGHPAQEHFPKLLGLLFPLLARERHDRVRDNICGALARLLMASPTRKPEPQVLAALLHALPLKEDLEEWVTIGRLFSFLYQSSPDQVIDVAPELLRICSLILADNKIPPDTKAALLLLLTFLAKQHTDSFQAALGSLPVDKAQELQAVLGLS

SEQ ID NO: 20326 - protein, 441 aa, Homo sapiens
LCCRGGDLCEHQVSIRPSLALKTLPGGPLPTAVSLSVVWPSFHTWKVSLKKYLNCWSRHIPPLLILQCPHLNVRKAAHEALGQFCCALHKACQSCPSEPNTAALQAALARVVPSYMQAVNRERERQVVMAVLEALTGVLRSCGTLTLKPPGRLAELCGVLKAVLQRKTACQDTDEEEEEEDDDQAEYDAMLLEHAGEAIPALAAAAGGDSFAPFFAGFLPLLVCKTKQGCTVAEKSFAVGTLAETIQGLGAASAQFVSRLLPVLLSTAQEADPEVRSNAIFGMGVLAEHGGHPAQEHFPKLLGLLFPLLARERHDRVRDNICGALARLLMASPTRKPEPQVLAALLHALPLKEDLEEWVTIGRLFSFLYQSSPDQVIDVAPELLRICSLILADNKIPPDTKAALLLLLTFLAKQHTDSFQAALGSLPVDKAQELQAVLGLS

SEQ ID NO: 20327 - protein, 876 aa, Homo sapiens
LRPASLGGRPPDPPVCGRADPQTTEHPLATAGGGATGEPQVPDPDGPAERNRISPVCRHCVSLSLAQLSATIFRKEGLEAWPQLLQLLQHSTHSPHSPEREMGLLLLSVVVTSRPEAFQPHHRELLRLLNETLGEVGSPGLLFYSLRTLTTMAPYLSTEDVPLARMLVPKLIMAMQTLIPIDEAKACEALEALDELLESEVPVITPYLSEVLTFCLEVARNVALGNAIRIRILCCLTFLVKVKSKALLKNRLLPPLLHTLFPIVAAEPPPGQLDPEDQDSEEEELEIELMGETPKHFAVQVVDMLALHLPPEKLCPQLMPMLEEALRSESPYQRKAGLLVLAVLSDGAGDHIRQRLLPPLLQIVCKGLEDPSQVVRNAALFALGQFSENLQPHISSYSREVMPLLLAYLKSVPLGHTHHLAKACYALENFVENLGPKVQPYLPELMECMLQLLRNPSSPRAKELAVSALGAIATAAQASLLPYFPAIMEHLREFLLTGREDLQPVQIQSLETLGVLARAVGEPMRPLAEECCQLGLGLCDQVDDPDLRRCTYSLFAALSGLMGEGLAPHLEQITTLMLLSLRSTEGIVPQYDGSSSFLLFDDESDGEEEEELMDEDVEEEDDSEISGYSVENAFFDEKEDTCAAVGEISVNTSVAFLPYMESVFEEVFKLLECPHLNVRKAAHEALGQFCCALHKACQSCPSEPNTAALQAALARVVPSYMQAVNRERERQVVMAVLEALTGVLRSCGTLTLKPPGRLAELCGVLKAVLQRKTACQDTDEEEEEEDDDQPLTWLHRLNTTPCCWSTLERPSLPWQPRLGETPLPHSLPVSCHYWCARQNRAAQWQRSPLQWGPWQRLFRAWVLPQPSLCLGCSLCC

SEQ ID NO: 20328 - protein, 936 aa, Homo sapiens
VGVRTSTCCPSPSPFRPSSGGSVAAMESAGLEQLLRELLLPDTERIRRATEQLQIVLRAPAALPALCDLLASAADPQIRQFAAVLTRRRLNTRWRRLAAEQRESLKSLILTALQRETEHCVSLSLAQLSATIFRKEGLEAWPQLLQLLQHSTHSPHSPEREMGLLLLSVVVTSRPEAFQPHHRELLRLLNETLGEVGSPGLLFYSLRTLTTMAPYLSTEDVPLARMLVPKLIMAMQTLIPIDEAKACEALEALDELLESEVPVITPYLSEVLTFCLEVARNVALGNAIRIRILCCLTFLVKVKSKALLKNRLLPPLLHTLFPIVAAEPPPGQLDPEDQDSEEEELEIELMGETPKHFAVQVVDMLALHLPPEKLCPQLMPMLEEALRSESPYQRKAGLLVLAVLSDGAGDHIRQRLLPPLLQIVCKGLEDPSQVVRNAALFALGQFSENLQPHISSYSREVMPLLLAYLKSVPLGHTHHLAKACYALENFVENLGPKVQPYLPELMECMLQLLRNPSSPRAKELAVSALGAIATAAQASLLPYFPAIMEHLREFLLTGREDLQPVQIQSLETLGVLARAVGEPMRPLAEECCQLGLGLCDQVDDPDLRRCTYSLFAALSGLMGEGLAPHLEQITTLMLLSLRSTEGIVPQYDGSSSFLLFDDESDGEEEEELMDEDVEEEDDSEISGYSVENAFFDEKEDTCAAVGEISVNTSVAFLPYMESVFEEVFKLLECPHLNVRKAAHEALGQFCCALHKACQSCPSEPNTAALQAALARVVPSYMQAVNRERERQVVMAVLEALTGVLRSCGTLTLKPPGRLAELCGVLKAVLQRKTACQDTDEEEEEEDDDQPLTWLHRLNTTPCCWSTLERPSLPWQPRLGETPLPHSLPVSCHYWCARQNRAAQWQRSPLQWGPWQRLFRAWVLPQPSLCLGCSLCC

SEQ ID NO: 20329 - protein, 190 aa, Homo sapiens
LLECPHLNVRKAAHEALGQFCCALHKACQSCPSEPNTAALQAALARVVPSYMQAVNRERERQVVMAVLEALTGVLRSCGTLTLKPPGRLAELCGVLKAVLQRKTACQDTDEEEEEEDDDQVRARDKNGDQAVQAVSTGTGVDSVFGLGLGQPGPLKETGNGQRDTTLIPLSQWEFREGEQCGLGCAWSDR

SEQ ID NO: 20330 - protein, 650 aa, Homo sapiens
MESAGLEQLLRELLLPDTERIRRATEQLQIVLRAPAALPALCDLLASAADPQIRQFAAVLTRRRLNTRWRRLAAEQRESLKSLILTALQRETEHCVSLSLAQLSATIFRKEGLEAWPQLLQLLQHSTHSPHSPEREMGLLLLSVVVTSRPEAFQPHHRELLRLLNETLGEVGSPGLLFYSLRTLTTMAPYLSTEDVPLARMLVPKLIMAMQTLIPIDEAKACEALEALDELLESEVPVITPYLSEVLTFCLEVARNVALGNAIRIRILCCLTFLVKVKSKALLKNRLLPPLLHTLFPIVAAEPPPGQLDPEDQDSEEEELEIELMGETPKHFAVQVVDMLALHLPPEKLCPQLMPMLEEALRSESPYQRKAGLLVLAVLSDGAGDHIRQRLLPPLLQIVCKGLEDPSQVVRNAALFALGQFSENLQPHISSYSREVMPLLLAYLKSVPLGHTHHLAKACYALENFVENLATAAQASLLPYFPAIMEHLREFLLTGREDLQPVQIQSLETLGVLARAVGEPMRPLAEECCQLGLGLCDQVDDPDLRRCTYSLFAALSGLMGEGLAPHLEQITTLMLLSLRSTEGIVPQYDGSSSFLLFDDESDGEEEEELMDEDVEEEDDSEISGYSVENAFFDEKEDTCAAVGEISVNTR

SEQ ID NO: 20331 - protein, 93 aa, Homo sapiens [sequence omitted]

SEQ ID NO: 20332 - protein, 28 aa, Homo sapiens
LRGGGGRGELAMSGLGRLFGKEGERANP

SEQ ID NO: 20333 - protein, 198 aa, Homo sapiens
LQPRPTSCFCSNINVTLGAHNIQRRENTQQHITARRAIRHPQYNQRTIQNDIMLLQLSRRVRRNRNVNPVALPRAQEGLRPGTLCTVAGWGRVSMRRGTDTLREVQLRVQRDRQCLRIFGSYDPRRQICVGDRRERKAAFKGDSGGPLLCNNVAHGIVSYGKSSGVPPEVFTRVSSFLPWIRTTMRSFKLLDQMETPL

SEQ ID NO: 20334 - protein, 22 aa, Homo sapiens
LCGGPAGTEGCLQGGFRRPPAV

SEQ ID NO: 20335 - protein, 132 aa, Homo sapiens
LEGVNTNSSDLGSLPEKMQPFLLLLAFLLTPGAGTEEIIGGHEAKPHSRPYMAFVQFLQEKSRKRCGGILVRKDFVLTAAHCQGRGDSGGPLVCKDVAQGILSYGNKKGTPPGVYIKVSHFLPWIKRTMKRL

SEQ ID NO: 20336 - protein, 179 aa, Homo sapiens
LFLEGVNTNSSDLGSLPEKMQPFLLLLAFLLTPGAGTEEIIGGHEAKPHSRPYMAFVQFLQEKSRKRCGGILVRKDFVLTAAHCQGSSINVTLGAHNIKEQERTQQFIPVKRPIPHPAYNPKNFSNDIMLLQGDSGGPLVCKDVAQGILSYGNKKGTPPGVYIKVSHFLPWIKRTMKRL

SEQ ID NO: 20337 - protein, 162 aa, Homo sapiens
LGSEVSEEVRWLPDTRRLRADSCSLLGKLERKAKRTRAVQPLRLPSNKAQVKPGQTCSVAGWGQTAPLGKHSHTLQEVKMTVQEDRKCESDLRHYYDSTIELCVGDPEIKKTSFKGDSGGPLVCNKVAQGIVSYGRNNGMPPRACTKVSSFVHWIKKTMKRY

SEQ ID NO: 20338 - protein, 254 aa, Homo sapiens
LRRCNQSCFCWPSSCCPGQMQTFPSGEIIGGHEAKPHSRPYMAYLMIWDQKSLKRCGGFLIRDDFVLTAAHCWGSSINVTLGAHNIKEQEPTQQFIPVKRPIPHPAYNPKNFSNDIMLLQLERKAKRTRAVQPLRLPSNKAQVKPGQTCSVAGWGQTAPLGKHSHTLQEVKMTVQEDRKCESDLRHYYDSTIELCVGDPEIKKTSFKGDSGGPLVCNKVAQGIVSYGRNNGMPPRACTKVSSFVHWIKKTMKRY

SEQ ID NO: 20339 - protein, 281 aa, Homo sapiens
MKSLSLLHLFPLPRAKREQGGNNSSSNQGSLPEKMQPILLLLAFLLLPRADAGEIIGGHEAKPHSRPYMAYLMIWDQKSLKRCGGFLIRDDFVLTAAHCWGSSINVTLGAHNIKEQEPTQQFIPVKRPIPHPAYNPKNFSNDIMLLQLERKAKRTRAVQPLRLPSNKAQVKPGQTCSVAGWGQTAPLGKHSHTLQEVKMTVQEDRKCESDLRHYYDSTIELCVGDPEIKKTSFKGDSGGPLVCNKVAQGIVSYGRNNGMPPRACTKVSSFVHWIKKTMKRY

SEQ ID NO: 20340 - protein, 236 aa, Homo sapiens
MKSLSLLHLFPLPRAKREQGGNNSSSNQGSLPEKMQPILLLLAFLLLPRADAGEIIGGHEAKPHSRPYMAYLMIWDQKSLKRCGGFLIRDDFVLTAAHCWGRLERKAKRTRAVQPLRLPSNKAQVKPGQTCSVAGWGQTAPLGKHSHTLQEVKMTVQEDRKCESDLRHYYDSTIELCVGDPEIKKTSFKGDSGGPLVCNKVAQGIVSYGRNNGMPPRACTKVSSFVHWIKKTMKRY

SEQ ID NO: 20341 - protein, 134 aa, Homo sapiens
LGSEVSEEVRWLPDTRRLRADSCSLLGKLERKAKRTRAVQPLRLPSNKAQVKPGQTCSVAGWGQTAPLGKHSHTLQEVKMTVQEDRKCESDLRHYYDSTIELCVGDPEIKKTSFKVRLCTCLDWLLGERCLGNI

SEQ ID NO: 20342 - protein, 234 aa, Homo sapiens
LFLIEHFSLVDETHQELDEVSLLTAITVFILSTSPEVTTIPCLQKRCIDKFKATLEIKDPVVQIKTYQLLHSIFQYPNPAVSYPYIYSLASCIMEKLQEIDKRKPENTAELEIFQEGIKVLETLVTVAEEHHRAQLVACLLPILISFLLDENSLGSATSIMRNLHDFALQNLMQIGPQYSSVFKSLVASSPALKARLEAAIKGNQESVKVKIPTSKYTKSPGKNSSIQLKTSFL

SEQ ID NO: 20343 - protein, 28 aa, Homo sapiens
LVPRKQSLQLPGGACVPGAGATGPRDCV

SEQ ID NO: 20344 - protein, 70 aa, Homo sapiens
MSRGSSAGFDRHITIFSPEGRLYQVEYAFKAINQGGLTSVAVRGKDCAVIVTQKKVPVSNTAQIVNNCRI

SEQ ID NO: 20345 - protein, 22 aa, Homo sapiens
LPSRILTEAEIDAHLVALAERD

SEQ ID NO: 20346 - protein, 42 aa, Homo sapiens
MDLYICTKKKFYFSKKRKKKKKFKGCTYIHTAHCLAQNVLLW

SEQ ID NO: 20347 - protein, 345 aa, Homo sapiens
LHKAGREFLAAGGRRAAGRGSTGRSELAGGRGGLAGARRGRGGRGAESPWAPARNTQLIITSRKTPRPRPPETPALRNPPQPAPPWAPRGALTTPGVFPSLPHRFLHLAIIHEEKALTMEVIRQVKGDLAFLNFQNNLQQTPLHLAVITNQPEIAEALLGAGCDPELRDFRGNTPLHLACEQGCLASVGVLTQSCTTPHLHSILKATNYNGHTCLHLASIHGYLGIVELLVSLGADVNAQEPCNGRTALHLAVDLQNPDLVSLLLKCGADVNRVTYQGYSPYQLTWGRPSTRIQQQLGQLTLENLQMLPESEDEESYDTESEFTEFTEDELPYDDCVFGGQRLTL

SEQ ID NO: 20348 - protein, 185 aa, Homo sapiens
MFQAAERPQEWAMEGPRDGLKKERLLDDRHDSGLDSMKDEEYEQMVKELQEIRLEPQEVPRGSEPWKQQLTEDGDSFLHLAIIHEEKALTMEVIRQVKGDLAFLNFQNNLQQTPLHLAVITNQPEIAEALLGAGCDPELRDFRGNTPLHLACEQGCLASVGVLTQSCTTPHLHSILKATNYNGAL

SEQ ID NO: 20349 - protein, 82 aa, Homo sapiens
LASVGVLTQSCTTPHLHSILKATNYNGHTCLHLASIHGYLGIVELLVSLGADVNAQVGASCPRRTESGSSCLCCEQKFQMQP

SEQ ID NO: 20350 - protein, 197 aa, Homo sapiens
MFQAAERPQEWAMEGPRDGLKKERLLDDRHDSGLDSMKDEEYEQMVKELQEIRLEPQEVPRGSEPWKQQLTEDGDSFLHLAIIHEEKALTMEVIRQVKGDLAFLNFQNNLQQTPLHLAVITNQPEIAEALLGAGCDPELRDFRGNTPLHLACEQGCLASVGVLTQSCTTPHLHSILKATNYNGMSASLPCPTPSEGR

SEQ ID NO: 20351 - protein, 122 aa, Homo sapiens
MFQAAERPQEWAMEGPRDGLKKERLLDDRHDSGLDSMKDEEYEQMVKELQEIRLEPQEVPRGSEPWKQQLTEDGDSFLHLAIIHEEKALTMEVIRQVKGDLAFLNFQNNLQQVRRLPGPGSL

SEQ ID NO: 20352 - protein, 199 aa, Homo sapiens
LLREKGSRFPRASYRHGAKTARVADQSNRQADQWAARVREDPDGGAGWREGGSFKASLTWLWPLGEMKLHCEVEVISRHLPALGLRNRGKGVRAVLSLCQQTSRSQPPVRAFLLISTLKDKRGTRYELRENIEQFFTKFVDEGKATVRLKEPPVDICLSKMESHSVTQVGVQWEELGSLQPTGHFQQFKRFPFSYETGS

SEQ ID NO: 20353 - protein, 212 aa, Homo sapiens
LLREKGSRFPRASYRHGAKTARVADQSNRQADQWAARVREDPDGGAGWREGGSFKASLTWLWPLGEMKLHCEVEVISRHLPALGLRNRGKGVRAVLSLCQQTSRSQPPVRAFLLISTLKDKRGTRYELRENIEQFFTKFVDEGKATVRLKEPPVDICLSKDSIWLSYHSIPSLPRFGYRKNLCLWKILSELFHSRNYYHESAFCCPHCGLSR

SEQ ID NO: 20354 - protein, 73 aa, Homo sapiens
LTWLWPLGEMKLHCEVEVISRHLPALGLRNRGKGVRAVLSLCQQTSRSQPPVRAFLLISTLKDKRGTRYEHSG

SEQ ID NO: 20355 - protein, 69 aa, Homo sapiens
MKNLKIANRAILDPVPKDSIWLSYHSIPSLPRFGYRKNLCLWKILSELFHSRNYYHESAFCCPHCGLSR

SEQ ID NO: 20356 - protein, 25 aa, Homo sapiens
LLGESCERRELRRARCRALFLVFII

SEQ ID NO: 20357 - protein, 536 aa, Homo sapiens
LRRWRQIANMAPERLRSRALSAFKLRGLLLRGEAIKYLTEALQSISELELEDKLEKIINAVEKQPLSSNMIERSVVEAAVQECSQSVDETIEHVFNIIGAFDIPRFVYNSERKKFLPLLMTNHPAPNLFGTPRDKAEMFRERYTILHQRTHRHELFTPPVIGSHPDESGSKFQLKTIETLLGSTTKIGDAIVLGMITQLKEGKFFLEDPTGTVQLDLSKAQFHSGLYTEACFVLAEGWFEDQVFHVNAFGFPPTEPSSTTRAYYGNINFFGGPSNTSVKTSAKLKQLEEENKDAMFVFLSDVWLDQVEVLEKLRIMFAGYSPAPPTCFILCGNFSSAPYGKNQVQALKDSLKTLADIICEYPDIHQSSRFVFVPGPEDPGFGSILPRPPLAESITNEFRQRVPFSVFTTNPCRIQYCTQEITVFREDLVNKMCRNCVRFPSSNLAIPNHFVKTILSQGHLTPLPLYVCPVYWAYDYALRVYPVPDLLVIADKYDPFTTTNTECLCINPGSFPRSGFSFKVFYPSNKTVEDSKLQGF

SEQ ID NO: 20358 - protein, 510 aa, Homo sapiens
LRRWRQIANMAPERLRSRALSAFKLRGLLLRGEAIKYLTEALQSISELELEDKLEKIINAVEKQPLSSNMIERSVVEAAVQECSQSVDETILLMTNHPAPNLFGTPRDKAEMFRERYTILHQRTHRHELFTPPVIGSHPDESGSKFQLKTIETLLGSTTKIGDAIVLGMITQLKEGKFFLEDPTGTVQLDLSKAQFHSGLYTEACFVLAEGWFEDQVFHVNAFGFPPTEPSSTTRAYYGNINFFGGPSNTSVKTSAKLKQLEEENKDAMFVFLSDVWLDQVEVLEKLRIMFAGYSPAPPTCFILCGNFSSAPYGKNQVQALKDSLKTLADIICEYPDIHQSSRFVFVPGPEDPGFGSILPRPPLAESITNEFRQRVPFSVFTTNPCRIQYCTQEITVFREDLVNKMCRNCVRFPSSNLAIPNHFVKTILSQGHLTPLPLYVCPVYWAYDYALRVYPVPDLLVIADKYDPFTTTNTECLCINPGSFPRSGFSFKVFYPSNKTVEDSKLQGF

SEQ ID NO: 20359 - protein, 153 aa, Homo sapiens
MNCVEFCYSSRFVFVPGPEDPGFGSILPRPPLAESITNEFRQRVPFSVFTTNPCRIQYCTQEITVFREDLVNKMCRNCVRFPSSNLAIPNHFVKTILSQGHLTPLPLYVCPVYWAYDYALRVYPVPDLLVIADKYDPFTTTNTECLCINPVRM

SEQ ID NO: 20360 - protein, 194 aa, Homo sapiens
LRSRALSAFKLRGLLLRGEAIKYLTEALQSISELELEDKLEKIINAVEKQPLSSNMIERSVVEAAVQECSQSVDETILLMTNHPAPNLFGTPRDKAEMFRERYTILHQRTHRHELFTPPVIGSHPDESGSKFQLKTIETLLGSTTKIGDAIVLGMITQLKEGKFFLEDPTGTVQLDLSKAISFTLVYTQRHALS

SEQ ID NO: 20361 - protein, 95 aa, Homo sapiens
LPREELWIYNMETGRWKKINTEGDVPPSMSGSCAVCVDRVLYLFGGHHSRGNTNKVSVSKDYGLRHFYSYYLSNNCKFLRLAPDLFVSQLKMMCT

SEQ ID NO: 20362 - protein, 25 aa, Homo sapiens
LLVHHRAAHSNEILIFSVQPKSLVR

SEQ ID NO: 20363 - protein, 83 aa, Homo sapiens
LPLGCPGSVGSPVLAGRRAGRRAAVSLAVRGRRRSGNRGGARAAPAGGRAVPGRAAPQQGGGSQRSLRARVAAATGEIKLCGR

SEQ ID NO: 20364 - protein, 52 aa, Homo sapiens
LQPAAPESRAFVRAGPLHMEMTLTRVPIRVLLKDARPEPLRRLRSIVPFLQP

SEQ ID NO: 20365 - protein, 109 aa, Homo sapiens
LEGPPTPAQGLGLCASGCVSRPGASGSRGRGRARAQRTGRGRAGKLVGASASRGGKEPVRGPGLPARAPRHVHRLGREVAIAERQEGRGGPGRRPGGGAPLGPARTGFI

SEQ ID NO: 20366 - protein, 111 aa, Homo sapiens
MAIPGIPYERRLLIMADPRDKALQDYRKKLLEHKEIDGRLKELREQLKELTKQYEKSENDLKALQSVGQIVGEVLKQLTEEKFIVKATNGPRYVVGCRRQVILYICIVPDD

SEQ ID NO: 20367 - protein, 31 aa, Homo sapiens
MADPRDKALQDYRKKLLEHKEIDGRLKEYRG

SEQ ID NO: 20368 - protein, 96 aa, Homo sapiens
MADPRDKALQDYRKKLLEHKEIDGRLKELREQLKELTKQYEKSENDLKALQSVGQIVGEVLKQLTEEKFIVKATNGPRYVVGCRRQGSVDAESWHF

SEQ ID NO: 20369 - protein, 28 aa, Homo sapiens
VGRPAMKPAIFVTSELFSVSRFMCSSRL

SEQ ID NO: 20370 - protein, 151 aa, Homo sapiens
VGRPAMKPPSSIQTSEFDSSDEEPIEDEQTPIHISWLSLSRVNCSQFLGLCALPGCKFKDVRRNVQKDTEELKSCGIQDIFVFCTRGELSKYRVPNLLDLYQQCGIITHHHPIADGGTPDIASCCEIMEELTTCLKNYRKTLIQAFEGVLR

SEQ ID NO: 20371 - protein, 153 aa, Homo sapiens
VGRPAMKPPSSIQTSEFDSSDEEPIEDEQTPIHISWLSLSRVNCSQFLGLCALPGCKFKDVRRNVQKDTEELKSCGIQDIFVFCTRGELSKYRVPNLLDLYQQCGIITHHHPIADGGTPDIASCCEIMEELTTCLKNYRKTLIHSCLSPTIPV

SEQ ID NO: 20372 - protein, 208 aa, Homo sapiens
VGRPAMKPPSSIQTSEFDSSDEEPIEDEQTPIHISWLSLSRVNCSQFLGLCALPGCKFKDVRRNVQKDTEELKSCGIQDIFVFCTRGELSKYRVPNLLDLYQQCGIITHHHPIADGGTPDIASCCEIMEELTTCLKNYRKTLIHCYGGLGRSCLVAACLLLYLSDTISPEQAIDSLRDLRGSGAIQTIKDLPTSQFLPQSVLGMDPLT

SEQ ID NO: 20373 - protein, 212 aa, Homo sapiens
VGRPAMKPPSSIQTSEFDSSDEEPIEDEQTPIHISWLSLSRVNCSQFLGLCALPGCKFKDVRRNVQKDTEELKSCGIQDIFVFCTRGELSKYRVPNLLDLYQQCGIITHHHPIADGGTPDIASCCEIMEELTTCLKKISCYGGLGRSCLVAACLLLYLSDTISPEQAIDSLRDLRGSGAIQTIKQYNYLHEFRDKLAAHLSSRDSQSRSVSR

SEQ ID NO: 20374 - protein, 177 aa, Homo sapiens
VGRPAMKPPSSIQTSCKFKDVRRNVQKDTEELKSCGIQDIFVFCTRGELSKYRVPNLLDLYQQCGIITHHHPIADGGTPDIASCCEIMEELTTCLKNYRKTLIHCYGGLGRSCLVAACLLLYLSDTISPEQAIDSLRDLRGSGAIQTIKQYNYLHEFRDKLAAHLSSRDSQSRSVSR

SEQ ID NO: 20375 - protein, 216 aa, Homo sapiens
VGRPAMKPPSSIQTSEFDSSDEEPIEDEQTPIHISWLSLSRVNCSQFLGLCALPGCKFKDVRRNVQKDTEELKSCGIQDIFVFCTRGELSKYRVPNLLDLYQQCGIITHHHPIADGGTPDIASCCEIMEELTTCLKNYRKTLIHCYGGLGRSCLAACLLLYLSDTISPEQAIDSLRDLRGSGAIQTIKQYNYLHEFRDKLAAHLSSRDSQSRSVSR

SEQ ID NO: 20376 - protein, 23 aa, Homo sapiens
MAIFDKLAAHLSSRDSQSRSVSR

SEQ ID NO: 20377 - protein, 36 aa, Homo sapiens
MVIVNTNLQYNYLHEFRDKLAAHLSSRDSQSRSVSR

SEQ ID NO: 20378 - protein, 61 aa, Homo sapiens
LTAGRKMSESLVVCDVAEDLVEKLRKFRFRKETNNAAIIMKIDKDKRLVVLDEELEVCSMN

SEQ ID NO: 20379 - protein, 132 aa, Homo sapiens
MRHFKLCLKYKMFSHNCDFRPKTGFQMWLEENRSNILSDNPDFSDEADIIKEGMIRFRVLSTEERKVWANKAKGETASEGTEAKKRKRVVDESDETENQEEKAKENLNLSKKQKPLDFSTNQKLSAFAFKQE

SEQ ID NO: 20380 - protein, 647 aa, Homo sapiens
MMDPCQLPGKSHFSQVLHRCISLTDSCKLHCLHFSSWDSSKEWIIDLPQNEDIEAICLGQGWAAAATSALLLRLFTIGGVQKEVFSLAGPVVSMAGHGEQLFIVYHRGTGFDGDQCLGVQLLELGKKKKQILHGDPLPLTRKSYLAWIGFSAEGTPCYVDSEGIVRMLNRGLGNTWTPICNTREHCKGKSDHYWVVGIHENPQQLRCIPCKGSRFPPTLPRPAVAILSFKLPYCQIATEKGQMEEQFWRSVIFHNHLDYLAKNGYEYEESTKNQATKEQQELLMKMLALSCKLEREFRCVELADLMTQNAVNLAIKYASRSRKLILAQKLSELAVEKAAELTATQVEEEEEEEDFRKKLNAGYSNTATEWSQPRFRNQVEEDAEDSGEADDEEKPEIHKPGQNSFSKSTNSSDVSAKSGAVTFSSQGRVNPFKVSASSKEPAMSMNSARSTNILDNMGKSSKKSTALSRTTNNEKSPIIKPLIPKPKPKQASAASYFQKRNSQTNKTEEVKEENLKNVLSETPAICPPQNTENQRPKTGFQMWLEENRSNILSDNPDFSDEADIIKEGMIRFRVLSTEERKVWANKAKGETASEGTEAKKRKRVVDESDETENQEEKAKENLNLSKKQKPLDFSTNQKLSAFAFKQE

SEQ ID NO: 20381 - protein, 1111 aa, Homo sapiens
VAEARSPGFIVTCGSDGDVRIWEDLDDDDPKFINVGEKAYSCALKSGKLVTAVSNNTIQVHTFPEGVPDGILTRFTTNANHVVFNGDGTKIAAGSSDFLVKIVDVMDSSQQKTFRGHDAPVLSLSFDPKDIFLASASCDGSVRVWQISDQTCAISWPLLQKCNDVINAKSICRLAWQPKSGKLLAIPVEKSVKLYRRESWSHQFDLSDNFISQTLNIVTWSPCGQYLAAGSINGLIIVWNVETKDCMERVKHEKGYAICGLAWHPTCGRISYTDAEGNLGLLENVCDPSGKTSSSKVSSRVEKDYNDLFDGDDMSNAGDFLNDNAVEIPSFSKGIINDDEDDEDLMMASGRPRQRSHILEDDENSVDISMLKTGSSLLKEEEEDGQEGSIHNLPLVTSQRPFYDGPMPTPRQKPFQSGSTPLHLTHRFMVWNSIGIIRCYNDEQDNAIDVEFHDTSIHHATHLSNTLNYTIADLSHEAILLACESTDELASKLHCLHFSSWDSSKEWIIDLPQNEDIEAICLGQGWAAAATSALLLRLFTIGGVQKEVFSLAGPVVSMAGHGEQLFIVYHRGTGFDGDQCLGVQLLELGKKKKQILHGDPLPLTRKSYLAWIGFSAEGTPCYVDSEGIVRMLNRGLGNTWTPICNTREHCKGKSDHYWVVGIHENPQQLRCIPCKGSRFPPTLPRPAVAILSFKLPYCQIATEKGQMEEQFWRSVIFHNHLDYLAKNGYEYEESTKNQATKEQQELLMKMLALSCKLEREFRCVELADLMTQNAVNLAIKYASRSRKLILAQKLSELAVEKAAELTATQVEEEEEEEDFRKKLNAGYSNTATEWSQPRFRNQVEEDAEDSGEADDEEKPEIHKPGQNSFSKSTNSSDVSAKSGAVTFSSQGRVNPFKVSASSKEPAMSMNSARSTNILDNMGKSSKKSTALSRTTNNEKSPIIKPLIPKPKPKQASAASYFQKRNSQTNKTEEVKEENLKNVLSETPAICPPQNTENQRPKTGFQMWLEENRSNILSDNPDFSDEADIIKEGMIRFRVLSTEERKVWANKAKGETASEGTEAKKRKRVVDESDETENQEEKAKENLNLSKKQKPLDFSTNQKLSAFAFKQE

SEQ ID NO: 20382 - protein, 57 aa, Homo sapiens
VQEWLGLPSPLKQAPRLMAMVMAAVTRTTPVKLRSGRYIQKVPRRNFLLEKMKKQYL

SEQ ID NO: 20383 - protein, 47 aa, Homo sapiens
VFLQNPTQISRTMIRMLSRSFWAHDGRYIQKVPRRNFLLEKMKKQYL

SEQ ID NO: 20384 - protein, 44 aa, Homo sapiens
LGLQPGLNCSNPFTQLERRHQEHARHISFGGNLITFSPLQPGEF

SEQ ID NO: 20385 - protein, 886 aa, Homo sapiens
LNFVEARVVRVPASESAVVVQTECSLLFVWLRFHARRWLRMSSSHFASRHRKDISTEMIRTKIAHRKSLSQKENRHKEYERNRHFGLKDVNIPTLEGRILVELDETSQGLVPEKTNVKPRAMKTILGDQRKQMLQKYKEEKQLQKLKEQREKAKRGIFKVGRYRPDMPCFLLSNQNAVKAEPKKAIPSSVRITRSKAKDQMEQTKIDNESDVRAIRPGPRQTSEKKVSDKEKKVVQPVMPTSLRMTRSATQAAKQVPRTVSSTTARKPVTRAANENEPEGKVPSKGRPAKNVETKPDKGISCKVDSEENTLNSQTNATSGMNPDGVLSKMENLPEINTAKIKGKNSFAPKDFMFQPLDGLKTYQVTPMTPRSANAFLTPSYTWTPLKTEVDESQATKEILAQKCKTYSTKTIQQDSNKLPCPLGPLTVWHEEHVLNKNEATTKNLNGLPIKEVPSLERNEGRIAQPHHGVPYFRNILQSETEKLTSHCFEWDRKLELDIPDDAKDLIRTAVGQTRLLMKERFKQFEGLVDDCEYKRGIKETTCTDLDGFWDMVSFQIEDVIHKFNNLIKLEESGWQVNNNMNHNMNKNVFRKKVVSGIASKPKQDDAGRIAARNRLAAIKNAMRERIRQEECAETAVSVIPKEVDKIVFDAGFFRVESPVKLFSGLSVSSEGPSQRLGTPKSVNKAVSQSRNEMGIPQQTTSPENAGPQNTKSEHVKKTLFLSIPESRSSIEDAQCPGLPDLIEENHVVNKTDLKVDCLSSERMSLPLLAGGVADDINTNKKEGISDVVEGMELNSSITSQDVLMSSPEKNTASQNSILEEGETKISQSELFDNKSLTTECHLLDSPGLNCSNPFTQLERRHQEHARHISFGGNLITFSPLQPGEF

SEQ ID NO: 20386 - protein, 865 aa, Homo sapiens
VVVQTECSLLFVWLRFHARRWLRMSSSHFASRHRKDISTEMIRTKIAHRKSLSQKENRHKEYERNRHFGLKDVNIPTLEGRILVELDETSQGLVPEKTNVKPRAMKTILGDQRKQMLQKYKEEKQLQKLKEQREKAKRGIFKVGRYRPDMPCFLLSNQNAVKAEPKKAIPSSVRITRSKAKDQMEQTKIDNESDVRAIRPGPRQTSEKKVSDKEKKVVQPVMPTSLRMTRSATQAAKQVPRTVSSTTARKPVTRAANENEPEGKVPSKGRPAKNVETKPDKGISCKVDSEENTLNSQTNATSGMNPDGVLSKMENLPEINTAKIKGKNSFAPKDFMFQPLDGLKTYQVTPMTPRSANAFLTPSYTWTPLKTEVDESQATKEILAQKCKTYSTKTIQQDSNKLPCPLGPLTVWHEEHVLNKNEATTKNLNGLPIKEVPSLERNEGRIAQPHHGVPYFRNILQSETEKLTSHCFEWDRKLELDIPDDAKDLIRTAVGQTRLLMKERFKQFEGLVDDCEYKRGIKETTCTDLDGFWDMVSFQIEDVIHKFNNLIKLEESGWQVNNNMNHNMNKNVFRKKVVSGIASKPKQDDAGRIAARNRLAAIKNAMRERIRQEECAETAVSVIPKEVDKIVFDAGFFRVESPVKLFSGLSVSSEGPSQRLGTPKSVNKAVSQSRNEMGIPQQTTSPENAGPQNTKSEHVKKTLFLSIPESRSSIEDAQCPGLPDLIEENHVVNKTDLKVDCLSSERMSLPLLAGGVADDINTNKKEGISDVVEGMELNSSITSQDVLMSSPEKNTASQNSILEEGETKISQSELFDNKSLTTECHLLDSVGSCYVARAGLEVLGSSDPTTSASRVAGTTARSKLQ

SEQ ID NO: 20387 - protein, 98 aa, Homo sapiens
LKVDCLSSERMSLPLLAGGVADDINTNKKEGISDVVEGMELNSSITSQDVLMSSPEKNTASQNSILEEGETKISQSELFDNKSLTTECHLLDSVSFPT

SEQ ID NO: 20388 - protein, 12 aa, Homo sapiens
VFFTFCLVEVSR

SEQ ID NO: 20389 - protein, 37 aa, Homo sapiens
MSVSLNQTVTQLQQLLQAVNQQLTKEKEHYQVLGKDN

SEQ ID NO: 20390 - protein, 9 aa, Homo sapiens
LMSDARACA

SEQ ID NO: 20391 - protein, 819 aa, Homo sapiens
LLLRLGGPAAVTALAARLGAMKPSPAGTAKELEPPAPARGEQRTAEPEGRWREKGEADTERQRTRERQEATLAGLAELEYLRQRQELLVRGALRGAGGAGAAAPRAGELLGEAAQRSRLEEKFLEENILLLRKQLNCLRRRDAGLLNQLQELDKQISDLRLDVEKTSEEHLETDSRPSSGFYELSDGASGSLSNSSNSVFSECLSSCHSSTCFCSPLEATLSLSDGCPKSADVNPKYQCDLVSKNGNDVYRYPSPLHAVAVQSPMFLLCLTGNPLREEDRLGNHASDICGGSELDAVKTDSSLPSPSSLWSASHPSSSKKMDGYILSLVQKKTHPVRTNKPRTSVNADPTKGLLRNGSVCVRAPGGVSQGNSVNLKNSKQACLPSGGIPSLNNGTFSPPKQWSKESKAEQAESKRVPLPEGCPSGAASDLQSKHLPKTAKPASQEHARCSAIGTGESPKESAQLSGASPKESPSRGPAPPQENKVVQPLKKMSQKNSLQGVPPATPPLLSTAFPVEERPALDFKSEGSSQSLEEAHLVKAQFIPGQQPSVRLHRGHRNMGVVKNSSLKHRGPALQGLENGLPTVREKTRAGSKKCRFPDDLDTNKKLKKASSKGRKSGGGPEAGVPGRPAGGGHRAGSRAHGHGREAVVAKPKHKRTDYRRWKSSAEISYEEALRRARRGRRENVGLYPAPVPLPYASPYAYVASDSEYSAECESLFHSTVVDTSEDEQSNYTTNCFGDSESSVSEGEFVGESTTTSDSEESGGLIWSQFVQTLPIQTVTAPDLHNHPAKTFVKIKASHNLKKKILRFRSGSLKLMTTV

SEQ ID NO: 20392 - protein, 839 aa, Homo sapiens
LGAMKPSPAGTAKELEPPAPARGEQRTAEPEGRWREKGEADTERQRTRERQEATLAGLAELEYLRQRQELLVRGALRGAGGAGAAAPRAGELLGEAAQRSRLEEKFLEENILLLRKQLNCLRRRDAGLLNQLQELDKQISDLRLDVEKTSEEHLETDSRPSSGFYELSDGASGSLSNSSNSVFSECLSSCHSSTCFCSPLEATLSLSDGCPKSADLIGLLEYKEGHCEDQASGAVCRSLSTPQFNSLDVIADVNPKYQCDLVSKNGNDVYRYPSPLHAVAVQSPMFLLCLTGNPLREEDRLGNHASDICGGSELDAVKTDSSLPSPSSLWSASHPSSSKKMDGYILSLVQKKTHPVRTNKPRTSVNADPTKGLLRNGSVCVRAPGGVSQGNSVNLKNSKQACLPSGGIPSLNNGTFSPPKQWSKESKAEQAESKRVPLPEGCPSGAASDLQSKHLPKTAKPASQEHARCSAIGTGESPKESAQLSGASPKESPSRGPAPPQENKVVQPLKKMSQKNSLQGVPPATPPLLSTAFPVEERPALDFKSEGSSQSLEEAHLVKAQFIPGQQPSVRLHRGHRNMGVVKNSSLKHRGPALQGLENGLPTVREKTRAGSKKCRFPDDLDTNKKLKKASSKGRKSGGGPEAGVPGRPAGGGHRAGSRAHGHGREAVVAKPKHKRTDYRRWKSSAEISYEEALRRARRGRRENVGLYPAPVPLPYASPYAYVASDSEYSAECESLFHSTVVDTSEDEQSNYTTNCFGDSESSVSEGEFVGESTTTSDSEESGGLIWSQFVQTLPIQTVTAPDLHNHPAKTFVKIKASHNLKKKILRFRSGSLKLMTTV

SEQ ID NO: 20393 - protein, 715 aa, Homo sapiens
LAGDCVPSSHILYVLPAVIGGGGGRKENLLSNCLRRRDAGLLNQLQELDKQISDLRLDVEKTSEEHLETDSRPSSGFYELSDGASGSLSNSSNSVFSECLSSCHSSTCFCSPLEATLSLSDGCPKSADVNPKYQCDLVSKNGNDVYRYPSPLHAVAVQSPMFLLCLTGNPLREEDRLGNHASDICGGSELDAVKTDSSLPSPSSLWSASHPSSSKKMDGYILSLVQKKTHPVRTNKPRTSVNADPTKGLLRNGSVCVRAPGGVSQGNSVNLKNSKQACLPSGGIPSLNNGTFSPPKQWSKESKAEQAESKRVPLPEGCPSGAASDLQSKHLPKTAKPASQEHARCSAIGTGESPKESAQLSGASPKESPSRGPAPPQENKVVQPLKKMSQKNSLQGVPPATPPLLSTAFPVEERPALDFKSEGSSQSLEEAHLVKAQFIPGQQPSVRLHRGHRNMGVVKNSSLKHRGPALQGLENGLPTVREKTRAGSKKCRFPDDLDTNKKLKKASSKGRKSGGGPEAGVPGRPAGGGHRAGSRAHGHGREAVVAKPKHKRTDYRRWKSSAEISYEEALRRARRGRRENVGLYPAPVPLPYASPYAYVASDSEYSAECESLFHSTVVDTSEDEQSNYTTNCFGDSESSVSEGEFVGESTTTSDSEESGGLIWSQFVQTLPIQTVTAPDLHNHPAKTFVKIKASHNLKKKILRFRSGSLKLMTTV

SEQ ID NO: 20394 - protein, 55 aa, Homo sapiens
VGWVVLLGCGGSGTSILVVSIVGSGLIKAMAPAEILNGKEISAHLSALVLELLET

SEQ ID NO: 20395 - protein, 63 aa, Homo sapiens
LTDEEINRFARLDIDPETITWQRVLDTNDRFLRKITIGQAPTEKGHTRTVTICPFPRKLVQRH

SEQ ID NO: 20396 - protein, 98 aa, Homo sapiens
LPLSRLDPSYHRLLWHSVFGVISCYQLRRQRIAQRSTWNLTAPSMFQQLAPASPQGIKFGILSLETQVLAELLILSQDSVIEDTRPEERDVAGASYTS

SEQ ID NO: 20397 - protein, 1246 aa, Homo sapiens
LASRALPGVSGGRACSWPSPGQLRGWRWAGAVGGLSPFRERLSNSRPRRGSTWAAPHAVRVPSPRGSYRSNLPGVPSPGSNARMPVSTSLHQDGSQERPVSLTSTTSSSGSSCDSRSAMEEPSSSEAPAKNGAGSLRSRHLPNSNNNSSSWLNVKGPLSPFNSRAAAGPAHHKLSYLGRVVREIVETERMYVQDLRSIVESQEFDIYTQYCNNYPNSVAALTECMRDKQQAKFFRDRQELLQHSLPLGSYLLKPVQRILKYHLLLQEIAKHFDEEEDGFEVVEDAIDTMTCVAWYINDMKRRHEHAVRLQEIQSLLINWKGPDLTTYGELVLEGTFRVHRVRNERTFFLFDKTLLITKKRGDHFVYKGNIPCSSLMLIESTRDSLCFTVTHYKHSKQQYSIQAKTVEEKRNWTHHIKRLILENHHATIPQKAKEAILEMDSYYPNRYRCSPERLKKAWSSQDEVSTNVRQGRRQSEPTKHLLRQLNEKARAAGMKGKGRRESESSRSSRRPSGRSPTSTEKRMSFESISSLPEVEPDPEAGSEQEVFSAVEGPSAEETPSDTESPEVLETQLDAHQGLLGMDPPGDMVDFVAAESTEDLKALSSEEEEEMGGAAQEPESLLPPSVLDQASVIAERFVSSFSRRSSVAQEDSKSSGFGSPRLVSRSSSVLSLEGSEKGLARHGSATDSLSCQLSPEVDISVGVATEDSPSVNGMEPPSPGCPVEPDRSSCKKKESALSTRDRLLLDKIKSYYENAEHHDAGFSVRRRESLSYIPKGLVRNSISRFNSLPRPDPEPVPPVGSKRQVGSRPTSWALFELPGPSQAVKGDPPPISDAEFRPSSEIVKIWEGMESSGGSPGKGPGQGQANGFDLHEPLFILEEHELGAITEESATASPESSSPTEGRSPAHLARELKELVKELSSSTQGELVAPLHPRIVQLSHVMDSHVSERVKNKVYQLARQYSLRIKSNKPVMARPPLQWEKVAPERDGKSPTVPCLQEEAGEPLGGKGKRKPVLSLFDYEQLMAQEHSPPKPSSAGEMSPQRFFFNPSAVSQRTTSPGGRPSARSPLSPTETFSWPDVRELCSKYASRDEARRAGGGRPRGPPVNRSHSVPENMVEPPLSGRVGRCRSLSTKRGRGGGEAAQSPGPLPQSKPDGGETLYVTADLTLEDNRRVIVMEKGPLPSPTAGLEESSGQGPSSPVALLGQVQDFQQSAECQPKEEGSRDPADPSQQGRVRNLREKFQALNSVG

SEQ ID NO: 20398 - protein, 1244 aa, Homo sapiens
VRVPSPRGSYRSNLPGVPSPGSNARMPVSTSLHQDGSQERPVSLTSTTSSSGSSCDSRSAMEEPSSSEAPAKNGAGSLRSRHLPNSNNNSSSWLNVKGPLSPFNSRAAAGPAHHKLSYLGRVVREIVETERMYVQDLRSIVEDYLLKIIDTPGLLKPEQVSALFGNIENIYALNSQLLRDLDSCNSDPVAVASCFVERSQEFDIYTQYCNNYPNSVAALTECMRDKQQAKFFRDRQELLQHSLPLGSYLLKPVQRILKYHLLLQEIAKHFDEEEDGFEVVEDAIDTMTCVAWYINDMKRRHEHAVRLQEIQSLLINWKGPDLTTYGELVLEGTFRVHRVRNERTFFLFDKTLLITKKRGDHFVYKGNIPCSSLMLIESTRDSLCFTVTHYKHSKQQYSIQAKTVEEKRNWTHHIKRLILENHHATIPQKAKEAILEMDSYYPNRYRCSPERLKKAWSSQDEVSTNVRQGRRQSEPTKHLLRQLNEKARAAGMKGKGRRESESSRSSRRPSGRSPTSTEKRMSFESISSLPEVEPDPEAGSEQEVFSAVEGPSAEETPSDTESPEVLETQLDAHQGLLGMDPPGDMVDFVAAESTEDLKALSSEEEEEMGGAAQEPESLLPPSVLDQASVIAERFVSSFSRRSSVAQEDSKSSGFGSPRLVSRSSSVLSLEGSEKGLARHGSATDSLSCQLSPEVDISVGVATEDSPSVNGMEPPSPGCPVEPDRSSCKKKESALSTRDRLLLDKIKSYYENAEHHDAGFSVRRRESLSYIPKGLVRNSISRFNSLPRPDPEPVPPVGSKRQVGSRPTSWALFELPGPSQAVKGDPPPISDAEFRPSSEIVKIWEGMESSGGSPGKGPGQGQANGFDLHEPLFILEEHELGAITEESATASPESSSPTEGRSPAHLARELKELVKELSSSTQGELVAPLHPRIVQLSHVMDSHVSERVKNKVYQLARQYSLRIKSNKPVMARPPLQWEKVAPERDGKSPTVPCLQEEAGEPLGGKGKRKPVLSLFDYEQLMAQEHSPPKPSSAGEMSPQRFFFNPSAVSQRTTSPGGRPSARSPLSPTETFSWPDVRELCSKYASRDEARRAGGGRPRGPPVNRSHSVPENMVEPPLSGRVGRCRSLSTKRGRGGGEAAQSPGPLPQSKPDGGETLYVTADLTLEDNRRVIVMEKGPLPSPTAGLEESSGQGPSSPVALLGQVQDFQQSAECQPKEEGSRDPADPSQQGRVRNLREKFQALNSVG

SEQ ID NO: 20399 - protein, 202 aa, Homo sapiens
VAALTECMRDKQQAKFFRDRQELLQHSLPLGSYLLKPVQRILKYHLLLQEIAKHFDEEEDGFEVVEDAIDTMTCVAWYINDMKRRHEHAVRLQEIQSLLINWKGPDLTTYGELVLEGTFRVHRVRNERTFFLFDKTLLITKKRGDHFVYKGNIPVTRPCPISSAIFSPSQRIWAPLLVCFLGLQHHPSEITLPASPGCQPCA

SEQ ID NO: 20400 - protein, 143 aa, Homo sapiens
LMLIESTRDSLCFTVTHYKHSKQQYSIQAKTVEEKRNWTHHIKRLILENHHATIPQKAKEAILEMDSYYPNRYRCSPERLKKAWSSQDEVSTNVRQGRRQSEPTKHLLRQLNEKGECVRWPAIPSERGRRREEGKQPTTWGVT

SEQ ID NO: 20401 - protein, 796 aa, Homo sapiens
VRTSPGSCPEVFFLLTDLFPSPPLPLARVLGDPVVMSAARAAGMKGKGRRESESSRSSRRPSGRSPTSTEKRMSFESISSLPEVEPDPEAGSEQEVFSAVEGPSAEETPSDTESPEVLETQLDAHQGLLGMDPPGDMVDFVAAESTEDLKALSSEEEEEMGGAAQEPESLLPPSVLDQASVIAERFVSSFSRRSSVAQEDSKSSGFGSPRLVSRSSSVLSLEGSEKGLARHGSATDSLSCQLSPEVDISVGVATEDSPSVNGMEPPSPGCPVEPDRSSCKKKESALSTRDRLLLDKIKSYYENAEHHDAGFSVRRRESLSYIPKGLVRNSISRFNSLPRPDPEPVPPVGSKRQVGSRPTSWALFELPGPSQAVKGDPPPISDAEFRPSSEIVKIWEGMESSGGSPGKGPGQGQANGFDLHEPLFILEEHELGAITEESATASPESSSPTEGRSPAHLARELKELVKELSSSTQGELVAPLHPRIVQLSHVMDSHVSERVKNKVYQLARQYSLRIKSNKPVMARPPLQWEKVAPERDGKSPTVPCLQEEAGEPLGGKGKRKPVLSLFDYEQLMAQEHSPPKPSSAGEMSPQRFFFNPSAVSQRTTSPGGRPSARSPLSPTETFSWPDVRELCSKYASRDEARRAGGGRPRGPPVNRSHSVPENMVEPPLSGRVGRCRSLSTKRGRGGGEAAQSPGPLPQSKPDGGETLYVTADLTLEDNRRVIVMEKGPLPSPTAGLEESSGQGPSSPVALLGQVQDFQQSAECQPKEEGSRDPADPSQQGRVRNLREKFQALNSVG

SEQ ID NO: 20402 - protein, 817 aa, Homo sapiens
LEDLTGHEGNEKGAGPEPPGSEEEEEEQEESLAVAEQVADFASSLLAALHCWHYRANALLFSRGAMGKGRRESESSRSSRRPSGRSPTSTEKRMSFESISSLPEVEPDPEAGSEQEVFSAVEGPSAEETPSDTESPEVLETQLDAHQGLLGMDPPGDMVDFVAAESTEDLKALSSEEEEEMGGAAQEPESLLPPSVLDQASVIAERFVSSFSRRSSVAQEDSKSSGFGSPRLVSRSSSVLSLEGSEKGLARHGSATDSLSCQLSPEVDISVGVATEDSPSVNGMEPPSPGCPVEPDRSSCKKKESALSTRDRLLLDKIKSYYENAEHHDAGFSVRRRESLSYIPKGLVRNSISRFNSLPRPDPEPVPPVGSKRQVGSRPTSWALFELPGPSQAVKGDPPPISDAEFRPSSEIVKIWEGMESSGGSPGKGPGQGQANGFDLHEPLFILEEHELGAITEESATASPESSSPTEGRSPAHLARELKELVKELSSSTQGELVAPLHPRIVQLSHVMDSHVSERVKNKVYQLARQYSLRIKSNKPVMARPPLQWEKVAPERDGKSPTVPCLQEEAGEPLGGKGKRKPVLSLFDYEQLMAQEHSPPKPSSAGEMSPQRFFFNPSAVSQRTTSPGGRPSARSPLSPTETFSWPDVRELCSKYASRDEARRAGGGRPRGPPVNRSHSVPENMVEPPLSGRVGRCRSLSTKRGRGGGEAAQSPGPLPQSKPDGGETLYVTADLTLEDNRRVIVMEKGPLPSPTAGLEESSGQGPSSPVALLGQVQDFQQSAECQPKEEGSRDPADPSQQGRVRNLREKFQALNSVG

SEQ ID NO: 20403 - protein, 785 aa, Homo sapiens
LTGHEGNEKGAGPEPPGSEEEEEEQEESLAVAEQGKGRRESESSRSSRRPSGRSPTSTEKRMSFESISSLPEVEPDPEAGSEQEVFSAVEGPSAEETPSDTESPEVLETQLDAHQGLLGMDPPGDMVDFVAAESTEDLKALSSEEEEEMGGAAQEPESLLPPSVLDQASVIAERFVSSFSRRSSVAQEDSKSSGFGSPRLVSRSSSVLSLEGSEKGLARHGSATDSLSCQLSPEVDISVGVATEDSPSVNGMEPPSPGCPVEPDRSSCKKKESALSTRDRLLLDKIKSYYENAEHHDAGFSVRRRESLSYIPKGLVRNSISRFNSLPRPDPEPVPPVGSKRQVGSRPTSWALFELPGPSQAVKGDPPPISDAEFRPSSEIVKIWEGMESSGGSPGKGPGQGQANGFDLHEPLFILEEHELGAITEESATASPESSSPTEGRSPAHLARELKELVKELSSSTQGELVAPLHPRIVQLSHVMDSHVSERVKNKVYQLARQYSLRIKSNKPVMARPPLQWEKVAPERDGKSPTVPCLQEEAGEPLGGKGKRKPVLSLFDYEQLMAQEHSPPKPSSAGEMSPQRFFFNPSAVSQRTTSPGGRPSARSPLSPTETFSWPDVRELCSKYASRDEARRAGGGRPRGPPVNRSHSVPENMVEPPLSGRVGRCRSLSTKRGRGGGEAAQSPGPLPQSKPDGGETLYVTADLTLEDNRRVIVMEKGPLPSPTAGLEESSGQGPSSPVALLGQVQDFQQSAECQPKEEGSRDPADPSQQGRVRNLREKFQALNSVG

SEQ ID NO: 20404 - protein, 79 aa, Homo sapiens
VEPDRSSCKKKESALSTRDRLLLDKIKSYYENAEHHDAGFSVRRRESLSYIPKGLVRNSISRRLRQWPGEALFCNGAFS

SEQ ID NO: 20405 - protein, 134 aa, Homo sapiens
LAGSAGPLLTLCPSTGDPALSMSHWMFHQQALQEYILMCCQCPAGGLLDKPGKSRDFYHTCYCLSGLSIAQHFGSGAMLHDVVLGVPENALQPTHPVYNIGPDKVIQATTYFLQKPVPGFEELKDETSAEPATD

SEQ ID NO: 20406 - protein, 23 aa, Homo sapiens
LKKSALGSSAGITHIPQNAGSKL

SEQ ID NO: 20407 - protein, 118 aa, Homo sapiens
VRESHTYLRMPGLSCRFYQHKFPEVEDVVMVNVRSIAEMGAYVSLLEYNNIEGMILLSELSRRRIRSINKLIRIGRNECVVVIRVDKEKGYIDLSKRRVSPEEAIKCEDKFTKSKTVS

SEQ ID NO: 20408 - protein, 411 aa, Homo sapiens
VCRGLVGGAGGGANVAVTSRGGRTLARVGKSSGGRWRSLPASNRAEPLPWRFSVLRIMSLRGSLSRLLQTRVHSILKKSVHSVAVIGAPFSQGQKRKGVEHGPAAIREAGLMKRLSSLGCHLKDFGDLSFTPVPKDDLYNNLIVNPRSVGLANQELAEVVSRAVSDGYSCVTLGGDHSLAIGTISGHARHCPDLCVVWVDAHADINTPLTTSSGNLHGQPVSFLLRELQDKVPQLPGFSWIKPCISSASIVYIGLRDVDPPEHFILKNYDIQYFSMRDIDRLGIQKVMERTFDLLIGKRQRPIHLSFDIDAFDPTLAPATGTPVVGGLTYREGMYIAEEIHNTGLLSALDLVEVNPQLATSEEEAKTTANLAVDVIASSFGQTREGGHIVYDQLPTPSSPDESENQARVRI

SEQ ID NO: 20409 - protein, 91 aa, Homo sapiens [sequence omitted]

SEQ ID NO: 20410 - protein, 19 aa, Homo sapiens
LCKTISCRSSFNGFCSRIP

SEQ ID NO: 20411 - protein, 11 aa, Homo sapiens
MCPPSPPHNPT

SEQ ID NO: 20412 - protein, 27 aa, Homo sapiens
LPTPAPTLHPHPIPSSPYPSHSPQALH

SEQ ID NO: 20413 - protein, 325 aa, Homo sapiens
LRVLGQGNKMLNYSAPSAGGCLLDRKAVGTPAGGGFPRRHSVTLPSSKFHQNQLLSSLKGEPAPALSSRDSRFRDRSFSEGGERLLPTQKQPGGGQVNSSRYKTELCRPFEENGACKYGDKCQFAHGIHELRSLTRHPKYKTELCRTFHTIGFCPYGPRCHFIHNAEERRALAGARDLSADRPRLQHSFSFAGFPSAAATAAATGLLDSPTSITPPPILSADDLLGSPTLPDGTNNPFAFSSQELASLFAPSMGLPGGGSPTTFLFRPMSESPHMFDSPPSPQDSLSDQEGYLSSSSSSHSGSDSPTLDNSRRLPIFSRLSISDD

SEQ ID NO: 20414 - protein, 87 aa, Homo sapiens [sequence omitted]

SEQ ID NO: 20415 - protein, 18 aa, Homo sapiens
LAKRESRARLPAQQKTTT

SEQ ID NO: 20416 - protein, 8 aa, Homo sapiens
MREKKRHA

SEQ ID NO: 20417 - protein, 43 aa, Homo sapiens
LRCVWGGWRRREGCGAAQNSERAWKVVSCSVGFFWEEGAFRKD

SEQ ID NO: 20418 - protein, 28 aa, Homo sapiens
MAAQIVSGRGCSLCGGWRLMSAVDSRKY

SEQ ID NO: 20419 - protein, 45 aa, Homo sapiens
MSGCRVFIGRLNPAAREKDVERFFKGYGRIRDIDLKRGFGFVVSI

SEQ ID NO: 20420 - protein, 66 aa, Homo sapiens
MSGCRVFIGRLNPAAREKDVERFFKGYGRIRDIDLKRGFGFVEFEDPRDADDAVYELDGKELCSER

SEQ ID NO: 20421 - protein, 107 aa, Homo sapiens
MSGCRVFIGRLNPAAREKDVERFFKGYGRIRDIDLKRGFGFVEFEDPRDADDAVYELDGKELCSERVTIEHARARSRGGRGRGRYSDRFSSRRPRNDRRYVKGGWLH

SEQ ID NO: 20422 - protein, 198 aa, Homo sapiens
LIEYKCGKCHVCTLSNIFSFSSLVFFISCDCLCVPFPLLCLTQLSCVKDLKDFMRQAGEVTFADAHRPKLNEGVVEFASYGDLKNAIEKLSGKEINGRKIKLIEGSKRHSRSRSRSRSRTRSSSRSRSRSRSRSRKSYSRSRSRSRSRSRSKSRSVSRSPVPEKSQKRGSSSRSKSPASVDRQRSRSRSRSRSVDSGN

SEQ ID NO: 20423 - protein, 156 aa, Homo sapiens
VNIETTYLDCCVQCVRLQDVYTLKVAVFHFRVVEFASYGDLKNAIEKLSGKEINGRKIKLIEGSKRHSRSRSRSRSRTRSSSRSRSRSRSRSRKSYSRSRSRSRSRSRSKSRSVSRSPVPEKSQKRGSSSRSKSPASVDRQRSRSRSRSRSVDSGN

SEQ ID NO: 20424 - protein, 84 aa, Homo sapiens
MLPRGQARWLTPVIPALWEAEIGSGSSRLGTAATIKGDTDTAKTSDDISLSLGQSSSLCKEGSEEQATQEVEARESLEPGRRRL

SEQ ID NO: 20425 - protein, 114 aa, Homo sapiens
VLSLDSGTVACLNDSNRLMAPESIKPLTTSKSDLEAKEGEVLDELSLLGRASQLETVTRSRNSLPNQVAFPEGEEQDAVSGGKFSSTLYETGGCDMSLVNFEPAARRASNIWYV

SEQ ID NO: 20426 - protein, 21 aa, Homo sapiens
LPVPGSLGFSSFIMNLAQGWL

SEQ ID NO: 20427 - protein, 470 aa, Homo sapiens
VKTLRMAQGSGDQRAVGVADPEESSPNMIVYCKIEDIITKMQDDKTGGVPIRTVKSFLSKIPSVVTGTDIVQWLMKNLSIEDPVEAIHLGSLIAAQGYIFPISDHVLTMKDDGTFYRFQAPYFWPSNCWEPENTDYAIYLCKRTMQNKARLELADYEAENLARLQRAFARKWEFIFMQAEAQVKIDRKKDKTERKILDSQERAFWDVHRPVPGCVNTTEMDIRKCRRLKNPQKVKKSVYGVTEESQAQSPVHVLSQPIRKTTKEDIRKQITFLNAQIDRHCLKMSKVAESLIAYTEQYVEYDPLITPAEPSNPWISDDVALWDIEMSKEPSQQRVKRWGFSFDEILKDQVGRDQFLRFLESEFSSENLRFWLAVQDLKKQPLQDVAKRVEEIWQEFLAPGAPSAINLDSHSYEITSQNVKDGGRYTFEDAQEHIYKLMKSDSYARFLRSNAYQDLLLAKKKKVSKVVELP

SEQ ID NO: 20428 - protein, 495 aa, Homo sapiens
VKTLRMAQGSGDQRAVGVADPEESSPNMIVYCKIEDIITKMQDDKTGGVPIRTVKSFLSKIPSVVTGTDIVQWLMKNLSIEDPVEAIHLGSLIAAQGYIFPISDHVLTMKDDGTFYRFQAPYFWPSNCWEPENTDYAIYLCKRTMQNKARLELADYEAENLARLQRAFARKWEFIFMQAEAQVKIDRKKDKTERKILDSQERAFWDVHRPVPGCVNTTEMDIRKCRRLKNPQKVKKSVYGVTEESQAQSPVHVLSQPIRKTTKEDIRKQITFLNAQIDRHCLKMSKVAESLIAYTEQYVEYDPLITPAEPSNPWISDDVALWDIEMSKEPSQQRVKRWGFSFDEILKDQVGRDQFLRFLESEFSSENLRFWLAVQDLKKQPLQDVAKRVEEIWQEFLAPGAPSAINLDSHSYEITSQNVKDGGRYTFEDAQEHIYKLMKSDSYARFLRSNAYQDLLLAKKKPESEQGRRTSLEKFTRSVGKSLAGKRLTGLMQSS

SEQ ID NO: 20429 - protein, 477 aa, Homo sapiens
VKTLRMAQGSGDQRAVGVADPEESSPNMIVYCKIEDIITKMQDDKTGGVPIRTVKSFLSKIPSVVTGTDIVQWLMKNLSIEDPVEAIHLGSLIAAQGYIFPISDHVLTMKDDGTFYRFQAPYFWPSNCWEPENTDYAIYLCKRTMQNKARLELADYEAENLARLQRAFARKWEFIFMQAEAQVKIDRKKDKTERKILDSQERAFWDVHRPVPGCVNTTEMDIRKCRRLKNPQKVKKSVYGVTEESQAQSPVHVLSQPIRKTTKEDIRKQITFLNAQIDRHCLKMSKVAESLIAYTEQYVEYDPLITPAEPSNPWISDDVALWDIEMSKEPSQQRVKRWGFSFDEILKDQVGRDQFLRFLESEFSSENLRFWLAVQDLKKQPLQDVAKRVEEIWQEFLAPGAPSAINLDSHSYEITSQNVKDGGRYTFEDAQEHIYKLMKSDSYARFLRSNAYQDLLLAKKKGKSLAGKRLTGLMQSS

SEQ ID NO: 20430 - protein, 52 aa, Homo sapiens
LGSLIAAQGYIFPISDHVLTMKDDGTFYRFQAPYFWPSNCWEPENTDYGGRH

SEQ ID NO: 20431 - protein, 84 aa, Homo sapiens
MQNKARLELADYEAENLARLQRAFARKWEFIFMQAEAQVKIDRKKDKTERKILDSQERAFWDVHRPVAHQRMVNSTSALSLGPF

SEQ ID NO: 20432 - protein, 125 aa, Homo sapiens
LKQKGRTSPCSISVGNTHIRLLKPGCVNTTEMDIRKCRRLKNPQKVKKSVYGVTEESQAQSPVHVLSQPIRKTTKEDIRKQVNELTACTLRRRRGQFKNPFKCSTLKIEQALSSWKPQWNPAVGD

SEQ ID NO: 20433 - protein, 49 aa, Homo sapiens
MSHPMPWGNCCNGVSHSPLWELEEGGGSCHTVLIIGMHQLRMVYFIAVI

SEQ ID NO: 20434 - protein, 29 aa, Homo sapiens
LHFTPEVASFQQWGKSLAGKRLTGLMQSS

SEQ ID NO: 20435 - protein, 13 aa, Homo sapiens
LRTEFPYEETWSL

SEQ ID NO: 20436 - protein, 54 aa, Homo sapiens
VRAMKGDGGETRWVNGETRKKESTEPGLGPVEAPVYSPLFFVQLYSNTPLAKRP

SEQ ID NO: 20437 - protein, 40 aa, Homo sapiens
LFWVCTTEAQTTETKQNSRMSVLPRDGIVMRYLFSIEIGS

SEQ ID NO: 20438 - protein, 8 aa, Homo sapiens
LKQNKTAE

SEQ ID NO: 20439 - protein, 112 aa, Homo sapiens
VAAQKGPDGTVIPNNYCDFCLGGSNMNKKSGRPEELVSCADCGRSAHLGGEGRKEKEAAAAARTTEDLFGSTSESDTSTFHGFDEDDLEEPRSCRGRRSGRGSPTADKKGSC

SEQ ID NO: 20440 - protein, 425 aa, Homo sapiens
LRLNATAFHPRKKMFYGRINGRNFAASSLPVAFAATPLMLFLPNPQLIFSFPISSRNHITGLMPPGKLKLENLFHMCTRLGDQFYKEAIEHCRSYNSRLCAERSVRLPFLDSQTGVAQNNCYIWMEKRHRGPGLAPGQLYTYPARCWRKKRRLHPPEDPKLRLLEIKPEVELPLKKDGFTSESTTLEALLRGEGVEKKVDAREEESIQEIQRVLENDENVEEGNEEEDLEEDIPKRKNRTRGRARGSAGGRRRHDAASQEDHDKPYVCDICGKRYKNRPGLSYHYAHTHLASEEGDEAQDQETRSPPNHRNENHRPQKGPDGTVIPNNYCDFCLGGSNMNKKSGRPEELVSCADCGRSAHLGGEGRKEKEAAAAARTTEDLFGSTSESDTSTFHGFDEDDLEEPRSCRGRRSGRGSPTADKKGSC

SEQ ID NO: 20441 - protein, 363 aa, Homo sapiens
LLHCSKMATVIHNPLKALGDQFYKEAIEHCRSYNSRLCAERSVRLPFLDSQTGVAQNNCYIWMEKRHRGPGLAPGQLYTYPARCWRKKRRLHPPEDPKLRLLEIKPEVELPLKKDGFTSESTTLEALLRGEGVEKKVDAREEESIQEIQRVLENDENVEEGNEEEDLEEDIPKRKNRTRGRARGSAGGRRRHDAASQEDHDKPYVCDICGKRYKNRPGLSYHYAHTHLASEEGDEAQDQETRSPPNHRNENHRPQKGPDGTVIPNNYCDFCLGGSNMNKKSGRPEELVSCADCGRSAHLGGEGRKEKEAAAAARTTEDLFGSTSESDTSTFHGFDEDDLEEPRSCRGRRSGRGSPTADKKGSC

SEQ ID NO: 20442 - protein, 36 aa, Homo sapiens
LASEEGDEAQDQETRSPPNHRNENHRQRTGWNSHSQ

SEQ ID NO: 20443 - protein, 38 aa, Homo sapiens
MKERTSRGFVFCETVFLYSCSNDRVTCTVVLLPECTDV

SEQ ID NO: 20444 - protein, 46 aa, Homo sapiens
MKESSVFLSLFRTSRGFVFCETVFLYSCSNDRVTCTVVLLPECTDV

SEQ ID NO: 20445 - protein, 140 aa, Homo sapiens
LLSPASLLRLSCSSAAFVSGPRPSSPPAQRSPRARQEAAFRWPAAAATSAQFLPLASLPNGRSSPAGRPGCDRERPILSRSRSERPAATPRDHTPAALGPARLPSPPAVAPRPLHDDATPLLQAADPTGPRPRRKMATAA

SEQ ID NO: 20446 - protein, 438 aa, Homo sapiens
LRRLVLQPHLQRASEKPRLSRRPRRSERAVTVLLPSSAPQRPPVSAPRPLARLCLTATMMFSGFNADYEASSSRCSSASPAGDSLSYYHSPADSFSSMGSPVNAQDFCTDLAVSSANFIPTVTAISTSPDLQWLVQPALVSSVAPSQTRAPHPFGVPAPSAGAYSRAGVVKTMTGGRAQSIGRRGKVEQLSPEEEEKRRIRRERNKMAAAKCRNRRRELTDTLQAETDQLEDEKSALQTEIANLLKEKEKLEFILAAHRPACKIPDDLGFPEEMSVASLDLTGGLPEVATPESEEAFTLPLLNDPEPKPSVEPVKSISSMELKTEPFDDFLFPASSRPSGSETARSVPDMDLSGSFYAADWEPLHSGSLGMGPMATELEPLCTPVVTCTPSCTAYTSSFVFTYPEADSFPSCAAAHRKGSSSNEPSSDSLSSPTLLAL

SEQ ID NO: 20447 - protein, 219 aa, Homo sapiens
LQRASEKPRLSRRPRRSERAVTVLLPSSAPQRPPVSAPRPLARLCLTATMMFSGFNADYEASSSRCSSASPAGDSLSYYHSPADSFSSMGSPVNAQDFCTDLAVSSANFIPTVTAISTSPDLQWLVQPALVSSVAPSQTRAPHPFGVPAPSAGAYSRAGVVKTMTGGRAQSIGRRGKVEQVRNSSVLFLGMWGLGGKQPRRCRSPVQRMKPLMGLAAHP

SEQ ID NO: 20448 - protein, 393 aa, Homo sapiens
LQRASEKPRLSRRPRRSERAVTVLLPSSAPQRPPVSAPRPLARLCLTATMMFSGFNADYEASSSRCSSASPAGDSLSYYHSPADSFSSMGSPVNAQDFCTDLAVSSANFIPTVTAISTSPDLQWLVQPALVSSVAPSQTRAPHPFGVPAPSAGAYSRAGVVKTMTGGRAQSIGRRGKVEQETDQLEDEKSALQTEIANLLKEKEKLEFILAAHRPACKIPDDLGFPEEMSVASLDLTGGLPEVATPESEEAFTLPLLNDPEPKPSVEPVKSISSMELKTEPFDDFLFPASSRPSGSETARSVPDMDLSGSFYAADWEPLHSGSLGMGPMATELEPLCTPVVTCTPSCTAYTSSFVFTYPEADSFPSCAAAHRKGSSSNEPSSDSLSSPTLLAL

SEQ ID NO: 20449 - protein, 18 aa, Homo sapiens
LLHSAHLSPPLGPSPGFA

SEQ ID NO: 20450 - protein, 22 aa, Homo sapiens
MEETGTALRNAWEEKGETFHPG

SEQ ID NO: 20451 - protein, 19 aa, Homo sapiens
VPGSREAAGASSTGVGEWR

SEQ ID NO: 20452 - protein, 7 aa, Homo sapiens
LSIRALE

SEQ ID NO: 20453 - protein, 15 aa, Homo sapiens
MECVLFPVTLQRAGS

SEQ ID NO: 20454 - protein, 40 aa, Homo sapiens
LSQAWVCVSFLFLLSLLIALTNLLGSLLELTWCWIFSNCI

SEQ ID NO: 20455 - protein, 16 aa, Homo sapiens
MTNIILRKDTTLFSGR

SEQ ID NO: 20456 - protein, 48 aa, Homo sapiens
MSLWGAVPLHPRVRRTQGSEVATGQAEEAPVGGGGLVAQEKSGREPSW

SEQ ID NO: 20457 - protein, 124 aa, Homo sapiens
MSLWGAVPLHPRVRRTQGSEDSSDDVRRVQRREKNRIAAQKSRQRQTQKADTLHLESEDLEKQNAALRKEIKQLTEELKYFTSVLNSHEPLCSVLAASTPSPPEVVYSAHAFHQPHVSSPRFQP

SEQ ID NO: 20458 - protein, 160 aa, Homo sapiens
VVGWWPRRSQEGSPAGDKRAQRCLGLSVRARKISAMPHSSDSSDSSFSRSPPPGKQDSSDDVRRVQRREKNRIAAQKSRQRQTQKADTLHLESEDLEKQNAALRKEIKQLTEELKYFTSVLNSHEPLCSVLAASTPSPPEVVYSAHAFHQPHVSSPRFQP

SEQ ID NO: 20459 - protein, 21 aa, Homo sapiens
VPGAECESPEDFSHASQLRQQ

SEQ ID NO: 20460 - protein, 689 aa, Homo sapiens
LREDLLAAVRSGGGRGRPAMIASCLCYLLLPATRLFRALSDAFFTCRKNVLLANSSSPQVEGDFAMAPRGPEQEECEGLLQQWREEGLSQVLSTASEGPLIDKGLAQSSLALLMDNPGEENAASEDRWSSRQLSDLRAAENLDEPFPEMLGEEPLLEVEGVEGSMWAAIPMQSEPQYADCAALPVGALATEQWEEDPAVLAWSIAPEPVPQEEASIWPFEGLGQLQPPAVEIPYHEILWREWEDFSTQPDAQGLKAGDGPQFQFTLMSYNILAQDLMQQSSELYLHCHPDILNWNYRFVNLMQEFQHWDPDILCLQEVQEDHYWEQLEPSLRMMGFTCFYKRRTGCKTDGCAVCYKPTRFRLLCASPVEYFRPGLELLNRDNVGLVLLLQPLVPEGLGQVSVAPLCVANTHILYNPRRGDVKLAQMAILLAEVDKVARLSDGSHCPIILCGDLNSVPDSPLYNFIRDGELQYHGMPAWKVSGQEDFSHQLYQRKLQAPLWPSSLGITDCCQYVTSCHPKRSERRKYGRDFLLRFRFCSIACQRPVGLVLMEGVTDTKPERPAGWAESVLEEDASELEPAFSRTVGTIQHCLHLTSVYTHFLPQRGRPEVTTMPLGLGMTVDYIFFSAESCENGNRTDHRLYRDGTLKLLGRLSLLSEEILWAANGLPNPFCSSDHLCLLASFGMEVTAP

SEQ ID NO: 20461 - protein, 225 aa, Homo sapiens
LLSVPGPSLLSPQKPILYSYFRSSCSWRVRIALALKGIDYETVPINLIKDGGQQFSKDFQALNPMKQVPTLKIDGITIHQSLAIIEYLEEMRPTPRLLPQDPKKRASVRMISDLIAGGIQPLQNLSVLKQVGEEMQLTWAQNAITCGFNALEQILQSTAGIYCVGDEVTMADLCLVPQVANAERFKVDLTPYPTISSINKRLLVLEAFQVSHPCRQPDTPTELRA

SEQ ID NO: 20462 - protein, 77 aa, Homo sapiens
LDCGVESAERTLCTVRPCQKDKETGFHRGLGWVQFSSEEGLRNALQQENHIIDGVKVQVHTRRPKLPQTSDDEKKDF

SEQ ID NO: 20463 - protein, 301 aa, Homo sapiens
VQLKLRNLKLKEYVISNNHSHHNRSGPPIFSGLPLKVTTLRDQTEVPRIDVSGEELPPAPLLFQISRHLGKMYSEMIFVNGFVHCDPHPGNVLVRKHPGTGKAEIVLLDHGLYQMLTEEFRLNYCHLWQSLIWTDMKRVKEYSQRLGAGDLYPLFACMLTARSWDSVNRGISQAPVTATEDLEIRNNAANYLPQISHLLNHVPRQMLLILKTNDLLRGIEAALGTRASASSFLNMSRCCIRALAEHKKKNTCSFFRRTQISFSEAFNLWQINLHELILRVKGLKLADRVLALICWLFPAPL

SEQ ID NO: 20464 - protein, 1104 aa, Homo sapiens
LGVCFDLCTSMAESSSESDHFRCRDRLSPWAARSTHRGTRSLPTVEVTEKVNTITSTLQDTSRNLRQVDQMLGRYREYSNGQAGAIEHLKESLEQSIDQLRSQRLLRNSGGRSISVTSLSASDLDGGTGSELHHFPPTSPLKDYGDPQGIKRMRSRTGVRFVQETDDMTQLHGFHQSLRDLSSEQIRLGDDFNRELSRRSRSDAETKRALEELTEKLNEAQKQEVVSDRVERRLQELEREMRTERELVERRQDQLGLMSLQLQEALKKQEAKADEHEGAIKNKLRQTETEKNQLEQELELSRRLLNQSEGSRETLLHQVEELRTQLTKAEGDRKGLQHQVSQISKQQSNYQDEQGEDWRFRRGVEREKQDLEKQMSDLRVQLNFSAMASELEEVKRCMERKDKEKAHLASQVENLTRELENGEKQQLQMLDRLKEIQNHFDTCEAERKHADLQISELTRHAEDATKQAERYLSELQQSEALKEEAEKRREDLKLKAQESIRQWKLKHKKLERALEKQSETVDELTGKNNQILKEKDELKTQLYAALQQIENLRKELNDVLTKRALQEEELHSKEEKLRDIKSHQADLELEVKNSLDTIHRLESELKKQSKIQSQMKVEKAHLEEEIAELKKSQAQDKAKLLEMQESIKDLSAIRADLANKLAEEERAKKAVLKDLSDLTAQAKSRDEETATIITQLKLERDVHQRELKDLTSSLQSVKTKHEQNIQELMKHFKKEKSEAENHIRTLKAESLEEKNMAKIHRGQLEKLKSQCDRLTEELTQNENENKKLKLKYQCLKDQLEEREKHISIEEEHLRRMEEARLQLKDQLLCLETEQESILGVIGKEIDAACKTFSKDSVEKLKVFSSGPDIHYDPHRWLAESKTKLQWLCEELKERENREKNLRHQLMLCRQQLRNLTENKESELQCLFQQIERQEQLLDEIHREKRDLLEETQRKDEEMGSLQDRVIALETSTQVALDHLESVPEKLSLLEDFKDFRDSCSSSERTDGRYSKYRVRRNSLQHHQDDTKYRTKSFKGDRTFLEGSHTRGLDHSSSWQDHSRFLSSPRFSYVNSFTKRTVAPDSASNKEDATMNGTSSQPKKEEYGS

SEQ ID NO: 20465 - protein, 445 aa, Homo sapiens
LGVCFDLCTSMAESSSESDHFRCRDRLSPWAARSTHRGTRSLPTVEVTEKVNTITSTLQDTSRNLRQVDQMLGRYREYSNGQAGAIEHLKESLEQSIDQLRSQRLLRNSGGRSISVTSLSASDLDGGTGSELHHFPPTSPLKDYGDPQGIKRMRSRTGVRFVQETDDMTQLHGFHQSLRDLSSEQIRLGDDFNRELSRRSRSDAETKRALEELTEKLNEAQKQEVVSDRVERRLQELEREMRTERELVERRQDQLGLMSLQLQEALKKQEAKADEHEGAIKNKLRQTETEKNQLEQELELSRRLLNQSEGSRETLLHQVEELRTQLTKAEGDRKGLQHQVSQISKQQSNYQDEQGEDWRFRRGVEREKQDLEKQMSDLRVQLNFSAMASELEEVKRCMERKDKEKAHLASQVEHINRKCLLNLVQDLDCKDNEILTYSLQSPLHV

SEQ ID NO: 20466 - protein, 140 aa, Homo sapiens
LGVCFDLCTSMAESSSESDHFRCRDRLSPWAARSTHRGTRSLPTVEVTEKVNTITSTLQDTSRNLRQVDQMLGRYREYSNGQAGAIEHLKESLEQSIDQLRSQRLLRNSGGRSISVTSLSASDLDGGTGSGKHFKCSEKH

SEQ ID NO: 20467 - protein, 67 aa, Homo sapiens
VENEAGGLAAAGAAARPAQGPGRNGVFVSTLRVPSGGGLQSHLQGYSTHPQLTAQYADSVSTRERSG

SEQ ID NO: 20468 - protein, 38 aa, Homo sapiens
VILVEATESRKSPSSALSGILIHKIRNSEYQELNLHRP

SEQ ID NO: 20469 - protein, 599 aa, Homo sapiens
LKLPGTPSGPMGFMVADLWATSRLLVNYPEPYRSQILDYLFKPNFGASLHILKVEIGGDGQTTDGTEPSHMHYALDENYFRGYEWWLMKEAKKRNPNITLIGLPWSFPGWLGKGFDWPYVNLQLTAYYVVTWIVGAKRYHDLDIDYIGIWNERSYNANYIKILRKMLNYQGLQRVKIIASDNLWESISASMLLDAELFKVVDVIGAHYPGTHSAKDAKLTGKKLWSSEDFSTLNSDMGAGCWGRILNQNYINGYMTSTIAWNLVASYYEQLPYGRCGLMTAQEPWSGHYVVESPVWVSAHTTQFTQPGWYYLKTVGHLEKGGSYVALTDGLGNLTIIIETMSHKHSKCIRPFLPYFNVSQQFATFVLKGSFSEIPELQVWYTKLGKTSERFLFKQLDSLWLLDSDGSFTLSLHEDELFTLTTLTTGRKGSYPLPPKSQPFPSTYKDDFNVDYPFFSEAPNFADQTGVFEYFTNIEDPGEHHFTLRQVLNQRPITWAADASNTISIIGDYNWTNLTIKCDVYIETPDTGGVFIAGRVNKGGILIRSARGIFFWIFANGSYRVTGDLAGWIIYALGRVEVTAKKWYTLTLTIKVAGRRKKT

SEQ ID NO: 20470 - protein, 104 aa, Homo sapiens
VASYYEQLPYGRCGLMTAQEPWSGHYVVESPVWVSAHTTQFTQPGWYYLKTVGHLEKGGSYVALTDGLGNLTIIIETMNLTLHFQAGVQWCNLGSLQPLPPGFK

SEQ ID NO: 20471 - protein, 8 aa, Homo sapiens
MYTYKCLS

SEQ ID NO: 20472 - protein, 19 aa, Homo sapiens
LVQPPSLPLLFLPSLAPCL

SEQ ID NO: 20473 - protein, 34 aa, Homo sapiens
LPRLRCGQAGAAGRGKTVNCVPWPASCRVCAWGV

SEQ ID NO: 20474 - protein, 10 aa, Homo sapiens
MRKYSINGKT

SEQ ID NO: 20475 - protein, 31 aa, Homo sapiens
MEKRRCREELSHICRGPCTCQIASLQQQRGP

SEQ ID NO: 20476 - protein, 151 aa, Homo sapiens
MSYEVDLLTHEWVTTRSLETAGWTPTCAFQLLLEPQGPRKAVWSLQPGPSPGRNTSTFAKDSLIHHHGTQKKKMQKRRLKLWPTQGGCKLFEIFLVEKWGSKFPPLNLGRPSDCLTNRNSMEATLYRFLRLSLKRLAVPTSCHLGIIVLET

SEQ ID NO: 20477 - protein, 23 aa, Homo sapiens
VGVHPAVSKLRVVTHSWVSKSTS

SEQ ID NO: 20478 - protein, 23 aa, Homo sapiens
LESTGGGPSSCFQTAGCDPFMGQ

SEQ ID NO: 20479 - protein, 2055 aa, Homo sapiens
LRSRFVPRRGGTGTRGGGRGAGGRSLSMDVTVSELLELFLQSPLVTWVKTFGPFGSGSQDNLTMYMDLVDGIFLNQIMLQIDPRPTNQRINKHVNNDVNLRIQNLTILVRNIKTYYQEVLQQLIVMNLPNVLMIGRDPLSGKSMEEIKKVLLLVLGCAVQCERKEEFIERIKQLDIETQAGIVAHIQEVTHNQENVFDLQWLELPDVAPEELEALSRSMVLHLRRLIDQRDECTELIVDLTQERDYLQAQHPPSPIKSSSADSTPSPTSSLSSEDKQHLAVELADTKARLRRVRQELEDKTEQLVDTRHEVDQLVLELQKVKQENIQLAADARSARAYRDELDSLREKANRVERLELELTRCKEKLHDVDFYKARMEELREDNIILIETKAMLEEQLTAARARGDKVHELEKENLQLKSKLHDLELDRDTDKKRIEELLEENMVLEIAQKQSMNESAHLGWELEQLSKNADLSDASRKSFVFELNECASSRILKLEKENQSLQSTIQGLRDASLVLEESGLKCGELEKENHQLSKKIEKLQTQLEREKQSNQDLETLSEELIREKEQLQSDMETLKADKARQIKDLEQEKDHLNRAMWSLRERSQVSSEARMKDVEKENKALHQTVTEANGKLSQLEFEKRQLHRDLEQAKEKGERAEKLERELQRLQEENGRLARKVTSLETATEKVEALEHESQGLQLENRTLRKSLDTLQNVSLQLEGLERDNKQLDAENLELRRLVETMRFTSTKLAQMERENQQLEREKEELRKNVDLLKALGKKSERLELSYQSVSAENLRLQQSLESSSHKTQTLESELGELEAERQALRRDLEALRLANAQLEGAEKDRKALEQEVAQLEKDKKLLEKEAKRLWQQVELKDAVLDDSTAKLSAVEKESRALDKELARCRDAAGKLKELEKDNRDLTKQVTVHARTLTTLREDLVLEKLKSQQLSSELDKLSQELEKVGLNRELLLQEDDSGSDTKYKILEGRNESALKTTLAMKEEKIVLLEAQMEEKASLNRQLESELQMLKKECETLRQNQGEGQHLQNSFKHPAGKTAASHQGKEAWGPGHKEATMELLRVKDRAIELERNNAALQAEKQLLKEQLQHLETQNVTFSSQILTLQKQSAFLQEHNTTLQTQTAKLQVENSTLSSQSAALTAQYTLLQNHHTAKETENESLQRQQEQLTAAYEALLQDHEHLGTLHERQSAEYEALIRQHSCLKTLHRNLELEHKELGERHGDMLKRKAELEEREKVLTTEREALQQEQRTNALAMGENQRLRGELDRVNFLHHQLKGEYEELHAHTKELKTSLNNAQLELNRWQARFDELKEQHQTMDISLTKLDNHCELLSRLKGNLEEENHHLLSQIQLLSQQNQMLLEQNMENKEQYHEEQKQYIDKLNALRRHKEKLEEKIMDQYKFYDPPPKKKNHWIGAKALVKLIKPKKEGSRERLKSTVDSPPWQLESSDPASPAASQPLRSQAENPDTPALGSNCAEERDAHNGSVGKGPGDLKPKRGSPHRGSLDRTDASTDLAMRSWPSELGSRTCSTSATTTAPSNSTPIARHPGRTKGYNSDDNLCEPSLEFEVPNHRQYVSRPSSLESSRNTSSNSSPLNLKGSSEQLHGRSESFSSEDLIPSRDLATLPREASTPGRNALGRHEYPLPRNGPLPQEGAQKRGTAPPYVGVRPCSASPSSEMVTLEEFLEESNRSSPTHDTPSCRDDLLSDYFRKASDPPAIGGQPGPPAKKEGAKMPTNFVAPTVKMAAPTSEGRPLKPGQYVKPNFRLTEAEAPPSVAPRQAQPPQSLSLGRPRQAPVPPASHAPASRSASLSRAFSLASADLLRASGPEACKQESPQKLGAPEALGGRETGSHTLQSPAPPSSHSLARERTPLVGKAGSSCQGPGPRSRPLDTRRFSLAPPKEERLAPLHQSATAPAIATAGAGAAAAGSGSNSQLLHFSPAAAPAARTKPKAPPRSGEVATITPVRAGLSLSEGDGVPGQGCSEGLPAKSPGRSPDLAPHLGRALEDCSRGSVSKSSPASPEPGGDPQTVWYEYGCV

SEQ ID NO: 20480 - protein, 113 aa, Homo sapiens
LEEKIMDQYKFYDPPPKKKNHWIGAKALVKLIKPKKEGSRERLKSTVDSPPWQLESSDPASPAASQPLRSQAENPDTPALGSNCAEERDAHNGSVGKGRGGRPGRGRVRKGVS

SEQ ID NO: 20481 - protein, 250 aa, Homo sapiens
VKTFGPFGSGSQDNLTMYMDLVDGIFLNQIMLQIDPRPTNQRINKHVNNDVNLRIQNLTILVRNIKTYYQEVLQQLIVMNLPNVLMIGRDPLSGKSMEEIKKVLLLVLGCAVQCERKEEFIERIKQLDIETQAGIVAHIQEVTHNQENVFDLQWLELPDVAPEELEALSRSMVLHLRRLIDQRDECTELIVDLTQERDYLQAQHPPSPIKSSSADSTPSPTSSLSSEDKQHLAVELADTKARLRRVRQEL

SEQ ID NO: 20482 - protein, 109 aa, Homo sapiens
LTILVRNIKTYYQEVLQQLIVMNLPNVLMIGRDPLSGKSMEEIKKVLLLVLGCAVQCERKEEFIERIKQLDIETQAGIVAHIQEVGAWPRGGLSCGLLLLWWPGGKTSL

SEQ ID NO: 20483 - protein, 95 aa, Homo sapiens
VDGIFLNQIMLQIDPRPTNQRINKHVNNDVNLRIQNLTILVRNIKTYYQVRAVLLSGILMCVHQYRHCHGFPTGGREETVLMFRPLLVDSWSAFM

SEQ ID NO: 20484 - protein, 79 aa, Homo sapiens [sequence omitted]

SEQ ID NO: 20485 - protein, 82 aa, Homo sapiens
MAQDALVSKLIKQRVIPLGLTQLGSEKQRPEGSSEPGSLLCRETQGLGRRMESEMLKVYVSFAPSASEPLPLGSTEHRGPEE

SEQ ID NO: 20486 - protein, 17 aa, Homo sapiens
MAAATVGLLPAGSPWRC

SEQ ID NO: 20487 - protein, 31 aa, Homo sapiens
LALLTQHRLFYVLNLDSPRGWEGLWTALGEA

SEQ ID NO: 20488 - protein, 12 aa, Homo sapiens
MTQTVPVKSSCR

SEQ ID NO: 20489 - protein, 394 aa, Homo sapiens
LAEREENQEAEFPGLRRAVQLNLSRPIEEQGPLDVIIHKLTDVILEADQNDSQSLELVHRFQEYIDAHPETIVLDPLPAIRTLLDRSKSYELIRKIEAYMEDDRICSPPFMELTSLCGDDTMRLLEKNGLTFPFICKTRVAHGTNSHEMAIVFNQEGLNAIQPPCVVQNFINHNAVLYKVFVVGESYTVVQRPSLKNFSAGTSDRESIFFNSHNVSKPESSSVLTELDKIEGVFERPSDEVIRELSRALRQALGVSLFGIDIIINNQTGQHAVIDINAFPGYEGVSEFFTDLLNHIATVLQGQSTAMAATGDVALLRHSKLLAEPAGGLVGERTCSASPGCCGSMMGQDAPWKAEADAGGTAKLPHQRLGCNAGVSPSFQQHCVASLATKASSQ

SEQ ID NO: 20490 - protein, 9 aa, Homo sapiens
MLMTSDFGS

SEQ ID NO: 20491 - protein, 110 aa, Homo sapiens
VSCSGSLAVTMELLGEYVGQEGKPQKLRVSCEAPGDGDPFQGLLSGVAQMKDMVTELFDPLVQGEVQHRVAAAPDEDLDGDDEDDAEDENNIDNRTNFDGPSAKRPKTPS

SEQ ID NO: 20492 - protein, 56 aa, Homo sapiens
LRMAGAEGAAGRQSELEPVVSLVDVLEEDEELENEACAVLGGSDSEKCSYSQKFSL

SEQ ID NO: 20493 - protein, 337 aa, Homo sapiens
LTRGAPCRWDPRRSPRSGRPAEPGARALLLAGPALPVHTPTLPSPAPAPRPGRIVQMLLPVTSRTRIRRSGVSPLHLAAERNHDEVLEALLSARFDVNTPLAPERARLYEDRRSSALYFAVVNNNVYATELLLQHGADPNRDVISPLLVAIRHGCLRTMQLLLDHGANIDAYIATHPTAFPATIMFAMKCLSLLKFLMDLGCDGEPCFSCLYGNGPHPPAPQPSSRFNDAPAADKEPSVVQFCEFVSAPEVSRWAGPIIDVLLDYVGNVQLCSRLKEHIDSFEDWAVIKEKAEPPRPLAHLCRLRVRKAIGKYRIKLLDTLPLPGRLIRYLKYENTQ

SEQ ID NO: 20494 - protein, 695 aa, Homo sapiens
VSLSPFHPGTCRPRLTSSWVKNVTLLPICLFRGWLGRGTGGWGEVNLIVVLYGHLNLPGLPPRAKNNPETQQLCPAHRGPGHLLWFRALCLSVSLSLALPPSSFLPEAMTRFSYAEYFSLFHSCSAPSRSTAPPESSPARAPMGLFQGVMQKYSSSLFKTSQLAPADPLIKAIKDGDEEALKTMIKEGKNLAEPNKEGWLPLHEAAYYGQVGCLKVLQRAYPGTIDQRTLQEETAVYLATCRGHLDCLLSLLQAGAEPDISNKSRETPLYKACERKNAEAVKILVQHNADTNHRCNRGWTALHESVSRNDLEVMQILVSGGAKVESKNAYGITPLFVAAQSGQLEALRFLAKYGADINTQASDNASALYEACKNEHEEVVEFLLSQGADANKTNKDGLLPLHIASKKGNYRIVQMLLPVTSRTRIRRSGVSPLHLAAERNHDEVLEALLSARFDVNTPLAPERARLYEDRRSSALYFAVVNNNVYATELLLQHGADPNRDVISPLLVAIRHGCLRTMQLLLDHGANIDAYIATHPTAFPATIMFAMKCLSLLKFLMDLGCDGEPCFSCLYGNGPHPPAPQPSSRFNDAPAADKEPSVVQFCEFVSAPEVSRWAGPIIDVLLDYVGNVQLCSRLKEHIDSFEDWAVIKEKAEPPRPLAHLCRLRVRKAIGKYRIKLLDTLPLPGRLIRYLKYENTQ

SEQ ID NO: 20495 - protein, 649 aa, Homo sapiens
LGVCSGGQGERWRRMATQISTRGSQCTIGQEEYSLYSSLSEDELVQMAIEQSLADKTRGPTTAEATASACTNRQPAHFYPWTRSTAPPESSPARAPMGLFQGVMQKYSSSLFKTSQLAPADPLIKAIKDGDEEALKTMIKEGKNLAEPNKEGWLPLHEAAYYGQVGCLKVLQRAYPGTIDQRTLQEETAVYLATCRGHLDCLLSLLQAGAEPDISNKSRETPLYKACERKNAEAVKILVQHNADTNHRCNRGWTALHESVSRNDLEVMQILVSGGAKVESKNAYGITPLFVAAQSGQLEALRFLAKYGADINTQASDNASALYEACKNEHEEVVEFLLSQGADANKTNKDGLLPLHIASKKGNYRIVQMLLPVTSRTRIRRSGVSPLHLAAERNHDEVLEALLSARFDVNTPLAPERARLYEDRRSSALYFAVVNNNVYATELLLQHGADPNRDVISPLLVAIRHGCLRTMQLLLDHGANIDAYIATHPTAFPATIMFAMKCLSLLKFLMDLGCDGEPCFSCLYGNGPHPPAPQPSSRFNDAPAADKEPSVVQFCEFVSAPEVSRWAGPIIDVLLDYVGNVQLCSRLKEHIDSFEDWAVIKEKAEPPRPLAHLCRLRVRKAIGKYRIKLLDTLPLPGRLIRYLKYENTQ

SEQ ID NO: 20496 - protein, 43 aa, Homo sapiens
LSTLVMRWPQNKLPASKDSVSELPGRAARSLGPGQKENSGSMF

SEQ ID NO: 20497 - protein, 174 aa, Homo sapiens
LPRGPQQCRRESWLGALAPPLTALLLPAWEKAGEGEILCAPSGERLCQLPHSNVEVQESEWRLTEAKGPTMGKESGWDSGRAAVAAVVGGVVAVGTVLVALSAMGFTSVGIAASSIAAKMMSTAAIANGGGVAAGSLVAILQSVGAAGLSVTSKVIGGFAGTALGAWLGSPPSS

SEQ ID NO: 20498 - protein, 112 aa, Homo sapiens
LAPPLTALLLPAWEKAGEGEILCAPSGERLCQLPHSNVEVQESEWRLTEAKGPTMGKESGWDSGRAAVAAVVGGGESLWEGTQAPIPRLPPALSLWEKLALTKPRILQDIAG

SEQ ID NO: 20499 - protein, 75 aa, Homo sapiens
LAPPLTALLLPAWEKAGEGEILCAPSGERLCQLPHSNVEVQESEWRLTEAKGPTMGKESGWDSAALLQGSPWDAG

SEQ ID NO: 20500 - protein, 60 aa, Homo sapiens
LPAWEKAGEGEILCAPSGERLCQLPHSNVEVQESEWRLTEAKGPTMGKESGWDSAGRLLA

SEQ ID NO: 20501 - protein, 83 aa, Homo sapiens
LCAPSGERLCQLPHSNVEVQESEWRLTEAKGPTMGKESGWDSGRAAVAAVVGGGAAGLSVTSKVIGGFAGTALGAWLGSPPSS

SEQ ID NO: 20502 - protein, 124 aa, Homo sapiens
MQKVEVQESEWRLTEAKGPTMGKESGWDSGRAAVAAVVGGVVAVGTVLVALSAMGFTSVGIAASSIAAKMMSTAAIANGGGVAAGSLVAILQSVGAAGLSVTSKVIGGFAGTALGAWLGSPPSS

SEQ ID NO: 20503 - protein, 102 aa, Homo sapiens
LPYYWSSATALLVNWRDWMSIRVTLAGQREAKQEGRRLSSCEPMRPAGLRRDNWERRGTRPFRGTPGRGHLLMKFPVPVSAAVELPWQCDSLIPGKSEEQAT

SEQ ID NO: 20504 - protein, 47 aa, Homo sapiens
LVLVQNVDIKLKILAYGHRKCIFGFVFLSLASNLGFWLRRLLNNDLS

SEQ ID NO: 20505 - protein, 20 aa, Homo sapiens
MANRRYPLAESLFPDSASLR

SEQ ID NO: 20506 - protein, 449 aa, Homo sapiens
VATSAVSSTTWDEIDSAVKMLVSLKMSYKAAAGEDYKADCPPGNPAPTSNHGPDATEAEEDFVDPWTVQTSSAKGIDYDKLIVRFGSSKIDKELINRIERATGQRPHHFLRRGIFFSHRDMNQVLDAYENKKPFYLYTGRGPSSEAMHVGHLIPFIFTKWLQDVFNVPLVIQMTDDEKYLWKDLTLDQAYSYAVENAKDIIACGFDINKTFIFSDLDYMGMSSGFYKNVVKIQKHVTFNQVKGIFGFTDSDCIGKISFPAIQAAPSFSNSFPQIFRDRTDIQCLIPCAIDQDPYFRMTRDVAPRIGYPKPALLHSTFFPALQGAQTKMSASDPNSSIFLTDTAKQIKTKVNKHAFSGGRDTIEEHRQFGGNCDVDVSFMYLTFFLEDDDKLEQIRKDYTSGAMLTGELKKALIEVLQPLIAEHQARRKEVTDEIVKEFMTPRKLSFDFQ

SEQ ID NO: 20507 - protein, 444 aa, Homo sapiens
LARLGRDEIDSAVKMLVSLKMSYKAAAGEDYKADCPPGNPAPTSNHGPDATEAEEDFVDPWTVQTSSAKGIDYDKLIVRFGSSKIDKELINRIERATGQRPHHFLRRGIFFSHRDMNQVLDAYENKKPFYLYTGRGPSSEAMHVGHLIPFIFTKWLQDVFNVPLVIQMTDDEKYLWKDLTLDQAYSYAVENAKDIIACGFDINKTFIFSDLDYMGMSSGFYKNVVKIQKHVTFNQVKGIFGFTDSDCIGKISFPAIQAAPSFSNSFPQIFRDRTDIQCLIPCAIDQDPYFRMTRDVAPRIGYPKPALLHSTFFPALQGAQTKMSASDPNSSIFLTDTAKQIKTKVNKHAFSGGRDTIEEHRQFGGNCDVDVSFMYLTFFLEDDDKLEQIRKDYTSGAMLTGELKKALIEVLQPLIAEHQARRKEVTDEIVKEFMTPRKLSFDFQ

SEQ ID NO: 20508 - protein, 122 aa, Homo sapiens
LLHSTFFPALQGAQTKMSASDPNSSIFLTDTAKQIKTKVNKHAFSGGRDTIEEHRQFGGNCDVDVSFMYLTFFLEDDDKLEQIRKVSREPQGPTAAFCHPLLPMGPGRLQQPGMKAWSEVLN

SEQ ID NO: 20509 - protein, 181 aa, Homo sapiens
MPNSEPASLLELFNSIATQGELVRSLKAGNASKDEIDSAVKMLVSLKMSYKAAAGEDYKADCPPGNPAPTSNHGPDATEAEEDFVDPWTVQTSSAKGIDYDKLIVRFGSSKIDKELINRIERATGQRPHHFLRRGIFFSHRDMNQVLDAYENKKPFYLYTGRGPSSEAMHVGHLIPFIFTK

SEQ ID NO: 20510 - protein, 154 aa, Homo sapiens
LARLGRDEIDSAVKMLVSLKMSYKAAAGEDYKADCPPGNPAPTSNHGPDATEAEEDFVDPWTVQTSSAKGIDYDKLIVRFGSSKIDKELINRIERATGQRPHHFLRRGIFFSHRDMNQVLDAYENKKPFYLYTGRGPSSEAMHVGHLIPFIFTK

SEQ ID NO: 20511 - protein, 106 aa, Homo sapiens
MPNSEPASLLELFNSIATQGELVRSLKAGNASKDEIDSAVKMLVSLKMSYKAAAGEDYKADCPPGNPAPTSNHGPDATEAEEDFVDPWTVQTSSAKGIDYDKLIEI

SEQ ID NO: 20512 - protein, 117 aa, Homo sapiens
MPNKNKKEKESPKAGKSGKSSKEGQDTVESEQISVRKNSLVAVPSTVSAKIKVPVSQPIVKKDKRQNSSRFSASNNRELQKLPSLKAFSSLAVCLAFHHLEEISIISTSGVCTMLCL

SEQ ID NO: 20513 - protein, 7 aa, Homo sapiens
MEAGFLP

SEQ ID NO: 20514 - protein, 59 aa, Homo sapiens
LLSAFYSGVECSAAETRHSAHLFRGTAPELLLKEQTPGLTFHLIFGARTSREIHVQAAF

SEQ ID NO: 20515 - protein, 26 aa, Homo sapiens
MFKLHFRHSWQEYFRGKRKLTIGKDS

SEQ ID NO: 20516 - protein, 15 aa, Homo sapiens
LTNDWEDHLAVKVSD

SEQ ID NO: 20517 - protein, 632 aa, Homo sapiens
VREPGLQPSRDFPAGGSRGGRRLFPAPRHGAARGAERCGPRRRTRPAPLSRPSGDGPRELLFPKMESSKKMDSPGALQTNPPLKLHTDRSAGTPVFVPEQGGYKEKFVKTVEDKYKCEKCHLVLCSPKQTECGHRFCESCMAALLSSSSPKCTACQESIVKDKVFKDNCCKREILALQIYCRNESRGCAEQLMLGHLLVHLKNDCHFEELPCVRPDCKEKVLRKDLRDHVEKACKYREATCSHCKSQVPMIALQKHEDTDCPCVVVSCPHKCSVQTLLRSELSAHLSECVNAPSTCSFKRYGCVFQGTNQQIKAHEASSAVQHVNLLKEWSNSLEKKVSLLQNESVEKNKSIQSLHNQICSFEIEIERQKEMLRNNESKILHLQRVIDSQAEKLKELDKEIRPFRQNWEEADSMKSSVESLQNRVTELESVDKSAGQVARNTGLLESQLSRHDQMLSVHDIRLADMDLRFQVLETASYNGVLIWKIRDYKRRKQEAVMGKTLSLYSQPFYTGYFGYKMCARVYLNGDGMGKGTHLSLFFVIMRGEYDALLPWPFKQKVTLMLMDQGSSRRHLGDAFKPDPNSSSFKKPTGEMNIASGCPVFVAQTVLENGTYIKDDTIFIKVIVDTSDLPDP

SEQ ID NO: 20518 - protein, 501 aa, Homo sapiens
LSRPSGDGPRELLFPKMESSKKMDSPGALQTNPPLKLHTDRSAGTPVFVPEQGGYKEKFVKTVEDKYKCEKCHLVLCSPKQTECGHRFCESCMAALLSSSSPKCTACQESIVKDKVFKDNCCKREILALQIYCRNESRGCAEQLMLGHLLVHLKNDCHFEELPCVRPDCKEKVLRKDLRDHVEKACKYREATCSHCKSQVPMIALQVSLLQNESVEKNKSIQSLHNQICSFEIEIERQKEMLRNNESKILHLQRVIDSQAEKLKELDKEIRPFRQNWEEADSMKSSVESLQNRVTELESVDKSAGQVARNTGLLESQLSRHDQMLSVHDIRLADMDLRFQVLETASYNGVLIWKIRDYKRRKQEAVMGKTLSLYSQPFYTGYFGYKMCARVYLNGDGMGKGTHLSLFFVIMRGEYDALLPWPFKQKVTLMLMDQGSSRRHLGDAFKPDPNSSSFKKPTGEMNIASGCPVFVAQTVLENGTYIKDDTIFIKVIVDTSDLPDP

SEQ ID NO: 20519 - protein, 563 aa, Homo sapiens
LAPYSSKDRCPDRRELLFPKMESSKKMDSPGALQTNPPLKLHTDRSAGTPVFVPEQGGYKEKFVKTVEDKYKCEKCHLVLCSPKQTECGHRFCESCMAALLSSSSPKCTACQESIVKDKVFKDNCCKREILALQIYCRNESRGCAEQLMLGHLLVHLKNDCHFEELPCVRPDCKEKVLRKDLRDHVEKACKYREATCSHCKSQVPMIALQKHEDTDCPCVVVSCPHKCSVQTLLRSEGTNQQIKAHEASSAVQHVNLLKEWSNSLEKKVSLLQNESVEKNKSIQSLHNQICSFEIEIERQKEMLRNNESKILHLQRVIDSQAEKLKELDKEIRPFRQNWEEADSMKSSVESLQNRVTELESVDKSAGQVARNTGLLESQLSRHDQMLSVHDIRLADMDLRFQVLETASYNGVLIWKIRDYKRRKQEAVMGKTLSLYSQPFYTGYFGYKMCARVYLNGDGMGKGTHLSLFFVIMRGEYDALLPWPFKQKVTLMLMDQGSSRRHLGDAFKPDPNSSSFKKPTGEMNIASGCPVFVAQTVLENGTYIKDDTIFIKVIVDTSDLPDP

SEQ ID NO: 20520 - protein, 588 aa, Homo sapiens
LAPYSSKDRCPDRRELLFPKMESSKKMDSPGALQTNPPLKLHTDRSAGTPVFVPEQGGYKEKFVKTVEDKYKCEKCHLVLCSPKQTECGHRFCESCMAALLSSSSPKCTACQESIVKDKVFKDNCCKREILALQIYCRNESRGCAEQLMLGHLLVHLKNDCHFEELPCVRPDCKEKVLRKDLRDHVEKACKYREATCSHCKSQVPMIALQKHEDTDCPCVVVSCPHKCSVQTLLRSELSAHLSECVNAPSTCSFKRYGCVFQGTNQQIKAHEASSAVQHVNLLKEWSNSLEKKVSLLQNESVEKNKSIQSLHNQICSFEIEIERQKEMLRNNESKILHLQRVIDSQAEKLKELDKEIRPFRQNWEEADSMKSSVESLQNRVTELESVDKSAGQVARNTGLLESQLSRHDQMLSVHDIRLADMDLRFQVLETASYNGVLIWKIRDYKRRKQEAVMGKTLSLYSQPFYTGYFGYKMCARVYLNGDGMGKGTHLSLFFVIMRGEYDALLPWPFKQKVTLMLMDQGSSRRHLGDAFKPDPNSSSFKKPTGEMNIASGCPVFVAQTVLENGTYIKDDTIFIKVIVDTSDLPDP

SEQ ID NO: 20521 - protein, 673 aa, Homo sapiens
LPRGPQKLQSTSEAESEASMSEASSEDLVPPLEAGAAPYREEEEAAKKKKEKKKKSKGLANVFCVFTKGKKKKGQPSSAEPEDAAGSRQGLDGPPPTVEELKAALERGQLEAARPLLALERELAAAAAAGGVSEEELVRRQSKVEALYELLRDQVLGVLRRPLEAPPERLRQALAVVAEQEREDRQAAAAGPGTSGLAATRPRRWLQLWRRGVAEAAEERMGQRPAAGAEVPESVFLHLGRTMKEDLEAVVERLKPLFPAEFGVVAAYAESYHQHFAAHLAAVAQFELCERDTYMLLLWVQNLYPNDIINSPKLVGELQGMGLGSLLPPRQIRLLEATFLSSEAANVRELMDRALELEARRWAEDVPPQRLDGHCHSELAIDIIQITSQAQAKAESITLDLGSQIKRVLLVELPAFLRSYQRAFNEFLERGKQLTNYRANVIANINNCLSFRMSMEQNWQVPQDTLSLLLGPLGELKSHGFDTLLQNLHEDLKPLFKRFTHTRWAAPVETLENIIATVDTRLPEFSELQGCFREELMEALHLHLVKEYIIQLSKGRLVLKTAEQQQQLAGYILANADTIQHFCTQHGSPATWLQPALPTLAEIIRLQDPSAIKIEVATYATCYPDFSKGHLSAILAIKGNLSNSEVKRIRSILDVSMGAQEPSRPLFSLIKVG

SEQ ID NO: 20522 - protein, 241 aa, Homo sapiens
LFKRFTHTRWAAPVETLENIIATVDTRLPEFSELQGCFREELMEALHLHLVKEYIIQLSKGRLVLKTAEQQQQLAGYILANADTIQHFCTQHGSPATWLQPALPTLAEIIRLQDPSAIKIEVATYATCYPDFSKGHLSAILAIKGNLSNSEVKRIRSILDVSMGAQEPSRPLFSLIKPRAAVSGIQQWWNGRQNWKRKKEKMSSRLAGAFRVLWRAVSTASIRRHIQVAPRPLQAGPAMGP

SEQ ID NO: 20523 - protein, 53 aa, Homo sapiens
MSVNVNRSVSDQFYRYKMPRLIAKVEGKGNGIKTVIVNMVDVAKALNRPPTCK

SEQ ID NO: 20524 - protein, 79 aa, Homo sapiens
LGAQTQFDVKNDRYIVNGSHEANKLQDMLDGFIKKFVLCPECENPETDLVSAFVVVERKSHIPASVIPLSHLPEKAEQM

SEQ ID NO: 20525 - protein, 96 aa, Homo sapiens
MDEISDHAKVLTLSDDLERTIEERVNILFDFVKKKKEEGVIDSSDKEIVAEAERLDVKAMGPLVLTEVLFNEKIREQIKKYRRHFLRVSKVLWIHK

SEQ ID NO: 20526 - protein, 241 aa, Homo sapiens
LPHRLGKMSVKEGAQRKWAALKEKLGPQDSDPTEANLESADPELCIRLLQMPSVVNYSGLRKRLEGSDGGWMVQFLEQSGLDLLLEALARLSGRGVARISDALLQLTCVSCVRAVMNSRQGIEYILSNQGYVRQLSQALDTSNVMVKKQVFELLAALCIYSPEGHVLTLDALDHYKTVCSQQYRFSIVMNELSGSDNVPYVVTLLSVINAVILGPEDLRARTQLRNEFIGLQLLDVLARLR

SEQ ID NO: 20527 - protein, 103 aa, Homo sapiens
LNSPKELRPLTRAAPAAAACTGPGAVMPKCPKCNKEVYFAERVTSLGKDWHRPCLKCEKCGKTLTSGGHAEHEGKPYCNHPCYAAMFGPKGFGRGGAESHTFK

SEQ ID NO: 20528 - protein, 79 aa, Homo sapiens
VHRALGRAGCKRRVRQWWVGAASCSVSPGPVCASAAERVTSLGKDWHRPCLKCEKCGKTLTSGGHAEVGGTHPGGRGQG

SEQ ID NO: 20529 - protein, 99 aa, Homo sapiens
VHRALGRAGCKRRVRQWWVGAASCSVSPGPVCASAAERVTSLGKDWHRPCLKCEKCGKTLTSGGHAEHEGKPYCNHPCYAAMFGPKGFGRGGAESHTFK

SEQ ID NO: 20530 - protein, 54 aa, Homo sapiens
VGPTLVAGARGDGTPSRPFSLQHEGKPYCNHPCYAAMFGPKGFGRGGAESHTFK

SEQ ID NO: 20531 - protein, 330 aa, Homo sapiens
LSLDSTPQDGNVVVACLVQGFFPQEPLSVTWSESGQNVTARNFPPSQDASGDLYTTSSQLTLPATQCPDGKSVTCHVKHYTNSSQDVTVPCRVPPPPPCCHPRLSLHRPALEDLLLGSEANLTCTLTGLRDASGATFTWTPSSGKSAVQGPPERDLCGCYSVSSVLPGCAQPWNHGETFTCTAAHPELKTPLTANITKSGNTFRPEVHLLPPPSEELALNELVTLTCLARGFSPKDVLVRWLQGSQELPREKYLTWASRQEPSQGTTTYAVTSILRVAAEDWKKGETFSCMVGHEALPLAFTQKTIDRMAGKPTHINVSVVMAEADGTCY

SEQ ID NO: 20532 - protein, 12 aa, Homo sapiens
LDSKAFPLGDQH

SEQ ID NO: 20533 - protein, 23 aa, Homo sapiens
VISTEHRGLTMEFWLSWVFLVAI

SEQ ID NO: 20534 - protein, 143 aa, Homo sapiens [sequence omitted]

SEQ ID NO: 20535 - protein, 244 aa, Homo sapiens
MAVIPESAWKHPDYVDDGLSGVCNGLEQPRKQQRSDLNGPVDNNNIPETKKVASFPSFVAVPGPCEPEDLIDGIIFAANYLGSTQLLSERNPSKNIRMMQAQEAVSRVKNSEGDAQTLTEVDLFISTQRIKVLNADTQETMMDHALRTISYIADIGNIVVLMARRRMPRSASQDCIETTPGAQEGKKQYKMICHVFESEDVSKPLPGHSPPKVHSPGRLQDPGAVETTLRWKASMLLLMFPVDQ

SEQ ID NO: 20536 - protein, 564 aa, Homo sapiens
VDVSEDQGKAVEVAGGRGRRSARRGRKAAERSSNLRAFGNWKTWWRTRVRTCILPQRVIDVSGMWDQRLVRLALLQHLRAFYGIKVKGVRGQCDRRRHETAATEIGGKIFGVPFNALPHSAVPEYGHIPSFLVDACTSLEDHIHTEGLFRKSGSVIRLKALKNKVDHGEGCLSSAPPCDIAGLLKQFFRELPEPILPADLHEALLKAQQLGTEEKNKATLLLSCLLADHTVHVLRYFFNFLRNVSLRSSENKMDSSNLAVIFAPNLLQTSEGHEKMSSNTEKKLRLQAAVVQTLIDYASDIGRVPDFILEKIPAMLGIDGLCATPSLEGFEEGEYETPGEYKRKRRQSVGDFVSGALNKFKPNRTPSITPQEERIAQLSESPVILTPNAKRTLPVDSSHGFSSKKRKSIKHNFNFELLPSNLFNSSSTPVSVHIDTSSEGSSQSSLSPVLIGGNHLITAGVPRRSKRIAGKKVCRVESGKAGCFSPKISHKEKVRRSLRLKFNLGKNGREVNGCSGVNRYESVGWRLANQQSLKNRIESVKTGLLFSPDVDEKLPKKGTFTYYC

SEQ ID NO: 20537 - protein, 536 aa, Homo sapiens
VDVSEDQGKAVEVAGGRGRRSARRGRKAAERSSNLRAFGNWKTWWRTRVRTCILPQRVIDVSGMWDQRLVRLALLQHLRAFYGIKVKGVRGQCDRRRHETAATEIGGKIFGVPFNALPHSAVPEYGHIPSFLVDACTSLEDHIHTEGLFRKSGSVIRLKALKNKVDHGEGCLSSAPPCDIAGLLKQFFRELPEPILPADLHEALLKAQQLGTEEKNKATLLLSCLLADHTVHVLRYFFNFLRNVSLRSSENKMDSSNLAVIFAPNLLQTSEGHEKMSSNTEKKLRLQAAVVQTLIDYASDIGRVPDFILEKIPAMLGIDGLCATPSLEGFEEGEYETPGEYKRKRRQSVGDFVSGALNKFKPNRTPSITPQEERIAQLSESPVILTPNAKRTLPVDSSHGFSSKKRKSIKHNFNFELLPSNLFNSSSTPVSGVPRRSKRIAGKKVCRVESGKAGCFSPKISHKEKVRRSLRLKFNLGKNGREVNGCSGVNRYESVGWRLANQQSLKNRIESVKTGLLFSPDVDEKLPKKGTFTYYC

SEQ ID NO: 20538 - protein, 1086 aa, Homo sapiens
VDVSEDQGKAVEVAGGRGRRSARRGRKAAERSSNLRAFGNWKTWWRTRVRTCILPQRVIDVSGMWDQRLVRLALLQHLRAFYGIKVKGVRGQCDRRRHETAATEIGGKIFGVPFNALPHSAVPEYGHIPSFLVDACTSLEDHIHTEGLFRKSGSVIRLKALKNKVDHGEGCLSSAPPCDIAGLLKQFFRELPEPILPADLHEALLKAQQLGTEEKNKATLLLSCLLADHTVHVLRYFFNFLRNVSLRSSENKMDSSNLAVIFAPNLLQTSEGHEKMSSNTEKKLRLQAAVVQTLIDYASDIGRVPDFILEKIPAMLGIDGLCATPSLEGFEEGEYETPGEYKRKRRQSVGDFVSGALNKFKPNRTPSITPQEERIAQLSESPVILTPNAKRTLPVDSSHGFSSKKRKSIKHNFNFELLPSNLFNSSSTPVSVHIDTSSEGSSQSSLSPVLIGGNHLITAGVPRRSKRIAGKKVCRVESGKAGCFSPKISHKEKVRRSLRLKFNLGKNGREVNGCSGVNRYESVGWRLANQQSLKNRIESVKTGLLFSPDVDEKLPKKGSEKISKSEETLLTPERLVGTNYRMSWTGPNNSSFQEVDANEASSMVENLEVENSLEPDIMVEKSPATSCELTPSNLNNKHNSNITSSPLSGDENNMTKETLVKVQKAFSESGSNLHALMNQRQSSVTNVGKVKLTEPSYLEDSPEENLFETNDLTIVESKEKYEHHTGKGEKCFSERDFSPLQTQTFNRETTIKCYSTQMKMEHEKDIHSNMPKDYLSKQEFSSDEEIKKQQSPKDKLNNKLKENENMMEGNLPKCAAHSKDEARSSFSQQSTCVVTNLSKPRPMRIAKQQSLETCEKTVSESSQMTEHRKVSDHIQWFNKLSLNEPNRIKVKSPLKFQRTPVRQSVRRINSLLEYSRQPTGHKLASLGDTASPLVKSVSCDGALSSCIESASKDSSVSCIKSGPKEQKSMSCEESNIGAISKSSMELPSKSFLKMRKHPDSVNASLRSTTVYKQKILSDGQVKVPLDDLTNHDIVKPVVNNNMGISSGINNRVLRRPSERGRAWYKGSPKHPIGKTQLLPTSKPVDL

SEQ ID NO: 20539 - protein, 13 aa, Homo sapiens
MALSLQPRTRGVS

SEQ ID NO: 20540 - protein, 203 aa, Homo sapiens
LLAFVFAAEPGAQLRLRGEMEPSQCVEELEDDVFQPEDGEPVTQPGSLLSADLFAQSLLDCPLSRLQLFPLTHCCGPGLRPTSQEDKATQTLSPASPSQGVMLPCGVTEEPQRLFYGNAGYRLPLPASFPAVLPIGEQPPEGQWQHQAEVQIARKLQCIADQFHRLHVQQHQQNQNRVWWQILLFLHNLALNGEENRNGAGPR

SEQ ID NO: 20541 - protein, 238 aa, Homo sapiens
LRLPPPAAARWAFSLLPNRVWASSPRVLVTLDPGAEPWHHDSEAETLSWSHPGEMEPSQCVEELEDDVFQPEDGEPVTQPGSLLSADLFAQSLLDCPLSRLQLFPLTHCCGPGLRPTSQEDKATQTLSPASPSQGVMLPCGVTEEPQRLFYGNAGYRLPLPASFPAVLPIGEQPPEGQWQHQAEVQIARKLQCIADQFHRLHVQQHQQNQNRVWWQILLFLHNLALNGEENRNGAGPR

SEQ ID NO: 20542 - protein, 192 aa, Homo sapiens
VRSGLLPPRPVPAAAAAPACASRLLPQPVWASSPRVLVTLDPGAEPWHHDSEAETLSWSHPGEMEPSQCVEELEDDVFQPEDGEPVTQPGSLLSADLFAQSLLDCPLSRLQLFPLTHCCGPGLRPTSQEDKATQTLSPASPSQGVMLPCGVTEEPQRLFYAPAEPKSCVVADPPLPAQPCFEWRREQERGRP

SEQ ID NO: 20543 - protein, 208 aa, Homo sapiens
LETIPHRAEWPPPAPACARRRRRPCLRLPPPAAARWAFSLLPNRVWASSPRVLVTLDPGAEPWHHDSEAETLSWSHPGEMEPSQCVEELEDDVFQPEDGEPVTQPGSLLSADLFAQSLLDCPLSRLQLFPLTHCCGPGLRPTSQEDKATQTLSPASPSQGVMLPCGVTEEPQRLFYAPAEPKSCVVADPPLPAQPCFEWRREQERGRP

SEQ ID NO: 20544 - protein, 143 aa, Homo sapiens
VAGLLGSRVRALVASVAPRAGCGRKPRRSVAQRKGLQQDEDLSQECRMAAVKKEGGALSEAMSLEGDEWELSKENVQPLRQGRIMSTLQGALAQESACNNTLQQQKRDGVSLFRPGWSAVARSWLTGSSASWVHANLLPQPPE

SEQ ID NO: 20545 - protein, 143 aa, Homo sapiens
VAGLLGSRVRALVASVAPRAGCGRKPRRSVAQRKGLQQDEDLSQECRMAAVKKEGGALSEAMSLEGDEWELSKENVQPLRQGRIMSTLQGALAQESACNNTLQQQKRAFEYEIRFYTGNDPLDVWDRYISWTEQNYPQGAFMQ

SEQ ID NO: 20546 - protein, 1097 aa, Homo sapiens
VAGLLGSRVRALVASVAPRAGCGRKPRRSVAQRKGLQQDEDLSQECRMAAVKKEGGALSEAMSLEGDEWELSKENVQPLRQGRIMSTLQGALAQESACNNTLQQQKRAFEYEIRFYTGNDPLDVWDRYISWTEQNYPQGGKESNMSTLLERAVEALQGEKRYYSDPRFLNLWLKLGRLCNEPLDMYSYLHNQGIGVSLAQFYISWAEEYEARENFRKADAIFQEGIQQKAEPLERLQSQHRQFQARVSRQTLLALEKEEEEEVFESSVPQRSTLAELKSKGKKTARAPIIRVGGALKAPSQNRGLQNPFPQQMQNNSRITVFDENADEASTAELSKPTVQPWIAPPMPRAKENELQAGPWNTGRSLEHRPRGNTASLIAVPAVLPSFTPYVEETARQPVMTPCKIEPSINHILSTRKPGKEEGDPLQRVQSHQQASEEKKEKMMYCKEKIYAGVGEFSFEEIRAEVFRKKLKEQREAELLTSAEKRAEMQKQIEEMEKKLKEIQTTQQERTGDQQEETMPTKETTKLQIASESQKIPGMTLSSSVCQVNCCARETSLAENIWQEQPHSKGPSVPFSIFDEFLLSEKKNKSPPADPPRVLAQRRPLAVLKTSESITSNEDVSPDVCDEFTGIEPLSEDAIITGFRNVTICPNPEDTCDFARAARFVSTPFHEIMSLKDLPSDPERLLPEEDLDVKTSEDQQTACGTIYSQTLSIKKLSPIIEDSREATHSSGFSGSSASVASTSSIKCLQIPEKLELTNETSENPTQSPWCSQYRRQLLKSLPELSASAELCIEDRPMPKLEIEKEIELGNEDYCIKREYLICEDYKLFWVAPRNSAELTVIKVSSQPVPWDFYINLKLKERLNEDFDHFCSCYQYQDGCIVWHQYINCFTLQDLLQHSEYITHEITVLIIYNLLTIVEMLHKAEIVHGDLSPRCLILRNRIHDPYDCNKNNQALKIVDFSYSVDLRVQLDVFTLSGFRTVQILEGQKILANCSSPYQVDLFGIADLAHLLLFKEHLQVFWDGSFWKLSQNISELKDGELWNKFFVRILNANDEATVSVLGELAAEMNGVFDTTFQSHLNKALWKVGKLTSPGALLFQ

SEQ ID NO: 20547 - protein, 1111 aa, Homo sapiens
VAGLLGSRVRALVASVAPRAGCGRKPRRSVAQRKGLQQDEDLSQECRMAAVKKEGGALSEAMSLEGDEWELSKENVQPLRQGRIMSTLQGALAQESACNNTLQQQKRAFEYEIRFYTGNDPLDVWDRWVFLFHKDNRNINRYISWTEQNYPQGGKESNMSTLLERAVEALQGEKRYYSDPRFLNLWLKLGRLCNEPLDMYSYLHNQGIGVSLAQFYISWAEEYEARENFRKADAIFQEGIQQKAEPLERLQSQHRQFQARVSRQTLLALEKEEEEEVFESSVPQRSTLAELKSKGKKTARAPIIRVGGALKAPSQNRGLQNPFPQQMQNNSRITVFDENADEASTAELSKPTVQPWIAPPMPRAKENELQAGPWNTGRSLEHRPRGNTASLIAVPAVLPSFTPYVEETARQPVMTPCKIEPSINHILSTRKPGKEEGDPLQRVQSHQQASEEKKEKMMYCKEKIYAGVGEFSFEEIRAEVFRKKLKEQREAELLTSAEKRAEMQKQIEEMEKKLKEIQTTQQERTGDQQEETMPTKETTKLQIASESQKIPGMTLSSSVCQVNCCARETSLAENIWQEQPHSKGPSVPFSIFDEFLLSEKKNKSPPADPPRVLAQRRPLAVLKTSESITSNEDVSPDVCDEFTGIEPLSEDAIITGFRNVTICPNPEDTCDFARAARFVSTPFHEIMSLKDLPSDPERLLPEEDLDVKTSEDQQTACGTIYSQTLSIKKLSPIIEDSREATHSSGFSGSSASVASTSSIKCLQIPEKLELTNETSENPTQSPWCSQYRRQLLKSLPELSASAELCIEDRPMPKLEIEKEIELGNEDYCIKREYLICEDYKLFWVAPRNSAELTVIKVSSQPVPWDFYINLKLKERLNEDFDHFCSCYQYQDGCIVWHQYINCFTLQDLLQHSEYITHEITVLIIYNLLTIVEMLHKAEIVHGDLSPRCLILRNRIHDPYDCNKNNQALKIVDFSYSVDLRVQLDVFTLSGFRTVQILEGQKILANCSSPYQVDLFGIADLAHLLLFKEHLQVFWDGSFWKLSQNISELKDGELWNKFFVRILNANDEATVSVLGELAAEMNGVFDTTFQSHLNKALWKVGKLTSPGALLFQ

SEQ ID NO: 20548 - protein, 140 aa, Homo sapiens
VSRQTLLALEKEEEEEVFESSVPQRSTLAELKSKGKKTARAPIIRVGGALKAPSQNRGLQNPFPQQMQNNSRITVFDENADEASTAELSKPTVQPWIAPPMPRAKENELQAGPWNTGRSLEHRVRTLRSSALLTQQRLHI

SEQ ID NO: 20549 - protein, 69 aa, Homo sapiens
LKIVDFSYSVDLRVQLDVFTLSGFRTVQILEGQKILANCSSPYQACGGLAQQGPRSSLSSAPKREAQCG

SEQ ID NO: 20550 - protein, 114 aa, Homo sapiens
LWNKFFVRILNANDEATVSVLGELAAEMNGVFDTTFQSHLNKALWKGVPLPGLETSTSLQWRTQDPAAQKEQPRPAEDWPSKVPGLPSPQRLRERPSAGEESRGRGGRRRKTVE

SEQ ID NO: 20551 - protein, 236 aa, Homo sapiens
LSPRGLPRSLPREESAGAAPGEGPEGVDGRVRELKDRLELELLRQGEEQYECVLKRKEQHVAEQISKMMELAREKQAAELKALKETSENDTKEMKKKLETKRLERIQGMTKVTTDKMAQERLKREINNSHIQEVVQVIKQMTENLERHQEKLEEKQAACLEQIREMEKQFQKEALAEYEARMKGLEAEVKESVRACLRTCFPSEAKDKPERACECPPELCEQDPLIAKADAQESRL

SEQ ID NO: 20552 - protein, 1208 aa, Homo sapiens
LASFLPFCLPVSAEILQRGTLGTMSLLNPVLLPPKVKAYLSQGERFIKWDDETTVASPVILRVDPKGYYLYWTYQSKEMEFLDITSIRDTRFGKFAKMPKSQKLRDVFNMDFPDNSFLLKTLTVVSGPDMVDLTFHNFVSYKENVGKAWAEDVLALVKHPLTANASRSTFLDKILVKLKMQLNSEGKIPVKNFFQMFPADRKRVEAALSACHLPKGKNDAINPEDFPEPVYKSFLMSLCPRPEIDEIFTSYHAKAKPYMTKEHLTKFINQKQRDSRLNSLLFPPARPDQVQGLIDKYEPSGINAQRGQLSPEGMVWFLCGPENSVLAQDKLLLHHDMTQPLNHYFINSSHNTYLTAGQFSGLSSAEMYRQVLLSGCRCVELDCWKGKPPDEEPIITHGFTMTTDIFFKEAIEAIAESAFKTSPYPIILSFENHVDSPRQQAKMAEYCRTIFGDMLLTEPLEKFPLKPGVPLPSPEDLRGKILIKNKKNQFSGPTSSSKDTGGEAEGSSPPSAPAGEGTVWAGEEGTELEEEEVEEEEEEESGNLDEEEIKKMQSDEGTAGLEVTAYEEMSSLVNYIQPTKFVSFEFSAQKNRSYVISSFTELKAYDLLSKASVQFVDYNKRQMSRIYPKGTRMDSSNYMPQMFWNAGCQMVALNFQTMDLPMQQNMAVFEFNGQSGYLLKHEFMRRPDKQFNPFSVDRIDVVVATTLSITVISGQFLSERSVRTYVEVELFGLPGDPKRRYRTKLSPSTNSINPVWKEEPFVFEKILMPELASLRVAVMEEGNKFLGHRIIPINALNSGYHHLCLHSESNMPLTMPALFIFLEMKDYIPGAWADLTVALANPIKFFSAHDTKSVKLKEAMGGLPEKPFPLASPVASQVNGALAPTSNGSPAARAGAREEAMKEAAEPRTASLEELRELKGVVKLQRRHEKELRELERRGARRWEELLQRGAAQLAELGPPGVGGVGACKLGPGKGSRKKRSLPREESAGAAPGEGPEGVDGRVRELKDRLELELLRQGEEQYECVLKRKEQHVAEQISKMMELAREKQAAELKALKETSENDTKEMKKKLETKRLERIQGMTKVTTDKMAQERLKREINNSHIQEVVQVIKQMTENLERHQEKLEEKQAACLEQIREMEKQFQKEALAEYEARMKGLEAEVKESVRACLRTCFPSEAKDKPERACECPPELCEQDPLIAKADAQESRL

SEQ ID NO: 20553 - protein, 1204 aa, Homo sapiens
LASFLPFCLPVSAEILQRGTLGTMSLLNPVLLPPKVKAYLSQGERFIKWDDETTVASPVILRVDPKGYYLYWTYQSKEMEFLDITSIRDTRFGKFAKMPKSQKLRDVFNMDFPDNSFLLKTLTVVSGPDMVDLTFHNFVSYKENVGKAWAEDVLALVKHPLTANASRSTFLDKILVKLKMQLNSEGKIPVKNFFQMFPADRKRVEAALSACHLPKGKNDAINPEDFPEPVYKSFLMSLCPRPEIDEIFTSYHAKAKPYMTKEHLTKFINQKQRDSRLNSLLFPPARPDQVQGLIDKYEPSGINAQRGQLSPEGMVWFLCGPENSVLAQDKLLLHHDMTQPLNHYFINSSHNTYLTAGQFSGLSSAEMYRQVLLSGCRCVELDCWKGKPPDEEPIITHGFTMTTDIFFKEAIEAIAESAFKTSPYPIILSFENHVDSPRQQAKMAEYCRTIFGDMLLTEPLEKFPLKPGVPLPSPEDLRGKILIKNKKNQFSGPTSSSKDTGGEAEGSSPPSAPAVWAGEEGTELEEEEVEEEEEEESGNLDEEEIKKMQSDEGTAGLEVTAYEEMSSLVNYIQPTKFVSFEFSAQKNRSYVISSFTELKAYDLLSKASVQFVDYNKRQMSRIYPKGTRMDSSNYMPQMFWNAGCQMVALNFQTMDLPMQQNMAVFEFNGQSGYLLKHEFMRRPDKQFNPFSVDRIDVVVATTLSITVISGQFLSERSVRTYVEVELFGLPGDPKRRYRTKLSPSTNSINPVWKEEPFVFEKILMPELASLRVAVMEEGNKFLGHRIIPINALNSGYHHLCLHSESNMPLTMPALFIFLEMKDYIPGAWADLTVALANPIKFFSAHDTKSVKLKEAMGGLPEKPFPLASPVASQVNGALAPTSNGSPAARAGAREEAMKEAAEPRTASLEELRELKGVVKLQRRHEKELRELERRGARRWEELLQRGAAQLAELGPPGVGGVGACKLGPGKGSRKKRSLPREESAGAAPGEGPEGVDGRVRELKDRLELELLRQGEEQYECVLKRKEQHVAEQISKMMELAREKQAAELKALKETSENDTKEMKKKLETKRLERIQGMTKVTTDKMAQERLKREINNSHIQEVVQVIKQMTENLERHQEKLEEKQAACLEQIREMEKQFQKEALAEYEARMKGLEAEVKESVRACLRTCFPSEAKDKPERACECPPELCEQDPLIAKADAQESRL

SEQ ID NO: 20554 - protein, 1193 aa, Homo sapiens
LASFLPFCLPVSAEILQRGTLGTMSLLNPVLLPPKVKAYLSQGERFIKWDDETTVASPVILRVDPKGYYLYWTYQSKEMEFLDITSIRDTRFGKFAKMPKSQKLRDVFNMDFPDNSFLLKTLTVVSGPDMVDLTFHNFVSYKENVGKAWAEDVLALVKHPLTANASRSTFLDKILVKLKMQLNSEGKIPVKNFFQMFPADRKRVEAALSACHLPKGKNDAINPEDFPEPVYKSFLMSLCPRPEIDEIFTSYHAKAKPYMTKEHLTKFINQKQRDSRLNSLLFPPARPDQVQGLIDKYEPSGINAQRGQLSPEGMVWFLCGPENSVLAQDKLLLHHDMTQPLNHYFINSSHNTYLTAGQFSGLSSAEMYRQVLLSGCRCVELDCWKGKPPDEEPIITHGFTMTTDIFFKEAIEAIAESAFKTSPYPIILSFENHVDSPRQQAKMAEYCRTIFGDMLLTEPLEKFPLKPGVPLPSPEDLRGKILIKNKKNQFSGPTSSSKDTGGEAEGSSPPSAPAGEGTVWAGEEGTELEEEEVEEEEEEESGNLDEEEIKKMQSDEGTAGLEVTAYEEMSSLVNYIQPTKFVSFEFSAQKNRSYVISSFTELKAYDLLSKASVQFVDYNKRQMSRIYPKGTRMDSSNYMPQMFWNAGCQMVALNFQTMDLPMQQNMAVFEFNGQSGYLLKHEFMRRPDKQFNPFSVDRIDVVVATTLSITVISGQFLSERSVRTYVEVELFGLPGDPKRRYRTKLSPSTNSINPVWKEEPFVFEKILMPELASLRVAVMEEGNKFLGHRIIPINALNSGYHHLCLHSESNMPLTMPALFIFLEMKDYIPGAWADLTVALANPIKFFSAHDTKSVKLKEAMGGLPEKPFPLASPVASQVNGALAPTSNGSPEPRTASLEELRELKGVVKLQRRHEKELRELERRGARRWEELLQRGAAQLAELGPPGVGGVGACKLGPGKGSRKKRSLPREESAGAAPGEGPEGVDGRVRELKDRLELELLRQGEEQYECVLKRKEQHVAEQISKMMELAREKQAAELKALKETSENDTKEMKKKLETKRLERIQGMTKVTTDKMAQERLKREINNSHIQEVVQVIKQMTENLERHQEKLEEKQAACLEQIREMEKQFQKEALAEYEARMKGLEAEVKESVRACLRTCFPSEAKDKPERACECPPELCEQDPLIAKADAQESRL

SEQ ID NO: 20555 - protein, 894 aa, Homo sapiens [sequence omitted]

SEQ ID NO: 20556 - protein, 22 aa, Homo sapiens
LRAGPAGSWGSAVPPRYDDQCG

SEQ ID NO: 20557 - protein, 68 aa, Homo sapiens
MTSVVKTVYSLQPPSALSGGQPADTQTRATSKSLLPVRSKEVDVSKQLHSGGPENDVTKITKLRRENG

SEQ ID NO: 20558 - protein, 55 aa, Homo sapiens
LKDLTQKVELLEKFRDNCLAILESKGLDPALGSETLASRQESTTDHMDSMVRAWV

SEQ ID NO: 20559 - protein, 70 aa, Homo sapiens
LIQLLLETLQEELKLFNETAKKQMEELQALKVKLEMKEERVRFLEQQTLCNNQVNDLTTALKEMEQLLEM

SEQ ID NO: 20560 - protein, 56 aa, Homo sapiens
LCMCCFLLECLSMQALKVKLEMKEERVRFLEQQTLCNNQVNDLTTALKEMEQLLEM

SEQ ID NO: 20561 - protein, 152 aa, Homo sapiens
LLEAAVCFRSKETQSVWTPNKSAQNLSRRFAAAEKFSSKMDGVSSEANEENDNIERPVRRRHSSILKPPRSPLQDLRGGNERVQESNALRNKKNSRRVSFADTIKVFQTESHMKIVRKSEMEETGENLLLIQNKKLEDNYCEITVFNYRTYP

SEQ ID NO: 20562 - protein, 1785 aa, Homo sapiens
LLEAAVCFRSKETQSVWTPNKSAQNLSRRFAAAEKFSSKMDGVSSEANEENDNIERPVRRRHSSILKPPRSPLQDLRGGNERVQESNALRNKKNSRRVSFADTIKVFQTESHMKIVRKSEMEETETGENLLLIQNKKLEDNYCEITGMNTLLSAPIHTQMQQKEFSIIEHTRERKHANDQTVIFSDENQMDLTSSHTVMITKGLLDNPISEKSTKIDTTSFLANLKLHTEDSRMKKEVNFSVDQNTSSENKIDFNDFIKRLKTGKCSAFPDVPDKENFEIPIYSKEPNSASSTHQMHVSLKEDENNSNITRLFREKDDGMNFTQCHTANIQTLIPTSSETNSRESKGNDITIYGNDFMDLTFNHTLQILPATGNFSEIENQTQNAMDVTTGYGTKASGNKTVFKSKQNTAFQDLSINSADKIHITRSHIMGAETHIVSQTCNQDARILAMTPESIYSNPSIQGCKTVFYSSCNDAMEMTKCLSNMREEKNLLKHDSNYAKMYCNPDAMSSLTEKTIYSGEENMDITKSHTVAIDNQIFKQDQSNVQIAAAPTPEKEMMLQNLMTTSEDGKMNVNCNSVPHVSKERIQQSLSNPLSISLTDRKTELLSGENMDLTESHTSNLGSQVPLAAYNLAPESTSESHSQSKSSSDECEEITKSRNEPFQRSDIIAKNSLTDTWNKDKDWVLKILPYLDKDSPQSADCNQEIATSHNIVYCGGVLDKQITNRNTVSWEQSLFSTTKPLFSSGQFSMKNHDTAISSHTVKSVLGQNSKLAEPLRKSLSNPTPDYCHDKMIICSEEEQNMDLTKSHTVVIGFGPSELQELGKTNLEHTTGQLTTMNRQIAVKVEKCGKSPIEKSGVLKSNCIMDVLEDESVQKPKFPKEKQNVKIWGRKSVGGPKIDKTIVFSEDDKNDMDITKSYTIEINHRPLLEKRDCHLVPLAGTSETILYTCRQDDMEITRSHTTALECKTVSPDEITTRPMDKTVVFVDNHVELEMTESHTVFIDYQEKERTDRPNFELSQRKSLGTPTVICTPTEESVFFPGNGESDRLVANDSQLTPLEEWSNNRGPVEVADNMELSKSATCKNIKDVQSPGFLNEPLSSKSQRRKSLKLKNDKTIVFSENHKNDMDITQSCMVEIDNESALEDKEDFHLAGASKTILYSCGQDDMEITRSHTTALECKTLLPNEIAIRPMDKTVLFTDNYSDLEVTDSHTVFIDCQATEKILEENPKFGIGKGKNLGVSFPKDNSCVQEIAEKQALAVGNKIVLHTEQKQQLFAATNRTTNEIIKFHSAAMDEKVIGKVVDQACTLEKAQVESCQLNNRDRRNVDFTSSHATAVCGSSDNYSCLPNVISCTDNLEGSAMLLCDKDEEKANYCPVQNDLAYANDFASEYYLESEGQPLSAPCPLLEKEEVIQTSTKGQLDCVITLHKDQDLIKDPRNLLANQTLVYSQDLGEMTKLNSKRVSFKLPKDQMKVYVDDIYVIPQPHFSTDQPPLPKKGQSSINKEEVILSKAGNKSLNIIENSSAPICENKPKILNSEEWFAAACKKELKENIQTTNYNTALDFHSNSDVTKQVIQTHVNAGEAPDPVITSNVPCFHSIKPNLNNLNGKTGEFLAFQTVHLPPLPEQLLELGNKAHNDMHIVQATEIHNINIISSNAKDSRDEENKKSHNGAETTSLPPKTVFKDKVRRCSLGIFLPRLPNKRNCSVTGIDDLEQIPADTTDINHLETQPVSSKDSGIGSVAGKLNLSPSQYINEENLPVYPDEINSSDSINIETEEKNVGTRRRRYS

SEQ ID NO: 20563 - protein, 2381 aa, Homo sapiens
LLEAAVCFRSKETQSVWTPNKSAQNLSRRFAAAEKFSSKMDGVSSEANEENDNIERPVRRRHSSILKPPRSPLQDLRGGNERVQESNALRNKKNSRRVSFADTIKVFQTESHMKIVRKSEMEGCSAMVPSQLQLLPPGFKRFSCLSLPETETGENLLLIQNKKLEDNYCEITGMNTLLSAPIHTQMQQKEFSIIEHTRERKHANDQTVIFSDENQMDLTSSHTVMITKGLLDNPISEKSTKIDTTSFLANLKLHTEDSRMKKEVNFSVDQNTSSENKIDFNDFIKRLKTGKCSAFPDVPDKENFEIPIYSKEPNSASSTHQMHVSLKEDENNSNITRLFREKDDGMNFTQCHTANIQTLIPTSSETNSRESKGNDITIYGNDFMDLTFNHTLQILPATGNFSEIENQTQNAMDVTTGYGTKASGNKTVFKSKQNTAFQDLSINSADKIHITRSHIMGAETHIVSQTCNQDARILAMTPESIYSNPSIQGCKTVFYSSCNDAMEMTKCLSNMREEKNLLKHDSNYAKMYCNPDAMSSLTEKTIYSGEENMDITKSHTVAIDNQIFKQDQSNVQIAAAPTPEKEMMLQNLMTTSEDGKMNVNCNSVPHVSKERIQQSLSNPLSISLTDRKTELLSGENMDLTESHTSNLGSQVPLAAYNLAPESTSESHSQSKSSSDECEEITKSRNEPFQRSDIIAKNSLTDTWNKDKDWVLKILPYLDKDSPQSADCNQEIATSHNIVYCGGVLDKQITNRNTVSWEQSLFSTTKPLFSSGQFSMKNHDTAISSHTVKSVLGQNSKLAEPLRKSLSNPTPDYCHDKMIICSEEEQNMDLTKSHTVVIGFGPSELQELGKTNLEHTTGQLTTMNRQIAVKVEKCGKSPIEKSGVLKSNCIMDVLEDESVQKPKFPKEKQNVKIWGRKSVGGPKIDKTIVFSEDDKNDMDITKSYTIEINHRPLLEKRDCHLVPLAGTSETILYTCRQDDMEITRSHTTALECKTVSPDEITTRPMDKTVVFVDNHVELEMTESHTVFIDYQEKERTDRPNFELSQRKSLGTPTVICTPTEESVFFPGNGESDRLVANDSQLTPLEEWSNNRGPVEVADNMELSKSATCKNIKDVQSPGFLNEPLSSKSQRRKSLKLKNDKTIVFSENHKNDMDITQSCMVEIDNESALEDKEDFHLAGASKTILYSCGQDDMEITRSHTTALECKTLLPNEIAIRPMDKTVLFTDNYSDLEVTDSHTVFIDCQATEKILEENPKFGIGKGKNLGVSFPKDNSCVQEIAEKQALAVGNKIVLHTEQKQQLFAATNRTTNEIIKFHSAAMDEKVIGKVVDQACTLEKAQVESCQLNNRDRRNVDFTSSHATAVCGSSDNYSCLPNVISCTDNLEGSAMLLCDKDEEKANYCPVQNDLAYANDFASEYYLESEGQPLSAPCPLLEKEEVIQTSTKGQLDCVITLHKDQDLIKDPRNLLANQTLVYSQDLGEMTKLNSKRVSFKLPKDQMKVYVDDIYVIPQPHFSTDQPPLPKKGQSSINKEEVILSKAGNKSLNIIENSSAPICENKPKILNSEEWFAAACKKELKENIQTTNYNTALDFHSNSDVTKQVIQTHVNAGEAPDPVITSNVPCFHSIKPNLNNLNGKTGEFLAFQTVHLPPLPEQLLELGNKAHNDMHIVQATEIHNINIISSNAKDSRDEENKKSHNGAETTSLPPKTVFKDKVRRCSLGIFLPRLPNKRNCSVTGIDDLEQIPADTTDINHLETQPVSSKDSGIGSVAGKLNLSPSQYINEENLPVYPDEINSSDSINIETEEKALIETYQKEISPYENKMGKTCNSQKRTWVQEEEDIHKEKKIRKNEIKFSDTTQDREIFDHHTEEDIDKSANSVLIKNLSRTPSSCSSSLDSIKADGTSLDFSTYRSSQMESQFLRDTICEESLREKLQDGRITIREFFILLQVHILIQKPRQSNLPGNFTVNTPPTPEDLMLSQYVYRPKIQIYREDCEARRQKIEELKLSASNQDKLLVDINKNLWEKMRHCSDKELKAFGIYLNKIKSCFTKMTKVFTHQGKVALYGKLVQSAQNEREKLQIKIDEMDKILKKIDNCLTEMETETKNLEDEEKNNPVEEWDSEMRAAEKELEQLKTEEEELQRNLLELEVQKEQTLAQIDFMQKQRNRTEELLDQLSLSEWDVVEWSDDQAVFTFVYDTIQLTITFEESVVGFPFLDKRYRKIVDVNFQSLLDEDQAPPSSLLVHKLIFQYVEEKESWKKTCTTQHQLPKMLEEFSLVVHHCRLLGEEIEYLKRWGPNYNLMNIDINNNELRLLFSSSAAFAKFEITLFLSAYYPSVPLPSTIQNHVGNTSQDDIATILSKVPLENNYLKNVVKQIYQDLFQDCHFYH

SEQ ID NO: 20564 - protein, 2355 aa, Homo sapiens
LLEAAVCFRSKETQSVWTPNKSAQNLSRRFAAAEKFSSKMDGVSSEANEENDNIERPVRRRHSSILKPPRSPLQDLRGGNERVQESNALRNKKNSRRVSFADTIKVFQTESHMKIVRKSEMEETETGENLLLIQNKKLEDNYCEITGMNTLLSAPIHTQMQQKEFSIIEHTRERKHANDQTVIFSDENQMDLTSSHTVMITKGLLDNPISEKSTKIDTTSFLANLKLHTEDSRMKKEVNFSVDQNTSSENKIDFNDFIKRLKTGKCSAFPDVPDKENFEIPIYSKEPNSASSTHQMHVSLKEDENNSNITRLFREKDDGMNFTQCHTANIQTLIPTSSETNSRESKGNDITIYGNDFMDLTFNHTLQILPATGNFSEIENQTQNAMDVTTGYGTKASGNKTVFKSKQNTAFQDLSINSADKIHITRSHIMGAETHIVSQTCNQDARILAMTPESIYSNPSIQGCKTVFYSSCNDAMEMTKCLSNMREEKNLLKHDSNYAKMYCNPDAMSSLTEKTIYSGEENMDITKSHTVAIDNQIFKQDQSNVQIAAAPTPEKEMMLQNLMTTSEDGKMNVNCNSVPHVSKERIQQSLSNPLSISLTDRKTELLSGENMDLTESHTSNLGSQVPLAAYNLAPESTSESHSQSKSSSDECEEITKSRNEPFQRSDIIAKNSLTDTWNKDKDWVLKILPYLDKDSPQSADCNQEIATSHNIVYCGGVLDKQITNRNTVSWEQSLFSTTKPLFSSGQFSMKNHDTAISSHTVKSVLGQNSKLAEPLRKSLSNPTPDYCHDKMIICSEEEQNMDLTKSHTVVIGFGPSELQELGKTNLEHTTGQLTTMNRQIAVKVEKCGKSPIEKSGVLKSNCIMDVLEDESVQKPKFPKEKQNVKIWGRKSVGGPKIDKTIVFSEDDKNDMDITKSYTIEINHRPLLEKRDCHLVPLAGTSETILYTCRQDDMEITRSHTTALECKTVSPDEITTRPMDKTVVFVDNHVELEMTESHTVFIDYQEKERTDRPNFELSQRKSLGTPTVICTPTEESVFFPGNGESDRLVANDSQLTPLEEWSNNRGPVEVADNMELSKSATCKNIKDVQSPGFLNEPLSSKSQRRKSLKLKNDKTIVFSENHKNDMDITQSCMVEIDNESALEDKEDFHLAGASKTILYSCGQDDMEITRSHTTALECKTLLPNEIAIRPMDKTVLFTDNYSDLEVTDSHTVFIDCQATEKILEENPKFGIGKGKNLGVSFPKDNSCVQEIAEKQALAVGNKIVLHTEQKQQLFAATNRTTNEIIKFHSAAMDEKVIGKVVDQACTLEKAQVESCQLNNRDRRNVDFTSSHATAVCGSSDNYSCLPNVISCTDNLEGSAMLLCDKDEEKANYCPVQNDLAYANDFASEYYLESEGQPLSAPCPLLEKEEVIQTSTKGQLDCVITLHKDQDLIKDPRNLLANQTLVYSQDLGEMTKLNSKRVSFKLPKDQMKVYVDDIYVIPQPHFSTDQPPLPKKGQSSINKEEVILSKAGNKSLNIIENSSAPICENKPKILNSEEWFAAACKKELKENIQTTNYNTALDFHSNSDVTKQVIQTHVNAGEAPDPVITSNVPCFHSIKPNLNNLNGKTGEFLAFQTVHLPPLPEQLLELGNKAHNDMHIVQATEIHNINIISSNAKDSRDEENKKSHNGAETTSLPPKTVFKDKVRRCSLGIFLPRLPNKRNCSVTGIDDLEQIPADTTDINHLETQPVSSKDSGIGSVAGKLNLSPSQYINEENLPVYPDEINSSDSINIETEEKALIETYQKEISPYENKMGKTCNSQKRTWVQEEEDIHKEKKIRKNEIKFSDTTQDREIFDHHTEEDIDKSANSVLIKNLSRTPSSCSSSLDSIKADGTSLDFSTYRSSQMESQFLRDTICEESLREKLQDGRITIREFFILLQVHILIQKPRQSNLPGNFTVNTPPTPEDLMLSQYVYRPKIQIYREDCEARRQKIEELKLSASNQDKLLVDINKNLWEKMRHCSDKELKAFGIYLNKIKSCFTKMTKVFTHQGKVALYGKLVQSAQNEREKLQIKIDEMDKILKKIDNCLTEMETETKNLEDEEKNNPVEEWDSEMRAAEKELEQLKTEEEELQRNLLELEVQKEQTLAQIDFMQKQRNRTEELLDQLSLSEWDVVEWSDDQAVFTFVYDTIQLTITFEESVVGFPFLDKRYRKIVDVNFQSLLDEDQAPPSSLLVHKLIFQYVEEKESWKKTCTTQHQLPKMLEEFSLVVHHCRLLGEEIEYLKRWGPNYNLMNIDINNNELRLLFSSSAAFAKFEITLFLSAYYPSVPLPSTIQNHVGNTSQDDIATILSKVPLENNYLKNVVKQIYQDLFQDCHFYH

SEQ ID NO: 20565 - protein, 54 aa, Homo sapiens
LQLIWVVRRRLGQASREVERKPGALGAVRVGRVPRPRGEVGARGLLERGALRTE

SEQ ID NO: 20566 - protein, 360 aa, Homo sapiens
LQLIWVVRRRLGQASREVELMAMQMQLEANADTSVEEESFGPQPISRLEQCGINANDVKKLEEAGFHTVEAVAYAPKKELINIKGISEAKADKILTESRSVARLECNSVILVYCTLRLSGSSDSPASASRVVGTTGGIETGSITEMFGEFRTGKTQICHTLAVTCQLPIDRGGGEGKAMYIDTEGTFRPERLLAVAERYGLSGSDVLDNVAYARAFNTDHQTQLLYQASAMMVESRYALLIVDSATALYRTDYSGRGELSARQMHLARFLRMLLRLADEFGVAVVITNQVVAQVDGAAMFAADPKKPIGGNIIAHASTTRLYLRKGRGETRICKIYDSPCLPEAEAMFAINADGVGDAKD

SEQ ID NO: 20567 - protein, 167 aa, Homo sapiens
LSPARYGLSGSDVLDNVAYARAFNTDHQTQLLYQASAMMVESRYALLIVDSATALYRTDYSGRGELSARQMHLARFLRMLLRLADEFGVAVVITNQVVAQVDGAAMFAADPKKPIGGNIIAHASTTRLYLRKGRGETRICKIYDSPCLPEAEAMFAINADGVGDAKD

SEQ ID NO: 20568 - protein, 63 aa, Homo sapiens
VSFQPGRCTWPGFCGCFCDSLMRLYLRKGRGETRICKIYDSPCLPEAEAMFAINADGVGDAKD

SEQ ID NO: 20569 - protein, 78 aa, Homo sapiens
LWLTLQEVGPTMVGDEQSDPELMQHLGASKRRALGNNFYEYYVDDPPRIVLDKLERRGFRVLSMTGVGQTLVWCLHKE

SEQ ID NO: 20570 - protein, 250 aa, Homo sapiens
LAKRGFAPPQSPRQLAAVGVVSRQEGLKGASMGGAQLELPSGARPGVCVRRSFRAHAGDQPRRPPGPIPVPGTMKQESAAPNTPPTSQSPTPSAQFPRNDGDPQALWIFGYGSLVWRPDFAYSDSRVGFVRGYSRRFWQGDTFHRGSDKMPGRVVTLLEDHEGCTWGVAYQVQGEQNPGYLGPAPEEAIATQILACRGFSGHNLEYLLRLADFMQLCGPQAQDEHLAAIVDAVGTMLPCFCPTEQALALV

SEQ ID NO: 20571 - protein, 295 aa, Homo sapiens
LAKRGFAPPQSPRQLAAVGVVSRQEGLKGASMGGAQLELPSGARPGVCVRRSFRAHAGDQPRRPPGPIPVPGTMKQESAAPNTPPTSQSPTPSAQFPRNDGDPQALWIFGYGSLVWRPDFAYSDSRVGFVRGYSRRFWQGDTFHRGSDKMPGRVVTLLEDHEGCTWGVAYQVQGEQVSKALKYLNVREAVLGGYDTKEVTFYPQDAPDQPLKALAYVATPQNPGYLGPAPEEAIATQILACRGFSGHNLEYLLRLADFMQLCGPQAQDEHLAAIVDAVGTMLPCFCPTEQALALV

SEQ ID NO: 20572 - protein, 248 aa, Homo sapiens
LCLGRGLACIRKEGAGCGKMAAQPLRHRSRCATPPRGDFCGGTERAIDQASFTTSMEWDTQVVKGSSPLGPAGLGAEEPAAGPQLPSWLQPERCAVFQCAQCHAVLADSVHLAWDLSRSLGAVVFSRVTNNVVLEAPFLVGIEGSLKGSTYNLLFCGSCGIPVGFHLYSTHAALAALRGHFCLSSDKMVCYLLKTKAIVNASEMDIQNVPLSEKIAELKEKIVLTHNRLKSLMKILSEVTPDQSKPEN

SEQ ID NO: 20573 - protein, 18 aa, Homo sapiens
LTKFGDPSSEYRRDFESR

SEQ ID NO: 20574 - protein, 383 aa, Homo sapiens
LVIHLPSIAGISNRDDHPLSRGAGLPQATKLLKALKGYIKHEARKGNENQDESQTSASSCDETEIQISNQEEAERQPLGHVTKTRRRCKTVRVDPDSQNHEKQESQDLRATAKVPSPPDEHQEAENAVSSGNRDSKVPSEGKKSLYTDESSKPGKNKRTAITTPNFKKLHEAHFKEMESIDQYIERKKKHFEEHNSMNELKQQPINKGGVRTPVPPRGRLSVASTPISQRRSQGRSCGPASQSTLGLKGSLKRSAISAAKTGVRFSAATKDNEHKRSLTKTPARKSAHVTVSGGTPKGEAVLGTHKLKTITGNSAAGKLKPWGQSKENNYLNQHVNRINFYKKTYKQPHLQTKEEQRKKREQERKEKKAKVLGMRRGLILAED

SEQ ID NO: 20575 - protein, 739 aa, Homo sapiens
VDPTGMGCWGQLLVWFGAAGAILCSSPGSQETFLRSSPLPLASPSPRDPKVSAPPSILEPASPLNSPGTEGSWLFSTCGASGRHGPTQTQCDGAYAGTSVVVTVGAAGQLRGVQLWRVPGPGQYLISAYGAAGGKGAKNHLSRAHGVFVSAIFSLGLGESLYILVGQQGEDACPGGSPESQLVCLGESRAVEEHAAMDGSEGVPGSRRWAGGGGGGGGATYVFRVRAGELEPLLVAAGGGGRAYLRPRDRGRTQASPEKLENRSEAPGSGGRGGAAGGDASETDNLWADGEDGVSFIHPSSELFLQPLAVTENHGEVEIRRHLNCSHCPLRDCQWQAELQLAECLCPEGMELAVDNVTCMDLHKPPGPLVLMVAVVATSTLSLLMVCGVLILGGAWPGPVLASATRCHRGFPSQCYSAQTLPELCSPQDELDFLMEALIISKFRHQNIVRCVGLSLRATPRLILLELMSGGDMKSFLRHSRPHLGQPSPLVMRDLLQLAQDIAQGCHYLEENHFIHRDIAARNCLLSCAGPSRVAKIGDFGMARDIYRASYYRRGDRALLPVKWMPPEAFLEGIFTSKTDSWSFGVLLWEIFSLGYMPYPGRTNQEVLDFVVGGGRMDPPRGCPGPVYRIMTQCWQHEPELRPSFASILERLQYCTQDPDVLNSLLPMELGPTPEEEGTSGLGNRSLECLRPPQPQELSPEKLKSWGGSPLGPWLSSGLKPLKSRGLQPQNLWNPTYRS

SEQ ID NO: 20576 - protein, 328 aa, Homo sapiens
VSWAGGGGRVDGQVEGVPLFFPPPVKQKKWQGLQEMRLPSPELELSKLRTSAIRTAPNPYYCQVGLGPAQSWPLPPGVTEVSPANVTLLRALGHGAFGEVYEGLVIGLPGDSSPLQVAIKTLPELCSPQDELDFLMEALIISKFRHQNIVRCVGLSLRATPRLILLELMSGGDMKSFLRHSRPHLGQPSPLVMRDLLQLAQDIAQGCHYLEENHFIHRDIAARNCLLSCAGPSRVAKIGDFGMARDIYRASYYRRGDRALLPVKWMPPEAFLEGIFTSKTDSWSFGVLLWEIFSLGYMPYPGRTNQEVLDFVVGGGRMDPPRGCPGPV

SEQ ID NO: 20577 - protein, 69 aa, Homo sapiens
LRDCQWQAELQLAECLCPEGMELAVDNVTCMGGAWPGPVLASATRCHRGFPSQCYSAQSPGPWCLWGGV

SEQ ID NO: 20578 - protein, 42 aa, Homo sapiens
LFYLLGVGFENLKTCNVCAFARYPNGVVVHYFCSKEVNPADT

SEQ ID NO: 20579 - protein, 133 aa, Homo sapiens
LYKPERKSERRTAFLPEASRTGAERRCGPGPAPPPPRAEAVSVAGSRREVGLMRRRGEIDMATEGDVELELETETSGPERPPEKPRKHDSGAADLERVTDYAEEKEIQSSNLETAMSVIGDRRSREQKAKQER

SEQ ID NO: 20580 - protein, 181 aa, Homo sapiens
LYKPERKSERRTAFLPEASRTGAERRCGPGPAPPPPRAEAVSVAGSRREVGLMRRRGEIDMATEGDVELELETETSGPERPPEKPRKHDSGAADLERVTDYAEEKEIQSSNLETAMSVIGDRRSREQKAKQEREKELAKVTIKKEDLELIMTEMEISRAAAERSLREHMGNVVEALIALTN

SEQ ID NO: 20581 - protein, 82 aa, Homo sapiens
MRRRGEIDMATEGDVELELETETSGPERPPEKPRKHDSGAADLERVTDYAEEKEIQSSNLETGERTGKSHYQEGRSGANSEW

SEQ ID NO: 20582 - protein, 33 aa, Homo sapiens
LQMTEMEISRAAAERSLREHMGNVVEALIALTN

SEQ ID NO: 20583 - protein, 42 aa, Homo sapiens
LSAVSMFDVSEQRILLSNINILVRFELFNLLHSKLVKIVKRA

SEQ ID NO: 20584 - protein, 61 aa, Homo sapiens
LNNSSETSKSFNICCKPWHRSFTSLRLNPKSTMEYYNKLRQHGEFQTSLSIPYSQRRRPNT

SEQ ID NO: 20585 - protein, 75 aa, Homo sapiens
LGVEEGADFQSLCRSSQGFMHMKLSRTKEHKYVLGQNSPPFSSVPEIVHHYASRKLPIKGAEHMSLLYPVAIRTL

SEQ ID NO: 20586 - protein, 438 aa, Homo sapiens
VSTISTEAALGHRWRMQQEGGPVRSAPCRTGTLEGSRQGSPGHRKRASPKGSLSSAQPHSWMLTPSPLNSHCAHREPISSSPQPVANGPKQKKKSNWRSTTRLRIIRLRDRLEPRPLAILEDYADPFDVQETGEGSAGASGAPEKVPENDGYMEPYEAQKMMAEIRGSKETATQPLPLYDTPYEPEEDGATAEGEGAPWPRESRLPEDDERPPEEYDQPWEWKKERISKAFAVDIKVIKDLPWPPPVGQLDSSPSLPDGDRDISGPASPLPEPSLEDSSAQFEGPEKSCLSPGREEKGRLPPRLSAGNPKSAKPLSMEPSSPLGEWTDPALPLENQVWYHGAISRTDAENLLRLCKEASYLVRNSETSKNDFSLSLKSSQGFMHMKLSRTKEHKYVLGQNSPPFSSVPEIVHHYASRKLPIKGAEHMSLLYPVAIRTL

SEQ ID NO: 20587 - protein, 93 aa, Homo sapiens
MEPYEAQKMMAEIRGSKETATQPLPLYDTPYEPEEDGATAEGEGAPWPRESRLPEDDERPPEEYDQPWEWKKERISKAFAARLENHRILIFFL

SEQ ID NO: 20588 - protein, 24 aa, Homo sapiens
VAPRSGLAAKHFIDVGGLLFGVEY

SEQ ID NO: 20589 - protein, 18 aa, Homo sapiens
MTVLKHHHTDISRNPILY

SEQ ID NO: 20590 - protein, 390 aa, Homo sapiens
LCWMLPALEHWIPKFFSFRTRTGSPLSLACRQPIVGPCDHIIANHHMQSISFASGGDPDTTDYVAYVAKDPVNQRACHILECHNGMAQDVISTIGQAFELRFKQYLKNPSLNTSCESEEVHIDSHAEEREDHEYYNEIPGKQPPVGGVSDMRIKVQATEQMAYCPIQCEKLCYLPGNSKCSSVYENCLEQSRAIGNVHPRGVQSQRDTSLLKHTCRVDLFDDPCYINTQALQSTPGSAGNQRSAQPLGSPWHCGKAPETVQPGATAQPASSHSLPHIKQQLWSEECYHGKLSRKAAESLLVKDGDFLVRESATSPGQYVLSGLQGGQAKHLLLVDPEGKVRTKDHVFDNVGHLIRYHMDNSLPIISSGSEVSLKQPVRKDNNPALLHSNK

SEQ ID NO: 20591 - protein, 45 aa, Homo sapiens
MAFVTFNAPSPPSSSPGQFTDVLMTCKSTSPNQTTSITTDQHIKN

SEQ ID NO: 20592 - protein, 48 aa, Homo sapiens
LHRALRYLMSAPFIYQTTRRFMQQYPVSALPRLCENAARTAWQDSCCM

SEQ ID NO: 20593 - protein, 46 aa, Homo sapiens
LGQGETEIRAGEAFPPWAVTLKGPGAEVGELESRVGEVAAVSCIGR

SEQ ID NO: 20594 - protein, 30 aa, Homo sapiens
VMQRAPRPALARVLRLRVGRERPAPPGAWV

SEQ ID NO: 20595 - protein, 123 aa, Homo sapiens
MCKTVICCRVTPLQKAQVVELVKKYRNAVTLAIGDGANDVSMIKSAHIGVGISGQEGLQAVLASDYSFAQFRYLQRLLLVHGRWSYFRMCKFLCYFFYKNFAFTLVHFWFGFFCGFSAQDQTY

SEQ ID NO: 20596 - protein, 22 aa, Homo sapiens
LNWALFCVRNCHQHRLCLQHAD

SEQ ID NO: 20597 - protein, 13 aa, Homo sapiens
LLHLDRPSLGSHG

SEQ ID NO: 20598 - protein, 66 aa, Homo sapiens
LPSLKKDDVSIYYVSRTSNTDGIDSFLDKVDEVSTEPIPESWRSEVTFSTPALYIYTSGTTGCLQL

SEQ ID NO: 20599 - protein, 102 aa, Homo sapiens
VRLALGNGLRGDVWRQFVKRFGDICIYEFYAATEGNIGFMNYARKVGAVGRVNYLQKKIITYDLIKYDVEKDEPVRDENGYCVRVPKGTVDFCSINLCPFLS

SEQ ID NO: 20600 - protein, 447 aa, Homo sapiens
LLPSPHPSVSHLAKAHHPCSPPLSLARCETSFPTSYLPSGQVMFASSGAREGLWLHIDAAYAGTAFLCPEFRGFLKGIEYADSFTFNPSKWMMVHFDCTGFWVKDKYKLQQTFSVNPIYLRHANSGVATDFMHWQIPLSRRFRSVKLWFVIRSFGVKNLQAHVRHGTEMAKYFESLVRNDPSFEIPAKRHLGLVVFRLKGPNCLTENVLKEIAKAGRLFLIPATIQDKLIIRFTVTSQFTTRDDILRDWNLIRDAATLILSQHCTSQPSPRVGNLISQIRGARAWACGTSLQSVSGAGDDPVQARKIIKQPQRVGAGPMKRENGLHLETLLDPVDDCFSEEAPDATKHKLSSFLFSYLSVQTKKKTVRSLSCNSVPVSAQKPLPTEASVKNGGSSRVRIFSRFPEDMMMLKKSAFKKLIKFYSVPSFPECSSQCGLQLPCCPLQAMV

SEQ ID NO: 20601 - protein, 699 aa, Homo sapiens
LPGSAQDWQEGSRAAPRLSRLPPPACPSVRRSQSPREMMEPEEYRERGREMVDYICQYLSTVRERRVTPDVQPGYLRAQLPESAPEDPDSWDSIFGDIERIIMPGVVHWQSPHMHAYYPALTSWPSLLGDMLADAINCLGFTWASSPACTELEMNVMDWLAKMLGLPEHFLHHHPSSQGGGVLQSTVSESTLIALLAARKNKILEMKTSEPDADESCLNARLVAYASDQAHSSVEKAGLISLVKMKFLPVDDNFSLRGEALQKAIEEDKQRGLVPVFVCATLGTTGVCAFDCLSELGPICAREGLWLHIDAAYAGTAFLCPEFRGFLKGIEYADSFTFNPSKWMMVHFDCTGFWVKDKYKLQQTFSVNPIYLRHANSGVATDFMHWQIPLSRRFRSVKLWFVIRSFGVKNLQAHVRHGTEMAKYFESLVRNDPSFEIPAKRHLGLVVFRLKGPNCLTENVLKEIAKAGRLFLIPATIQDKLIIRFTVTSQFTTRDDILRDWNLIRDAATLILSQHCTSQPSPRVGNLISQIRGARAWACGTSLQSVSGAGDDPVQARKIIKQPQRVGAGPMKRENGLHLETLLDPVDDCFSEEAPDATKHKLSSFLFSYLSVQTKKKTVRSLSCNSVPVSAQKPLPTEASVKNGGSSRVRIFSRFPEDMMMLKKSAFKKLIKFYSVPSFPECSSQCGLQLPCCPLQAMV

SEQ ID NO: 20602 - protein, 26 aa, Homo sapiens
LLFRRGPRCHQAQAVLLPVQLLVCAD

SEQ ID NO: 20603 - protein, 198 aa, Homo sapiens
LPESAPEDPDSWDSIFGDIERIIMPGVVHWQSPHMHAYYPALTSWPSLLGDMLADAINCLGFTWSTVSESTLIALLAARKNKILEMKTSEPDADESCLNARLVAYASDQAHSSVEKAGLISLVKMKFLPVDDNFSLRGEALQKAIEEDKQRGLVPVFVCATLGTTGVCAFDCLSELGPICKYLPSVARKTRNTFLNVS

SEQ ID NO: 20604 - protein, 202 aa, Homo sapiens
MMEPEEYRERGREMVDYICQYLSTVRERRVTPDVQPGYLRAQLPESAPEDPDSWDSIFGDIERIIMPGSTVSESTLIALLAARKNKILEMKTSEPDADESCLNARLVAYASDQAHSSVEKAGLISLVKMKFLPVDDNFSLRGEALQKAIEEDKQRGLVPVFVCATLGTTGVCAFDCLSELGPICKYLPSVARKTRNTFLNVS

SEQ ID NO: 20605 - protein, 287 aa, Homo sapiens
LPGSAQDWQEGSRAAPRLSRLPPPACPSVRRSQSPREMMEPEEYRERGREMVDYICQYLSTVRERRVTPDVQPGYLRAQLPESAPEDPDSWDSIFGDIERIIMPGVVHWQSPHMHAYYPALTSWPSLLGDMLADAINCLGFTWASSPACTELEMNVMDWLAKMLGLPEHFLHHHPSSQGGGVLQSTVSESTLIALLAARKNKILEMKTSEPDADESCLNARLVAYASDQAHSSVEKAGLISLVKMKFLPVDDNFSLRGEALQKAIEEDKQRGLVPVFVSQDICLSLE

SEQ ID NO: 20606 - protein, 385 aa, Homo sapiens
VLGAGDGCWSGARRGSAHSRSPLPSPLRPRAKMATEGLHENETLASLKSEAESLKGKLEEERAKLHDVELHQVAERVEALGQFVMKTRRTLKGHGNKVLCMDWCKDKRRIVSSSQDGKVIVWDSFTTNKEHAVTMPCTWVMACAYAPSGCAIACGGLDNKCSVYPLTFDKNENMAAKKKSVAMHTNYLSACSFTNSDMQILTASGDGTCALWDVESGQLLQSFHGHGADVLCLDLAPSETGNTFVSGGCDKKAMVWDMRSGQCVQAFETHESDINSVRYYPSGDAFASGSDDATCRLYDLRADREVAIYSKESIIFGASSVDFSLSGRLLFAGYNDYTINVWDVLKGSRVSILFGHENRVSTLRVSPDGTAFCSGSWDHTLRVWA

SEQ ID NO: 20607 - protein, 165 aa, Homo sapiens
MCDQTFLVNVFGSCDKCFKQRALRPVFKKSQQLSYCSTCAEIMATEGLHENETLASLKSEAESLKGKLEEERAKLHDVELHQVAERVEALGQFVMKTRRTLKGHGNKVLCMDWCKDKRRIVSSSQDGKVIVWDSFTTNKEHAVTMPCTWVMACAYAPSGCAIACG

SEQ ID NO: 20608 - protein, 219 aa, Homo sapiens
MGGAQLELPSGARPGVCVRRSFRAHAGDQPRRPPGPIPVPGTMKQESAAPNTPPTSQSPTPSAQFPRNDGDPQALWIFGYGSLVWRPDFAYSDSRVGFVRGYSRRFWQGDTFHRGSDKMPGRVVTLLEDHEGCTWGVAYQVQGEQNPGYLGPAPEEAIATQILACRGFSGHNLEYLLRLADFMQLCGPQAQDEHLAAIVDAVGTMLPCFCPTEQALALV

SEQ ID NO: 20609 - protein, 173 aa, Homo sapiens
LFGGVTRGFNMRIEKCYFCSGPIYPGHGMMFVRNDCKVFRFCKSKCHKNFKKKRNPRKVRWTKAFRKAAGKELTVDNSFEFEKRRNEPIKYQRELWNKTIDAMKRVEEIKQKRQAKFIMNRLKKNKELQKVQDIKEVKQNIHLIRAPLAGKGKQLEEKMVQQLQEDVDMEDAP

SEQ ID NO: 20610 - protein, 264 aa, Homo sapiens
MGGAQLELPSGARPGVCVRRSFRAHAGDQPRRPPGPIPVPGTMKQESAAPNTPPTSQSPTPSAQFPRNDGDPQALWIFGYGSLVWRPDFAYSDSRVGFVRGYSRRFWQGDTFHRGSDKMPGRVVTLLEDHEGCTWGVAYQVQGEQVSKALKYLNVREAVLGGYDTKEVTFYPQDAPDQPLKALAYVATPQNPGYLGPAPEEAIATQILACRGFSGHNLEYLLRLADFMQLCGPQAQDEHLAAIVDAVGTMLPCFCPTEQALALV

SEQ ID NO: 20611 - protein, 492 aa, Homo sapiens
LQSAWDLAISMSLKENLARCWTLTEAEKMSFETQKTNLATENQYLRVSLEKEEKALSSLQEELNKLREQIRILEDKGTSTELVKENQKLKQHLEEEKQKKHSFLSQRETLLTEAKMLKRELERERLVTTALRGELQQLSGSQLHGKSDSPNVYTEKKEIAILRERLTELERKLTFEQQRSDLWERLYVEAKDQNGKQGTDGKKKGGRGSHRAKNKSKETFLGSVKETFDAMKNSTKEFVRHHKEKIKQAKEAVKENLKKFSDSVKSTFRHFKDTTKNIFDEKGNKRFGATKEAAEKPRTVFSDYLHPQYKAPTENHHNRGPTMQNDGRKEKPVHFKEFRKNTNSKKCSPGHDCRENSHSFRKACSGVFDCAQQESMSLFNTVVNPIRMDEFRQIIQRYMLKELDTFCHWNELDQFINKFFLNGVFIHDQKLFTDFVNDVKDYLRNMKEYEVDNDGVFEKLDEYIYRHFFGHTFSPPYGPRSVYIKPCHYSSL

SEQ ID NO: 20612 - protein, 282 aa, Homo sapiens
MNHMKHHLELEKQSSESWENHTTCQHCYRQFPTPFQLQCHIESTHTPHEFSTICKICELSFETEHVLLQHMKDNHKPGEMPYVCQVCNYRSSSFSDVETHFRTSHENTKNLLCPFCLKVIKIATPYMHHYMKHQKKGIHRCTKCRLQFLTCKEKMDHKTQHHRTFIKPKQLEGLPPGTKVTIRASVGPLQSGASPTPSISASASTLQLSPPRTKNITAKNPAKSNTSKPNTVKSNASKPNTSKPNGSKSKYKPKISNMQKKQSTLASSNKKSKVNTALRNLR

SEQ ID NO: 20613 - protein, 128 aa, Homo sapiens
LLVLCIFIQSSALGQSLKPGGRRARKLDLADGGRAEVSAGPASERGAGGLDHPGPRPLHHRRPQHPPCGQGGRGSSPVAGGICATLSKPCSPNWVQPGCTRVRICRQFHRWNAQDWENHRAGCRGTFV

SEQ ID NO: 20614 - protein, 372 aa, Homo sapiens
VDGVLENWIWQMVAALKSQPAQPVNVGLVDWITLAHDHYTIAVRNTRLVGKEVAALLRWLEESVQLSRSHVHLIGYSLGAHVSGFAGSSIGGTHKIGRITGLDAAGPLFEGSAPSNRLSPDDANFVDAIHTFTREHMGLSVGIKQPIGHYDFYPNGGSFQPGCHFLELYRHIAQHGFNAITQTIKCSHERSVHLFIDSLLHAGTQSMAYPCGDMNSFSQGLCLSCKKGRCNTLGYHVRQEPRSKSKRLFLVTRAQSPFKVYHYQFKIQFINQTETPIQTTFTMSLLGTKEKMQKIPITLGKGIASNKTYSFLITLDVDIGELIMIKFKWENSAVWANVWDTVQTIIPWSTGPRHSGLVLKTIRVKAGETQQR

SEQ ID NO: 20615 - protein, 18 aa, Homo sapiens
LPFHSVIYHEDDISEGLN

SEQ ID NO: 20616 - protein, 462 aa, Homo sapiens
VPDRGRARALLLPIQLSWRPRRWLRRSGRGLHRAGGGRPGMESSPESLQPLEHGVAAGPASGTGSSQEGLQETRLAAGDGPGVWAAETSGGNGLGAAAARRSLPDSASPAGSPEVPGPCSSSAGLDLKDSGLESPAAAEAPLRGQYKVTASPETAVAGVGHELGTAGDAGARPDLAGTCQAELTAAGSEEPSSAGGLSSSCSDPSPPGESPSLDSLESFSNLHSFPSSCEFNSEEGAENRVPEEEEGAAVLPGAVPLCKEEEGEETAQVLAASKERFPGQSVYHIKWIQWKEENTPIITQNENGPCPLLAILNVLLLAWKVKLPPMMEIITAEQLMEYLGDYMLDAKPKEISEIQRLNYEQNMSDAMAILHKLQTGLDVNVRFTGVRVFEYTPECIVFDLLDIPLYHGWLVDPQIDDIVKAVGNCSYNQLVEKIISCKQSDNSELVSEGSTVFVGNGPGVSY

SEQ ID NO: 20617 - protein, 410 aa, Homo sapiens
LLLPIQLSWRPRRWLRRSGRGLHRAGGGRPGMESSPESLQPLEHGVAAGPASGTGSSQEGLQETRLAAGDGPGVWAAETSGGNGLGAAAARRSLPDSASPAGSPEVPGPCSSSAGLDLKDSGLESPAAAEAPLRGQYKVTASPETAVAGVGHELGTAGDAGARPDLAGTCQAELTAAGSEEPSSAGGLSSSCSDPSPPGESPSLDSLESFSNLHSFPSSCEFNSEEGAENRVPEEEEGAAVLPGAVPLCKEEEGEETAQVLAASKERFPGQSVYHIKWIQWKEENTPIITQNENGPCPLLAILNVLLLAWKVKLPPMMEIITAEQLMEYLGDYMLDAKPKEISEIQRLNYEQNMSDAMAILHKLQTGLDVNIDDIVKAVGNCSYNQLVEKIISCKQSDNSELVSEGGLCS

SEQ ID NO: 20618 - protein, 44 aa, Homo sapiens
MLGLQARLPCMHLFHQVCVDQWLITNKKCPICRVDIEAQLPSES

SEQ ID NO: 20619 - protein, 139 aa, Homo sapiens
LALLPSPSLMALLRRPTVSSDLENIDTGVNSKVKSHVTIRRTVLEEIGNRVTTRAAQVAKVTMMKTECEYRGRFCIVLSPTTLAVLRYSCFFFLIESSEHQSSSSTHQNNKCQQTTETYCFCQTSTDGKVGSKGSFSHT

SEQ ID NO: 20620 - protein, 279 aa, Homo sapiens
LALLPSPSLMALLRRPTGPSPTPEDVSMKEENLCQAFSDALLCKIEDIDNEDWENPQLCSDYVKDIYQYLRQLEVLQSINPHFLDGRDINGRMRAILVDWLVQVHSKFRLLQETLYMCVGIMDRFLQVQPVSRKKLQLVGITALLLASKYEEMFSPNIEDFVYITDNAYTSSQIREMETLILKELKFELGRPLPLHFLRRASKAGENLKQQYYTGYTENEVLEVMQHMAKNVVKVNENLTKFIAIKNKYASSKLLKISMIPQLNSKAVKDLASPLIGRS

SEQ ID NO: 20621 - protein, 38 aa, Homo sapiens
LQAIKNKYASSKLLKISMIPQLNSKAVKDLASPLIGRS

SEQ ID NO: 20622 - protein, 1130 aa, Homo sapiens
LRSSPSSPAAGPGEDATAARVTMGSKGVYQYHWQSHNVKHSGVDDMVLLSKITENSIVENLKKRYMDDYIFTYIGSVLISVNPFKQMPYFGEKEIEMYQGAAQYENPPHIYALADNMYRNMIIDRENQCVIISGESGAGKTVAAKYIMSYISRVSGGGTKVQHVKDIILQSNPLLEAFGNAKTVRNNNSSRFGKYFEIQFSPGGEPDGGKISNFLLEKSRVVMRNPGERSFHIFYQLIEGASAEQKHSLGITSMDYYYYLSLSGSYKVDDIDDRREFQETLHAMNVIGIFAEEQTLVLQIVAGILHLGNISFKEVGNYAAVESEEFLAFPAYLLGINQDRLKEKLTSRQMDSKWGGKSESIHVTLNVEQACYTRDALAKALHARVFDFLVDSINKAMEKDHEEYNIGVLDIYGFEIFQKNGFEQFCINFVNEKLQQIFIELTLKAEQEEYVQEGIRWTPIEYFNNKIVCDLIENKVNPPGIMSILDDVCATMHAVGEGADQTLLQKLQMQIGSHEHFNSWNQGFIIHHYAGKVSYDMDGFCERNRDVLFMDLIELMQSSELPFIKSLFPENLQADKKGRPTTAGSKIKKQANDLVSTLMKCTPHYIRCIKPNETKKPRDWEESRVKHQVEYLGLKENIRVRRAGYAYRRIFQKFLQRYAILTKATWPSWQGEEKQGVLHLLQSVNMDSDQFQLGRSKVFIKAPESLFLLEEMRERKYDGYARVIQKSWRKFVARKKYVQMREEASDLLLNKKERRRNSINRNFIGDYIGMEEHPELQQFVGKREKIDFADTVTKYDRRFKGVKRDLLLTPKCLYLIGREKVKQGPDKGLVKEVLKRKIEIERILSVSLSTMQDDIFILHEQEYDSLLESVFKTEFLSLLAKRYEEKTQKQLPLKFSNTLELKLKKENWGPWSAGGSRQVQFHQGFGDLAVLKPSNKVLQVSIGPGLPKNSRPTRRNTTQNTGYSSGTQNANYPVRAAPPPPGYHQNGVIRNQYVPYPHAPGSQRSNQKSLYTSMARPPLPRQQSTSSDRVSQTPESLDFLKVPDQGAAGVRRQTTSRPPPAGGRPKPQPKPKPQVPQCKALYAYDAQDTDELSFNANDIIDIIKEDPSGWWTGRLRGKQGLFPNNYVTKI

SEQ ID NO: 20623 - protein, 43 aa, Homo sapiens
VAEERGVRQGSEADAPSASDSPGPAATGEYEWTLALRSMRPAC

SEQ ID NO: 20624 - protein, 168 aa, Homo sapiens
LWGKKESKKKDEESLIPETIDDLMTPEEKDKLFTAIGYSESTHNLTLPKQYVAHIMTLKLVSTSVTIRENKNIPEILKIQIIGLGTQVSQRPGAQALKVEAKLEHWYITGLRQQDIVPSLVASIGDTTSSLLKIKFETNPEDSPADQTLIVQSQPVEVIYDAVSARRK

SEQ ID NO: 20625 - protein, 25 aa, Homo sapiens
MPDGRSARIPVRSAVEPQEQKSPRR

SEQ ID NO: 20626 - protein, 101 aa, Homo sapiens
LNMVRTKADSVPGTYRKVVAARAPRKVLGSSTSATNSTSVSSRKAENKYAGGNPVCVRPTPKWQKGIGEFFRLSPKDSEKENQIPEEAGSSGLGKAKRKNQ

SEQ ID NO: 20627 - protein, 118 aa, Homo sapiens
LNMVRTKADSVPGTYRKVVAARAPRKVLGSSTSATNSTSVSSRKAENKYAGGNPVCVRPTPKWQKGIGEFFRLSPKDSEKENQIPEEAGSSGLGKAKRKLQDVHLRLRPSDYISYGNK

SEQ ID NO: 20628 - protein, 50 aa, Homo sapiens
LNMVRTKADSVPGTYRKVVAARAPRKVLGSSTSATNSTSVSSRKGYKMFT

SEQ ID NO: 20629 - protein, 67 aa, Homo sapiens
LNMVRTKADSVPGTYRKVVAARAPRKVLGSSTSATNSTSVSSRKEHVLCNLITQMMKKNRTFSFIFE

SEQ ID NO: 20630 - protein, 28 aa, Homo sapiens
LSSKLDTRHTDPNGACPLQPDHTNDEKE

SEQ ID NO: 20631 - protein, 129 aa, Homo sapiens
LDRQALLSKLLGSRTRCRNPPAPSEHPFLPLFTVVAARAPRKVLGSSTSATNSTSVSSRKAENKYAGGNPVCVRPTPKWQKGIGEFFRLSPKDSEKENQIPEEAGSSGLGKAKRKACPLQPDHTNDEKE

SEQ ID NO: 20632 - protein, 113 aa, Homo sapiens
LNMVRTKADSVPGTYRKVVAARAPRKVLGSSTSATNSTSVSSRKAENKYAGGNPVCVRPTPKWQKGIGEFFRLSPKDSEKENQIPEEAGSSGLGKAKRKACPLQPDHTNDEKE

SEQ ID NO: 20633 - protein, 86 aa, Homo sapiens
LNMVRTKADSVPGTYRKAENKYAGGNPVCVRPTPKWQKGIGEFFRLSPKDSEKENQIPEEAGSSGLGKAKRKACPLQPDHTNDEKE

SEQ ID NO: 20634 - protein, 96 aa, Homo sapiens
LVAARAPRKVLGSSTSATNSTSVSSRKAENKYAGGNPVCVRPTPKWQKGIGEFFRLSPKDSEKENQIPEEAGSSGLGKAKRKACPLQPDHTNDEKE

SEQ ID NO: 20635 - protein, 117 aa, Homo sapiens
LNMVRTKADSVPGTYRKVVAARAPRKVLGSSTSATNSTSVSSRKAENKYAGGNPVCVRPTPKWQKGIGEFFRLSPKDSEKENQIPEEAGSSGLGKAKRNQEPPILQHTEQQAGHTAH

SEQ ID NO: 20636 - protein, 709 aa, Homo sapiens
VTMLSGIEAAAGEYEDSELRCRVAVEELSPGGQPRRRQALRTAELSLGRNERRELMLRLQAPGPAGRPRCFPLRAARLFTRFAEAGRSTLRLPAHDTPGAGAVQLLLSDCPPDRLRRFLRTLRLKLAAAPGPGPASARAQLLGPRPRDFVTISPVQPEERRLRAATRVPDTTLVKRPVEPQAGAEPSTEAPRWPLPVKRLSLPSTKPQLSEEQAAVLRAVLKGQSIFFTGSAGTGKSYLLKRILGSLPPTGTVATASTGVAACHIGGTTLHAFAGIGSGQAPLAQCVALAQRPGVRQGWLNCQRLVIDEISMVEADLFDKLEAVARAVRQQNKPFGGIQLIICGDFLQLPPVTKGSQPPRFCFQSKSWKRCVPVTLELTKVWRQADQTFISLLQAVRLGRCSDEVTRQLQATASHKVGRDGIVATRLCTHQDDVALTNERRLQELPGKVHRFEAMDSNPELASTLDAQCPVSQLLQLKLGAQVMLVKNLSVSRGLVNGARGVVVGFEAEGRGLPQVRFLCGVTEVIHADRWTVQATGGQLLSRQQLPLQLAWAMSIHKSQGMTLDCVEISLGRVFASGQAYVALSRARSLQGLRVLDFDPMAVRCDPRVLHFYATLRRGRSLSLAAEGRGNEDRCSGSSIRALGGDWWGLRLGAASKQRTELRCVSTARPSLAQPRTNTLQSLTKEHKLQNVHPYFKLLFQGINSVWGH

SEQ ID NO: 20637 - protein, 654 aa, Homo sapiens
VSARTQRPAEAVTMLSGIEAAAGEYEDSELRCRVAVEELSPGGQPRRRQALRTAELSLGRNERRELMLRLQAPGPAGRPRCFPLRAARLFTRFAEAGRSTLRLPAHDTPGAGAVQLLLSDCPPDRLRRFLRTLRLKLAAAPGPGPASARAQLLGPRPRDFVTISPVQPEERRLRAATRVPDTTLVKRPVEPQAGAEPSTEAPRWPLPVKRLSLPSTKPQLSEEQAAVLRAVLKGQSIFFTGSAGTGKSYLLKRILGSLPPTGTVATASTGVAACHIGGTTLHAFAGIGSGQAPLAQCVALAQRPGVRQGWLNCQRLVIDEISMVEADLFDKLEAVARAVRQQNKPFGGIQLIICGDFLQLPPVTKGSQPPRFCFQSKSWKRCVPVTLELTKVWRQADQTFISLLQAVRLGRCSDEVTRQLQATASHKVGRDGIVATRLCTHQDDVALTNERRLQELPGKVHRFEAMDSNPELASTLDAQCPVSQLLQLKLGAQVMLVKNLSVSRGLVNGARGVVVGFEAEGRGLPQVRFLCGVTEVIHADRWTVQATGGQLLSRQQLPLQLAWAMSIHKSQGMTLDCVEISLGRVFASGQAYVALSRARSLQGLRVLDFDPMAVRCDPRVLHFYATLRRGRSLSLESPDDDEAASDQENMDPIL

SEQ ID NO: 20638 - protein, 268 aa, Homo sapiens
VTMLSGIEAAAGEYEDSELRCRVAVEELSPGGQPRRRQALRTAELSLGRNERRELMLRLQAPGPAGRPRCFPLRAARLFTRFAEAGRSTLRLPAHDTPGAGAVQLLLSDCPPDRLRRFLRTLRLKLAAAPGPGPASARAQLLGPRPRDFVTISPVQPEERRLRAATRVPDTTLVKRPVEPQAGAEPSTEAPRWPLPVKRLSLPSTKPQLSEEQAAVLRAVLKGQSIFFTGSAGSGGREEVGGQWWGGIEEQGDLSNFAPVQEQGSHIC

SEQ ID NO: 20639 - protein, 197 aa, Homo sapiens
VTMLSGIEAAAGEYEDSELRCRVAVEELSPGGQPRRRQALRTAELSLGRNERRELMLRLQAPGPAGRPRCFPLRAARLFTRFAEAGRSTLRLPAHDTPGAGAVQLLLSDCPPDRLRRFLRTLRLKLAAAPGPGPASARAQLLGPRPRDFVTISPVQPEERRLRAATRVPDTTLVKRPVEPQAGAEPSTVRTGKKGHL

SEQ ID NO: 20640 - protein, 129 aa, Homo sapiens
MRRRGEIDMATEGDVELELETETSGPERPPEKPRKHDSGAADLERVTDYAEEKEIQSSNLETAMSVIGDRRSREQKAKQEREKELAKVTIKKEDLELIMTEMEISRAAAERSLREHMGNVVEALIALTN

SEQ ID NO: 20641 - protein, 28 aa, Homo sapiens
LLERKARTIRRMCSCKNGSIGNSSFRML

SEQ ID NO: 20642 - protein, 106 aa, Homo sapiens
LTSGDSPASASQSAGITGVSHRARLHKLRVDKAAAAAAALQAKSDEKAAVAGKKPVVGKKGKKAAVGVKKQKKPLVGKKAAATKKPAPEKKPAEKKPTTEEKKPAA

SEQ ID NO: 20643 - protein, 216 aa, Homo sapiens
LLEYRLPNFSFPLKGITLLNVSKLNILKLAPGGHVGRFCIWTESAFRKLDELYGTWRKAASLKSNYNLPMHKMINTDLSRILKSPEIQRALRAPRKKIHRRVLKKNPLKNLRIMLKLNPYAKTMRRNTILRQARNHKLRVDKAAAAAAALQAKSDEKAAVAGKKPVVGKKGKKAAVGVKKQKKPLVGKKAAATKKPAPEKKPAEKKPTTEEKKPAA

SEQ ID NO: 20644 - protein, 438 aa, Homo sapiens
LRGAWLSPLSAMACARPLISVYSEKGESSGKNVTLPAVFKAPIRPDIVNFVHTNLRKNNRQPYAVSELAGHQTSAESWGTGRAVARIPRVRGGGTHRSGQGAFGNMCRGGRMFAPTKTWRRWHRRVNTTQKRYAICSALAASALPALVMSKGHRIEEVPELPLVVEDKVEGYKKTKEAVLLLKKLKAWNDIKKVYASQRMRAGKGKMRNRRRIQRRGPCIIYNEDNGIIKAFRNIPGITLLNVSKLNILKLAPGGHVGRFCIWTESAFRKLDELYGTWRKAASLKSNYNLPMHKMINTDLSRILKSPEIQRALRAPRKKIHRRVLKKNPLKNLRIMLKLNPYAKTMRRNTILRQARNHKLRVDKAAAAAAALQAKSDEKAAVAGKKPVVGKKGKKAAVGVKKQKKPLVGKKAAATKKPAPEKKPAEKKPTTEEKKPAA

SEQ ID NO: 20645 - protein, 238 aa, Homo sapiens
LRGAWLSPLSAMACARPLISVYSEKGESSGKNVTLPAVFKAPIRPDIVNFVHTNLRKNNRQPYAVSELAGHQTSAESWGTGRAVARIPRVRGGGTHRSGQGAFGNMCRGGRMFAPTKTWRRWHRRVNTTQKRYAICSALAASALPALVMSKGHRIEEVPELPLVVEDKVEGYKKTKEAVLLLKKLKAWNDIKKVYASQRMRAGKGKMRNRRRIQRRGPCIIYNEDNGIIKAFRNIPGN

SEQ ID NO: 20646 - protein, 180 aa, Homo sapiens
LRGAWLSPLSAMACARPLISVYSEKGESSGKNVTLPAVFKAPIRPDIVNFVHTNLRKNNRQPYAVSELAGHQTSAESWGTGRAVARIPRVRGGGTHRSGQGAFGNMCRGGRMFAPTKTWRRWHRRVNTTQKRYAICSALAASALPALVMSKGLCLSANESWQRQNEKPSPYPAQGPVHHL

SEQ ID NO: 20647 - protein, 220 aa, Homo sapiens
LRGAWLSPLSAMACARPLISVYSEKGESSGKNVTLPAVFKAPIRPDIVNFVHTNLRKNNRQPYAVSELAGHQTSAESWGTGRAVARIPRVRGGGTHRSGQGAFGNMCRGGRMFAPTKTWRRWHRRVNTTQKRYAICSALAASALPALVMSKGHRIEEVPELPLVVEDKVEGYKKTKEAVLLLKKLKAWNDIKKVRSMSTFTVWYSLFTVCHFEFQKIRAV

SEQ ID NO: 20648 - protein, 10 aa, Homo sapiens
LFSATVACCQ

SEQ ID NO: 20649 - protein, 117 aa, Homo sapiens
LRGAWLSPLSAMACARPLISVYSEKGESSGKNVTLPAVFKAPIRPDIVNFVHTNLRKNNRQPYAVSELAGHQTSAESWGTGRAVARIPRVRGGGTHRSGQGAFGNVSFVSLPKTGHL

SEQ ID NO: 20650 - protein, 36 aa, Homo sapiens
LAVPVPLSHWGGMWERLNCAAEDFYSRLLQLMSKCS

SEQ ID NO: 20651 - protein, 107 aa, Homo sapiens
LGICGGLRRGSRAEPVSSSERQGRGACGAAMEATRRRQHLGATGGPGAQLGASFLQARHGSVSADEAARTAPFHLDLWFYFTLQNWVLDFGRPIAMTEMESWISPLF

SEQ ID NO: 20652 - protein, 138 aa, Homo sapiens
LGICGGLRRGSRAEPVSSSERQGRGACGAAMEATRRRQHLGATGGPGAQLGASFLQARHGSVSADEAARTAPFHLDLWFYFTLQNWVLDFGRPIAMLVFPLEWFPLNKPSVGDYFHMAYNVITPFLLLKWLPAPPVCP

SEQ ID NO: 20653 - protein, 150 aa, Homo sapiens
LGICGGLRRGSRAEPVSSSERQGRGACGAAMEATRRRQHLGATGGPGAQLGASFLQARHGSVSADEAARTAPFHLDLWFYFTLQNWVLDFGRPIAMLVFPLEWFPLNKPSVGDYFHMAYNVITPFLLLKVLSQGPHSLLSSPFFAHLAGR

SEQ ID NO: 20654 - protein, 63 aa, Homo sapiens
VEGLDDEEEDEDEEEYDEDAQVVEDEEDEDEEEEGEEEDVSGEEEVRRLGWAGPPSAPLRQSH

SEQ ID NO: 20655 - protein, 135 aa, Homo sapiens
LLPVLTSRSLRQPAVPHARLGGVEPAAMKSARAKTPRKPTVKKGSQTNLKDPVGVYCRVRPLGFPDQECCIEVINNTTVQLHTPEGYRLNRNGDYKETQYSFKQVFGTHTTQKELFDVVANPLVNDLIHGKNGMI

SEQ ID NO: 20656 - protein, 136 aa, Homo sapiens
LLPVLTSRSLRQPAVPHARLGGVEPAAMKSARAKTPRKPTVKKGSQTNLKDPVGVYCRVRPLGFPDQECCIEVINNTTVQLHTPEGYRLNRNGDYKETQYSFKQVFGTHTTQKELFDVVANPLVNDLIHGKNGFQI

SEQ ID NO: 20657 - protein, 398 aa, Homo sapiens
LLPVLTSRSLRQPAVPHARLGGVEPAAMKSARAKTPRKPTVKKGSQTNLKDPVGVYCRVRPLGFPDQECCIEVINNTTVQLHTPEGYRLNRNGDYKETQYSFKQVFGTHTTQKELFDVVANPLVNDLIHGKNGLLFTYGVTGSGKTHTMTGSPGEGGLLPRCLDMIFNSIGSFQAKRYVFKSNDRNSMDIQCEVDALLERQKREAMPNPKTSSSKRQVDPEFADMITVQEFCKAEEVDEDSVYGVFVSYIEIYNNYIYDLLEEVPFDPIKPKWNSCSTPMRNTDFVPPQSKLLREDKNHNMYVAGCTEVEVKSTEEAFEVFWRGQKKRRIANTHLNRESSRSHSVFNIKLVQAPLDADGDNVLQFWEAGYRILEPEFCCEKSLQIFKNPFGRSDKIRL

SEQ ID NO: 20658 - protein, 987 aa, Homo sapiens
LLPVLTSRSLRQPAVPHARLGGVEPAAMKSARAKTPRKPTVKKGSQTNLKDPVGVYCRVRPLGFPDQECCIEVINNTTVQLHTPEGYRLNRNGDYKETQYSFKQVFGTHTTQKELFDVVANPLVNDLIHGKNGLLFTYGVTGSGKTHTMTGSPGEGGLLPRCLDMIFNSIGSFQAKRYVFKSNDRNSMDIQCEVDALLERQKREAMPNPKTSSSKRQVDPEFADMITVQEFCKAEEVDEDSVYGVFVSYIEIYNNYIYDLLEEVPFDPIKPKPPQSKLLREDKNHNMYVAGCTEVEVKSTEEAFEVFWRGQKKRRIANTHLNRESSRSHSVFNIKLVQAPLDADGDNVLQEKEQITISQLSLVDLAGSERTNRTRAEGNRLREAGNINQSLMTLRTCMDVLRENQMYGTNKMVPYRDSKLTHLFKNYFDGEGKVRMIVCVNPKAEDYEENLQVMRFAEVTQEVEVARPVDKAICGLTPGRRYRNQPRGPVGNEPLVTDVVLQSFPPLPSCEILDINDEQTLPRLIEALEKRHNLRQMMIDEFNKQSNAFKALLQEFDNAVLSKENHMQGKLNEKEKMISGQKLEIERLEKKNKTLEYKIEILEKTTTIYEEDKRNLQQELETQNQKLQRQFSDKRRLEARLQGMVTETTMKWEKECERRVAAKQLEMQNKLWVKDEKLKQLKAIVTEPKTEKPERPSRERDREKVTQRSVSPSPVPLSSNYIAQISNGQQLMSQPQLHRRSNSCSSISVASCISEWEQKIPTYNTPLKVTSIARRRQQEPGQSKTCIVSDRRRGMYWTEGREVVPTFRNEIEIEEDHCGRLLFQPDQNAPPIRLRHRRSRSAGDRWVDHKPASNMQTETVMQPHVPHAITVSVANEKALAKCEKYMLTHQELASDGEIETKLIKGDIYKTRGGGQSVQFTDIETLKQESPNGSRKRRSSTVAPAQPDGAESEWTDVETRCSVAVEMRAGSQLGPGYQHHAQPKRKKP

SEQ ID NO: 20659 - protein, 883 aa, Homo sapiens
LLPVLTSRSLRQPAVPHARLGGVEPAAMKSARAKTPRKPTVKKGSQTNLKDPVGVYCRVRPLGFPDQECCIEVINNTTVQLHTPEGYRLNRNGDYKETQYSFKQVFGTHTTQKELFDVVANPLVNDLIHGKNGLLFTYGVTGSGKTHTMTGSPGEGGLLPRCLDMIFNSIGSFQAKRYVFKSNDRNSMDIQCEVDALLERQKREAMPNPKTSSSKRQVDPEFADMITVQEFCKAEEVDEDSVYGVFVSYIEIYNNYIYDLLEEVPFDPIKPKPPQSKLLREDKNHNMYVAGCTEVEVKSTEEAFEVFWRGQKKRRIANTHLNRESSRSHSVFNIKLVQAPLDADGDNVLQEKEQITISQLSLVDLAGSERTNRTRAEGNRLREAGNINQSLMTLRTCMDVLRENQMYGTNKMVPYRDSKLTHLFKNYFDGEGKVRMIVCVNPKAEDYEENLQVMRFAEVTQEVEVARPVDKAICGLTPGRRYRNQPRGPVGNEPLVTDVVLQSFPPLPSCEILDINDEQTLPRLIEALEKRHNLRQMMIDEFNKQSNAFKALLQEFDNAVLSKENHMQGKLNEKEKMISGQKLEIERLEKKNKTLEYKIEILEKTTTIYEEDKRNLQQELETQNQKLQRQFSDKRRLEARLQGMVTETTMKWEKECERRVAAKQLEMQNKLWVKDEKLKQLKAIVTEPKTEKPERPSRERDREKVTQRSVSPSPVPLLFQPDQNAPPIRLRHRRSRSAGDRWVDHKPASNMQTETVMQPHVPHAITVSVANEKALAKCEKYMLTHQELASDGEIETKLIKGDIYKTRGGGQSVQFTDIETLKQESPNGSRKRRSSTVAPAQPDGAESEWTDVETRCSVAVEMRAGSQLGPGYQHHAQPKRKKP

SEQ ID NO: 20660 - protein, 979 aa, Homo sapiens
LLPVLTSRSLRQPAVPHARLGGVEPAAMKSARAKTPRKPTVKKGSQTNLKDPVGVYCRVRPLGFPDQECCIEVINNTTVQLHTPEGYRLNRNGDYKETQYSFKQVFGTHTTQKELFDVVANPLVNDLIHGKNGLLFTYGVTGSGKTHTMTGSPGEGGLLPRCLDMIFNSIGSFQAKRYVFKSNDRNSMDIQCEVDALLERQKREAMPNPKTSSSKRQVDPEFADMITVQEFCKAEEVDEDSVYGVFVSYIEIYNNYIYDLLEEVPFDPIKPKPPQSKLLREDKNHNMYVAGCTEVEVKSTEEAFEVFWRGQKKRRIANTHLNRESSRSHSVFNIKLVQAPLDADGDNVLQEKEQITISQLSLVDLAGSERTNRTRAEGNRLREAGNINQSLMTLRTCMDVLRENQMYGTNKMVPYRDSKLTHLFKNYFDGEGKVRMIVCVNPKAEDYEENLQVMRFAEVTQEVEVARPVDKAICGLTPGRRYRNQPRGPVGNEPLVTDVVLQSFPPLPSCEILDINDEQTLPRLIEALEKRHNLRQMMIDEFNKQSNAFKALLQEFDNAVLSKENHMQGKLNEKEKMISGQKLEIERLEKKNKTLEYKIEILEKTTTIYEEDKRNLQQELETQNQKLQRQFSDKRRLEARLQGMVTETTMKWEKECERRVAAKQLEMQNKLWVKDEKLKQLKAIVTEPKTEKPERPSRERDREKVTQRSVSPSPVPLSSNYIAQISNGQQLMSQPQLHRRSNSCSSISVASCISEWEQKIPTYNTPLKVTSIARRRQQEPGQSKTCIVSDRRRGMYWTEGREVVPTFRNEIEIEEDHCGRNAPPIRLRHRRSRSAGDRWVDHKPASNMQTETVMQPHVPHAITVSVANEKALAKCEKYMLTHQELASDGEIETKLIKGDIYKTRGGGQSVQFTDIETLKQESPNGRKRRSSTVAPAQPDGAESEWTDVETRCSVAVEMRAGSQLGPGYQHHAQPKRKKP

SEQ ID NO: 20661 - protein, 780 aa, Homo sapiens
LFSFILLRATDSTEMETIRRLSIHLNKYLALTPPRRNSLMLWLIPWSMTSFMAKMVFKSNDRNSMDIQCEVDALLERQKREAMPNPKTSSSKRQVDPEFADMITVQEFCKAEEVDEDSVYGVFVSYIEIYNNYIYDLLEEVPFDPIKPKPPQSKLLREDKNHNMYVAGCTEVEVKSTEEAFEVFWRGQKKRRIANTHLNRESSRSHSVFNIKLVQAPLDADGDNVLQEKEQITISQLSLVDLAGSERTNRTRAEGNRLREAGNINQSLMTLRTCMDVLRENQMYGTNKMVPYRDSKLTHLFKNYFDGEGKVRMIVCVNPKAEDYEENLQVMRFAEVTQEVEVARPVDKAICGLTPGRRYRNQPRGPVGNEPLVTDVVLQSFPPLPSCEILDINDEQTLPRLIEALEKRHNLRQMMIDEFNKQSNAFKALLQEFDNAVLSKENHMQGKLNEKEKMISGQKLEIERLEKKNKTLEYKIEILEKTTTIYEEDKRNLQQELETQNQKLQRQFSDKRRLEARLQGMVTETTMKWEKECERRVAAKQLEMQNKLWVKDEKLKQLKAIVTEPKTEKPERPSRERDREKVTQRSVSPSPVPLSSNYIAQISNGQQLMSQPQLHRRSNSCSSISVASCISEWEQKIPTYNTPLKVTSIARRRQQEPGQSKTCIVSDRRRGMYWTEGREVVPTFRNEIEIEEDHCGRGDIYKTRGGGQSVQFTDIETLKQESPNGSRKRRSSTVAPAQPDGAESEWTDVETRCSVAVEMRAGSQLGPGYQHHAQPKRKKP

SEQ ID NO: 20662 - protein, 673 aa, Homo sapiens
MITVQEFCKAEEVDEDSVYGVFVSYIEIYNNYIYDLLEEVPFDPIKPKWNSCSTPMRNTDFVPPQSKLLREDKNHNMYVAGCTEVEVKSTEEAFEVFWRGQKKRRIANTHLNRESSRSHSVFNIKLVQAPLDADGDNVLQEKEQITISQLSLVDLAGSERTNRTRAEGNRLREAGNINQSLMTLRTCMDVLRENQMYGTNKMVPYRDSKLTHLFKNYFDGEGKVRMIVCVNPKAEDYEENLQVMRFAEVTQEVEVARPVDKAICGLTPGRRYRNQPRGPVGNEPLVTDVVLQSFPPLPSCEILDINDEQTLPRLIEALEKRHNLRQMMIDEFNKQSNAFKALLQEFDNAVLSKENHMQGKLNEKEKMISGQKLEIERLEKKNKTLEYKIEILEKTTTIYEEDKRNLQQELETQNQKLQRQFSDKRRLEARLQGMVTETTMKWEKECERRVAAKQLEMQNKLWVKDEKLKQLKAIVTEPKTEKPERPSRERDREKVTQRSVSPSPVPLLFQPDQNAPPIRLRHRRSRSAGDRWVDHKPASNMQTETVMQPHVPHAITVSVANEKALAKCEKYMLTHQELASDGEIETKLIKGDIYKTRGGGQSVQFTDIETLKQESPNGSRKRRSSTVAPAQPDGAESEWTDVETRCSVAVEMRAGSQLGPGYQHHAQPKRKKP

SEQ ID NO: 20663 - protein, 33 aa, Homo sapiens
LLREDKNHNMYVAGCTEVEVKSTEEAFEVFWRG

SEQ ID NO: 20664 - protein, 168 aa, Homo sapiens
MLVSQLLFQPDQNAPPIRLRHRRSRSAGDRWVDHKPASNMQTETVMQPHVPHAITVSVANEKALAKCEKYMLTHQELASDGEIETKLIKGDIYKTRGGGQSVQFTDIETLKQESPNGSRKRRSSTVAPAQPDGAESEWTDVETRCSVAVEMRAGSQLGPGYQHHAQPK

SEQ ID NO: 20665 - protein, 172 aa, Homo sapiens [sequence omitted]

SEQ ID NO: 20666 - protein, 37 aa, Homo sapiens
MDRCRNKVFCGCGDESRIPAGTWISASRTTQAQKAMN

SEQ ID NO: 20667 - protein, 112 aa, Homo sapiens
VRPSLHPATSTASGSASPTLARAMASVSELACIYSALILHDDEVTVTALANVNIGSLICNVGAGGPAPAAGAAPAGGPAPSTAAAPAEEKKVEAKKEESEESDDDMGFGLFD

SEQ ID NO: 20668 - protein, 83 aa, Homo sapiens
VLNKDRTGRLPMHAHVLQALANVNIGSLICNVGAGGPAPAAGAAPAGGPAPSTAAAPAEEKKVEAKKEESEESDDDMGFGLFD

SEQ ID NO: 20669 - protein, 108 aa, Homo sapiens
VMDPRAPPPAPVPPPSPSPSIRPATLVELTLGCNVALVGWDTREEDQRLTETWLCLQPALVGQPRAWLPIMWPHPIKGRRRNAGLEAPGARWQEGDSFLSCVYSVQFL

SEQ ID NO: 20670 - protein, 536 aa, Homo sapiens
MTSAAMSKPHSEAGTAFIQTQQLHAAMADTFLEHMCRLDIDSPPITARNTGIICTIGPASRSVETLKEMIKSGMNVARLNFSHGTHEYHAETIKNVRTATESFASDPILYRPVAVALDTKGPEIRTGLIKGSGTAEVELKKGATLKITLDNAYMEKCDENILWLDYKNICKVVEVGSKIYVDDGLISLQVKQKGADFLVTEVENGGSLGSKKGVNLPGAAVDLPAVSEKDIQDLKFGVEQDVDMVFASFIRKASDVHEVRKVLGEKGKNIKIISKIENHEGVRRFDEILEASDGIMVARGDLGIEIPAEKVFLAQKMMIGRCNRAGKPVICATQMLESMIKKPRPTRAEGSDVANAVLDGADCIMLSGETAKGDYPLEAVRMQHLIAREAEAAMFHRKLFEELVRASSHSTDLMEAMAMGSVEASYKCLAAALIVLTESGRSAHQVARYRPRAPIIAVTRNPQTARQAHLYRGIFPVLCKDPVQEAWAEDVDLRVNFAMNVGKARGFFKKGDVVIVLTGWRPGSGFTNTMRVVPVP

SEQ ID NO: 20671 - protein, 563 aa, Homo sapiens
VELRERRTAPHAWGLLFRSPQRRSFQIRTSAAMSKPHSEAGTAFIQTQQLHAAMADTFLEHMCRLDIDSPPITARNTGIICTIGPASRSVETLKEMIKSGMNVARLNFSHGTHEYHAETIKNVRTATESFASDPILYRPVAVALDTKGPEIRTGLIKGSGTAEVELKKGATLKITLDNAYMEKCDENILWLDYKNICKVVEVGSKIYVDDGLISLQVKQKGADFLVTEVENGGSLGSKKGVNLPGAAVDLPAVSEKDIQDLKFGVEQDVDMVFASFIRKASDVHEVRKVLGEKGKNIKIISKIENHEGVRRFDEILEASDGIMVARGDLGIEIPAEKVFLAQKMMIGRCNRAGKPVICATQMLESMIKKPRPTRAEGSDVANAVLDGADCIMLSGETAKGDYPLEAVRMQHLIAREAEAAMFHRKLFEELVRASSHSTDLMEAMAMGSVEASYKCLAAALIVLTESGRSAHQVARYRPRAPIIAVTRNPQTARQAHLYRGIFPVLCKDPVQEAWAEDVDLRVNFAMNVGKARGFFKKGDVVIVLTGWRPGSGFTNTMRVVPVP

SEQ ID NO: 20672 - protein, 566 aa, Homo sapiens
MQWSSERGERLLTPGACSSEVPSAVPSRSGGTSAAMSKPHSEAGTAFIQTQQLHAAMADTFLEHMCRLDIDSPPITARNTGIICTIGPASRSVETLKEMIKSGMNVARLNFSHGTHEYHAETIKNVRTATESFASDPILYRPVAVALDTKGPEIRTGLIKGSGTAEVELKKGATLKITLDNAYMEKCDENILWLDYKNICKVVEVGSKIYVDDGLISLQVKQKGADFLVTEVENGGSLGSKKGVNLPGAAVDLPAVSEKDIQDLKFGVEQDVDMVFASFIRKASDVHEVRKVLGEKGKNIKIISKIENHEGVRRFDEILEASDGIMVARGDLGIEIPAEKVFLAQKMMIGRCNRAGKPVICATQMLESMIKKPRPTRAEGSDVANAVLDGADCIMLSGETAKGDYPLEAVRMQHLIAREAEAAMFHRKLFEELVRASSHSTDLMEAMAMGSVEASYKCLAAALIVLTESGRSAHQVARYRPRAPIIAVTRNPQTARQAHLYRGIFPVLCKDPVQEAWAEDVDLRVNFAMNVGKARGFFKKGDVVIVLTGWRPGSGFTNTMRVVPVP

SEQ ID NO: 20673 - protein, 605 aa, Homo sapiens
MQWSSERGERLLTPGACSSEVPSAVPSRSGGSPGHTVFSSERSLLVRPRSHPEPKGEHYVTGSPTPENQRTSAAMSKPHSEAGTAFIQTQQLHAAMADTFLEHMCRLDIDSPPITARNTGIICTIGPASRSVETLKEMIKSGMNVARLNFSHGTHEYHAETIKNVRTATESFASDPILYRPVAVALDTKGPEIRTGLIKGSGTAEVELKKGATLKITLDNAYMEKCDENILWLDYKNICKVVEVGSKIYVDDGLISLQVKQKGADFLVTEVENGGSLGSKKGVNLPGAAVDLPAVSEKDIQDLKFGVEQDVDMVFASFIRKASDVHEVRKVLGEKGKNIKIISKIENHEGVRRFDEILEASDGIMVARGDLGIEIPAEKVFLAQKMMIGRCNRAGKPVICATQMLESMIKKPRPTRAEGSDVANAVLDGADCIMLSGETAKGDYPLEAVRMQHLIAREAEAAMFHRKLFEELVRASSHSTDLMEAMAMGSVEASYKCLAAALIVLTESGRSAHQVARYRPRAPIIAVTRNPQTARQAHLYRGIFPVLCKDPVQEAWAEDVDLRVNFAMNVGKARGFFKKGDVVIVLTGWRPGSGFTNTMRVVPVP

SEQ ID NO: 20674 - protein, 77 aa, Homo sapiens
MLSGETAKGDYPLEAVRMQHLIAREAEAAIYHLQLFEELRRLAPITSDPTEATAVGAVEASFKCCSGAIIVLTKSGR

SEQ ID NO: 20675 - protein, 84 aa, Homo sapiens
LDGADCIMLSGETAKGDYPLEAVRMQHLIAREAEAAMFHRKLFEELVRASSHSTDLMEAMAMGSVEASYKCLAAALIVLTESGR

SEQ ID NO: 20676 - protein, 130 aa, Homo sapiens
MNVARLNFSHGTHEYHAETIKNVRTATESFASDPILYRPVAVALDTKGPEIRTGLIKGSGTAEVELKKGATLKITLDNAYMEKCDENILWLDYKNICKVVEVGSKIYVDDGLISLQVKQKGTYGSWSPVV

SEQ ID NO: 20677 - protein, 228 aa, Homo sapiens
VVSVTNVICAICFGRRYDHNHQELLSLVNLNNNFGEVVGSGNPADFIPILRYLPNPSLNAFKDLNEKFYSFMQKMVKEHYKTFEKGHIRDITDSLIEHCQEKQLDENANVQLSDEKIINIVLDLFGAGFDTVTTAISWSLMYLVMNPRVQRKIQEELDTVIGRSRRPRLSDRSHLPYMEAFILETFRHSSFVPFTIPHSTTRDTSLKGFYIPKGRCVFVNQWQINHDQ

SEQ ID NO: 20678 - protein, 34 aa, Homo sapiens
LGEPRPLMPPAARWPGPQCPKRALMVPSDRLALL

SEQ ID NO: 20679 - protein, 41 aa, Homo sapiens
LPLPGGPSSPLLAPIPLCTAPPGDPCAPPLPPDRMDRPAGR

SEQ ID NO: 20680 - protein, 22 aa, Homo sapiens
MPERALSFGSCGCGCRHHGAEA

SEQ ID NO: 20681 - protein, 441 aa, Homo sapiens
LCLLPDYGLLEGRTWFGSQSSQGLMNDRCPRPGSSSLARGCLLSVADGAGREGGPGPALPGLGRCCWRLALHQASLWQESELCRGRRLRMMPQLQFKDAFWCRDFTAHTGYEVLLQRLLDGRKMCKDMEELLRQRAQAEERYGKELVQIARKAGGQTEINSLRASFDSLKQQMENVGSSHIQLALTLREELRSLEEFRERQKEQRKKYEAVMDRVQKSKLSLYKKAMESKKTYEQKCRDADDAEQAFERISANGHQKQVEKSQNKARQCKDSATEAERVYRQSIAQLEKVRAEWEQEHRTTCEAFQLQEFDRLTILRNALWVHSNQLSMQCVKDDELYEEVRLTLEGCSIDADIDSFIQAKSTGTEPPGEVRLADSAASSSGALPELLRSGGHPADQQPWHTAVLRHDKEVLWTAARKSQDHFVGSFCCVHRDPDPHPRAE

SEQ ID NO: 20682 - protein, 146 aa, Homo sapiens
LARGCLLSVADGAGREGGPGPALPGLGRCCWRLALHQASLWQESELCRGRRLRMMPQLQFKDAFWCRDFTAHTGYEVLLQRLLDGRKMCKDMEELLRQRAQAEERYGKELVQIARKAGGQTEINWWTVVSLPRGEPWKRRGLQGRC

SEQ ID NO: 20683 - protein, 134 aa, Homo sapiens
LARGCLLSVADGAGREGGPGPALPGLGRCCWRLALHQASLWQESELCRGRRLRMMPQLQFKDAFWCRDFTAHTGYEVLLQRLLDGRKMCKDMEELLRQRAQAEERYGKELVQIARKAGGQTEIKVATGAAPSLL

SEQ ID NO: 20684 - protein, 189 aa, Homo sapiens
LARGCLLSVADGAGREGGPGPALPGLGRCCWRLALHQASLWQESELCRGRRLRMMPQLQFKDAFWCRDFTAHTGYEVLLQRLLDGRKMCKDMEELLRQRAQAEERYGKELVQIARKAGGQTEINSLRASFDSLKQQMENVGSSHIQLALTLREELRSLEEFRERQKEQRKKGSLPRPRPSAQNLVSPAV

SEQ ID NO: 20685 - protein, 124 aa, Homo sapiens
LCRDFTAHTGYEVLLQRLLDGRKMCKDMEELLRQRAQAEERYGKELVQIARKAGGQTEINSLRASFDSLKQQMENVGSSHIQLALTLREELRSLEEFRERQKEQRKKSQERCCASSQGHSVLLA

SEQ ID NO: 20686 - protein, 175 aa, Homo sapiens
VRSCGVSRSFVRGRRSRGRRGASRGRGPRLRTSCPLQYEAVMDRVQKSKLSLYKKAMESKKTYEQKCRDADDAEQAFERISANGHQKQVEKSQNKARQCKDSATEAERVYRQSIAQLEKVRAEWEQEHRTTCEAFQLQEFDRLTILRNALWVHSNQLSMQCVKDDEVGAEGLGVG

SEQ ID NO: 20687 - protein, 262 aa, Homo sapiens
VRSCGVSRSFVRGRRSRGRRGASRGRGPRLRTSCPLQYEAVMDRVQKSKLSLYKKAMESKKTYEQKCRDADDAEQAFERISANGHQKQVEKSQNKARQCKDSATEAERVYRQSIAQLEKVRAEWEQEHRTTCEAFQLQEFDRLTILRNALWVHSNQLSMQCVKDDELYEEVRLTLEGCSIDADIDSFIQAKSTGTEPPGEVRLADSAASRCIEPLGRPGPEPQVPGPGWGSSQLPSGQRSPSRGCGELGPRPAASSQAKLRA

SEQ ID NO: 20688 - protein, 41 aa, Homo sapiens
MAGPAWISKVSRLLGAFHNPKQVTRGFTGGVSIIMSFIFSF

SEQ ID NO: 20689 - protein, 41 aa, Homo sapiens
LRMRGGHISSGYSVSGGGLFFRGVKGSVDISGLQGLPSGTI

SEQ ID NO: 20690 - protein, 46 aa, Homo sapiens
VSGGGLFFRGVKGSVDISGLQGLPSGEPLAPWGPRKLGRFPIGRGS

SEQ ID NO: 20691 - protein, 97 aa, Homo sapiens
VAAAAQTGGEGEERAAWAWVEILPWRKLWGDPLGPPTFCPHLCAQPGNLQTRRSSTMSSPVSMTQRSPAMCLSVLLNRLKPHGPRIFFLSRRATFHI

SEQ ID NO: 20692 - protein, 34 aa, Homo sapiens
LPSPLCPAWKPTDKEEFHHELTRVYDAKITSHVP

SEQ ID NO: 20693 - protein, 106 aa, Homo sapiens
LFPQYDEEAMVEAVALYNPVSFAFEVTQDFMMYRTGIYSSTSCHKTPDKVNHAVLAVGYGEKNGIPYWIVKNSWGPQWGMNGYFLIERGKNMCGLAACASYPIPLV

SEQ ID NO: 20694 - protein, 206 aa, Homo sapiens
LTGPQMWLSQGGLAPHAKALTASQLAGHWVVSFFQAEQQLVDCAQDFNNHGCQGGLPSQAFEYILYNKGIMGEDTYPYQGKDGYCKFQPGKAIGFVKDVANITIYDEEAMVEAVALYNPVSFAFEVTQDFMMYRTGIYSSTSCHKTPDKVNHAVLAVGYGEKNGIPYWIVKNSWGPQWGMNGYFLIERGKNMCGLAACASYPIPLV

SEQ ID NO: 20695 - protein, 223 aa, Homo sapiens
MREEPGPMHPSPRPQETDDAPEGTILAPASVEKGGTVHSRPGDAMRTLGCGQAEQQLVDCAQDFNNHGCQGGLPSQAFEYILYNKGIMGEDTYPYQGKDGYCKFQPGKAIGFVKDVANITIYDEEAMVEAVALYNPVSFAFEVTQDFMMYRTGIYSSTSCHKTPDKVNHAVLAVGYGEKNGIPYWIVKNSWGPQWGMNGYFLIERGKNMCGLAACASYPIPLV

SEQ ID NO: 20696 - protein, 218 aa, Homo sapiens
LRRGLAPGSPRLRCRRTVRELLSCWTFSTTGALESAIAIATGKMLSLAEQQLVDCAQDFNNHGCQGGLPSQAFEYILYNKGIMGEDTYPYQGKDGYCKFQPGKAIGFVKDVANITIYDEEAMVEAVALYNPVSFAFEVTQDFMMYRTGIYSSTSCHKTPDKVNHAVLAVGYGEKNGIPYWIVKNSWGPQWGMNGYFLIERGKNMCGLAACASYPIPLV

SEQ ID NO: 20697 - protein, 356 aa, Homo sapiens
LTLWAATSADPERKSQAASAAMWATLPLLCAGAWLLGVPVCGAAELCVNSLEKFHFKSWMSKHRKTYSTEEYHHRLQTFASNWRKINAHNNGNHTFKMALNQFSDMSFAEIKHKYLWSEPQNCSATKSNYLRGTGPYPPSVDWRKKGNFVSPVKNQGACGSCWTFSTTGALESAIAIATGKMLSLAEQQLVDCAQDFNNHGCQGGLPSQAFEYILYNKGIMGEDTYPYQGKDGYCKFQPGKAIGFVKDVANITIYDEEAMVEAVALYNPVSFAFEVTQDFMMYRTGIYSSTSCHKTPDKVNHAVLAVGYGEKNGIPYWIVKNSWGPQWGMNGYFLIERGKNMCGLAACASYPIPLV

SEQ ID NO: 20698 - protein, 123 aa, Homo sapiens
VHSRPGDAMRTLGCGQAEQQLVDCAQDFNNHGCQGGLPSQAFEYILYNKGIMGEDTYPYQGKDGYCKFQPGKAIGFVKDVANITIVSADPPLGWGMCPDEEASLMLSDSQWAQQGSPSGSTSL

SEQ ID NO: 20699 - protein, 107 aa, Homo sapiens
LPHSCHLRVQPGSQVALNQFSDMSFAEIKHKYLWSEPQNCSATKSNYLRGTGPYPPSVDWRKKGNFVSPVKNQGACGSCWTFSTTGALESAIAIATGKMLSLPQLSS

SEQ ID NO: 20700 - protein, 152 aa, Homo sapiens
MVIFAVNLTQHQQWRPGVPHMWQHRKTYSTEEYHHRLQTFASNWRKINAHNNGNHTFKMALNQFSDMSFAEIKHKYLWSEPQNCSATKSNYLRGTGPYPPSVDWRKKGNFVSPVKNQGACGSCWTFSTTGALESAIAIATGKMLSLQPQLSS

SEQ ID NO: 20701 - protein, 191 aa, Homo sapiens
LTLWAATSADPERKSQAASAAMWATLPLLCAGAWLLGVPVCGAAELCVNSLEKFHFKSWMSKHRKTYSTEEYHHRLQTFASNWRKINAHNNGNHTFKMALNQFSDMSFAEIKHKYLWSEPQNCSATKSNYLRGTGPYPPSVDWRKKGNFVSPVKNQGACGSCWTFSTTGALESAIAIATGKMLSLQPQLSS

SEQ ID NO: 20702 - protein, 58 aa, Homo sapiens
VDAGRTWPGAHWAPEERGRAFPGERPGTLRAGTGRGKLHYRRGFSEGGRLVGPEEQMG

SEQ ID NO: 20703 - protein, 48 aa, Homo sapiens
LGELGQGRTGLRRNGAELSPVRGQELCVLARGGVNCIIGGGSRRVGGL

SEQ ID NO: 20704 - protein, 8 aa, Homo sapiens
LGRHLRGP

SEQ ID NO: 20705 - protein, 62 aa, Homo sapiens
MDKAKRRLGEMAQSHTYAGRVSGPQEEENGFVKKFEPKSGWMTFLEVTGKICEMLSLLKQYC

SEQ ID NO: 20706 - protein, 188 aa, Homo sapiens
VSQLKTLLSTRQKMTDCEFGYIYRLAQDYLQCVLQIPQPGSGPSKTSRVLQNVAFSVQKEVEKNLKSCLDNVNVVSVDTARTLFNQVMEKEFEDGIINWGRIVTIFAFEGILIKKLLRQQIAPDVDTYKEISYFVAEFIMNNTGEWIRQNGGWENGFVKKFEPKSGWMTFLEVTGKICEMLSLLKQYC

SEQ ID NO: 20707 - protein, 176 aa, Homo sapiens
VSQLKTLLSTRQKMTDCEFGYIYRLAQDYLQCVLQIPQPGSGPSKTSRVLQNVAFSVQKEVEKNLKSCLDNVNVVSVDTARTLFNQVMEKEFEDGIINWGRIVTIFAFEGILIKKLLRQQIAPDVDTYKEISYFVAEFIMNNTGEWIRQNGGWGKWHNHTPMLVESVAHKKRKMAL

SEQ ID NO: 20708 - protein, 178 aa, Homo sapiens
VLFSMSFIPVAEDSDFPIHNLPYGVFSTRGDPRPRIGVAIGDQILDLSIIKHLFTGPVLSKHQDVFNQPTLNSFMGLGQAAWKEARVFLQNLLSVSQARLRDDTELRKCAFISQASATMHLPATIGECSLFTKIRTEQLRGPRGLARRLHRLLFLSAACYQRRNHVQGQGECVDAKLV

SEQ ID NO: 20709 - protein, 164 aa, Homo sapiens
VLFSMSFIPVAEDSDFPIHNLPYGVFSTRGDPRPRIGVAIGDQILDLSIIKHLFTGPVLSKHQDVFNQPTLNSFMGLGQAAWKEARVFLQNLLSVSQARLRDDTELRKCAFISQASATMHLPATIGDYTDFYSSRQHATNVGIMFRDKENALMPNWYELGQMSA

SEQ ID NO: 20710 - protein, 423 aa, Homo sapiens
VLFSMSFIPVAEDSDFPIHNLPYGVFSTRGDPRPRIGVAIGDQILDLSIIKHLFTGPVLSKHQDVFNQPTLNSFMGLGQAAWKEARVFLQNLLSVSQARLRDDTELRKCAFISQASATMHLPATIGDYTDFYSSRQHATNVGIMFRDKENALMPNWLHLPVGYHGRASSVVVSGTPIRRPMGQMKPDDSKPPVYGACKLLDMELEMAFFVGPGNRLGEPIPISKAHEHIFGMVLMNDWSARDIQKWEYVPLGPFLGKSFGTTVSPWVVPMDALMPFAVPNPKQDPRPLPYLCHDEPYTFDINLSVNLKGEGMSQAATICKSNFKYMYWTMLQQLTHHSVNGCNLRPGDLLASGTISGPEPENFGSMLELSWKGTKPIDLGNGQTRKFLLDGDEVIITGYCQGDGYRIGFGQCAGKVLPALLPS

SEQ ID NO: 20711 - protein, 62 aa, Homo sapiens
LHLPVGYHGRASSVVVSGTPIRRPMGQMKPDDSKPPVYGACKLLDMELEMVSELDVLLPWDL

SEQ ID NO: 20712 - protein, 68 aa, Homo sapiens
MVLMNDWSARDIQKWEYVPLGPFLGKSFGTTVSPWVVPMDALMPFAVPNPKQVSTFSAGSSQTQPCCL

SEQ ID NO: 20713 - protein, 152 aa, Homo sapiens
VKSCWTMGSFSHRTILFLFSSLMHGIKFSSILLFFPTGEGMSQAATICKSNFKYMYWTMLQQLTHHSVNGCNLRPGDLLASGTISGPEPENFGSMLELSWKGTKPIDLGNGQTRKFLLDGDEVIITGYCQGDGYRIGFGQCAGKVLPALLPS

SEQ ID NO: 20714 - protein, 248 aa, Homo sapiens
LGLTGSPGLSAGLRAAPPAPLPSGRLSSPSKMATPAAVNPPEMASDIPGSVTLPVAPMAATGQVRMAGAMPARGGKRRSGMDFDDEDGEGPSKFSRENHSEIERRRRNKMTQYITELSDMVPTCSALARKPDKLTILRMAVSHMKSMRGTGNKSTDGAYKPSFLTEQELKHLILEAADGFLFVVAAETGRVIYVSDSVTPVLNQPQSEWFGSTLYEQVHPDDVEKLREQLCTSENSMTGQWSSLYEAV

SEQ ID NO: 20715 - protein, 748 aa, Homo sapiens
LGLTGSPGLSAGLRAAPPAPLPSGRLSSPSKMATPAAVNPPEMASDIPGSVTLPVAPMAATGQVRMAGAMPARGGKRRSGMDFDDEDGEGPSKFSRENHSEIERRRRNKMTQYITELSDMVPTCSALARKPDKLTILRMAVSHMKSMRGTGNKSTDGAYKPSFLTEQELKHLILEAADGFLFVVAAETGRVIYVSDSVTPVLNQPQSEWFGSTLYEQVHPDDVEKLREQLCTSENSMTGRILDLKTGTVKKEGQQSSMRMCMGSRRSFICRMRCGNAPLDHLPLNRITTMRKRFRNGLGPVKEGEAQYAVVHCTGYIKAWPPAGMTIPEEDADVGQGSKYCLVAIGRLQVTSSPVCMDMNGMSVPTEFLSRHNSDGIITFVDPRCISVIGYQPQDLLGKDILEFCHPEDQSHLRESFQQVVKLKGQVLSVMYRFRTKNREWMLIRTSSFTFQNPYSDEIEYIICTNTNVKQLQQQQAELEVHQRDGLSSYDLSQVPVPNLPAGVHEAGKSVEKADAIFSQERDPRFAEMFAGISASEKKMMSSASAAGTQQIYSQGSPFPSGHSGKAFSSSVVHVPGVNDIQSSSSTGQNMSQISRQLNQSQVAWTGSRPPFPGQQIPSQSSKTQSSPFGIGTSHTYPADPSSYSPLSSPATSSPSGNAYSSLANRTPGFAESGQSSGQFQGRPSEVWSQWQSQHHGQQSGEQHSHQQPGQTEVFQDMLPMPGDPTQGTGNYNIEDFADLGMFPPFSE

SEQ ID NO: 20716 - protein, 747 aa, Homo sapiens
LGLTGSPGLSAGLRAAPPAPLPSGRLSSPSKMATPAAVNPPEMASDIPGSVTLPVAPMAATGQVRMAGAMPARGGKRRSGMDFDDEDGEGPSKFSRENHSEIERRRRNKMTQYITELSDMVPTCSALARKPDKLTILRMAVSHMKSMRGTGNKSTDGAYKPSFLTEQELKHLILEAADGFLFVVAAETGRVIYVSDSVTPVLNQPQSEWFGSTLYEQVHPDDVEKLREQLCTSENSMTGRILDLKTGTVKKEGQQSSMRMCMGSRRSFICRMRCGNAPLDHLPLNRITTMRKRFRNGLGPVKEGEAQYAVVHCTGYIKAWPPAGMTIPEEDADVGQGSKYCLVAIGRLQVTSSPVCMDMNGMSVPTEFLSRHNSDGIITFVDPRCISVIGYQPQDLLGKDILEFCHPEDQSHLRESFQQVVKLKGQVLSVMYRFRTKNREWMLIRTSSFTFQNPYSDEIEYIICTNTNVKQLQQQQAELEVHQRDGLSSYDLSQVPVPNLPAGVHEAGKSVEKADAIFSQERDPRFAEMFAGISASEKKMMSSASAAGTQQIYSQGSPFPSGHSGKAFSSSVVHVPGVNDIQSSSSTGQNMSQISRQLNQSQVAWTGSRPPFPGQQIPSQSSKTQSSPFGIGTSHTYPADPSSYSPLSSPATSSPSGNAYSSLANRTPGFAESGQSSGQFQGRPSEVWSQWQSQHHGQQSGEQHSHQQPGQTEVFQDMLPMPGDPRNEWWSPHSRQHFRQPISYARM

SEQ ID NO: 20717 - protein, 143 aa, Homo sapiens
MTQYITELSDMVPTCSALARKPDKLTILRMAVSHMKSMRGTGNKSTDGAYKPSFLTEQELKHLILEAADGFLFVVAAETGRVIYVSDSVTPVLNQPQSEWFGSTLYEQVHPDDVEKLREQLCTSENSMTGMQTSHALFMATTS

SEQ ID NO: 20718 - protein, 77 aa, Homo sapiens
MHGALGECWENGQAECTALVLPAGAKKHRDTEAPAPQLRWSVCASTVPWDICNLCSVTWTCCPNGCVVPCVCHVWPA

SEQ ID NO: 20719 - protein, 44 aa, Homo sapiens
VQVSGAEDMGSSSGSATHPPALNFSGGLKTRTRADSRIFCLADL

SEQ ID NO: 20720 - protein, 32 aa, Homo sapiens
MNPSPCFQGPLPSPTPLTLVRTPSASCVSFLL

SEQ ID NO: 20721 - protein, 47 aa, Homo sapiens
VAAAGHMEGPTLWESPCVPPRVLQVGPRRCCLLRNNPCIPAHGFCRT

SEQ ID NO: 20722 - protein, 54 aa, Homo sapiens
MGLSLPALPLGPPLPPAGLSLPQALGIIISPQKRHKNRFWIKEVFLSEMKTVFL

SEQ ID NO: 20723 - protein, 23 aa, Homo sapiens
VHTQTQVNTLTVNLPCIRSCAGH

SEQ ID NO: 20724 - protein, 32 aa, Homo sapiens
LLVLQPMPSRYLSDWRRAQSWIRKGRGTCDFV

SEQ ID NO: 20725 - protein, 28 aa, Homo sapiens
LSPNLPGSFPTKHPILRSHEPPGHSPFL

SEQ ID NO: 20726 - protein, 168 aa, Homo sapiens
LPPALLPEERILISKKGRKEGQLPASPSRPPRSEGRARPCPRRRRRRRTSRRDFPGSPATRSADSEFALPRFMVPASPLGGRKLQPLPLPRRAFRVLSPSGPPRAARAPAAAAQCPLPAAVDGMMVRGRHRGLGQLSRDGRRGGGSGRGSGGGSGLPSGMPVPPGRDG

SEQ ID NO: 20727 - protein, 546 aa, Homo sapiens
LQKRVFPRRQNEGVWSTAGEMELREGRAGTHEVAAKPCPVATRQPRARDQERKKGSFTSSLRMESHSRAGKSRKSAKFRSISRSLMLCNAKTSDDGSSPDEKYPDPFEISLAQGKEGIFHSSVQLADTSEAGPSSVPDLALASEAAQLQAAGNDRGKTCRRIFFMKESSTASSREKPGKLEAQSSNFLFPKACHQRARSNSTSVNPYCTREIDFPMTKKSAAPTDRQPYSLCSNRKSLSQQLDCPAGKAAGTSRPTRSLSTAQLVQPSGGLQASVISNIVLMKGQAKGLGFSIVGGKDSIYGPIGIYVKTIFAGGAAAADGRLQEGDEILELNGESMAGLTHQDALQKFKQAKKGLLTLTVRTRLTAPPSLCSHLSPPLCRSLSSSTCITKDSSSFALESPSAPISTAKPNYRIMVEVSLQKEAGVGLGIGLCSVPYFQCISGIFVHTLSPGSVAHLDGRLRCGDEIVEISDSPVHCLTLNEVYTILSHCDPGPVPIIVSRHPDPQVSEQQLKEAVAQAVENTKFGKERHQWSLEDAEMELGPPGS

SEQ ID NO: 20728 - protein, 1361 aa, Homo sapiens
VAAKPCPVATRQPRARDQERKKGSFTSSLRMESHSRAGKSRKSAKFRSISRSLMLCNAKTSDDGSSPDEKYPDPFEISLAQGKEGIFHSSVQLADTSEAGPSSVPDLALASEAAQLQAAGNDRGKTCRRIFFMKESSTASSREKPGKLEAQSSNFLFPKACHQRARSNSTSVNPYCTREIDFPMTKKSAAPTDRQPYSLCSNRKSLSQQLDCPAGKAAGTSRPTRSLSTAQLVQPSGGLQASVISNIVLMKGQAKGLGFSIVGGKDSIYGPIGIYVKTIFAGGAAAADGRLQEGDEILELNGESMAGLTHQDALQKFKQAKKGLLTLTVRTRLTAPPSLCSHLSPPLCRSLSSSTCITKDSSSFALESPSAPISTAKPNYRIMVEVSLQKEAGVGLGIGLCSVPYFQCISGIFVHTLSPGSVAHLDGRLRCGDEIVEISDSPVHCLTLNEVYTILSHCDPGPVPIIVSRHPDPQVSEQQLKEAVAQAVENTKFGKERHQWSLEGVKRLESSWHGRPTLEKEREKNSAPPHRRAQKVMIRSSSDSSYMSGSPGGSPGSGSAEKPSSDVDISTHSPSLPLAREPVVLSIASSRLPQESPPLPESRDSHPPLRLKKSFEILVRKPMSSKPKPPPRKYFKSDSDPQKSLEERENSSCSSGHTPPTCGQEARELLPLLLPQEDTAGRSPSASAGCPGPGIGPQTKSSTEGEPGWRRASPVTQTSPIKHPLLKRQARMDYSFDTTAEDPWVRISDCIKNLFSPIMSENHGHMPLQPNASLNEEEGTQGHPDGTPPKLDTANGTPKVYKSADSSTVKKGPPVAPKPAWFRQSLKGLRNRASDPRGLPDPALSTQPAPASREHLGSHIRASSSSSSIRQRISSFETFGSSQLPDKGAQRLSLQPSSGEAAKPLGKHEEGRFSGLLGRGAAPTLVPQQPEQVLSSGSPAASEARDPGVSESPPPGRQPNQKTLPPGPDPLLRLLSTQAEESQGPVLKMPSQRARSFPLTRSQSCETKLLDEKTSKLYSISSQVSSAVMKSLLCLPSSISCAQTPCIPKEGASPTSSSNEDSAANGSAETSALDTGFSLNLSELREYTEGLTEAKEDDDGDHSSLQSGQSVISLLSSEELKKLIEEVKVLDEATLKQLDGIHVTILHKEEGAGLGFSLAGGADLENKVITVHRVFPNGLASQEGTIQKGNEVLSINGKSLKGTTHHDALAILRQAREPRQAVIVTRKLTPEAMPDLNSSTDSAASASAASDVSVESTEATVCTVTLEKMSAGLGFSLEGGKGSLHGDKPLTINRIFKGAASEQSETVQPGDEILQLGGTAMQGLTRFEAWNIIKALPDGPVTIVIRRKSLQSKETTAAGDS

SEQ ID NO: 20729 - protein, 89 aa, Homo sapiens
LEMGCPIGQGSCLQLWQPLEGPTAESSLPAALPTAGTPSPSSMGDLGGISPYTSVIGSESLNDFPNPKSYSSPGTNTKTAILQIHSDFR

SEQ ID NO: 20730 - protein, 173 aa, Homo sapiens
LESSWHGRPTLEKEREKNSAPPHRRAQKVMIRSSSDSSYMSGSPGGSPGSGSAEKPSSDVDISTHSPSLPLAREPVVLSIASSRLPQESPPLPESRDSHPPLRLKKSFEILVRKPMSSKPKPPPRKYFKSDSDPQKSLEERENSSCSSGHTPPTCGQGLILKSPMKRMQYWMC

SEQ ID NO: 20731 - protein, 703 aa, Homo sapiens
LFTPQEARELLPLLLPQEDTAGRSPSASAGCPGPGIGPQTKSSTEGEPGWRRASPVTQTSPIKHPLLKRQARMDYSFDTTAEDPWVRISDCIKNLFSPIMSENHGHMPLQPNASLNEEEGTQGHPDGTPPKLDTANGTPKVYKSADSSTVKKGPPVAPKPAWFRQSLKGLRNRASDPRGLPDPALSTQPAPASREHLGSHIRASSSSSSIRQRISSFETFGSSQLPDKGAQRLSLQPSSGEAAKPLGKHEEGRFSGLLGRGAAPTLVPQQPEQVLSSGSPAASEARDPGVSESPPPGRQPNQKTLPPGPDPLLRLLSTQAEESQGPVLKMPSQRARSFPLTRSQSCETKLLDEKTSKLYSISSQVSSAVMKSLLCLPSSISCAQTPCIPKEGASPTSSSNEDSAANGSAETSALDTGFSLNLSELREYTEGLTEAKEDDDGDHSSLQSGQSVISLLSSEELKKLIEEVKVLDEATLKQLDGIHVTILHKEEGAGLGFSLAGGADLENKVITVHRVFPNGLASQEGTIQKGNEVLSINGKSLKGTTHHDALAILRQAREPRQAVIVTRKLTPEAMPDLNSSTDSAASASAASDVSVESTAEATVCTVTLEKMSAGLGFSLEGGKGSLHGDKPLTINRIFKGAASEQSETVQPGDEILQLGGTAMQGLTRFEAWNIIKALPDGPVTIVIRRKSLQSKETTAAGDS

SEQ ID NO: 20732 - protein, 31 aa, Homo sapiens
LPRTWYRPTDQVLHRGRARVEKSQPSLETRI

SEQ ID NO: 20733 - protein, 37 aa, Homo sapiens
LPRTWYRPTDQVLHRGRARVEKSQPSDPNIPDKTPTA

SEQ ID NO: 20734 - protein, 19 aa, Homo sapiens
LALFLHCSDPNIPDKTPTA

SEQ ID NO: 20735 - protein, 606 aa, Homo sapiens
MDYSFDTTAEDPWVRISDCIKNLFSPIMSENHGHMPLQPNASLNEEEGTQGHPDGTPPKLDTANGTPKVYKSADSSTVKKGPPVAPKPAWFRQSLKGLRNRASDPRGLPDPALSTQPAPASREHLGSHIRASSSSSSIRQRISSFETFGSSQLPDKGAQRLSLQPSSGEAAKPLGKHEEGRFSGLLGRGAAPTLVPQQPEQVLSSGSPAASEARDPGVSESPPPGRQPNQKTLPPGPDPLLRLLSTQAEESQGPVLKMPSQRARSFPLTRSQSCETKLLDEKTSKLYSISSQVSSAVMKSLLCLPSSISCAQTPCIPKEGASPTSSSNEDSAANGSAETSALDTGFSLNLSELREYTEGLTEAKEDDDGDHSSLQSGQSVISLLSSEELKKLIEEVKVLDEATLKQLDGIHVTILHKEEGAGLGFSLAGGADLENKVITVHRVFPNGLASQEGTIQKGNEVLSINGKSLKGTTHHDALAILRQAREPRQAVIVTRKLTPEAMPDLNSSTDSAASASAASDVSVESTEATVCTVTLEKMSAGLGFSLEGGKGSLHGDKPLTINRIFKGVGCVWFFACSPVVGMWPGPQKASGHFLGYVVSHNSMSSS

SEQ ID NO: 20736 - protein, 8 aa, Homo sapiens
MIQARMRG

SEQ ID NO: 20737 - protein, 10 aa, Homo sapiens
MLKPKPITHS

SEQ ID NO: 20738 - protein, 46 aa, Homo sapiens
VTVQEHTWPKWQSLDWMHVFQLLIQGSDQFNLMQSRGGAVQAQYVP

SEQ ID NO: 20739 - protein, 38 aa, Homo sapiens
LEQIHTVWFHRGHETPPCGDKERKTNSSNGRHIESVFP

SEQ ID NO: 20740 - protein, 47 aa, Homo sapiens
MSHGSSLPRSNDSITHGIASLLSEGWHKTGSCCGGRRSPPRSVGGNR

SEQ ID NO: 20741 - protein, 32 aa, Homo sapiens
VSRAQPSGNGHDTVIASHPLLCPPPRSPLWTC

SEQ ID NO: 20742 - protein, 31 aa, Homo sapiens
LVHFQDFGSLSNLQVTQPTVGMNFKTPRGPV

SEQ ID NO: 20743 - protein, 98 aa, Homo sapiens
MAWKNSAKVNVLIANYVTHLMKRIQRGPVRGISIKLQEEERERRDNYVPEVSALDQEIIEVDPDTKEMLKLLDFGSLSNLQVTQPTVGMNFKTPRGPV

SEQ ID NO: 20744 - protein, 95 aa, Homo sapiens [sequence omitted]

SEQ ID NO: 20745 - protein, 97 aa, Homo sapiens
MGRVRTKTVKKAARVIIEKYYTRLGNDFHTNKRVCEEIAIIPSKKLRNKIAGYVTHLMKRIQRGPVRGISIKLQEEERERRDNYVPEVNFLDIWASG

SEQ ID NO: 20746 - protein, 52 aa, Homo sapiens
MGRVRTKTVKKAARVIIEKYYTRLGNDFHTNKRVCEEIAIIPSKKLRNKIAG

SEQ ID NO: 20747 - protein, 103 aa, Homo sapiens
VLKRELGEGAFGKVFLAECYNLSPTKDKMLVAVKALKDPTLAARKDFQREAELLTNLQHEHIVKFYGVCGDGDPLIMVFEYMKHGDLNKFLSSISSPKSHQQG

SEQ ID NO: 20748 - protein, 25 aa, Homo sapiens
LLVVLFVMINKYGRRSKFGMKGELS

SEQ ID NO: 20749 - protein, 149 aa, Homo sapiens
LNWTNVHAINLTLVNVTSEDNGFTLTCIAENVVGMSNASVALTVYYPPRVVSLEEPELRLEHCIEFVVRGNPPPTLHWLHNGQPLRESKIIHVEYYQEGEISEGCLLFNKPTHYNNGNYTLIAKNPLGTANQTINGHFLKEPFPGCGED

SEQ ID NO: 20750 - protein, 233 aa, Homo sapiens
VQTGRDTRGFRLLPHWKITPQASLAPSSELTGMVPREAPESAQCLCPSLTIPNAKDVLRKRHKRRSRQHQRFMARKALLQEQGLLSMPPEPGSSPLPTPFGAATATEAASSGKQCLRAGSGSAPCSRRPAPGKASGPLPSKCVAIDCEMVGTGPRGRVSELARCSIVSYHGNVLYDKYIRPEMPIADYRTRWSGITRQHMRKAVPFQVAQKEVRAGMGTCLGGVVGWKEPPWV

SEQ ID NO: 20751 - protein, 357 aa, Homo sapiens
VQTGRDTRGFRLLPHWKITPQASLAPSSELTGMVPREAPESAQCLCPSLTIPNAKDVLRKRHKRRSRQHQRFMARKALLQEQGLLSMPPEPGSSPLPTPFGAATATEAASSGKQCLRAGSGSAPCSRRPAPGKASGPLPSKCVAIDCEMVGTGPRGRVSELARCSIVSYHGNVLYDKYIRPEMPIADYRTRWSGITRQHMRKAVPFQVAQKEILKLLKGKVVVGHALHNDFQALKYVHPRSQTRDTTYVPNFLSEPGLHTRARVSLKDLALQLLHKKIQVGQHGHSSVEDATTAMELYRLVEVQWEQQEARSLWTCPEDREPDSSTDMEQYMEDQYWPDDLAHGSRGGAREAQDRRN

SEQ ID NO: 20752 - protein, 184 aa, Homo sapiens
VLPPPTGIHASIGQGFSGRVSCQPDGVWGDLPDSSFCSQILKLLKGKVVVGHALHNDFQALKYVHPRSQTRDTTYVPNFLSEPGLHTRARVSLKDLALQLLHKKIQVGQHGHSSVEDATTAMELYRLVEVQWEQQEARSLWTCPEDREPDSSTDMEQYMEDQYWPDDLAHGSRGGAREAQDRRN

SEQ ID NO: 20753 - protein, 18 aa, Homo sapiens
LKQGRDADAGLELEMSHR

SEQ ID NO: 20754 - protein, 162 aa, Homo sapiens
LLAGCANPLGLKNNSIPDKQITASSSYKTWGLHLFSWNPSYARLDKQGNFNAWVAGSYGNDQWLQVDLGSSKEVTGIITQGARNFGSVQFVASYKVAYSNDSANWTEYQDPRTGSSKIFPGNWDNHSHKKNLFETPILARYVRILPVAWHNRIALRLELLGC

SEQ ID NO: 20755 - protein, 358 aa, Homo sapiens
LSSPACPFQRPRPRSMPRPRLLAALCGALLCAPSLLVALECVEPLGLENGNIANSQIAASSVRVTFLGLQHWVPELARLNRAGMVNAWTPSSNDDNPWIQVNLLRRMWVTGVVTQGASRLASHEYLKAFKVAYSLNGHEFDFIHDVNKKHKEFVGNWNKNAVHVNLFETPVEAQYVRLYPTSCHTACTLRFELLGCELNGCANPLGLKNNSIPDKQITASSSYKTWGLHLFSWNPSYARLDKQGNFNAWVAGSYGNDQWLQVDLGSSKEVTGIITQGARNFGSVQFVASYKVAYSNDSANWTEYQDPRTGSSKIFPGNWDNHSHKKNLFETPILARYVRILPVAWHNRIALRLELLGC

SEQ ID NO: 20756 - protein, 81 aa, Homo sapiens
LKAFKVAYSLNGHEFDFIHDVNKKHKEFVGNWNKNAVHVNLFETPVEAQYVRLYPTSCHTACTLRFELLGCELNGECWGCG

SEQ ID NO: 20757 - protein, 169 aa, Homo sapiens
LSSPACPFQRPRPRSMPRPRLLAALCGALLCAPSLLVALECVEPLGLENGNIANSQIAASSVRVTFLGLQHWVPELARLNRAGMVNAWTPSSNDDNPWIQVNLLRRMWVTGVVTQGASRLASHEYLKAFKVAYSLNGHEFDFIHDVNKKHKVGLVGARKKGCGPYPLRF

SEQ ID NO: 20758 - protein, 56 aa, Homo sapiens
LLLRVTEVWRRWVERAFWKFVAEFCDMSNNGPEDFISSSRKNSRQTARISSNPERR

SEQ ID NO: 20759 - protein, 49 aa, Homo sapiens
VWRRWVERAFWKFVAEFCDMSNNGPEDFISSSRKNSRQTARISSNPERS

SEQ ID NO: 20760 - protein, 43 aa, Homo sapiens
LEVCGGGEAEFCDMSNNGPEDFISSSRKNSRQTARISSNPERR

SEQ ID NO: 20761 - protein, 37 aa, Homo sapiens
LGLQFCDMSNNGPEDFISSSRKNSRQTARISSNPERR

SEQ ID NO: 20762 - protein, 65 aa, Homo sapiens
LGLQGFGLIKQWKPLKSFKMRMAWREDKSHNQFCDMSNNGPEDFISSSRKNSRQTARISSNPERR

SEQ ID NO: 20763 - protein, 35 aa, Homo sapiens
MSNNGPEDFISSSRKNSRQTARISSNPERRIRVRA

SEQ ID NO: 20764 - protein, 56 aa, Homo sapiens [sequence omitted]

SEQ ID NO: 20765 - protein, 140 aa, Homo sapiens
LINTLCSGRWDQQYVIQLTSMFKDVPLTAEEVEFVVEKALSMFSKMNLQEIPPLVYQLLVLSSKGSRKSVLEGIIAFFSALDKQHNEEQSGDELLDVVTVPSGELRHVEGTIILHIVFAIKLDYELGRELVKHLKVASNL

SEQ ID NO: 20766 - protein, 125 aa, Homo sapiens
MIRQEILEQVLNRVVTRASSPISHFLDLLSNIVMYAPLVLQSCSSKVTEAFDYLSFLPLQTVQRLLKAVQPLLKVSMSMRDCLILVLRKAMFAKYVASFSIIGRRCLLMLELKLSLPSPSTTCSQ

SEQ ID NO: 20767 - protein, 435 aa, Homo sapiens
LHASFPILQRHRLPATAGDVSDADKRIKVAKPVVEMDGDEMTRIIWQFIKEKLILPHVDIQLKYFDLGLPNRDQTDDQVTIDSALATQKYSVAVKCATITPDEARVEEFKLKKMWKSPNGTIRNILGGTVFREPIICKNIPRLVPGWTKPITIGRHAHGDQYKATDFVADRAGTFKMVFTPKDGSGVKEWEVYNFPAGGVGMGMYNTDESISGFAHSCFQYAIQKKWPLYMSTKNTILKAYDGRFKDIFQEIFDKHYKTDFDKNKIWYEHRLIDDMVAQVLKSSGGFVWACKNYDGDVQSDILAQGFGSLGLMTSVLVCPDGKTIEAEAAHGTVTRHYREHQKGRPTSTNPIASIFAWTRGLEHRGKLDGNQDLIRFAQMLEKVCVETVESGAMTKDLAGCIHGLSNVKLNEHFLNTTDFLDTIKSNLDRALGRQ

SEQ ID NO: 20768 - protein, 425 aa, Homo sapiens
LVPSARSLRARIMAAVPQNNLQEQLERHSARTLNNKLSLSKPKFSGFTFKKKTSSDNNVSVTNVSVAKTPVLRNKDVNVTEDFSFSEPLPNTTNQQRVKDFFKNAPAGQETQRGGSKSLLPDFLQTPKEVVCTTQNTPTVKKSRDTALKKLEFSSSPDSLSTINDWDDMDDFDTSETSKSFVTPPQSHFVRVSTAQKSKKGKRNFFKAQLYTTNTVKTDLPPPSSESEQIDLTEEQKDDSEWLSSDVICIDDGPIAEVHINEDAQESDSLKTHLEDERDNSEKKKNLEEAELHSTEKVPCIEFDDDDYDTDFVPPSPEEIISASSSSSKCLSTLKDLDTSDRKEDVLSTSKDLLSKPEKMSMQELNPETSTDCDGSHCVAQAGLELLDLSNPPALASPKGWDYSHEPPCLAKTFFFFPQRKILTT

SEQ ID NO: 20769 - protein, 109 aa, Homo sapiens
LKTHLEDERDNSEKKKNLEEAELHSTEKVPCIEFDDDDYDTDFVPPSPEEIISASSSSSKCLSTLKDLDTSDRKEDVLSTSKDLLSKPEKMSMQELNPETSTDCDEGNF

SEQ ID NO: 20770 - protein, 38 aa, Homo sapiens
VKDPSLSDSSTVGLQRELSKASKSDATSGILNSTNIQS

SEQ ID NO: 20771 - protein, 24 aa, Homo sapiens
VRELSKASKSDATSGILNSTNIQS

SEQ ID NO: 20772 - protein, 213 aa, Homo sapiens
LRVVVALGAVWSRSGPGLTAAWSVRHEEKELLDMMIAEEESLKERLIKSISVCQKELNTLCSELHVEPFQEEGETTILQLEKDLRTQVELMRKQKKERKQELKLLQEQDQELCEILCMPHYDIDSASVPSLEELNQFRQHVTTLRETKASRREEFVSIKRQIILCMEALDHTPDTSFERDVVCEDEDAFCLSLENIATLQKLLRQVLSSQIMP

SEQ ID NO: 20773 - protein, 123 aa, Homo sapiens
LRVVVALGAVWSRSGPGLTAAWSVRHEEKEEGETTILQLEKDLRTQVELMRKQKKERKQELKLLQEQDQELCEILCMPHYDIDSASVPSLEELNQFRQHVTTLRETKVHCLHLFFLKVTLVFL

SEQ ID NO: 20774 - protein, 11 aa, Homo sapiens
LGKSVFYIASK

SEQ ID NO: 20775 - protein, 30 aa, Homo sapiens
LVETFTPSQLEEFQMDPTTEKSRWQSTMGN

SEQ ID NO: 20776 - protein, 51 aa, Homo sapiens
LEQGYKPRALINSAFLGLGERDGLPPGAHDLSSSKPIMYDSCVAVARLSFE

SEQ ID NO: 20777 - protein, 26 aa, Homo sapiens
VPTLLCLSLEKPVRTRMGKVSGSWCS

SEQ ID NO: 20778 - protein, 15 aa, Homo sapiens
MEEMAGTKGQRNKKP

SEQ ID NO: 20779 - protein, 45 aa, Homo sapiens
LGLGERDGLPPGAHDLSSSKPIMYDSCVAVARLRNICPVPGMVRL

SEQ ID NO: 20780 - protein, 1006 aa, Homo sapiens
VRCAKSCATRLTQRNGQCGKVGKRVIDCLEDEKATLTLAMADWLRDYQDLLQVKTGLSLEVATYRALLEGESNPEIVIWAEHVENMPSEFRNKSYHYTDSLLQRENERNLFSRQKAPLASFNHSSALYSNLSGHRGSQTGTSIGGDARRGFLGSGYSSSATTQQENSYGKAVSSQTNVRTFSPTYGLLRNTEAQVKTFPDRPKAGDTREVPVYIGEDSTIARESYRDRRDKVAAGASESTRSNERTVILGKKTEVKATREQERNRPETIRTKPEEKMFDSKEKASEERNLRWEELTKLDKEARQRESQQMKEKAKEKDSPKEKSVREREVPISLEVSQDRRAEVSPKGLQTPVKDAGGGTGREAEARELRFRLGTSDATGSLQGDSMTETVAENIVTSILKQFTQSPETEASADSFPDTKVTYVDRKELPGERKTKTEIVVESKLTEDVDVSDEAGLDYLLSKDIKEVGLKGKSAEQMIGDIINLGLKGREGRAKVVNVEIVEEPVSYVSGEKPEEFSVPFKVEEVEDVSPGPWGLVKEEEGYGESDVTFSVNQHRRTKQPQENTTHVEEVTEAGDSEGEQSYFVSTPDEHPGGHDRDDGSVYGQIHIEEESTIRYSWQDEIVQGTRRRTQKDGAVGEKVVKPLDVPAPSLEGDLGSTHWKEQARSGEFHAEPTVIEKEIKIPHEFHTSMKGISSKEPRQQLVEVIGQLEETLPERMREELSALTREGQGGPGSVSVDVKKVQGAGGSSVTLVAEVNVSQTVDADRLDLEELSKDEASEMEKAVESVVRESLSRQRSPAPGSPDEEGGAEAPAAGIRFRRWATRELYIPSGESEVAGGASHSSGQRTPQGPVSATVEVSSPTGFAQSQVLEDVSQAARHIKLGPSEVWRTERMSYEGPTAEVVEMDVSNVEAIRSRTQEAGALGVSDRGSWRDADSRNDQAVGVSFKASAGEGDQAHREQGKEQAMFDKKVQLQRMVDQRSVISDEKKVALLYLDNEEEENDGHWF

SEQ ID NO: 20781 - protein, 1506 aa, Homo sapiens
LRRGGAQLAAAAGRAELGHCAGGGRAGRSAARAAGAAAPGCGGARRPRPPGRRAGCAAARAAGGAGRARRPRGAAGPAAGRAPRPRRGPRTRREGAARARRQPYHAFPRPRHRPRRAAATPAGGARQLRTAGGRVVAGDGAAVRGRGARAGGGAAARPGEQTPGGGRDAAVRAGGKALRREALGLEQLRARLEDALLRMREEYGIQAEERQRVIDCLEDEKATLTLAMADWLRDYQDLLQVKTGLSLEVATYRALLEGESNPEIVIWAEHVENMPSEFRNKSYHYTDSLLQRENERNLFSRQKAPLASFNHSSALYSNLSGHRGSQTGTSIGGDARRGFLGSGYSSSATTQQENSYGKAVSSQTNVRTFSPTYGLLRNTEAQVKTFPDRPKAGDTREVPVYIGEDSTIARESYRDRRDKVAAGASESTRSNERTVILGKKTEVKATREQERNRPETIRTKPEEKMFDSKEKASEERNLRWEELTKLDKEARQRESQQMKEKAKEKDSPKEKSVREREVPISLEVSQDRRAEVSPKGLQTPVKDAGGGTGREAEARELRFRLGTSDATGSLQGDSMTETVAENIVTSILKQFTQSPETEASADSFPDTKVTYVDRKELPGERKTKTEIVVESKLTEDVDVSDEAGLDYLLSKDIKEVGLKGKSAEQMIGDIINLGLKGREGRAKVVNVEIVEEPVSYVSGEKPEEFSVPFKVEEVEDVSPGPWGLVKEEEGYGESDVTFSVNQHRRTKQPQENTTHVEEVTEAGDSEGEQSYFVSTPDEHPGGHDRDDGSVYGQIHIEEESTIRYSWQDEIVQGTRRRTQKDGAVGEKVVKPLDVPAPSLEGDLGSTHWKEQARSGEFHAEPTVIEKEIKIPHEFHTSMKGISSKEPRQQLVEVIGQLEETLPERMREELSALTREGQGGPGSVSVDVKKVQGAGGSSVTLVAEVNVSQTVDADRLDLEELSKDEASEMEKAVESVVRESLSRQRSPAPGSPDEEGGAEAPAAGIRFRRWATRELYIPSGESEVAGGASHSSGQRTPQGPVSATVEVSSPTGFAQSQVLEDVSQAARHIKLGPSEVWRTERMSYEGPTAEVVEVSAGGDLSQAASPTGASRSVRHVTLGPGQSPLSREVIFLGPAPACPEAWGSPEPGPAESSADMDGSGRHSTFGCRQFHAEKEIIFQGPISAAGKVGDYFATEESVGTQTSVRQLQLGPKEGFSGQIQFTAPLSDKVELGVIGDSVHMEGLPGSSTSIRHISIGPQRHQTTQQIVYHGLVPQLGESGDSESTVHGEGSADVHQATHSHTSGRQTVMTEKSTFQSVVSESPQEDSAEDTSGAEMTSGVSRSFRHIRLGPTETETSEHIAIRGPVSRTFVLAGSADSPELGKLADSSRTLRHIAPGPKETSFTFQMDVSNVEAIRSRTQEAGALGVSDRGSWRDADSRNDQAVGVSFKASAGEGDQAHREQGKEQAMFDKKVQLQRMVDQRSVISDEKKVALLYLDNEEEENDGHWF

SEQ ID NO: 20782 - protein, 1194 aa, Homo sapiens
LRRGGAQLAAAAGRAELGHCAGGGRAGRSAARAAGAAAPGCGGARRPRPPGRRAGCAAARAAGGAGRARRPRGAAGPAAGRAPRPRRGPRTRREGAARARRQPYHAFPRPRHRPRRAAATPAGGARQLRTAGGRVVAGDGAAVRGRGARAGGGAAARPGEQTPGGGRDAAVRAGGKALRREALGLEQLRARLEDALLRMREEYGIQAEERQRVIDCLEDEKATLTLAMADWLRDYQDLLQVKTGLSLEVATYRALLEGESNPEIVIWAEHVENMPSEFRNKSYHYTDSLLQRENERNLFSRQKAPLASFNHSSALYSNLSGHRGSQTGTSIGGDARRGFLGSGYSSSATTQQENSYGKAVSSQTNVRTFSPTYGLLRNTEAQVKTFPDRPKAGDTREVPVYIGEDSTIARESYRDRRDKVAAGASESTRSNERTVILGKKTEVKATREQERNRPETIRTKPEEKMFDSKEKASEERNLRWEELTKLDKEARQRESQQMKEKAKEKDSPKEKSVREREVPISLEVSQDRRAEVSPKGLQTPVKDAGGGTGREAEARELRFRLGTSDATGSLQGDSMTETVAENIVTSILKQFTQSPETEASADSFPDTKVTYVDRKELPGERKTKTEIVVESKLTEDVDVSDEAGLDYLLSKDIKEVGLKGKSAEQMIGDIINLGLKGREGRAKVVNVEIVEEPVSYVSGEKPEEFSVPFKVEEVEDVSPGPWGLVKEEEGYGESDVTFSVNQHRRTKQPQENTTHVEEVTEAGDSEGEQSYFVSTPDEHPGGHDRDDGSVYGQIHIEEESTIRYSWQDEIVQGTRRRTQKDGAVGEKVVKPLDVPAPSLEGDLGSTHWKEQARSGEFHAEPTVIEKEIKIPHEFHTSMKGISSKEPRQQLVEVIGQLEETLPERMREELSALTREGQGGPGSVSVDVKKVQGAGGSSVTLVAEVNVSQTVDADRLDLEELSKDEASEMEKAVESVVRESLSRQRSPAPGSPDEEGGAEAPAAGIRFRRWATRELYIPSGESEVAGGASHSSGQRTPQGPVSATVEVSSPTGFAQSQVLEDVSQAARHIKLGPSEVWRTERMSYEGPTAEVVEMDVSNVEAIRSRTQEAGALGVSDRGSWRDADSRNDQAVGVSFKASAGEGDQAHREQGKEQAMFDKKVQLQRMVDQRSVISDEKKVALLYLDNEEEENDGHWF

SEQ ID NO: 20783 - protein, 92 aa, Homo sapiens
LKMGRKKIQITRIMDERNRQVTFTKRKFGLMKKAYELSVLCDCEIALIIFNSSNKLFQYASTDMDKVLLKYTEYNEPHESRTNSDIVEVTHI

SEQ ID NO: 20784 - protein, 144 aa, Homo sapiens
LKMGRKKIQITRIMDERNRQVTFTKRKFGLMKKAYELSVLCDCEIALIIFNSSNKLFQYASTDMDKVLLKYTEYNEPHESRTNSDIVETLRKKGLNGCESPDADDYFEHSPLSEDRFSKLNEDSDFIFKRGPVSTFTLPLLFIC

SEQ ID NO: 20785 - protein, 134 aa, Homo sapiens
LRGAALEETEAAGGPEAQEEDEDEEEALPHSEAMDVFQEGLAMVVQDPLLCDLPIQVTLEEVNSQIALEYGQAMTVRVCKMDGEVMPVVVVQSATVLDLKKAIQRYVQLKQEREGGIQHISCKVCLAKPPQTAL

SEQ ID NO: 20786 - protein, 102 aa, Homo sapiens
LEETEAAGGPEAQEEDEDEEEALPHSEAMDVFQEGLAMVVQDPLLCDLPIQVTLEEVNSQIALEYGQAMTVRVCKMDGEVMQCHSPGPEEGHPEIRAAQAGA

SEQ ID NO: 20787 - protein, 150 aa, Homo sapiens
LSSWDYRHPPPRLARFCVLSRDGVSPRCPGWSPARDLRSGSRTRDRRRSRSRDRRRRRSRSTSRERRKLSRSRSRDRHRRHRSRSRSHSRGHRRASRDRSAKYKFSRERASREESWESGRSERGPPDWRLESSNGKMASRRSEEKEAGEI

SEQ ID NO: 20788 - protein, 213 aa, Homo sapiens
VSGVSPSPCGPFKGRGRVAGPPPPRGARSPLSASPGAGAGSGRGPAAVWERRVMYTITKGPSKLVAQRRTGPTQQQVEGRLGELLKCRQPAPPTSQPPRAQPFAQPPGPWPLSSPGPRLVFNRVNGRRAPSTSPSFEGTQETYTVAHEENVRFVSEAWQQVQQQLDGGPAGEGGPRPVQYVERTPNPRLQNFVPIDLDEWWAQQFLARITSCS

SEQ ID NO: 20789 - protein, 296 aa, Homo sapiens
LHVYTLLLPPCGLHPFSCNPDPAPARLQVMLEQMQGVVRLELSGCNDFTEAGLWSSLSARITSLSVSDCINVADDAIAAISQLLPNLAELSLQAYHVTDTALAYFTARQGHSTHTLRLLSCWEITNHGVVNVVHSLPNLTALSLSGCSKVTDDGVELVAENLRKLRSLDLSWCPRITDMALEYVACDLHRLEELVLDRCVRITDTGLSYLSTMSSLRSLYLRWCCQVQDFGLKHLLALGSLRLLSLAGCPLLTTTGLSGLVQLQELEELELTNCPGATPELFKYFSQHLPRCLVIE

SEQ ID NO: 20790 - protein, 476 aa, Homo sapiens
VRDGGGGAGGSERELGLADGMEDYEQELCGVEDDFHNQFAAELEVLAELEAGASTPSPSGVPLFTAGRPPRTFEEALARGDAASSPAPAASVGSSQGGARKRQVDADLQPAGSLPHAPRIKRPRLQVVKRLNFRSEEMEEPPPPDSSPTDITPPPSPEDLAELWGHGVSEAAADVGLTRASPAARNPVLRRPPILEDYVHVTSTEGVRAYLVLRADPMAPGVQGSLLHVPWRGGGQLDLLGVSLASLKKQVDGERRERLLQEAQKLSDTLHSLRSGEEEAAQPLGAPEEEPTDGQDASSHCLWVDEFAPRHYTELLSDDFTNRCLLKWLKLWDLVVFGHERPSRKPRPSVEPARVSKEATAPGKWKSHEQVLEEMLEAGLDPSQRPKQKVALLCGPPGLGKTTLAHVIARHAGYSVVEMNASDDRSPEVFRTRIEAATQMESVLGAGGKPNCLVIDEIDGAPVVGSLMPGPPSTSS

SEQ ID NO: 20791 - protein, 995 aa, Homo sapiens
VRDGGGGAGGSERELGLADGMEDYEQELCGVEDDFHNQFAAELEVLAELEGASTPSPSGVPLFTAGRPPRTFEEALARGDAASSPAPAASVGSSQGGARKRQVDADLQPAGSLPHAPRIKRPRLQVVKRLNFRSEEMEEPPPPDSSPTDITPPPSPEDLAELWGHGVSEAAADVGLTRASPAARNPVLRRPPILEDYVHVTSTEGVRAYLVLRADPMAPGVQGSLLHVPWRGGGQLDLLGVSLASLKKQVDGERRERLLQEAQKLSDTLHSLRSGEEEAAQPLGAPEEEPTDGQDASSHCLWVDEFAPRHYTELLSDDFTNRCLLKWLKLWDLVVFGHERPSRKPRPSVEPARVSKEATAPGKWKSHEQVLEEMLEAGLDPSQRPKQKVALLCGPPGLGKTTLAHVIARHAGYSVVEMNASDDRSPEVFRTRIEAATQMESVLGAGGKPNCLVIDEIDGAPVAAINVLLSILNRKGPQEVGPQGPAVPSGGGRRRRAEGGLLMRPIICICNDQFAPSLRQLKQQAFLLHFPPTLPSRLVQRLQEVSLRQGMRADPGVLAALCEKTDNDIRACINTLQFLYSRGQRELSVRDVQATRVGLKDQRRGLFSVWQEVFQLPRAQRRRVGQDPALPADTLLLGDGDAGSLTSASQRFYRVLHAAASAGEHEKVVQGLFDNFLRLRLRDSSLGAVCVALDWLAFDDLLAGAAHHSQSFQLLRYPPFLPVAFHVLFASSHTPRITFPSSQQEAQNRMSQMRNLIQTLVSGIAPATRSRATPQALLLDALCLLLDILAPKLRPVSTQLYSTREKQQLASLVGTMLAYSLTYRQERTPDGQYIYRLEPNVEELCRFPELPARKPLTYQTKQLIAREIEVEKMRRAEASARVENSPQVDGSPPGLEGLLGGIGEKGVHRPAPRNHEQRLEHIMRRAAREEQPEKDFFGRVVVRSTAVPSAGDTAPEQDSVERRMGTAVGRSEVWFRFNEGVSNAVRRSLYIRDLL

SEQ ID NO: 20792 - protein, 1023 aa, Homo sapiens
VRDGGGGAGGSERELGLADGMEDYEQELCGVEDDFHNQFAAELEVLAELEGASTPSPSGVPLFTAGRPPRTFEEALARGDAASSPAPAASVGSSQGGARKRQVDADLQPAGSLPHGRLAALPQGLRSGREAEEASGSLHVSPPAPRIKRPRLQVVKRLNFRSEEMEEPPPPDSSPTDITPPPSPEDLAELWGHGVSEAAADVGLTRASPAARNPVLRRPPILEDYVHVTSTEGVRAYLVLRADPMAPGVQGSLLHVPWRGGGQLDLLGVSLASLKKQVDGERRERLLQEAQKLSDTLHSLRSGEEEAAQPLGAPEEEPTDGQDASSHCLWVDEFAPRHYTELLSDDFTNRCLLKWLKLWDLVVFGHERPSRKPRPSVEPARVSKEATAPGKWKSHEQVLEEMLEAGLDPSQRPKQKVALLCGPPGLGKTTLAHVIARHAGYSVVEMNASDDRSPEVFRTRIEAATQMESVLGAGGKPNCLVIDEIDGAPVAAINVLLSILNRKGPQEVGPQGPAVPSGGGRRRRAEGGLLMRPIICICNDQFAPSLRQLKQQAFLLHFPPTLPSRLVQRLQEVSLRQGMRADPGVLAALCEKTDNDIRACINTLQFLYSRGQRELSVRDVQATRVGLKDQRRGLFSVWQEVFQLPRAQRRRVGQDPALPADTLLLGDGDAGSLTSASQRFYRVLHAAASAGEHEKVVQGLFDNFLRLRLRDSSLGAVCVALDWLAFDDLLAGAAHHSQSFQLLRYPPFLPVAFHVLFASSHTPRITFPSSQQEAQNRMSQMRNLIQTLVSGIAPATRSRATPQALLLDALCLLLDILAPKLRPVSTQLYSTREKQQLASLVGTMLAYSLTYRQERTPDGQYIYRLEPNVEELCRFPELPARKPLTYQTKQLIAREIEVEKMRRAEASARVENSPQVDGSPPGLEGLLGGIGEKGVHRPAPRNHEQRLEHIMRRAAREEQPEKDFFGRVVVRSTAVPSAGDTAPEQDSVERRMGTAVGRSEVWFRFNEGVSNAVRRSLYIRDLL

SEQ ID NO: 20793 - protein, 995 aa, Homo sapiens
VRDGGGGAGGSERELGLADGMEDYEQELCGVEDDFHNQFAAELEVLAELEGASTPSPSGVPLFTAGRPPRTFEEALARGDAASSPAPAASVGSSQGGARKRQVDADLQPAGSLPHAPRIKRPRLQVVKRLNFRSEEMEEPPPPDSSPTDITPPPSPEDLAELWGHGFSEAAADVGLTRASPAARNPVLRRPPILEDYVHVTSTEGVRAYLVLRADPMAPGVQGSLLHVPWRGGGQLDLLGVSLASLKKQVDGERRERLLQEAQKLSDTLHSLRSGEEEAAQPLGAPEEEPTDGQDASSHCLWVDEFAPRHYTELLSDDFTNRCLLKWLKLWDLVVFGHERPSRKPRPSVEPARVSKEATAPGKWKSHEQVLEEMLEAGLDPSQRPKQKVALLCGPPGLGKTTLAHVIARHAGYSVVEMNASDDRSPEVFRTRIEAATQMESVLGAGGKPNCLVIDEIDGAPVAAINVLLSILNRKGPQEVGPQGPAVPSGGGRRRRAEGGLLMRPIICICNDQFAPSLRQLKQQAFLLHFPPTLPSRLVQRLQEVSLRQGMRADPGVLAALCEKTDNDIRACINTLQFLYSRGQRELSVRDVQATRVGLKDQRRGLFSVWQEVFQLPRAQRRRVGQDPALPADTLLLGDGDAGSLTSASQRFYRVLHAAASAGEHEKVVQGLFDNFLRLRLRDSSLGAVCVALDWLAFDDLLAGAAHHSQSFQLLRYPPFLPVAFHVLFASSHTPRITFPSSQQEAQNRMSQMRNLIQTLVSGIAPATRSRATPQALLLDALCLLLDILAPKLRPVSTQLYSTREKQQLASLVGTMLAYSLTYRQERTPDGQYIYRLEPNVEELCRFPELPARKPLTYQTKQLIAREIEVEKMRRAEASARVENSPQVDGSPPGLEGLLGGIGEKGVHRPAPRNHEQRLEHIMRRAAREEQPEKDFFGRVVVRSTAVPSAGDTAPEQDSVERRMGTAVGRSEVWFRFNEGVSNAVRRSLYIRDLL

SEQ ID NO: 20794 - protein, 1180 aa, Homo sapiens
LCLGVPELVPSAAPQEPPHPRAGPRSPAMSTLLDIKSSVLRQVQVCPSFRRRTEQDPGSASADPQEPATGAWKPGDGVEFFAHMRLMLKKGEGRQGLPCLEVPLRSGSPAPPEPVDPSLGLRALAPEEVEMLYEEALYTVLYRAGTMGPDQVDDEEALLSYLQQVFGTSLEEHTEAIERVRKAKAPTYALKVSVMRAKNLLAKDPNGFSDPYCMLGILPASDATREPRAQKEQRFGFRKGSKRGGPLPAKCIQVTEVKSSTLNPVWKEHFLFEIEDVSTDQLHLDIWDHDDDVSLVEACRKLNEVIGLKGMGRYFKQIVKSARANGTAGPTEDHTDDFLGCLNIPVREVPVAGVDRWFKLEPRSSASRVQGHCHLVLKLITTQRDTAMSQRGRSGFLSHLLLLSHLLRLEHSAEEPNSSSWRGELSTPAATILCLHGAQSNLSPLQLAVLHWQVSSRHHQTCTLDYSYLLGLLEDMQAHWEEAPSLPQEQEESLADSLSAFSEFGLQLLRQLRDYFPATNSTAVHRLELLLKCLGKLQLFQPSFEICPFESELNMDIAAALKRGNREWYDRILNDKSPREQPGPQRLPGLVVLADAVYDDLQFCYSVYASLFHSILNVDVFTLTFRQLERLVAEEAWVLTEELSPKMTLEVASGLFELYLTLADLQRFWDSIPGRDSRSLALAGIHAPFLPAVKLWFQVLRDQAKWRLQGAVDMDTLEPVDASSRHSSSAATAGLCLSHIQELWVRLAWPDPAQAQGLGTQLGQDVCEATLFYTELLRKKVDTQPGAAGEAVSEALCVVLNNVELVRKAAGQALKGLAWPEGATGPEGVLPRPLLSCTQALDDDLQREAHTVTAHLTSKMVGDIRKYVQHISLSPDSIQNDEAVAPLMKYLDEKLALLNASLVKGNLSRVLEALWELLLQAILQALGANRDVSADFYSRFHFTLEALVSFFHAEGQGLPLESLRDGSYKRLKEELRLHKCSTRECIEQFYLDKLKQRTLEQNRFGRLSVRCHYEAAEQRLAVEVLHAADLLPLDANGLSDPFVIVELGPPHLFPLVRSQRTQVKTRTLHPVYDELFYFSVPAEACRRRAACVLFTVMDHDWLSTNDFAGEAALGLGGVTGVARPQVGGGARAGQPVTLHLCRPRAQVRSALRRLEGRTSKEAQEFVKKLKELEKCMEADP

SEQ ID NO: 20795 - protein, 1197 aa, Homo sapiens
LCLGVPELVPSAAPQEPPHPRAGPRSPAMSTLLDIKSSVLRQVQVCPSFRRRTEQDPGSASADPQEPATGAWKPGDGVEFFAHMRLMLKKGEGRQGLPCLEAWGSPCRQSPHPGPHTQVPLRSGSPAPPEPVDPSLGLRALAPEEVEMLYEEALYTVLYRAGTMGPDQVDDEEALLSYLQQVFGTSLEEHTEAIERVRKAKAPTYALKVSVMRAKNLLAKDPNGFSDPYCMLGILPASDATREPRAQKEQRFGFRKGSKRGGPLPAKCIQVTEVKSSTLNPVWKEHFLFEIEDVSTDQLHLDIWDHDDDVSLVEACRKLNEVIGLKGMGRYFKQIVKSARANGTAGPTEDHTDDFLGCLNIPVREVPVAGVDRWFKLEPRSSASRVQGHCHLVLKLITTQRDTAMSQRGRSGFLSHLLLLSHLLRLEHSAEEPNSSSWRGELSTPAATILCLHGAQSNLSPLQLAVLHWQVSSRHHQTCTLDYSYLLGLLEDMQAHWEEAPSLPQEQEESLADSLSAFSEFGLQLLRQLRDYFPATNSTAVHRLELLLKCLGKLQLFQPSFEICPFESELNMDIAAALKRGNREWYDRILNDKSPREQPGPQRLPGLVVLADAVYDDLQFCYSVYASLFHSILNVDVFTLTFRQLERLVAEEAWVLTEELSPKMTLEVASGLFELYLTLADLQRFWDSIPGRDSRSLALAGIHAPFLPAVKLWFQVLRDQAKWRLQGAVDMDTLEPVDASSRHSSSAATAGLCLSHIQELWVRLAWPDPAQAQGLGTQLGQDVCEATLFYTELLRKKVDTQPGAAGEAVSEALCVVLNNVELVRKAAGQALKGLAWPEGATGPEGVLPRPLLSCTQALDDDLQREAHTVTAHLTSKMVGDIRKYVQHISLSPDSIQNDEAVAPLMKYLDEKLALLNASLVKGNLSRVLEALWELLLQAILQALGANRDVSADFYSRFHFTLEALVSFFHAEGQGLPLESLRDGSYKRLKEELRLHKCSTRECIEQFYLDKLKQRTLEQNRFGRLSVRCHYEAAEQRLAVEVLHAADLLPLDANGLSDPFVIVELGPPHLFPLVRSQRTQVKTRTLHPVYDELFYFSVPAEACRRRAACVLFTVMDHDWLSTNDFAGEAALGLGGVTGVARPQVGGGARAGQPVTLHLCRPRAQVRSALRRLEGRTSKEAQEFVKKLKELEKCMEADP

SEQ ID NO: 20796 - protein, 1204 aa, Homo sapiens
MRPRGAAFAAGPPGDLHLGTAIGFAGAIWRSRSPAMSTLLDIKSSVLRQVQVCPSFRRRTEQDPGSASADPQEPATGAWKPGDGVEFFAHMRLMLKKGEGRQGLPCLEAWGSPCRQSPHPGPHTQVPLRSGSPAPPEPVDPSLGLRALAPEEVEMLYEEALYTVLYRAGTMGPDQVDDEEALLSYLQQVFGTSLEEHTEAIERVRKAKAPTYALKVSVMRAKNLLAKDPNGFSDPYCMLGILPASDATREPRAQKEQRFGFRKGSKRGGPLPAKCIQVTEVKSSTLNPVWKEHFLFEIEDVSTDQLHLDIWDHDDDVSLVEACRKLNEVIGLKGMGRYFKQIVKSARANGTAGPTEDHTDDFLGCLNIPVREVPVAGVDRWFKLEPRSSASRVQGHCHLVLKLITTQRDTAMSQRGRSGFLSHLLLLSHLLRLEHSAEEPNSSSWRGELSTPAATILCLHGAQSNLSPLQLAVLHWQVSSRHHQTCTLDYSYLLGLLEDMQAHWEEAPSLPQEQEESLADSLSAFSEFGLQLLRQLRDYFPATNSTAVHRLELLLKCLGKLQLFQPSFEICPFESELNMDIAAALKRGNREWYDRILNDKSPREQPGPQRLPGLVVLADAVYDDLQFCYSVYASLFHSILNVDVFTLTFRQLERLVAEEAWVLTEELSPKMTLEVASGLFELYLTLADLQRFWDSIPGRDSRSLALAGIHAPFLPAVKLWFQVLRDQAKWRLQGAVDMDTLEPVDASSRHSSSAATAGLCLSHIQELWVRLAWPDPAQAQGLGTQLGQDVCEATLFYTELLRKKVDTQPGAAGEAVSEALCVVLNNVELVRKAAGQALKGLAWPEGATGPEGVLPRPLLSCTQALDDDLQREAHTVTAHLTSKMVGDIRKYVQHISLSPDSIQNDEAVAPLMKYLDEKLALLNASLVKGNLSRVLEALWELLLQAILQALGANRDVSADFYSRFHFTLEALVSFFHAEGQGLPLESLRDGSYKRLKEELRLHKCSTRECIEQFYLDKLKQRTLEQNRFGRLSVRCHYEAAEQRLAVEVLHAADLLPLDANGLSDPFVIVELGPPHLFPLVRSQRTQVKTRTLHPVYDELFYFSVPAEACRRRAACVLFTVMDHDWLSTNDFAGEAALGLGGVTGVARPQVGGGARAGQPVTLHLCRPRAQVRSALRRLEGRTSKEAQEFVKKLKELEKCMEADP

SEQ ID NO: 20797 - protein, 279 aa, Homo sapiens
LKMPSVSKAAAAALSGSPPQTEKPTHYRYLKEFRTEQCPLFSQHKCAQHRPFTCFHWHFLNQRRRRPLRRRDGTFNYSPDVYCSKYNEATGVCPDGDECPYLHRTTGDTERKYHLRYYKTGTCIHETDARGHCVKNGLHCAFAHGPLDLRPPVCDVRELQAQEALQNGQLGGGEGVPDLQPGVLASQAMIEKILSEDPRWQDANFVLGSYKTEQCPKPPRLCRQGYACPHYHNSRDRRRNPRRFQYSWQLGRRVLRLSPRANNPRVALPRVHTGPSSTA

SEQ ID NO: 20798 - protein, 1343 aa, Homo sapiens
LAAAVAAMMEIQMDEGGGVVVYQDDYCSGSVMSERVSGLAGSIYREFERLIHCYDEEVVKELMPLVVNVLENLDSVLSENQEHEVELELLREDNEQLLTQYEREKALRRQAEEKFIEFEDALEQEKKELQIQVEHYEFQTRQLELKAKNYADQISRLEERESEMKKEYNALHQRHTEMIQTYVEHIERSKMQQVGGNSQTESSLPGRRKERPTSLNVFPLADGTVRAQIGGKLVPAGDHWHLSDLGQLQSSSSYQCPQDEMSESGQSSAAATPSTTGTKSNTPTSSVPSAAVTPLNESLQPLGDYGVGSKNSKRAREKRDSRNMEVQVTQEMRNVSIGMGSSDEWSDVQDIIDSTPELDMCPETRLDRTGSSPTQGIVNKAFGINTDSLYHELSTAGSEVIGDVDEGADLLGEFSVRDDFFGMGKEVGNLLLENSQLLETKNALNVVKNDLIAKVDQLSGEQEVLRGELEAAKQAKVKLENRIKELEEELKRVKSEAIIARREPKEEAEDVSSYLCTESDKIPMAQRRRFTRVEMARVLMERNQYKERLMELQEAVRWTEMIRASREHPSVQEKKKSTIWQFFSRLFSSSSSPPPAKRPYPSVNIHYKSPTTAGFSQRRNHAMCPISAGSRPLEFFPDDDCTSSARREQKREQYRQVREHVRNDDGRLQACGWSLPAKYKQLSPNGGQEDTRMKNVPVPVYCRPLVEKDPTMKLWCAAGVNLSGWRPNEDDAGNGVKPAPGRDPLTCDREGDGEPKSAHTSPEKKKAKELPEMDATSSRVWILTSTLTTSKVVIIDANQPGTVVDQFTVCNAHVLCISSIPAASDSDYPPGEMFLDSDVNPEDPGADGVLAGITLVGCATRCNVPRSNCSSRGDTPVLDKGQGEVATIANGKVNPSQSTEEATEATEVPDPGPSEPETATLRPGPLTEHVFTDPAPTPSSGPQPGSENGPEPDSSSTRPEPEPSGDPTGAGSSAAPTMWLGAQNGWLYVHSAVANWKKCLHSIKLKDSVLSLVHVKGRVLVALADGTLAIFHRGEDGQWDLSNYHLMDLGHPHHSIRCMAVVYDRVWCGYKNKVHVIQPKTMQIEKSFDAHPRRESQVRQLAWIGDGVWVSIRLDSTLRLYHAHTHQHLQDVDIEPYVSKMLGTGKLGFSFVRITALLVAGSRLWVGTGNGVVISIPLTETVVLHRGQLLGLRANKTSPTSGEGARPGGIIHVYGDDSSDRAASSFIPYCSMAQAQLCFHGHRDAVKFFVSVPGNVLATLNGSVLDSPAEGPGPAAPASEVEGQKLRNVLVLSGGEGYIDFRIGDGEDDETEEGAGDMSQVKPVLSKAERSHIIVWQVSYTPE

SEQ ID NO: 20799 - protein, 1337 aa, Homo sapiens
LAAAVAAMMEIQMDEGGGVVVYQDDYCSGSVMSERVSGLAGSIYREFERLIHCYDEEVVKELMPLVVNVLENLDSVLSENQEHEVELELLREDNEQLLTQYEREKALRRQAEEKFIEFEDALEQEKKELQIQVEHYEFQTRQLELKAKNYADQISRLEERESEMKKEYNALHQRHTEMIQTYVEHIERSKMQQVGGNSQTESSLPGRRKERPTSLNVFPLADGTVRAQIGGKLVPAGDHWHLSDLGQLQSSSSYQCPQDEMSESGQSSAAATPSTTGTKSNTPTSSVPSAAVTPLNESLQPLGDYGVGSKNSKRAREKRDSRNMEVQVTQEMRNVSIGMGSSDEWSDVQDIIDSTPELDMCPETRLDRTGSSPTQGIVNKAFGINTDSLYHELSTAGSEVIGDVDEGADLLGEFSGMGKEVGNLLLENSQLLETKNALNVVKNDLIAKVDQLSGEQEVLRGELEAAKQAKVKLENRIKELEEELKRVKSEAIIARREPKEEAEDVSSYLCTESDKIPMAQRRRFTRVEMARVLMERNQYKERLMELQEAVRWTEMIRASREHPSVQEKKKSTIWQFFSRLFSSSSSPPPAKRPYPSVNIHYKSPTTAGFSQRRNHAMCPISAGSRPLEFFPDDDCTSSARREQKREQYRQVREHVRNDDGRLQACGWSLPAKYKQLSPNGGQEDTRMKNVPVPVYCRPLVEKDPTMKLWCAAGVNLSGWRPNEDDAGNGVKPAPGRDPLTCDREGDGEPKSAHTSPEKKKAKELPEMDATSSRVWILTSTLTTSKVVIIDANQPGTVVDQFTVCNAHVLCISSIPAASDSDYPPGEMFLDSDVNPEDPGADGVLAGITLVGCATRCNVPRSNCSSRGDTPVLDKGQGEVATIANGKVNPSQSTEEATEATEVPDPGPSEPETATLRPGPLTEHVFTDPAPTPSSGPQPGSENGPEPDSSSTRPEPEPSGDPTGAGSSAAPTMWLGAQNGWLYVHSAVANWKKCLHSIKLKDSVLSLVHVKGRVLVALADGTLAIFHRGEDGQWDLSNYHLMDLGHPHHSIRCMAVVYDRVWCGYKNKVHVIQPKTMQIEKSFDAHPRRESQVRQLAWIGDGVWVSIRLDSTLRLYHAHTHQHLQDVDIEPYVSKMLGTGKLGFSFVRITALLVAGSRLWVGTGNGVVISIPLTETVVLHRGQLLGLRANKTSPTSGEGARPGGIIHVYGDDSSDRAASSFIPYCSMAQAQLCFHGHRDAVKFFVSVPGNVLATLNGSVLDSPAEGPGPAAPASEVEGQKLRNVLVLSGGEGYIDFRIGDGEDDETEEGAGDMSQVKPVLSKAERSHIIVWQVSYTPE

SEQ ID NO: 20800 - protein, 1344 aa, Homo sapiens
LAAAVAAMMEIQMDEGGGVVVYQDDYCSGSVMSERVSGLAGSIYREFERLIHCYDEEVVKELMPLVVNVLENLDSVLSENQEHEVELELLREDNEQLLTQYEREKALRRQAEEKFIEFEDALEQEKKELQIQVEHYEFQTRQLELKAKNYADQISRLEERESEMKKEYNALHQRHTEMIQTYVEHIERSKMQQVGGNSQTESSLPGRSRKERPTSLNVFPLADGTVRAQIGGKLVPAGDHWHLSDLGQLQSSSSYQCPQDEMSESGQSSAAATPSTTGTKSNTPTSSVPSAAVTPLNESLQPLGDYGVGSKNSKRAREKRDSRNMEVQVTQEMRNVSIGMGSSDEWSDVQDIIDSTPELDMCPETRLDRTGSSPTQGIVNKAFGINTDSLYHELSTAGSEVIGDVDEGADLLGEFSVRDDFFGMGKEVGNLLLENSQLLETKNALNVVKNDLIAKVDQLSGEQEVLRGELEAAKQAKVKLENRIKELEEELKRVKSEAIIARREPKEEAEDVSSYLCTESDKIPMAQRRRFTRVEMARVLMERNQYKERLMELQEAVRWTEMIRASREHPSVQEKKKSTIWQFFSRLFSSSSSPPPAKRPYPSVNIHYKSPTTAGFSQRRNHAMCPISAGSRPLEFFPDDDCTSSARREQKREQYRQVREHVRNDDGRLQACGWSLPAKYKQLSPNGGQEDTRMKNVPVPVYCRPLVEKDPTMKLWCAAGVNLSGWRPNEDDAGNGVKPAPGRDPLTCDREGDGEPKSAHTSPEKKKAKELPEMDATSSRVWILTSTLTTSKVVIIDANQPGTVVDQFTVCNAHVLCISSIPAASDSDYPPGEMFLDSDVNPEDPGADGVLAGITLVGCATRCNVPRSNCSSRGDTPVLDKGQGEVATIANGKVNPSQSTEEATEATEVPDPGPSEPETATLRPGPLTEHVFTDPAPTPSSGPQPGSENGPEPDSSSTRPEPEPSGDPTGAGSSAAPTMWLGAQNGWLYVHSAVANWKKCLHSIKLKDSVLSLVHVKGRVLVALADGTLAIFHRGEDGQWDLSNYHLMDLGHPHHSIRCMAVVYDRVWCGYKNKVHVIQPKTMQIEKSFDAHPRRESQVRQLAWIGDGVWVSIRLDSTLRLYHAHTHQHLQDVDIEPYVSKMLGTGKLGFSFVRITALLVAGSRLWVGTGNGVVISIPLTETVVLHRGQLLGLRANKTSPTSGEGARPGGIIHVYGDDSSDRAASSFIPYCSMAQAQLCFHGHRDAVKFFVSVPGNVLATLNGSVLDSPAEGPGPAAPASEVEGQKLRNVLVLSGGEGYIDFRIGDGEDDETEEGAGDMSQVKPVLSKAERSHIIVWQVSYTPE

SEQ ID NO: 20801 - protein, 248 aa, Homo sapiens
VESHISPNKRKRANRKKRLRCRNRVTLHTSFQKRNEGDRSGGSQESEIIDFFLGASLKDEVLKIMPVQKQTRAGQRTRFKAFVAIGDYNGHVGLGVKCSKEVATAIRGAIILAKLSIVPVRRGYWGNKIGKPHTVPCKVTGRCGSVLVRLIPAPRGTGIVSAPVPKKLLMMAGIDDCYTSARGCTATLGNFAKATFDAISKTYSYLTPDLWKETVFTKSPYQEFTDHLVKTHTRVSVQRTQAPAVATT

SEQ ID NO: 20802 - protein, 308 aa, Homo sapiens
LLPSRSRSSFPTKHQMADDAGAAGGPGGPGGPGMGNRGGFRGGFGSGIRGRGRGRGRGRGRGRGARGGKAEDKEWMPVTKLGRLVKDMKIKSLEEIYLFSLPIKESEIIDFFLGASLKDEVLKIMPVQKQTRAGQRTRFKAFVAIGDYNGHVGLGVKCSKEVATAIRGAIILAKLSIVPVRRGYWGNKIGKPHTVPCKVTGRCGSVLVRLIPAPRGTGIVSAPVPKKLLMMAGIDDCYTSARGCTATLGNFAKATFDAISKTYSYLTPDLWKETVFTKSPYQEFTDHLVKTHTRVSVQRTQAPAVATT

SEQ ID NO: 20803 - protein, 19 aa, Homo sapiens
LGGSPCLGLAGGCQMRRPH

SEQ ID NO: 20804 - protein, 46 aa, Homo sapiens
VSPVGRCSGPLRGRRESADIGSGLGSRVRAPGREPLSGSRGGLPDA

SEQ ID NO: 20805 - protein, 849 aa, Homo sapiens
VTPSQRAGSVAFCEEFGANLPHAAVAAGTLAGFSWSGGGGNMAETAAGVGRFKTNYAVERKIEPFYKGGKAQLDQTGQHLFCVCGTRVNILEVASGAVLRSLEQEDQEDITAFDLSPDNEVLVTASRALLLAQWAWQEGSVTRLWKAIHTAPVATMAFDPTSTLLATGGCDGAVRVWDIVRHYGTHHFRGSPGVVHLVAFHPDPTRLLLFSSATDAAIRVWSLQDRSCLAVLTAHYSAVTSLAFSADGHTMLSSGRDKICIIWDLQSCQATRTVPVFESVEAAVLLPEEPVSQLGVKSPGLYFLTAGDQGTLRVWEAASGQCVYTQAQPPGPGQELTHCTLAHTAGVVLTATADHNLLLYEARSLRLQKQFAGYSEEVLDVRFLGPEDSHVVVASNSPCLKVFELQTSACQILHGHTDIVLALDVFRKGWLFASCAKDQSVRIWRMNKAGQVMCVAQGSGHTHSVGTVCCSRLKESFLVTGSQDCTVKLWPLPKALLSKNTAPDNGPILLQAQTTQRCHDKDINSVAIAPNDKLLATGSQDRTAKLWALPQCQLLGVFSGHRRGLWCVQFSPMDQVLATASADGTIKLWALQDFSCLKTFEGHDASVLKVAFVSRGTQLLSSGSDGLVKLWTIKNNECVRTLDAHEDKVWGLHCSRLDDHALTGASDSRVILWKDVTEAEQAEEQARQEEQVVRQQELDNLLHEKRYLRALGLAISLDRPHTVLTVIQAIRRDPEACEKLEATMLRLRRDQKEALLRFCVTWNTNSRHCHEAQAVLGVLLRREAPEELLAYEGVRAALEALLPYTERHFQRLSRTLQAAAFLDFLWHNMKLPVPAAAPTPWETHKGALP

SEQ ID NO: 20806 - protein, 649 aa, Homo sapiens
VAAGTLAGFSWSGGGGNMAETAAGVGRFKTNYAVERKIEPFYKGGKAQLDQTGQHLFCVCGTRVNILEVASGAVLRSLEQEDQEDITAFDLSPDNEVLVTASRALLLAQWAWQEGSVTRLWKAIHTAPVATMAFDPTSTLLATGGCDGAVRVWDIVRHYGTHHFRGSPGVVHLVAFHPDPTRLLLFSSATDAAIRVWSLQDRSCLAVLTAHYSAVTSLAFSADGHTMLSSGRDKICIIWDLQSCQATRTVPVFESVEAAVLLPEEPVSQLGVKSPGLYFLTAGDQGTLRVWEAASGQCVYTQAQPPGPGQELTHCTLAHTAGVVLTATADHNLLLYEARSLRLQKQFAGYSEEVLDVRFLGPEDSHVVVASNSPCLKVFELQTSACQILHGHTDIVLALDVFRKGWLFASCAKDQSVRIWRMNKAGQVMCVAQGSGHTHSVGTVCCSRLKESFLVTGSQDCTVKLWPLPKALLSKNTAPDNGPILLQAQTTQRCHDKDINSVAIAPNDKLLATGSQDRTAKLWALPQCQLLGVFSGHRVASGASSSLPWTRCWPRPQLMAPSSSGHSRTSAVSRHLRGTMLCLKVAFVSRGTQLLSSGSDGLVKLWTIKNNECVRTLDAHEDKVWGLHAGWTTTPSLGPVTPESSSGRM

SEQ ID NO: 20807 - protein, 189 aa, Homo sapiens
LDVFRKGWLFASCAKDQSVRIWRMNKAGQVMCVAQGSGHTHSVGTVCCSRLKESFLVTGSQDCTVKLWPLPKALLSKNTAPDNGPILLQAQTTQRCHDKDINSVAIAPNDKLLATGSQDRTAKLWALPQCQLLGVFSGHRRGLWCVQFSPMDQVLATASADGTIKLWALQDFSCLKVSGAPDPPHFPPW

SEQ ID NO: 20808 - protein, 249 aa, Homo sapiens
LGPATVPAAGCLLRPPGGLWCVQFSPMDQVLATASADGTIKLWALQDFSCLKTFEGHDALSEGGLCEPWHAAAVQRFGWPREALDHQEQRVCADAGCPRGQGLGAARRLDDHALTGASDSRVILWKDVTEAEQAEEQARQEEQVVRQQELDNLLHEKRYLRALGLAISLDRPHTVLTVIQAIRRDPEACEKLEATMLRLRRDQKGPAALLRHVEHQLAALPRGPGRAGCALEARGPRGAAGLRRRAGSA

SEQ ID NO: 20809 - protein, 161 aa, Homo sapiens
VGWIVCRTLAGVQWATGWAVQWGALGAFVRRMNSLSVGLLPQRDTKFREDCPPDREELGRHSWAVLHTLAAYYPDLPTPEQQQDMAQFIHLFSKFYPCEECAEDLRKRLCRNHPDTRTRACFTQWLCHLHNEVNRKLGKPDFDCSKVDERWRDGWKDGSCD

SEQ ID NO: 20810 - protein, 118 aa, Homo sapiens
LVLVSAINGACPAGGCLVALTCDYRILADNPRYCIGLNETQLGIIAPFWLKDTLENTIGHRAAERALQLGLLFPPAEALQVGIVDQVVPEEQVQSTALSAIAQWMAIPGEARGMAGAR

SEQ ID NO: 20811 - protein, 135 aa, Homo sapiens
MGSGGVVHCRCAKCFCYPTKRRIRRRPRNLTILSLPEDVLFHILKWLSVEDILAVRAVHSQLKDLVDNHASVWACASFQELWPSPGNLKLFERAAEKGNFEAAVKLGIAYLYNEGRKSSPHLHVGASDKCEPLAL

SEQ ID NO: 20812 - protein, 694 aa, Homo sapiens
LAAEKGNFEAAVKLGIAYLYNEGLSVSDEARAEVNGLKASRFFSLAERLNVGAAPFIWLFIRPPWSVSGSCCKAVVHESLRAECQLQRTHKASILHCLGRVLSLFEDEEKQQQAHDLFEEAAHQGCLTSSYLLWESDRRTDVSDPGRCLHSFRKLRDYAAKGCWEAQLSLAKACANANQLGLEVRASSEIVCQLFQASQAVSKQQVFSVQKGLNDTMRYILIDWLVEVATMKDFTSLCLHLTVECVDRYLRRRLVPRYRLQLLGIACMVICTRFISKEILTIREAVWLTDNTYKYEDLVRMMGEIVSALEGKIRVPTVVDYKEVLLTLVPVELRTQHLCSFLCELSLLHTSLSAYAPARLAAAALLLARLTHGQTQPWTTQLWDLTGFSYEDLIPCVLSLHKKCFHDDAPKDYRQVSLTAVKQRFEDKRYGEISQEEVLSYSQLCAALGVTQDSPDPPTFLSTGEIHAFLSSPSGRRTKRKRENSLQEDRGSFVTTPTAELSSQEETLLGSFLDWSLDCCSGYEGDQESEGEKEGDVTAPSGILDVTVVYLNPEQHCCQESSDEEACPEDKGPQDPQALALDTQIPATPGPKPLVRTSREPGKDVTTSGYSSVSTASPTSSVDGGLGALPQPTSVLSLDSDSHTQPCHHQARKSCLQCRPPSPPESSVPQQQVKRINLCIHSEEEDMNLGLVRL

SEQ ID NO: 20813 - protein, 116 aa, Homo sapiens
LGSVLSVPAVSVSDEARAEVNGLKASRFFSLAERLNVGAAPFIWLFIRPPWSVSGSCCKAVVHESLRAECQLQRVSLGEGQHLRGHLQGPRTQEDPEGRSWTLESQEPKGSEDAEN

SEQ ID NO: 20814 - protein, 413 aa, Homo sapiens
LQGDAAAFMLPAGCSRRLVAELQGALDACAQRQLQLEQSLRVCRRLLHAWEPTGTRALKPPPGPETNGEDPLPACTPSPQDLKELEFLTQALEKAVRVRRGITKAGERDKAPSLKSRSIVTSSGTTASAPPHSPGQAGGHASDTRPTKGLRQTTVPAKGHPERRLLSVGDGTRVGMGARTPRPGAGLRDQQMAPSAAPQAPEAFTLKEKGHLLRLPAAFRKAASQNSSLWAQLSSTQTSDSTDAAAAKTQFLQNMQTASGGPQPRLSAVEVEAEAGRLRKACSLLRLRMREELSAAPMDWMQEYRCLLTLEGLQAMVGQCLHRLQELRAAVAEQPPRPCPVGRPPGASPSCGGRAEPAWSPQLLVYSSTQELQTLAALKLRVAVLDQQIHLEKVLLEEEVGVQQRSAALRTRG

SEQ ID NO: 20815 - protein, 441 aa, Homo sapiens
LQGDAAAFMLPAGCSRRLVAELQGALDACAQRQLQLEQSLRVCRRLLHAWEPTGTRALKPPPGPETNGEDPLPACTPSPQDLKELEFLTQALEKAVRVRRGITKAGERDKAPSLKSRSIVTSSGTTASAPPHSPGQAGGHASDTRPTKGLRQTTVPAKGHPERRLLSVGDGTRVGMGARTPRPGAGLRDQQMAPSAAPQAPEAFTLKEKGHLLRLPAAFRKAASQNSSLWAQLSSTQTSDSTDAAAAKTQFLQNMQTASGGPQPRLSAVEVEAEAGRLRKACSLLRLRMREELSAAPMDWMQEYRCLLTLEGLQAMVGQCLHRLQELRAAVAEQPPRPCPVGRPPGASPSCGGRAEPAWSPQLLVYSSTQELQTLAALKLRVAVLDQQIHLEKVLMAELLPLVSAAQPQGPPWLALCRAVHSLLCEGGARVLTILRDEPAV

SEQ ID NO: 20816 - protein, 193 aa, Homo sapiens
LVAELQGALDACAQRQLQLEQSLRVCRRLLHAWEPTGTRALKPPPGPETNGEDPLPACTPSPQDLKELEFLTQALEKAVRVRRGITKAGERDKAPSLKSRSIVTSSGTTASAPPHSPGQAGGHASDTRPTKGLRQTTVPAKGHPERRLLSVGDGTRVGMGARTPRPGAGLRDQQMAPSAAPQAPEAFTLKEKG

SEQ ID NO: 20817 - protein, 392 aa, Homo sapiens
LPRGPAAPSGLFGLGPASWPCDGCPCLCREPTGTRALKPPPGPETNGEDPLPACTPSPQDLKELEFLTQALEKAVRVRRGITKAGERDKAPSLKSRSIVTSSGTTASAPPHSPGQAGGHASDTRPTKGLRQTTVPAKGHPERRLLSVGDGTRVGMGARTPRPGAGLRDQQMAPSAAPQAPEAFTLKEKGHLLRLPAAFRKAASQNSSLWAQLSSTQTSDSTDAAAAKTQFLQNMQTASGGPQPRLSAVEVEAEAGRLRKACSLLRLRMREELSAAPMDWMQEYRCLLTLEGLQAMVGQCLHRLQELRAAVAEQPPRPCPVGRPPGASPSCGGRAEPAWSPQLLVYSSTQELQTLAALKLRVAVLDQQIHLEKVLLEEEVGVQQRSAALRTRG

SEQ ID NO: 20818 - protein, 103 aa, Homo sapiens
LAAAGLRSRSLPTRLTMRGEQGAAGARVLQFTNCRILRGGKLLREDLWVRGGRILDPEKLFFEERRVADERRDCGGRILAPGFIDVQINGAARGRQGNPGEEL

SEQ ID NO: 20819 - protein, 188 aa, Homo sapiens
LAAAGLRSRSLPTRLTMRGEQGAAGARVLQFTNCRILRGGKLLREDLWVRGGRILDPEKLFFEERRVADERRDCGGRILAPGFIDVQINGGFGVDFSQATEDVGSGVALVARRILSHGVTSFCPTLVTSPPEVYHKVVPQIPVKSGGPHGAGVLGEWLTSSPPPPWEAPAGPVGSPHPSRCPAGGEGR

SEQ ID NO: 20820 - protein, 126 aa, Homo sapiens
MAENHCELLSPARGGIGAGLGGGLCRRCSAGLGALAQRPGSVSKWVRLNVGGTYFLTTRQTLCRDPKSFLYRLCQADPDLDSDKDETGAYLIDRDPTYFGPVLNYLRHGKLVINKDLAEEGGWVLS

SEQ ID NO: 20821 - protein, 245 aa, Homo sapiens
LMKTAALSHPPPRGSPGLGLCPRANPAPFCPHPVPASLGLTILEVACNMELPHGGEGWQQLRQGYLPPEFTAGLSSELRSVLVMMLEPDPKLRATAEALLALPVLRQPRAWGVLWCMAAEALSRGWALWQALLALLCWLWHGLAHPASWLQPLGPPATPPGSPPCSLLLDSSLSSNWDDDSLGPSLSPEAVLARTVGSTSTPRSRCTPRDALDLSDINSEPPRGSFPSFEPRNLLSLFEDTLDPT

SEQ ID NO: 20822 - protein, 25 aa, Homo sapiens
LDSRGSPCSCLPRPTTEAVGPGQSC

SEQ ID NO: 20823 - protein, 57 aa, Homo sapiens
VRGLGVATSPLPSASPARPLLCSPGLPHTHGVKSAAALPGRNLPSTGKGGQQMCRAW

SEQ ID NO: 20824 - protein, 55 aa, Homo sapiens
VSPDPAVRGLGVATSPLPSASPGLPHTHGVKSAAALPGRNLPSTGKGGQQMCRAW

SEQ ID NO: 20825 - protein, 46 aa, Homo sapiens
LGPRGPAPRPVAPGLPHTHGVKSAAALPGRNLPSTGKGGQQMCRAW

SEQ ID NO: 20826 - protein, 54 aa, Homo sapiens
LGPRGPAPRPVAPARPLLCSPGLPHTHGVKSAAALPGRNLPSTGKGGQQMCRAW

SEQ ID NO: 20827 - protein, 27 aa, Homo sapiens
LRGRGRRAARGGRVRDGTHQPPSRRRR

SEQ ID NO: 20828 - protein, 159 aa, Homo sapiens
MDPGTVATMRKPRCSLPDVLGVAGLVRRRRRYALSGSVWKKRTLTWRVRSFPQSSQLSQETVRVLMSYALMAWGMESGLTFHEVDSPQGQEPDILIDFARAFHQDSYPFDGLGGTLAHAFFPGEHPISGDTHFDDEETWTFGSKGLSAAGAGAGRRLTG

SEQ ID NO: 20829 - protein, 776 aa, Homo sapiens
LPSVTYLLLEVIPDSMRKQEVRTGREAGQGHGTGSPAEQVKALMDLLAGKGSQGSQAPQALDRTPDAPLGPCSNDSRIQRHRKALLSKVGGGPELGGPWHRLASLLLVEGLTDLQLREHDFTQVEATRGGGHPARTVALDRLFLPLSRVSVPPRVSITIGVAGMGKTTLVRHFVRLWAHGQVGKDFSLVLPLTFRDLNTHEKLCADRLICSVFPHVGEPSLAVAVPARALLILDGLDECRTPLDFSNTVACTDPKKEIPVDHLITNIIRGNLFPEVSIWITSRPSASGQIPGGLVDRMTEIRGFNEEEIKVCLEQMFPEDQALLGWMLSQVQADRALYLMCTVPAFCRLTGMALGHLWRSRTGPQDAELWPPRTLCELYSWYFRMALSGEGQEKGKASPRIEQVAHGGRKMVGTLGRLAFHGLLKKKYVFYEQDMKAFGVDLALLQGAPCSCFLQREETLASSVAYCFTHLSLQEFVAAAYYYGASRRAIFDLFTESGVSWPRLGFLTHFRSAAQRAMQAEDGRLDVFLRFLSGLLSPRVNALLAGSLLAQGEHQAYRTQVAELLQGCLRPDAAVCARAINVLHCLHELQHTELARSVEEAMESGALARLTGPAHRAALAYLLQVSDACAQEANLSLSLSQGVLQSLLPQLLYCRKLRLDTNQFQDPVMELLGSVLSGKDCRIQKISLAENQISNKGAKALARSLLVNRSLTSLDLRGNSIGPQGAKALADALKINRTLTSLRVKFMYHKIDCFRRVPEADACNPSTLGGQGRWIT

SEQ ID NO: 20830 - protein, 62 aa, Homo sapiens
LAQGFPGHLPPRSWSRAEPRSMEMDAPRPPSLAVPGAASRPGRAAISSSEPSPLLATLCFFS

SEQ ID NO: 20831 - protein, 120 aa, Homo sapiens
LGTSITLNPGLCSQVTLRLDTHPAMVTVLEMGAARHFLRMQQLAKTQEERAQLLQPTLEINPRHALIKKLNQLRASEPGLAQLLVDQIYENAMIAAGLVDDPRAMVGRLNELLVKALERH

SEQ ID NO: 20832 - protein, 529 aa, Homo sapiens
LASAPQAFLDALQNQAEASSKIIGQFGVGFYSAFMVADRVEVYSRSAAPGSLGYQWLSDGSGVFEIAEASGVRTGTKIIIHLKSDCKEFSSEARVRDVVTKYSNFVSFPLYLNGRRMNTLQAIWMMDPKDVREWQHEEFYRYVAQAHDKPRYTLHYKTDAPLNIRSIFYVPDMKPSMFDVSRELGSSVALYSRKVLIQTKATDILPKWLRFIRGVVDSEDIPLNLSRELLQESALIRKLRDVLQQRLIKFFIDQSKKDAEKYAKFFEDYGLFMREGIVTATEQEVKEDIAKLLRYESSALPSGQLTSLSEYASRMRAGTRNIYYLCAPNRHLAEHSPYYEAMKKKDTEVLFCFEQFDELTLLHLREFDKKKLISVETDIVVDHYKEEKFEDRSPAAECLSEKETEELMAWMRNVLGSRVTNVKVTLRLDTHPAMVTVLEMGAARHFLRMQQLAKTQEERAQLLQPTLEINPRHALIKKLNQLRASEPGLAQLLVDQIYENAMIAAGLVDDPRAMVGRLNELLVKALERH

SEQ ID NO: 20833 - protein, 719 aa, Homo sapiens
VYGPAWLRAALWEYDMARELRALLLWGRRLRPLLRAPALAAVPGGKPILCPRRTTAQLGPRRNPAWSLQAGRLFSTQTAEDKEEPLHSIISSTESVQGSTSKHEFQAETKKLLDIVARSLYSEKEVFIRELISNASDALEKLRHKLVSDGQALPEMEIHLQTNAEKGTITIQDTGIGMTQEELVSNLGTIARSGSKAFLDALQNQAEASSKIIGQFGVGFYSAFMVADRVEVYSRSAAPGSLGYQWLSDGSGVFEIAEASGVRTGTKIIIHLKSDCKEFSSEARVRDVVTKYSNFVSFPLYLNGRRMNTLQAIWMMDPKDVREWQHEEFYRYVAQAHDKPRYTLHYKTDAPLNIRSIFYVPDMKPSMFDVSRELGSSVALYSRKVLIQTKATDILPKWLRFIRGVVDSEDIPLNLSRELLQESALIRKLRDVLQQRLIKFFIDQSKKDAEKYAKFFEDYGLFMREGIVTATEQEVKEDIAKLLRYESSALPSGQLTSLSEYASRMRAGTRNIYYLCAPNRHLAEHSPYYEAMKKKDTEVLFCFEQFDELTLLHLREFDKKKLISVETDIVVDHYKEEKFEDRSPAAECLSEKETEELMAWMRNVLGSRVTNVKVTLRLDTHPAMVTVLEMGAARHFLRMQQLAKTQEERAQLLQPTLEINPRHALIKKLNQLRASEPGLAQLLVDQIYENAMIAAGLVDDPRAMVGRLNELLVKALERH

SEQ ID NO: 20834 - protein, 104 aa, Homo sapiens
VEVYSRSAAPGSLGYQWLSDGSGVFEIAEASGVRTGTKIIIHLKSDCKEFSSEARVRDVVTKYSNFVSFPLYLNGRRMNTLQEPVQGQALHWLRPARWWRRRAW

SEQ ID NO: 20835 - protein, 128 aa, Homo sapiens
LDALQNQAEASSKIIGQFGVGFYSAFMVADRVEVYSRSAAPGSLGYQWLSDGSGVFEIAEASGVRTGTKIIIHLKSDCKEFSSEARVRDVVTKYSNFVSFPLYLNGRRMNTLQTFLLDGVTRHAVLSD

SEQ ID NO: 20836 - protein, 97 aa, Homo sapiens
MARELRALLLWGRRLRPLLRAPALAAVPGGKPILCPRRTTAQLGPRRNPAWSLQAGRLFSTQTAEDKEEPLHSIISSTESVQGSTSKHEFQAEVAVS

SEQ ID NO: 20837 - protein, 182 aa, Homo sapiens
VTPQPQTPVQPPSVATPQSSQQQPTPVHAQPPGTPLSQAAASIDNRVPTPSSVASAETNSQQPGPDVPVLEMKTETQAEDTEPDPGESKGEPRSEMMEEDLQGASQVKEETDIAEQKSEPMEVDEKKPEVKVEVKEEEESSSNGTASQSTSPSQPRKKSRPFIHYLIKACCFSTVLGFHVED

SEQ ID NO: 20838 - protein, 90 aa, Homo sapiens
LAESPHCLLAGHVSPAEPSQWFVPVQAIQHIEGTQEKQELEEEQRRAVIVKPVRSCPEAPTSDTASDSEASDSDAMDQSREEPSGDGELP

SEQ ID NO: 20839 - protein, 70 aa, Homo sapiens
LSPGGRAAAMAKYLAQIIVMGVQVVGRAFARALRQEFAGVSHQLGRPRVKCGLLRTERSPTCPHSQPGRS

SEQ ID NO: 20840 - protein, 33 aa, Homo sapiens
LAKYLAQIIVMGVQVVGRAFARALRQEFAASTP

SEQ ID NO: 20841 - protein, 42 aa, Homo sapiens
LSPGGRAAAMAKYLAQIIVMGVQVVGRAFARALRQEFAASTP

SEQ ID NO: 20842 - protein, 334 aa, Homo sapiens
LRPRPRHGARGERGDRTLAAEFRAPLPGGTHTALLPLAGSNRSGHWDTAALAHSKKSAPSGPQSLEAKLRDSSDSELLRDILHKHEAVHTEPLDELYEALAETLMAKESTQGHRSYLLPSGGSVTLSESTAIISYGTTGLVTWDAALYLAEWAIENPAVFTNRTVLELGSGAGLTGLAICKMCRPRAYIFSDCHSRVLEQLRGNVLLNGLSLEADITAKLDSPRVTVAQLDWDVATVHQLSAFQPDVVIAADVLYCPEAIMSLVGVLRRLAACREHQRAPEVYVAFTVRNPETCQLFTTELGRAGIRWEVEPRHEQKLFPYEEHLEMAMLNLTL

SEQ ID NO: 20843 - protein, 159 aa, Homo sapiens
MAPEENAGTELLLQSFERRFLAARTLRSFPWQSLEAKLRDSSDSELLRDILHKTVKHPVCVKHPPSVKYARCFLSELIKKHEAVHTEPLDELYEALAETLMAKESTQGHRSYLLPSGGSVTLSESTAIISYGTTGLVTWDAALYLAEWAIENPAVFTNR

SEQ ID NO: 20844 - protein, 161 aa, Homo sapiens
LAAAVAERRDRRSAMSSEPPPPPQPPTHQASVGLLDTPRSRERSPSPLRGNVVPSPLPTRRTRTFSATVRASQGPVYKGVCKCFCRSKGHGFITPADGGPDIFLHISDVEGEYVPVEGDEVTYKMCSIPPKNEKLQAVEVVITHLAPGTKHETWSGHVISS

SEQ ID NO: 20845 - protein, 169 aa, Homo sapiens
VKSPGRGHRGSGDQSGLNLRSAMSSEPPPPPQPPTHQASVGLLDTPRSRERSPSPLRGNVVPSPLPTRRTRTFSATVRASQGPVYKGVCKCFCRSKGHGFITPADGGPDIFLHISDVEGEYVPVEGDEVTYKMCSIPPKNEKLQAVEVVITHLAPGTKHETWSGHVISS

SEQ ID NO: 20846 - protein, 154 aa, Homo sapiens
VPGDTSAMSSEPPPPPQPPTHQASVGLLDTPRSRERSPSPLRGNVVPSPLPTRRTRTFSATVRASQGPVYKGVCKCFCRSKGHGFITPADGGPDIFLHISDVEGEYVPVEGDEVTYKMCSIPPKNEKLQAVEVVITHLAPGTKHETWSGHVISS

SEQ ID NO: 20847 - protein, 155 aa, Homo sapiens
LRWRFRSAMSSEPPPPPQPPTHQASVGLLDTPRSRERSPSPLRGNVVPSPLPTRRTRTFSATVRASQGPVYKGVCKCFCRSKGHGFITPADGGPDIFLHISDVEGEYVPVEGDEVTYKMCSIPPKNEKLQAVEVVITHLAPGTKHETWSGHVISS

SEQ ID NO: 20848 - protein, 101 aa, Homo sapiens
VPGDTSAMSSEPPPPPQPPTHQASVGLLDTPRSRERSPSPLRGNVVPSPLPTRRTRTFSATVRASQGPVYKGVCKCFCRSKGHGFITPADGGPDIFLHISE

SEQ ID NO: 20849 - protein, 60 aa, Homo sapiens
VPGDTSAMSSEPPPPPQPPTHQASVGLLDTPRSRERSPSPLRGNVVPSPLPTRRTRTFSA

SEQ ID NO: 20850 - protein, 7 aa, Homo sapiens
VRVSHVI

SEQ ID NO: 20851 - protein, 11 aa, Homo sapiens
VASVMTVSHVI

SEQ ID NO: 20852 - protein, 9 aa, Homo sapiens
LAVQVSHVI

SEQ ID NO: 20853 - protein, 57 aa, Homo sapiens [sequence omitted]

SEQ ID NO: 20854 - protein, 86 aa, Homo sapiens [sequence omitted]

SEQ ID NO: 20855 - protein, 57 aa, Homo sapiens [sequence omitted]

SEQ ID NO: 20856 - protein, 196 aa, Homo sapiens
LGKLRARGGAARLRELLPGWDSYTMRCLAPRPAGSYLSEPQGSSQCATMELGPLEGGYLELLNSDADPLCLYHFYDQMDLAGEEEIELYSEPDTDTINCDQFSRLLCDMEGDEETREAYANIAELDQYVFQDSQLEGLSKDIFKHIGPDEVIGESMEMPAEVGQKSQKRPFPEELPADLKHWKPALRVEALGSCSA

SEQ ID NO: 20857 - protein, 957 aa, Homo sapiens
LGKLRARGGAARLRELLPGWDSYTMRCLAPRPAGSYLSEPQGSSQCATMELGPLEGGYLELLNSDADPLCLYHFYDQMDLAGEEEIELYSEPDTDTINCDQFSRLLCDMEGDEETREAYANIAELDQYVFQDSQLEGLSKDIFKHIGPDEVIGESMEMPAEVGQKSQKRPFPEELPADLKHWKPAEPPTVVTGSLLVGPVSDCSTLPCLPLPALFNQEPASGQMRLEKTDQIPMPFSSSSLSCLNLPEGPIQFVPTISTLPHGLWQISEAGTGVSSIFIYHGEVPQASQVPPPSGFTVHGLPTSPDRPGSTSPFAPSATDLPSMPEPALTSRANMTEHKTSPTQCPAAGEVSNKLPKWPEPVEQFYRSLQDTYGAEPAGPDGILVEVDLVQARLERSSSKSLERELATPDWAERQLAQGGLAEVLLAAKEHRRPRETRVIAVLGKAGQGKSYWAGAVSRAWACGRLPQYDFVFSVPCHCLNRPGDAYGLQDLLFSLGPQPLVAADEVFSHILKRPDRVLLILDGFEELEAQDGFLHSTCGPAPAEPCSLRGLLAGLFQKKLLRGCTLLLTARPRGRLVQSLSKADALFELSGFSMEQAQAYVMRYFESSGMTEHQDRALTLLRDRPLLLSHSHSPTLCRAVCQLSEALLELGEDAKLPSTLTGLYVGLLGRAALDSPPGALAELAKLAWELGRRHQSTLQEDQFPSADVRTWAMAKGLVQHPPRAAESELAFPSFLLQCFLGALWLALSGEIKDKELPQYLALTPRKKRPYDNWLEGVPRFLAGLIFQPPARCLGALLGPSAAASVDRKQKVLARYLKRLQPGTLRARQLLELLHCAHEAEEAGIWQHVVQELPGRLSFLGTRLTPPDAHVLGKALEAAGQDFSLDLRSTGICPSGLGSLVGLSCVTRFRWGEGLGEETSLCWALTAVLVPSPVLCGVSFSMQSSRVGQNGFSPFLR

SEQ ID NO: 20858 - protein, 909 aa, Homo sapiens
LGKLRARGGAARLRELLPGWDSYTMRCLAPRPAGSYLSEPQGSSQCATMELGPLEGGYLELLNSDADPLCLYHFYDQMDLAGEEEIELYSEPDTDTINCDQFSRLLCDMEGDEETREAYANIAELDQYVFQDSQLEGLSKDIFIEHIGPDEVIGESMEMPAEVGQKSQKRPFPEELPADLKHWKPVPFSSSSLSCLNLPEGPIQFVPTISTLPHGLWQISEAGTGVSSIFIYHGEVPQASQVPPPSGFTVHGLPTSPDRPGSTSPFAPSATDLPSMPEPALTSRANMTEHKTSPTQCPAAGEVSNKLPKWPEPVEQFYRSLQDTYGAEPAGPDGILVEVDLVQARLERSSSKSLERELATPDWAERQLAQGGLAEVLLAAKEHRRPRETRVIAVLGKAGQGKSYWAGAVSRAWACGRLPQYDFVFSVPCHCLNRPGDAYGLQDLLFSLGPQPLVAADEVFSHILKRPDRVLLILDGFEELEAQDGFLHSTCGPAPAEPCSLRGLLAGLFQKKLLRGCTLLLTARPRGRLVQSLSKADALFELSGFSMEQAQAYVMRYFESSGMTEHQDRALTLLRDRPLLLSHSHSPTLCRAVCQLSEALLELGEDAKLPSTLTGLYVGLLGRAALDSPPGALAELAKLAWELGRRHQSTLQEDQFPSADVRTWAMAKGLVQHPPRAAESELAFPSFLLQCFLGALWLALSGEIKDKELPQYLALTPRKKRPYDNWLEGVPRFLAGLIFQPPARCLGALLGPSAAASVDRKQKVLARYLKRLQPGTLRARQLLELLHCAHEAEEAGIWQHVVQELPGRLSFLGTRLTPPDAHVLGKALEAAGQDFSLDLRSTGICPSGLGSLVGLSCVTRFRWGEGLGEETSLCWALTAVLVPSPVLCGVSFSMQSSRVGQNGFSPFLR

SEQ ID NO: 20859 - protein, 377 aa, Homo sapiens
LGKLRARGGAARLRELLPGWDSYTMRCLAPRPAGSYLSEPQGSSQCATMELGPLEGGYLELLNSDADPLCLYHFYDQMDLAGEEEIELYSEPDTDTINCDQFSRLLCDMEGDEETREAYANIAELDQYVFQDSQLEGLSKDIFKHIGPDEVIGESMEMPAEVGQKSQKRPFPEELPADLKHWKPAEPPTVVTGSLLVGPVSDCSTLPCLPLPALFNQEPASGQMRLEKTDQIPMPFSSSSLSCLNLPEGPIQFVPTISTLPHGLWQISEAGTGVSSIFIYHGEVPQASQVPPPSGFTVHGLPTSPDRPGSTSPFAPSATDLPSMPEPALTSRANMTEHKTSPTQCPAAGEVSNKLPKWPGREVPRKTQLGSSLLFGT

SEQ ID NO: 20860 - protein, 1155 aa, Homo sapiens
LGKLRARGGAARLRELLPGWDSYTMRCLAPRPAGSYLSEPQGSSQCATMELGPLEGGYLELLNSDADPLCLYHFYDQMDLAGEEEIELYSEPDTDTINCDQFSRLLCDMEGDEETREAYANIAELDQYVFQDSQLEGLSKDIFIEHIGPDEVIGESMEMPAEVGQKSQKRPFPEELPADLKHWKPAEPPTVVTGSLLVGPVSDCSTLPCLPLPALFNQEPASGQMRLEKTDQIPMPFSSSSLSCLNLPEGPIQFVPTISTLPHGLWQISEAGTGVSSIFIYHGEVPQASQVPPPSGFTVHGLPTSPDRPGSTSPFAPSATDLPSMPEPALTSRANMTEHKTSPTQCPAAGEVSNKLPKWPEPVEQFYRSLQDTYGAEPAGPDGILVEVDLVQARLERSSSKSLERELATPDWAERQLAQGGLAEVLLAAKEHRRPRETRVIAVLGKAGQGKSYWAGAVSRAWACGRLPQYDFVFSVPCHCLNRPGDAYGLQDLLFSLGPQPLVAADEVFSHILKRPDRVLLILDGFEELEAQDGFLHSTCGPAPAEPCSLRGLLAGLFQKKLLRGCTLLLTARPRGRLVQSLSKADALFELSGFSMEQAQAYVMRYFESSGMTEHQDRALTLLRDRPLLLSHSHSPTLCRAVCQLSEALLELGEDAKLPSTLTGLYVGLLGRAALDSPPGALAELAKLAWELGRRHQSTLQEDQFPSADVRTWAMAKGLVQHPPRAAESELAFPSFLLQCFLGALWLALSGEIKDKELPQYLALTPRKKRPYDNWLEGVPRFLAGLIFQPPARCLGALLGPSAAASVDRKQKVLARYLKRLQPGTLRARQLLELLHCAHEAEEAGIWQHVVQELPGRLSFLGTRLTPPDAHVLGKALEAAGQDFSLDLRSTGICPSGLGSLVGLSCVTRFRAALSDTVALWESLQQHGETKLLQAAEEKFTIEPFKAKSLKDVEDLGKLVQTQRTRSSSEDTAGELPAVRDLKKLEFALGPVSGPQAFPKLVRILTAFSSLQHLDLDALSENKIGDEGVSQLSATFPQLKSLETLNLSQNNITDLGAYKLAEALPSLAASLLRLSLYNNCICDVGAESLARVLPDMVSLRVMDVQYNKFTAAGAQQLAASLRRCPHVETLAMWTPTIPFSVQEHLQQQDSRISLR

SEQ ID NO: 20861 - protein, 1154 aa, Homo sapiens
LGKLRARGGAARLRELLPGWDSYTMRCLAPRPAGSYLSEPQGSSQCATMELGPLEGGYLELLNSDADPLCLYHFYDQMDLAGEEEIELYSEPDTDTINCDQFSRLLCDMEGDEETREAYANIAELDQYVFQDSQLEGLSKDIFKHIGPDEVIGESMEMPAEVGQKSQKRPFPEELPADLKHWKPAEPPTVVTGSLLVGPVSDCSTLPCLPLPALFNQEPASGQMRLEKTDQIPMPFSSSSLSCLNLPEGPIQFVPTISTLPHGLWQISEAGTGVSSIFIYHGEVPQASQVPPPSGFTVHGLPTSPDRPGSTSPFAPSATDLPSMPEPALTSRANMTEHKTSPTQCPAAGEVSNKLPKWPEPVEQFYRSLQDTYGAEPAGPDGILVEVDLVQARLERSSSKSLERELATPDWAERQLAQGGLAEVLLAAKEHRRPRETRVIAVLGKAGQGKSYWAGAVSRAWACGRLPQYDFVFSVPCHCLNRPGDAYGLQDLLFSLGPQPLVAADEVFSHILKRPDRVLLILDGFEELEAQDGFLHSTCGPAPAEPCSLRGLLAGLFQKKLLRGCTLLLTARPRGRLVQSLSKADALFELSGFSMEQAQAYVMRYFESSGMTEHQDRALTLLRDRPLLLSHSHSPTLCRAVCQLSEALLELGEDAKLPSTLTGLYVGLLGRAALDSPPGALAELAKLAWELGRRHQSTLQEDQFPSADVRTWAMAKGLVQHPPRAAESELAFPSFLLQCFLGALWLALSGEIKDKELPQYLALTPRKKRPYDNWLEGVPRFLAGLIFQPPARCLGALLGPSAAASVDRKQKVLARYLKRLQPGTLRARQLLELLHCAHEAEEAGIWQHVVQELPGRLSFLGTRLTPPDAHVLGKALEAAGQDFSLDLRSTGICPSGLGSLVGLSCVTRFRAALSDTVALWESLQQHGETKLLQAAEEKFTIEPFKAKSLKDVEDLGKLVQTQRTRSSSEDTAGELPAVRDLKKLEFALGPVSGPQAFPKLVRILTAFSSLQHLDLDALSENKIGDEGVSQLSATFPQLKSLETLNLSQNNITDLGAYKLAEALPSLAASLLRLSLYNNCICDVGAESLARVLPDMVSLRVMDVQYNKFTAAGAQQLAASLRRCPHVETLAMWTPTIPFSVQEHLQQQDSRISLR

SEQ ID NO: 20862 - protein, 570 aa, Homo sapiens
LGKLRARGGAARLRELLPGWDSYTMRCLAPRPAGSYLSEPQGSSQCATMELGPLEGGYLELLNSDADPLCLYHFYDQMDLAGEEEIELYSEPDTDTINCDQFSRLLCDMEGDEETREAYANIAELDQYVFQDSQLEGLSKDIFKHIGPDEVIGESMEMPAEVGQKSQKRPFPEELPADLKHWKPVPFSSSSLSCLNLPEGPIQFVPTISTLPHGLWQISEAGTGVSSIFIYHGEVPQASQVPPPSGFTVHGLPTSPDRPGSTSPFAPSATDLPSMPEPALTSRANMTEHKTSPTQCPAAGEVSNKLPKWPGLAWSPCLGLRPSLHRAALSDTVALWESLQQHGETKLLQAAEEKFTIEPFKAKSLKDVEDLGKLVQTQRTRSSSEDTAGELPAVRDLKKLEFALGPVSGPQAFPKLVRILTAFSSLQHLDLDALSENKIGDEGVSQLSATFPQLKSLETLNLSQNNITDLGAYKLAEALPSLAASLLRLSLYNNCICDVGAESLARVLPDMVSLRVMDVQYNKFTAAGAQQLAASLRRCPHVETLAMWTPTIPFSVQEHLQQQDSRISLR

SEQ ID NO: 20863 - protein, 40 aa, Homo sapiens
LTGSARRARSINWDAVLFCYYLPGTMWVPSPAWVGGSGWV

SEQ ID NO: 20864 - protein, 73 aa, Homo sapiens
MQSPQQQSPDGGQNLPPLPPPRPRPPRARGRAPRSRPRPPATRTSAHSVRTPITGASRAPARSWTPADSTGGP

SEQ ID NO: 20865 - protein, 51 aa, Homo sapiens
LHGSWPRSMRESRPGAPRSPPPSRPRRPAPRRQRTPGRYGPPLRLAPSVGW

SEQ ID NO: 20866 - protein, 510 aa, Homo sapiens
VRTRSQQWGCTRASSRGGNKMEDSASASLSSAAATGTSTSTPAAPTARKQLDKEQVRKAVDALLTHCKSRKNNYGLLLNENESLFLMVVLWKIPSKELRVRLTLPHSIRSDSEDICLFTKDEPNSTPEKTEQFYRKLLNKHGIKTVSQIISLQTLKKEYKSYEAKLRLLSSFDFFLTDARIRRLLPSLIGRHFYQRKKVPVSVNLLSKNLSREINDCIGGTVLNISKSGSCSAIRIGHVGMQIEHIIENIVAVTKGLSEKLPEKWESVKLLFVKTEKSAALPIFSSFVSNWDEATKRSLLNKKKKEARRKRRERNFEKQKERKKKRQQARKTASVLSKDDVAPESGDTTVKKPESKKEQTPEHGKKKRGRGKAQVKATNESEDEIPQLVPIGKKTPANEKVEIQKHATGKKSPAKSPNPSTPRGKKRKALPASETPKAAESETPGKSPEKKPKIKEEAVKEKSPSLGKKDARQTPKKPEAKFFTTPSKSVRKASHTPKKWPKKPKVPQST

SEQ ID NO: 20867 - protein, 84 aa, Homo sapiens
MQIEHIIENIVAVTKGLSEKLPEKWESVKLLFVKTEKSAALPIFSSFVSNWDEATKRSLLNKKKKVSRILNTYRMNNEGCKFSH

SEQ ID NO: 20868 - protein, 156 aa, Homo sapiens
MEDSASASLSSAAATGTSTSTPAAPTARKQLDKEQVRKAVDALLTHCKSRKNNYGLLLNENESLFLMVVLWKIPSKELRVRLTLPHSIRSDSEDICLFTKDEPNSTPEKTEQFYRKLLNKHGIKTVSQVGSLVNIFKLFRGFNSGEMVSQIHCYIS

SEQ ID NO: 20869 - protein, 59 aa, Homo sapiens
VRTRSQQWGCTRASSRGGNKMEDSASASLSSAAATGTSTSTPAAPTARKQLDKEQDLAS

SEQ ID NO: 20870 - protein, 130 aa, Homo sapiens
VKARNSLAMSAAEAGGVFHRARGRTLAAFPAEKESEWKGPFYFILGADPQFGLIKAWSTGDCDNGGDEWEQEIRLTEQAVQAINKLNPKPKFFVLCGDLIHAMPAGQRPPRAPSRGGHRRENCSPILQSR

SEQ ID NO: 20871 - protein, 120 aa, Homo sapiens
VKARNSLAMSAAEAGGVFHRARGRTLAAFPAEKESEWKGPFYFILGADPQFGLIKAWSTGDCDNGGDEWEQEIRLTEQAVQAINKLNPKPKFFVLCGDLIHAMPGKTRVIACDLFSFSRS

SEQ ID NO: 20872 - protein, 42 aa, Homo sapiens
LGFPITCHALSTQLVPLGIDGIELERVPASAVALPGSTESSI

SEQ ID NO: 20873 - protein, 139 aa, Homo sapiens
LMPEKVTRFCPLEGKANKNVQWDEDSVEYMPANPVRIAFVLVVHGRASRQLQRMFKAIYHKDHFYYIHVDKRSNYLHRQVLQVSRQYSNVRVTPWRMATIWGGASLLSTYLQSMRDLLEMTDWPWDFFINLSAADYPIR

SEQ ID NO: 20874 - protein, 107 aa, Homo sapiens
VLQSHRPVSHCDDEACQLSFVGYIGEFEIIDDHRAGKIVVNLTGRLNKCGVISPRFDVQLKDLEKWQNNLLPSRQFGFIVLTTSAGIMDHEEARRKHTGGKILGFFF

SEQ ID NO: 20875 - protein, 33 aa, Homo sapiens
LRLQCGVISPRFDVQLKDLEKWQNNLLPSRQFG

SEQ ID NO: 20876 - protein, 56 aa, Homo sapiens
MVRMNVLADALKSINNAEKRGKRQVLIRPCSKVIVRFLTVMMKHGKSAAAVFYVFM

SEQ ID NO: 20877 - protein, 39 aa, Homo sapiens
MAAPLLHTLFVGRCGRFVLCSQDAGRVEDWDFKYACIRE

SEQ ID NO: 20878 - protein, 34 aa, Homo sapiens
MAAPLLHTLFVGRCGRFVLCSQDAGRVEDWLLLE

SEQ ID NO: 20879 - protein, 12 aa, Homo sapiens
MAYTVECLRGDV

SEQ ID NO: 20880 - protein, 317 aa, Homo sapiens
VMAMLLFPGPEVEEDLSKSFLEEAQVNRRSFPGRPRKGETPKEFLLSRGWVSASTPGLVSQAIPRVRASVSIRFSPAGSGFKGCCCAGRSHGAARRAGLDFKSPRPISGAQAFVTFPAPRLNSGRSGAVRRLCSDRGLQRSFGSMSAAVTAGKLARAPADPGKAGVPGVAAPGAPAAAPPAKEIPEVLVDPRSRRRYVRGRFLGKGGFAKCFEISDADTKEVFAGKIVPKSLLLKPHQREKMSMEISIHRSLAHQHVVGFHGFFEDNDFVFVVLELCRRRVSVAAGELELPAGQLERPDLELLERVPSKGEPGTWSC

SEQ ID NO: 20881 - protein, 627 aa, Homo sapiens
LNSGRSGAVRRLCSDRGLQRSFGSMSAAVTAGKLARAPADPGKAGVPGVAAPGAPAAAPPAKEIPEVLVDPRSRRRYVRGRFLGKGGFAKCFEISDADTKEVFAGKIVPKSLLLKPHQREKMSMEISIHRSLAHQHVVGFHGFFEDNDFVFVVLELCRRRSLLELHKRRKALTEPEARYYLRQIVLGCQYLHRNRVIHRDLKLGNLFLNEDLEVKIGDFGLATKVEYDGERKKTLCGTPNYIAPEVLSKKGHSFEVDVWSIGCIMYTLLVGKPPFETSCLKETYLRIKKNEYSIPKHINPVAASLIQKMLQTDPTARPTINELLNDEFFTSGYIPARLPITCLTIPPRFSIAPSSLDPSNRKPLTVLNKGLENPLPERPREKEEPVVRETGEVVDCHLSDMLQQLHSVNASKPSERGLVRQEEAEDPACIPIFWVSKWVDYSDKYGLGYQLCDNSVGVLFNDSTRLILYNDGDSLQYIERDGTESYLTVSSHPNSLMKKITLLKYFRNYMSEHLLKAGANITPREGDELARLPYLRTWFRTRSAIILHLSNGSVQINFFQDHTKLILCPLMAAVTYIDEKRDFRTYRLSLLEEYGCCKELASRLRYARTMVDKLLSSRSASNRLKAS

SEQ ID NO: 20882 - protein, 158 aa, Homo sapiens
MLQTDPTARPTINELLNDEFFTSGYIPARLPITCLTIPPRFSIAPSSLDPSNRKPLTVLNKGLENPLPERPREKEEPVVRETGEVVDCHLSDMLQQLHSVNASKPSERGLVRQGGYCGALGGAGLLGASGKGRRRLGQQSTGDLFRPCLHRTIGFPIS

SEQ ID NO: 20883 - protein, 150 aa, Homo sapiens
VDYSDKYGLGYQLCDNSVGVLFNDSTRLILYNDGDSLQYIERDGTESYLTVSSHPNSLMKKITLLKYFRNYMSEHLLKAGANITPREGDELARLPYLRTWFRTRSAIILHLSNGSVQINFFQVSWRSPGAGESWGRLRMPGSGPCGLNVE

SEQ ID NO: 20884 - protein, 8 aa, Homo sapiens
MEQGRADN

SEQ ID NO: 20885 - protein, 80 aa, Homo sapiens
MEQGRAGALASPNGVALLWAPVPCELPGPAAGGKLWTLQDAVWRKEEGGSQEVWREVWSGGDERLRIPLGGRFEDRLELR

SEQ ID NO: 20886 - protein, 17 aa, Homo sapiens
VKDREREVARMTPRFLT

SEQ ID NO: 20887 - protein, 36 aa, Homo sapiens
MRCACWKACLLLIENRTGNIPSILCPLVSCCGFGWS

SEQ ID NO: 20888 - protein, 62 aa, Homo sapiens
LKTELGTFLPFCVHWSAAAALDGLDRGRLTFFWYPESLQESPLSLLGCGDRSLKHALYSSDA

SEQ ID NO: 20889 - protein, 9 aa, Homo sapiens
MTWAALGNR

SEQ ID NO: 20890 - protein, 14 aa, Homo sapiens
LPRGAHSFNRASLG

SEQ ID NO: 20891 - protein, 18 aa, Homo sapiens
LSNARLCVLVSSPVICVC

SEQ ID NO: 20892 - protein, 20 aa, Homo sapiens
LHMRLGGSQRPQTDPLASLC

SEQ ID NO: 20893 - protein, 121 aa, Homo sapiens
LLSDRKLGVWPSACLSLSVADSHAAVSVCLRPVHPCCGRLVPSLPSLSSVCCSVGHLPGGPAARHQSDRSYDSLIGDSGWVWILTPGLCLLSQTLICHPHAEPSCHPQKPIRLPPAHGMDF

SEQ ID NO: 20894 - protein, 11 aa, Homo sapiens
LALCLPLPECG

SEQ ID NO: 20895 - protein, 98 aa, Homo sapiens
LISVDSRSVSLLPLEFRKDSSYELQVRAGPMPGSSYQGTWSEWSDPVIFQTQSEVKGRLEPSPAASPPACHSLHSCLLEPEDPSIVEAMEEDMGRPQP

SEQ ID NO: 20896 - protein, 1106 aa, Homo sapiens
LDTQTETDRMDFLRLYLPGLHQALRGALDSLGTFVSYLLGDAVPTVEREAQAAEELGVVAVGKTGKIVEEEAQEDLEGLRGSQNEGAGRLRGPGDDRRHEVGSSAVEQTWGWGDGSSHGSQAERQDSGAGETAKAARCQEPSAHLEARKKSKAGSGACQDRSGQAQERQESHEQEVNREERLRSWEQEEEEEEVRAREPGMARGAESEWTWHGETEGKAGAVGPKAAGDNREMEQGVREADAGETEEPGAEGAGKGEEVVVVEKACESTRAWGTWGPGAEPEDWGILGREEARTTPGREEARAILDGEEARTISGGEEAETASGGEEAETASGGEEAGTASGGEEAGIASGGEAGTASGGEEAGTASGGEEAGTASGGDEAWTTSGKEEADLLGVRQTEYGAVPGERLLEATGKVWVLEEEGDEEREAEVSPFPKQPQVLGTERTEEAAESQTAGREAVGGQEAGESFEGQVDLRGKEAEMRQDLGIRADRARMEELVQAEEAQEERGSSRDPVAELPSDGEAEGTADLEATPEARPEEELTGEESEAAQTSCGLLGVEWGGLTHSVTKGQGPELMGGAQTPTKQPEEREAGEVELMGVLALSKEEQERSLEAGPRHAGSVKPEASEAFPGAWENRTRKDMERGNTQEDAADGEQREEEETAGGQTLAAEAEGDRESELSEVPEAGGEGLTTQDAGCGTEEGEASVSENQELDGSTGADAGPCPSLGEAYARETEDEEAEADRTSRRGWRLQAVAVGLPDREDAQTGSVAAGIMGGDVVPHISAAGAGEALEGVLGQGWDSKEKEEAAAGEHAGGQEFGLEGSAEEEVTGRGSQVEAFESREGGPWGGRVEAEESAGAEDSCGLDPAGSQTARAEGMGAMVEAGGLLEKWTLLEEEAVGWQEREQREDSEGRCGDYHPEGEAPRLLDAEGLMVTGGRRAEAKETEPESLEHVRGQEEQPTHQAPAEAAPESVGEAETAEAMGSARGGAANSWSEAPLPGSLLDVSVPRSRVHLSRSSSQRRSRPSFRRTPAWEQQEEPPAPNPPEEELSAPEQRPLQLEEPLEPSPLRHDGTPVPARRRPLGHGFGLAHPGMMQELQARLGRPKPQ

SEQ ID NO: 20897 - protein, 1097 aa, Homo sapiens
LDTQTETDRMDFLRLYLPGLHQALRGALDSLGTFVSYLLGDAVPTVEREAQAAEELGVVAVGKTGKIVEEEAQEDLEGLRGSQNEGAGRLRGPGDDRRHEVGSSAVEQTWGWGDGSSHGSQAERQDSGAGETAKAARCQEPSAHLEARKKSKAGSGACQDRSGQAQERQESHEQEVNREERLRSWEQEEEEEEVRAREPGMARGAESEWTWHGETEGKAGAVGPKAAGDNREMEQGVREADAGETEEPGAEGAGKGEEVVVVEKACESTRAWGTWGPGAEPEDWGILGREEARTTPGREEARAILDGEEARTISGGEEAETASGGEEAETASGGEEAGTASGGEEAGIASGGEAGTASGGEEAGTASGGDEAWTTSGKEEADLLGVRQTEYGAVPGERLLEATGKVWVLEEEGDEEREAEVSPFPKQPQVLGTERTEEAAESQTAGREAVGGQEAGESFEGQVDLRGKEAEMRQDLGIRADRARMEELVQAEEAQEERGSSRDPVAELPSDGEAEGTADLEATPEARPEEELTGEESEAAQTSCGLLGVEWGGLTHSVTKGQGPELMGGAQTPTKQPEEREAGEVELMGVLALSKEEQERSLEAGPRHAGSVKPEASEAFPGAWENRTRKDMERGNTQEDAADGEQREEEETAGGQTLAAEAEGDRESELSEVPEAGGEGLTTQDAGCGTEEGEASVSENQELDGSTGADAGPCPSLGEAYARETEDEEAEADRTSRRGWRLQAVAVGLPDREDAQTGSVAAGIMGGDVVPHISAAGAGEALEGVLGQGWDSKEKEEAAAGEHAGGQEFGLEGSAEEEVTGRGSQVEAFESREGGPWGGRVEAEESAGAEDSCGLDPAGSQTARAEGMGAMVEAGGLLEKWTLLEEEAVGWQEREQREDSEGRCGDYHPEGEAPRLLDAEGLMVTGGRRAEAKETEPESLEHVRGQEEQPTHQAPAEAAPESVGEAETAEAMGSARGGAANSWSEAPLPGSLLDVSVPRSRVHLSRSSSQRRSRPSFRRTPAWEQQEEPPAPNPPEEELSAPEQRPLQLEEPLEPSPLRHDGTPVPARRRPLGHGFGLAHPGMMQELQARLGRPKPQ

SEQ ID NO: 20898 - protein, 52 aa, Homo sapiens
LLPLPLWTHPLHPLGLSVLMYHSWSRQNQTSGKTVNLRSLILRHRLVDHLPH

SEQ ID NO: 20899 - protein, 399 aa, Homo sapiens
VQLEKALKPYEIHTVFGLLGSAPSGRMAEASRPRLSIPCSSITDVRTTTALEMPDRENTFVVKVEGPSEYIMETVDAQHVKAWVSDIQECLSPGPCPATSPRPMTLPLAPGTSFLTRENTDSLELSCLNHSESLPSQDLLLGPSESNDRLSQGAYGGLSDRPSASISPSSASIAASHFDSMELLPPELPPRIPIEEGPPTGTVHPLSAPYPPLDTPETATGSFLFQGEPEGGEGDQPLSGYPWFHGMLSRLKAAQLVLTGGTGSHGVFLVRQSETRRGEYVLTFNFQGKAKHLRLSLNEEGQCRVQHLWFQSIFDMLEHFRVHPIPLESGGSSDVVLVSYVPSSQRQQGEQSRSAGEEVPVHPRSEAGSRLGAMRGCAREMDATPMPPAPSCPSERVTV

SEQ ID NO: 20900 - protein, 735 aa, Homo sapiens
VGAQGAGAAAAAAAAGANLGDRDAAAAAHPSSSGCLPLCAPQAPPLHLLGPIMNGAPSPEDGASPSSPPLPPPPPPSWREFCESHARAAALDFARRFRLYLASHPQYAGPGAEAAFSRRFAELFLQHFEAEVARASGSLSPPILAPLSPGAEISPHDLSLESCRVGGPLAVLGPSRSSEDLAGPLPSSVSSSSTTSSKPKLKKRFSLRSVGRSVRGSVRGILQWRGTVDPPSSAGPLETSSGPPVLGGNSNSNSSGGAGTVGRGLVSDGTSPGERWTHRFERLRLSRGGGALKDGAGMVQREELLSFMGAEEAAPDPAGVGRGGGVAGPPSGGGGQPQWQKCRLLLRSEGEGGGGSRLEFFVPPKASRPRLSIPCSSITDVRTTTALEMPDRENTFVVKVEGPSEYIMETVDAQHVKAWVSDIQECLSPGPCPATSPRPMTLPLAPGTSFLTRENTDSLELSCLNHSESLPSQDLLLGPSESNDRLSQGAYGGLSDRPSASISPSSASIAASHFDSMELLPPELPPRIPIEEGPPTGTVHPLSAPYPPLDTPETATGSFLFQGEPEGGEGDQPLSGYPWFHGMLSRLKAAQLVLTGGTGSHGVFLVRQSETRRGEYVLTFNFQGKAKHLRLSLNEEGQCRVQHLWFQSIFDMLEHFRVHPIPLESGGSSDVVLVSYVPSSQRQQGEQSRSAGEEVPVHPRSEAGSRLGAMRGCAREMDATPMPPAPSCPSERVTV

SEQ ID NO: 20901 - protein, 808 aa, Homo sapiens
VGAQGAGAAAAAAAAGANLGDRDAAAAAHPSSSGCLPLCAPQAPPLHLLGPIMNGAPSPEDGASPSSPPLPPPPPPSWREFCESHARAAALDFARRFRLYLASHPQYAGPGAEAAFSRRFAELFLQHFEAEVARASGSLSPPILAPLSPGAEISPHDLSLESCRVGGPLAVLGPSRSSEDLAGPLPSSVSSSSTTSSKPKLKKRFSLRSVGRSVRGSVRGILQWRGTVDPPSSAGPLETSSGPPVLGGNSNSNSSGGAGTVGRGLVSDGTSPGERWTHRFERLRLSRGGGALKDGAGMVQREELLSFMGAEEAAPDPAGVGRGGGVAGPPSGGGGQPQWQKCRLLLRSEGEGGGGSRLEFFVPPKASRPRLSIPCSSITDVRTTTALEMPDRENTFVVKVEGPSEYIMETVDAQHVKAWVSDIQECLSPGPCPATSPRPMTLPLAPGTSFLTRENTDSLELSCLNHSESLPSQDLLLGPSESNDRLSQGAYGGLSDRPSASISPSSASIAASHFDSMELLPPELPPRIPIEEGPPTGTVHPLSAPYPPLDTPETATGSFLFQGEPEGGEGDQPLSGYPWFHGMLSRLKAAQLVLTGGTGSHGVFLVRQSETRRGEYVLTFNFQGKAKHLRLSLNEEGQCRVQHLWFQSIFDMLEHFRVHPIPLESGGSSDVVLVSYVPSSQRQQEPTTSHDPPQPPEPPSWTDPPQPGAEEASRAPEVAAAAAAAAKERQEKEKAGGGGVPEELVPVVELVPVVELEEAIAPGSEAQGAGSGGDAGVPPMVQLQQSPLGGDGEEGGHPRAINNQYSFV

SEQ ID NO: 20902 - protein, 134 aa, Homo sapiens [sequence omitted]

SEQ ID NO: 20903 - protein, 195 aa, Homo sapiens
MLSRLKAAQLVLTGGTGSHGVFLVRQSETRRGEYVLTFNFQGKAKHLRLSLNEEGQCRVQHLWFQSIFDMLEHFRVHPIPLESGGSSDVVLVSYVPSSQRQQGEQSRSAGEEVPVHPRSENRPPPMTHPSPLNPLHGQIPHSLGQKRRRGRQKWRQQQPQQPKRGKRKRKRAVEGSRKSWSPWLSWSPWLNWKRP

SEQ ID NO: 20904 - protein, 340 aa, Homo sapiens
MAAPLLHTRLPGDAAASPSAVKMLGASRTGISNMRALENDFFNSPPRKTVQFGGTVTEVLLKYKTGETNDFELLKNQLLDPDIKDDQIINWLLEFRSSIMYLTKDFEQLISIILRLPWLNRSQTVVEEYLAFLGNLVSAQTVFLRPCLSMIASHFVPPRVIIKEGDVDVSDSDDEDDNLPANFDTSQSLANNSKICTIECYVHNLLRISVYFPTLRHEILELIIEKLLKLDVNASRQGIEDAEETANQTCGGTDSTEGLCNMGFAEAFLEPLWKKLQDPSNPAIIRQAAGNYIGSFLARAKFIPLMIREQRHSAMLLSMDHFTQPAKLCSTPLFLDTSSF

SEQ ID NO: 20905 - protein, 171 aa, Homo sapiens
LAEDRREAWGAWEGPADSLMGPPSLHSPTPSLGPLGALVLSSQHTSPDSCKSPWTLKAVRAARQAADFTLKVEVECSSLQEAVQAAEAGADLVLLDNFKPEELHPTATVLKAQFPSVAVEASGGITLDNLPQFCGPHIDVISMGMLTQAAPALDFSLKLFAKEVAPVPKIH

SEQ ID NO: 20906 - protein, 301 aa, Homo sapiens
LQVTMDAEGLALLLPPVTLAALVDSWLREDCPGLNYAALVSGAGPSQAALWAKSPGVLAGQPFFDAIFTQLNCQVSWFLPEGSKLVPVARVAEVRGPAHCLLLGERVALNTLARCSGIASAAAAAVEAARGAGWTGHVAGTRKTTPGFRLVEKYGLLVGGAASHRYDLGGLVMVKDNHVVAAGGVEKAVRAARQAADFTLKVEVECSSLQEAVQAAEAGADLVLLDNFKPEELHPTATVLKAQFPSVAVEASGGITLDNLPQFCGPHIDVISMGMLTQAAPALDFSLKLFAKEVAPVPKIH

SEQ ID NO: 20907 - protein, 153 aa, Homo sapiens
LQVTMDAEGLALLLPPVTLAALVDSWLREDCPGLNYAALAVRAARQAADFTLKVEVECSSLQEAVQAAEAGADLVLLDNFKPEELHPTATVLKAQFPSVAVEASGGITLDNLPQFCGPHIDVISMGMLTQAAPALDFSLKLFAKEVAPVPKIH

SEQ ID NO: 20908 - protein, 25 aa, Homo sapiens
MAAGGSTQQRRREMAAASAAAISGT

SEQ ID NO: 20909 - protein, 27 aa, Homo sapiens
MAAGGSTQQRRREMAAASAAAISANTS

SEQ ID NO: 20910 - protein, 663 aa, Homo sapiens
LNKQEKSGGRSSHEDEKKGAGGAGRCRLSKIGATRRPPPARVRVAVRLRPFVDGTAGASDPPCVRGMDSCSLEIANWRNHQETLKYQFDAFYGERSTQQDIYAGSVQPILRHLLEGQNASVLAYGPTGAGKTHTMLGSPEQPGVIPRALMDLLQLTREEGAEGRPWALSVTMSYLEIYQEKVLDLLDPASGDLVIREDCRGNILIPGLSQKPISSFADFERHFLPASRNRTVGATRLNQRSSRSHAVLLVKVDQRERLAPFRQREGKLYLIDLAGSEDNRRTGNKGLRLKESGAINTSLFVLGKVVDALNQGLPRVPYRDSKLTRLLQDSLGGSAHSILIANIAPERRFYLDTVSALNFAARSKEVINRPFTNESLQPHALGPVKLSQKELLGPPEAKRARGPEEEEIGSPEPMAAPASASQKLSPLQKLSSMDPAMLERLLSLDRLLASQGSQGAPLLSTPKRERMVLMKTVEEKDLEIERLKTKQKELEAKMLAQKAEEKENHCPTMLRPLSHRTVTGAKPLKKAVVMPLQLIQEQAASPNAEIHILKNKGRKRKLESLDALEPEEKAEDCWELQISPELLAHGRQKILDLLNEGSARDLRSLQRIGPKKAQLIVGWRELHGPFSQVEDLERVEGITGKQMESFLKANILGLAAGQRCGAS

SEQ ID NO: 20911 - protein, 634 aa, Homo sapiens
VAVRLRPFVDGTAGASDPPCVRGMDSCSLEIANWRNHQETLKYQFDAFYGERSTQQDIYAGSVQPILRHLLEGQNASVLAYGPTGAGKTHTMLGSPEQPGVIPRALMDLLQLTREEGAEGRPWALSVTMSYLEIYQEKVLDLLDPASGDLVIREDCRGNILIPGLSQKPISSFADFERHFLPASRNRTVGATRLNQRSSRSHAVLLVKVDQRERLAPFRQREGKLYLIDLAGSEDNRRTGNKGLRLKESGAINTSLFVLGKVVDALNQGLPRVPYRDSKLTRLLQDSLGGSAHSILIANIAPERRFYLDTVSALNFAARSKEVINRPFTNESLQPHALGPVKLSQKELLGPPEAKRARGPEEEEIGSPEPMAAPASASQKLSPLQKLSSMDPAMLERLLSLDRLLASQGSQGAPLLSTPKRERMVLMKTVEEKDLEIERLKTKQKELEAKMLAQKAEEKENHCPTMLRPLSHRTVTGAKPLKKAVVMPLQLIQEQAASPNAEIHILKNKGRKRKVKVAGGLGYTWSPELESLDALEPEEKAEDCWELQISPELLAHGRQKILDLLNEGSARDLRSLQRIGPKKAQLIVGWRELHGPFSQVEDLERVEGITGKQMESFLKANILGLAAGQRCGAS

SEQ ID NO: 20912 - protein, 133 aa, Homo sapiens
VRGMDSCSLEIANWRNHQETLKYQFDAFYGERSTQQDIYAGSVQPILRHLLEGQNASVLAYGPTGAGKTHTMLGSPEQPGVIPRALMDLLQLTREEGAEGRPWALSVTMSYLEIYQEKVRPRAGWERSNKGSK

SEQ ID NO: 20913 - protein, 185 aa, Homo sapiens
MENCPSPSLLTQVLDLLDPASGDLVIREDCRGNILIPGLSQKPISSFADFERHFLPASRNRTVGATRLNQRSSRSHAVLLVKVDQRERLAPFRQREGKLYLIDLAGSEDNRRTGNKGLRLKESGAINTSLFVLGKVVDALNQGLPRVPYRDSKLTRLLQVRPTCLREEGAAEGGSQACCGVGNSS

SEQ ID NO: 20914 - protein, 226 aa, Homo sapiens
LRAGFWTHLTREEEAGAQEVAGAGLLVLAEEPKALGCPACHSSPFASQLESLDALEPEEKAEDCWELQISPELLAHGRQKILDLLNEGSARDLRSLQRIGPKKAQLIVGWRELHGPFSQVAAHWTGGGRGRGRPGTPETLSPIDPVPPGGGPGTRGGHNGETDGVLPEGEVTALPLLCLSCAPRPSLTSLSPSLLCCRQTSWVSPPASAVAPPDRRLLTPPFQIFV

SEQ ID NO: 20915 - protein, 59 aa, Homo sapiens
VQCPYLLEPGPSFPSPDIEKLGKKRETSSSQTARCGKEEERVLPRFILCRLPHLPVIFL

SEQ ID NO: 20916 - protein, 18 aa, Homo sapiens
MLPRFILCRLPHLPVIFL

SEQ ID NO: 20917 - protein, 32 aa, Homo sapiens
LTSKQLRLKPACQLRLPRFILCRLPHLPVIFL

SEQ ID NO: 20918 - protein, 36 aa, Homo sapiens
LARNPGPLWLTASSSSWQRLPRFILCRLPHLPVIFL

SEQ ID NO: 20919 - protein, 66 aa, Homo sapiens
MAEISDLDRQIEQLRRCELIKESEVKALCAKAREILVEESNVQRVDSPVTVSTCCPCRARPGLSGT

SEQ ID NO: 20920 - protein, 187 aa, Homo sapiens
LVPGEAAGSGERREQPSVTERVPTALGVPRMCVAQVLTAHLLPPRQALGSLCSPWAAPRVGPLPPAPAMVRISKPKTFQAYLDDCHRRYSCAHCRAHLANHDDLISKSFQGSQGRAYLFNSVVNVGCGPAEERVLLTGLHAVADIHCENCKTTLGWKYEQAFESSQKYKEGKYIIELNHMIKDNGWD

SEQ ID NO: 20921 - protein, 152 aa, Homo sapiens
LRTRARGGRRPPGAPPTPRPAHPGGPGPARPGEAYLDDCHRRYSCAHCRAHLANHDDLISKSFQGSQGRAYLFNSVTLPGTTPCPHRVNVGCGPAEERVLLTGLHAVADIHCENCKTTLGWKYEQAFESSQKYKEGKYIIELNHMIKDNGWD

SEQ ID NO: 20922 - protein, 174 aa, Homo sapiens
LRTRARGGRRPPGAPPTPRPAHPGGPGPARPGEALGSLCSPWAAPRVGPLPPAPAMVRISKPKTFQAYLDDCHRRYSCAHCRAHLANHDDLISKSFQGSQGRAYLFNSVVNVGCGPAEERVLLTGLHAVADIHCENCKTTLGWKYEQAFESSQKYKEGKYIIELNHMIKDNGWD

SEQ ID NO: 20923 - protein, 96 aa, Homo sapiens
LGSLCSPWAAPRVGPLPPAPAMVRISKPKTFQAYLDDCHRRYSCAHCRAHLANHDDLISKSFQGSQGRAYLFNSVNRPLRAARSTKRGSTSLNSTT

SEQ ID NO: 20924 - protein, 167 aa, Homo sapiens
LVPGEAAGSGERREQPSVTERVPTALGVPRMCVAQVLTAHLLPPRQALGSLCSPWAAPRVGPLPPAPAMVRISKPKTFQAYLDDCHRRYSCAHCRAHLANHDDLISKSFQGSQGRAYLFNSVVNVGCGPAEERVLLTGLHAVADIHCENCKTTLGWKYVSHPPLTPG

SEQ ID NO: 20925 - protein, 122 aa, Homo sapiens
LVPGEAAGSGERREQPSVTERVPTALGVPRMCVAQVLTAHLLPPRQALGSLCSPWAAPRVGPLPPAPAMVRISKPKTFQAYLDDCHRRYSCAHCRAHLANHDDLISKSFQGSQGRAYLFNSV

SEQ ID NO: 20926 - protein, 109 aa, Homo sapiens
LRTRARGGRRPPGAPPTPRPAHPGGPGPARPGEALGSLCSPWAAPRVGPLPPAPAMVRISKPKTFQAYLDDCHRRYSCAHCRAHLANHDDLISKSFQGSQGRAYLFNSV

SEQ ID NO: 20927 - protein, 203 aa, Homo sapiens
VETRSVPRSSAYDHVRKTRVAIKKISPFEHQTYCQRTLREIQILLRFRHENVIGIRDILRASTLEAMRDVYIVQDLMETDLYKLLKSQQLSNDHICYFLYQILRGLKYIHSANVLHRDLKPSNLLINTTCDLKICDFGLARIADPEHDHTGFLTEAIPSPSTSGLWAAFWLRCSLTGPSSLASTTWISSTTFWASWAPHPRRT

SEQ ID NO: 20928 - protein, 201 aa, Homo sapiens
VGPRYTQLQYIGEGAYGMVRPQQQPLSGPLSSAYDHVRKTRVAIKKISPFEHQTYCQRTLREIQILLRFRHENVIGIRDILRASTLEAMRDVYIVQDLMETDLYKLLKSQQLSNDHICYFLYQILRGLKYIHSANVLHRDLKPSNLLINTTCDLKICDFGLARIADPEHDHTGFLTEYVATRWYRAPEIMLNSKVGGAAHS

SEQ ID NO: 20929 - protein, 94 aa, Homo sapiens
LSSLGSRMSRQVVRSSKFRHVFGQPAKADQCYEDVRVSQTTWDSGFCAVNPKFVALICEASGGGAFLVLPLGKVSPWGPGGSSSSTGPMALCRS

SEQ ID NO: 20930 - protein, 173 aa, Homo sapiens
LSSLGSRMSRQVVRSSKFRHVFGQPAKADQCYEDVRVSQTTWDSGFCAVNPKFVALICEASGGGAFLVLPLGKTGRVDKNAPTVCGHTAPVLDIAWCPHNDNVIASGSEDCTVMVWEIPDGGLMLPLREPVVTLEGHTKRVGIVAWHTTAQNVLLSAGAAGGGAWGWLVACSG

SEQ ID NO: 20931 - protein, 118 aa, Homo sapiens
LSSLGSRMSRQVVRSSKFRHVFGQPAKADQCYEDVRVSQTTWDSGFCAVNPKFVALICEASGGGAFLVLPLGKTGRVDKNAPTVCGHTAPVLDIAWCPHNDNVIASGSEDCTVMVVTT

SEQ ID NO: 20932 - protein, 95 aa, Homo sapiens
LHSHGEWWWGPRGWERGSRMGSDIWSPEDSLAPPLQVWEIPDGGLMLPLREPVVTLEGHTKRVGIVAWHTTAQNVLLSAGAAGGGAWGWLVACSG

SEQ ID NO: 20933 - protein, 275 aa, Homo sapiens
LGLTTPCSLLSTPAGVKIIFRVALVLLRHTLGSVEKLRSCQGMYETMEQLRNLPQQCMQEDFLVHEVTNLPVTEALIERENAAQLKKWRETRGELQYRPSRRLHGSRAIHEERRRQQPPLGPSSSLLSLPGLKSRGSRAAGGAPSPPPPVRRASAGPAPGPVVTAEGLHPSLPSPTGNSTPLGSSKETRKQEKERQKQEKERQKQEKEREKERQKQEKEREKQEKEREKQEKERQKQEKKAQGRKLSLRRKADGPPGPHDGGDRPSAEARQDAYF

SEQ ID NO: 20934 - protein, 159 aa, Homo sapiens
LPLAPASPSNPETWTYTPLSYFSRRLHAEFAAERDWEQFHQPRNLLLALVGEVGELAELFQWKTDGEPGPQGWSPRERAALQEELSDVLIYLVALAARCRVDLPLAVLSKMDINRRRYPAHLARSSSRKYTELPHGAISEDQAVGPADIPCDSTGQTST

SEQ ID NO: 20935 - protein, 153 aa, Homo sapiens
LGRYRHQIPPLLSRRRGRRLHAEFAAERDWEQFHQPRNLLLALVGEVGELAELFQWKTDGEPGPQGWSPRERAALQEELSDVLIYLVALAARCRVDLPLAVLSKMDINRRRYPAHLARSSSRKYTELPHGAISEDQAVGPADIPCDSTGQTST

SEQ ID NO: 20936 - protein, 177 aa, Homo sapiens
LWPVGRFVGTRGERTLLLPAGSASARSPRSRTCKQAWPSSGRRLHAEFAAERDWEQFHQPRNLLLALVGEVGELAELFQWKTDGEPGPQGWSPRERAALQEELSDVLIYLVALAARCRVDLPLAVLSKMDINRRRYPAHLARSSSRKYTELPHGAISEDQAVGPADIPCDSTGQTST

SEQ ID NO: 20937 - protein, 173 aa, Homo sapiens [sequence omitted]

SEQ ID NO: 20938 - protein, 216 aa, Homo sapiens
VVAAGGSQPLDEPRSLPQPGMADSAQAQKLVYLVTGGCGFLGEHVVRMLLQREPRLGELRVFDQHLGPWLEELKTGPVRVTAIQGDVTQAHEVAAAVAGAHVVIHTAGLVDVFGRASPKTIHEVNVQGTRNVIEACVQTGTRFLVYTSSMEVVGPNTKGHPFYRGNEDTPYEAVHRHPYPCSKALAEWLVLEANGRKAMLPGCTCWQPGSWSSGQP

SEQ ID NO: 20939 - protein, 130 aa, Homo sapiens
LPVRACADMASNDYTQQATQSYGAYPTQPGQGYSQQSSQPYGQQSYSGYSQSTDTSGYGQSSYSSYGQSQNSESFSAGHLFLLFLNIAFLFLVFWRRSLVLLPRLECSGAVSAHCNISLPGSNDSPASAS

SEQ ID NO: 20940 - protein, 263 aa, Homo sapiens
LPVRACADMASNDYTQQATQSYGAYPTQPGQGYSQQSSQPYGQQSYSGYSQSTDTSGYGQSSYSSYGQSQNTGYGTQSTPQGYGSTGGYGSSQSSQSSYGQQSSYPGYGQQPAPSSTSGSYGSSSQSSSYGQPQSGSYSQQPSYGGQQQSYGQQQSYNPPQGYGQQNQYNSSSGGGGGGGGGGNYGQDQSSMSSGGGSGGGYGNQDQSGGGGSGGYGQQDRGGRGRGGSGGGGGGGGGGYNRSSGGYEPRGRGGGRGGRGGMG

SEQ ID NO: 20941 - protein, 271 aa, Homo sapiens
LPVRACADMASNDYTQQATQSYGAYPTQPGQGYSQQSSQPYGQQSYSGYSQSTDTSGYGQSSYSSYGQSQNTGYGTQSTPQGYGSTGGYGSSQSSQSSYGQQSSYPGYGQQPAPSSTSGSYGSSSQSSSYGQPQSGSYSQQPSYGGQQQSYGQQQSYNPPQGYGQQNQYNSSSGGGGGGGGGGNYGQDQSSMSSGGGSGGGYGNQDQSGGGGSGGYGQQDRGGRGRGGSGGGGGGGGGGYNRSSGGYEPRGRGGGRGGRGGMGPSGPRITS

SEQ ID NO: 20942 - protein, 102 aa, Homo sapiens
LSSFLLSTCENMNFSWRNECNQCKAPKPDGPGGGPGGSHMGGNYGDDRRGGRGGYDRGGYRGRGGDRGGFRGGRGGGDRGGFGPGKMDSRGEHRQDRRERPY

SEQ ID NO: 20943 - protein, 140 aa, Homo sapiens
LLYRKGGSPRLAYRPTGPRPHGGKGREGDHLAHILPGSGAAPAGIQAPPQSAAKPGLHFIDQHRAALIARVTNVEWLLDALYGKVLTDEQYQAVRAEPTNPSKMRKLFSFTPAWNWTCKDLLLQALRESQSYLVEDLERS

SEQ ID NO: 20944 - protein, 160 aa, Homo sapiens
VCICARVCEWPKWARTVCPAHIGSPIPLHPTPSPPPRTSYPLPMCLFAPYTLSLRHPPRAPLMFCHLLSLFSPFSHGVSTKYLNFTASENTSRVMQHQYQVSNLGQRSLPISLVFLVPVRLNQTVIWDRPQVTFSEVSGARPDSCTALRVPLTSVNAIGF

SEQ ID NO: 20945 - protein, 243 aa, Homo sapiens
VLSTCFTESWDPASAPPTARVSLCHPDWSTVVQSPLTATSASRVQVILLPQPPEQLGLQRIAGSQLSSRLQYFGQALSGGQDLTQDGLVDLAVGARGQVLLLRTRPVLWVGVSMQFIPAEIPRSAFECREQVVSEQTLVQSNICLYIDKRSKNLLGSRDLQSSVTLDLALDPGRLSPRATFQETKNRSLSRVRVLGLKAHCENFNLLLPLPFEKNCGADHICQDNLGISFSFPGNKGSCVPCT

SEQ ID NO: 20946 - protein, 44 aa, Homo sapiens
MISSRCSLTIRAKAKLQKKKEVCLYSTPSTSKLWRSRLWTDQKT

SEQ ID NO: 20947 - protein, 103 aa, Homo sapiens
MFLNGNCLETLKKKEPEGGRRRLSHPGNMGWMRPSQETTPPDRSHHSGFGLFCGDPGPEIEPFSLGMSLLPTMWPLTGLVRAFSLAGVPAGDGAGDPPAVHGP

SEQ ID NO: 20948 - protein, 107 aa, Homo sapiens
LRINRTSVALRLAGTGRFVAKTPGHPGSWEMGLLTFRDVAVEFSLEEWEHLEPAQKNLYQDVMLENYRNLVSLGLVVSKPDLITFLEQRKEPWNVKSEETVAIQPGH

SEQ ID NO: 20949 - protein, 773 aa, Homo sapiens
LRINRTSVALRLAGTGRFVAKTPGHPGSWEMGLLTFRDVAVEFSLEEWEHLEPAQKNLYQDVMLENYRNLVSLGLVVSKPDLITFLEQRKEPWNVKSEETVAIQPDVFSHYNKDLLTEHCTEASFQKVISRRHGSCDLENLHLRKRWKREECEGHNGCYDEKTFKYDQFDESSVESLFHQQILSSCAKSYNFDQYRKVFTHSSLLNQQEEIDIWGKHHIYDKTSVLFRQVSTLNSYRNVFIGEKNYHCNNSEKTLNQSSSPKNHQENYFLEKQYKCKEFEEVFLQSMHGQEKQEQSYKCNKCVEVCTQSLKHIQHQTIHIRENSYSYNKYDKDLSQSSNLRKQIIHNEEKPYKCEKCGDSLNHSLHLTQHQIIPTEEKPCKWKECGKVFNLNCSLYLTKQQQIDTGENLYKCKACSKSFTRSSNLIVHQRIHTGEKPYKCKECGKAFRCSSYLTKHKRIHTGEKPYKCKECGKAFNRSSCLTQHQTTHTGEKLYKCKVCSKSYARSSNLIMHQRVHTGEKPYKCKECGKVFSRSSCLTQHRKIHTGENLYKCKVCAKPFTCFSNLIVHERIHTGEKPYKCKECGKAFPYSSHLIRHHRIHTGEKPYKCKACSKSFSDSSGLTVHRRTHTGEKPYTCKECGKAFSYSSDVIQHRRIHTGQRPYKCEECGKAFNYRSYLTTHQRSHTGERPYKCEECGKAFNSRSYLTTHRRRHTGERPYKCDECGKAFSYRSYLTTHRRSHSGERPYKCEECGKAFNSRSYLIAHQRSHTREKL

SEQ ID NO: 20950 - protein, 95 aa, Homo sapiens
LECLVTVSPRSPPVRGPPKGLLTFRDVAVEFSLEEWEHLEPAQKNLYQDVMLENYRNLVSLGLVVSKPDLITFLEQRKEPWNVKSEETVAIQPGH

SEQ ID NO: 20951 - protein, 678 aa, Homo sapiens
LEFLKFLYLSDVFSHYNKDLLTEHCTEASFQKVISRRHGSCDLENLHLRKRWKREECEGHNGCYDEKTFKYDQFDESSVESLFHQQILSSCAKSYNFDQYRKVFTHSSLLNQQEEIDIWGKHHIYDKTSVLFRQVSTLNSYRNVFIGEKNYHCNNSEKTLNQSSSPKNHQENYFLEKQYKCKEFEEVFLQSMHGQEKQEQSYKCNKCVEVCTQSLKHIQHQTIHIRENSYSYNKYDKDLSQSSNLRKQIIHNEEKPYKCEKCGDSLNHSLHLTQHQIIPTEEKPCKWKECGKVFNLNCSLYLTKQQQIDTGENLYKCKACSKSFTRSSNLIVHQRIHTGEKPYKCKECGKAFRCSSYLTKHKRIHTGEKPYKCKECGKAFNRSSCLTQHQTTHTGEKLYKCKVCSKSYARSSNLIMHQRVHTGEKPYKCKECGKVFSRSSCLTQHRKIHTGENLYKCKVCAKPFTCFSNLIVHERIHTGEKPYKCKECGKAFPYSSHLIRHHRIHTGEKPYKCKACSKSFSDSSGLTVHRRTHTGEKPYTCKECGKAFSYSSDVIQHRRIHTGQRPYKCEECGKAFNYRSYLTTHQRSHTGERPYKCEECGKAFNSRSYLTTHRRRHTGERPYKCDECGKAFSYRSYLTTHRRSHSGERPYKCEECGKAFNSRSYLIAHQRSHTREKL

SEQ ID NO: 20952 - protein, 701 aa, Homo sapiens
LVHGLGPTIKSAEPASSRRCLGCRPRKFEMADGSLTGGGLEAAAMAPERMGWAVEQELASLEKGLFQDEDSCSDCSYRDKPGSSLQSFMPEGKTFFPEIFQTNQLLFYERFRAYQDYILADCKASEVQEFTAEFLEKVLEPSGWRAVWHTNVFKVLVEITDVDFAALKAVVRLAEPYLCDSQVSTFTMECMKELLDLKEHRLPLQELWVVFDDSGVFDQTALAIEHVRFFYQNIWRSWDEEEEDEYDYFVRCVEPRLRLHYDILEDRVPSGLIVDYHNLLSQCEESYRKFLNLRSSLSNCNSDSEQENISMVEGLKLYSEMEQLKQKLKLIENPLLRYVFGYQKNSNIQAKGVRSSGQKITHVVSSTMMAGLLRSLLTDRLCQEPGEEEREIQFHSDPLSAINACFEGDTVIVCPGHYVVHGTFSIADSIELEGYGLPDDIVIEKRGKGDTFVDCTGADIKISGIKFVQHDAVEGILIVHRGKTTLENCVLQCETTGVTVRTSAEFLMKNSDLYGAKGAGIEIYPGSQCTLSDNGIHHCKEGILIKDFLDEHYDIPKISMVNNIIHNNEGYGVVLVKPTIFSDLQENAEDGTEENKALKIQTSGEPDVAERVDLEELIECATGKMELCARTDPSEQVEGNCEIVNELIAASTQKGQIKKKRLSELGITQADDNLMSQEMFVGIVGNQFKWNGKGSFGTFLF

SEQ ID NO: 20953 - protein, 378 aa, Homo sapiens
MADGSLTGGGLEAAAMAPERMGWAVEQELASLEKGLFQDEDSCSDCSYRDKPGSSLQSFMPEGKTFFPEIFQTNQLLFYERFRAYQDYILADCKASEVQEFTAEFLEKVLEPSGWRAVWHTNVFKVLVEITDVDFAALKAVVRLAEPYLCDSQVSTFTMECMKELLDLKEHRLPLQELWVVFDDSGVFDQTALAIEHVRFFYQNIWRSWDEEEEDEYDYFVRCVEPRLRLHYDILEDRVPSGLIVDYHNLLSQCEESYRKFLNLRSSLSNCNSDSEQENISMVEGLKLYSEMEQLKQKLKLIENPLLRYVFGYQKNSNIQAKGVRSSGQKITHVVSSTMMAGLLRSLLTDRLCQEPGEEEREIQVNGEFLTPGGFFSF

SEQ ID NO: 20954 - protein, 129 aa, Homo sapiens
VFDQTALAIEHVRFFYQNIWRSWDEEEEDEYDYFVRCVEPRLRLHYDILEDRVPSGLIVDYHNLLSQCEESYRKFLNLRSSLSNCNSDSEQENISMVEGLKLYSEMEQLKQKLKLIENPLLRYVCLCNS

SEQ ID NO: 20955 - protein, 44 aa, Homo sapiens
LTGGGLEAAAMAPERMGWAVEQELASLEKGDHEPHFPFPKKRKA

SEQ ID NO: 20956 - protein, 150 aa, Homo sapiens
MGSELIGRLAPRLGLAEPDMLRKAEEYLRLSRVKCVGLSARTTETSSAVMCLDLAASWMKCPLDRAYLIKLSGLNKETYQSCLKSFECLLGLNSNIGIRDLAVQFSCIEAVNMASKILKSYESSLPQTQQVDLDLSRPLFTSAALLSACK

SEQ ID NO: 20957 - protein, 196 aa, Homo sapiens
VSSAAQDQGWASASRPWALRKAEEYLRLSRVKCVGLSARTTETSSAVMCLDLAASWMKCPLDRAYLIKLSGLNKETYQSCLKSFECLLGLNSNIGIRDLAVQFSCIEAVNMASKILKSYESSLPQTQQVDLDLSRPLFTSAALLSACKILKLKVDKNKMVATSGVKKAIFDRLCKQLEKIGQQVDSKYSVVQECVI

SEQ ID NO: 20958 - protein, 94 aa, Homo sapiens
MSPVFPRHSKWILTYPGHFSLLLHCFQHAREPGDVATPPRKRKKIVVEAPAKEMEKVEEMPHKPQKDEDLTQDYEEWKRKILENAASAQKATAE

SEQ ID NO: 20959 - protein, 109 aa, Homo sapiens
LKPYYAEILKLKVDKNKMVATSGVKKAIFDRLCKQLEKIGQQVDREPGDVATPPRKRKKIVVEAPAKEMEKVEEMPHKPQKDEDLTQDYEEWKRKILENAASAQKATAE

SEQ ID NO: 20960 - protein, 108 aa, Homo sapiens [sequence omitted]

SEQ ID NO: 20961 - protein, 56 aa, Homo sapiens [sequence omitted]

SEQ ID NO: 20962 - protein, 25 aa, Homo sapiens
VCYKSPMTTRGNTDVKLRRKRNHSG

SEQ ID NO: 20963 - protein, 180 aa, Homo sapiens
LDEPVRRQPCTVSEIFHFCWVLFIYAKGNFPMISDDLVNSYHLLLCALDLVYGNALQCSNRKELVNPNFKGLSEDFHAKDSKPSSDPPCIIEKLCSLHDGLVLEAKGIKEHFWKPYIRKLYEKKLLKGKEENLTGFLEPGNFGESLWSLAVSPRLECSGMISAHCNLCLPGSSDSSASAS

SEQ ID NO: 20964 - protein, 849 aa, Homo sapiens
MESRCVAQAGMQWHDLGSLQPLPPRFKRFFCLSLLSSCEYSKAINKAYEEYVLSVGNLDERIFLGEDAEEEIGTLSRCLNAGSGTETAERVQMKNILQQHFDKSKALRISTPLTGVRYIKENSPCVTPVSTATHSLSRLHTMLTGLRNAPSEKLEQILRTCSRDPTQAIANRLKEMFEIYSQHFQPDEDFSNCAKEIASKHFRFAEMLYYKVLESVIEQEQKRLGDMDLSGILEQDAFHRSLLACCLEVVTFSYKPPGNFPFITEIFDVPLYHFYKVIEVFIRAEDGLCREVVKHLNQIEEQILDHLAWKPESPLWEKIRDNENRVPTCEEVMPPQNLERADEICIAGSPLTPRRVTEVRADTGGLGRSITSPTTLYDRYSSPPASTTRRRLFVENDSPSDGGTPGRMPPQPLVNAVPVQNVSGETVSVTPVPGQTLVTMATATVTANNGQTVTIPVQGIANENGGITFFPVQVNVGGQAQAVTGSIQPLSAQALAGSLSSQQVTGTTLQVPGQVAIQQISPGGQQQKQGQSVTSSSNRPRKTSSLSLFFRKVYHLAAVRLRDLCAKLDISDELRKKIWTCFEFSIIQCPELMMDRHLDQLLMCAIYVMAKVTKEDKSFQNIMRCYRTQPQARSQVYRSVLIKGKRKRRNSGSSDSRSHQNSPTELNKDRTSRDSSPVMRSSSTLPVPQPSSAPPTPTRLTGANSDMEEEERGDLIQFYNNIYIKQIKTFAMKYSQANMDAPPLSPYPFVRTGSPRRIQLSQNHPVYISPHKNETMLSPREKIFYYFSNSPSKRLREINSMIRTGETPTKKRGILLEDGSESPAKRICPENHSALLRRLQDVANDRGSH

SEQ ID NO: 20965 - protein, 109 aa, Homo sapiens
LKEMFEIYSQHFQPDEDFSNCAKEIASKHFRFAEMLYYKVLESVIEQEQKRLGDMDLSGILEQDAFHRSLLACCLEVVTFSYKPPGNFPFITEIFDVPLYHFYKVFLKI

SEQ ID NO: 20966 - protein, 134 aa, Homo sapiens [sequence omitted]

SEQ ID NO: 20967 - protein, 182 aa, Homo sapiens
LFGIHVMNPFWSMSTSSVRKRSEGEEKTLTGDVKTSPPRTAPKKQLPSIPKNALPITKPTSPAPAAQSTNGTHASYGPFYLEYSLLAEFTLVVKQKLPGVYVQPSYRSALMWFGVIFIRHGLYQDGVFKFTVYIPDNYPDGDCPVSWRHSLALFVDQREGLKGLTAFLVLFLTWYLYDLSTQ

SEQ ID NO: 20968 - protein, 8 aa, Homo sapiens
LLMAGSSR

SEQ ID NO: 20969 - protein, 10 aa, Homo sapiens
MPGVAVPSGR

SEQ ID NO: 20970 - protein, 47 aa, Homo sapiens
MPGVAVPSGRSHCHGHGPFSSLCDPKLHPKPRLLRRASEGTDELGLP

SEQ ID NO: 20971 - protein, 77 aa, Homo sapiens
LHFERTFYTKQFSCVSLIGHSTQFHVFESTRQLPRFSMYALTSLDPASEPISYVNFTIAERAQRVSISLFSFNAFTQ

SEQ ID NO: 20972 - protein, 68 aa, Homo sapiens
LHLKAFVGYRSSTQFHVFESTRQLPRFSMYALTSLDPASEPISYVNFTIAERAQRVSISLFSFNAFTQ

SEQ ID NO: 20973 - protein, 48 aa, Homo sapiens
LIGHSTQFHVFESTRQLPRFSMYALTSLDPASEPISYVNFTIAERAQR

SEQ ID NO: 20974 - protein, 40 aa, Homo sapiens
LPDCLFASPVISWLEMDPNCSCATGGSCSCASSCKCKECK

SEQ ID NO: 20975 - protein, 580 aa, Homo sapiens
LENGHSMKAWFYGIPPGIGPDCQELLPPPPAPMAHIPSGGAPAAGAAPMGPQYCVCKVELSVSGQNLLDRDVTSKSDPFCVLFTENNGRWIEYDRTETAINNLNPAFSKKFVLDYHFEEVQKLKFALFDQDKSSMRLDEHDFLGQFSCSLGTIVSSKKITRPLLLLNDKPAGKGLITIAAQELSDNRVITLSLAGRRLDKKDLFGKSDPFLEFYKPGDDGKWMLVHRTEVIKYTLDPVWKPFTVPLVSLCDGDMEKPIQVMCYDYDNDGGHDFIGEFQTSVSQMCEARDSVPLEFECINPKKQRKKKNYKNSGIIILRSCKINRDYSFLDYILGGCQLMFTVGIDFTASNGNPLDPSSLHYINPMGTNEYLSAIWAVGQIIQDYDSDKMFPALGFGAQLPPDWKVSHEFAINFNPTNPFCSGVDGIAQAYSACLPHIRFYGPTNFSPIVNHVARFAAQATQQRTATQYFILLIITDGVISDMEETRHAVVQASKLPMSIIIVGVGNADFAAMEFLDGDSRMLRSHTGEEAARDIVQFVPFREFRNAAKETLAKAVLAELPQQVVQYFKHKNLPPTNSEPA

SEQ ID NO: 20976 - protein, 573 aa, Homo sapiens
VSVHSLTLTSVPLDCQELLPPPPAPMAHIPSGGAPAAGAAPMGPQYCVCKVELSVSGQNLLDRDVTSKSDPFCVLFTENNGRWIEYDRTETAINNLNPAFSKKFVLDYHFEEVQKLKFALFDQDKSSMRLDEHDFLGQFSCSLGTIVSSKKITRPLLLLNDKPAGKGLITIAAQELSDNRVITLSLAGRRLDKKDLFGKSDPFLEFYKPGDDGKWMLVHRTEVIKYTLDPVWKPFTVPLVSLCDGDMEKPIQVMCYDYDNDGGHDFIGEFQTSVSQMCEARDSVPLEFECINPKKQRKKKNYKNSGIIILRSCKINRDYSFLDYILGGCQLMFTVGIDFTASNGNPLDPSSLHYINPMGTNEYLSAIWAVGQIIQDYDSDKMFPALGFGAQLPPDWKVSHEFAINFNPTNPFCSGVDGIAQAYSACLPHIRFYGPTNFSPIVNHVARFAAQATQQRTATQYFILLIITDGVISDMEETRHAVVQASKLPMSIIIVGVGNADFAAMEFLDGDSRMLRSHTGEEAARDIVQFVPFREFRNAAKETLAKAVLAELPQQVVQYFKHKNLPPTNSEPA

SEQ ID NO: 20977 - protein, 226 aa, Homo sapiens
MGFCYVAQAGLKLLGSSDLPTLASQSARITGMSHWAWPSLFSYFLGTCRPEIHMHLSLLPDRRTHWNVGIDFTASNGNPLDPSSLHYINPMGTNEYLSAIWAVGQIIQDYDSDKMFPALGFGAQLPPDWKQYFILLIITDGVISDMEETRHAVVQASKLPMSIIIVGVGNADFAAMEFLDGDSRMLRSHTGEEAARDIVQFVPFREFRNVSVGLGWEGAVTGSQPP

SEQ ID NO: 20978 - protein, 160 aa, Homo sapiens
LLGRSFRTTTVIRCFQLWDSGPSYPQTGRSPMSLPSTSTPPTPSAQQYFILLIITDGVISDMEETRHAVVQASKLPMSIIIVGVGNADFAAMEFLDGDSRMLRSHTGEEAARDIVQFVPFREFRNAAKETLAKAVLAELPQQVVQYFKHKNLPPTNSEPA

SEQ ID NO: 20979 - protein, 186 aa, Homo sapiens
LQDELEELAEVSHEFAINFNPTNPFCSGVDGIAQAYSACLPHIRFYGPTNFSPIVNHVARFAAQATQQRTATQYFILLIITDGVISDMEETRHAVVQASKLPMSIIIVGVGNADFAAMEFLDGDSRMLRSHTGEEAARDIVQFVPFREFRNAAKETLAKAVLAELPQQVVQYFKHKNLPPTNSEPA

SEQ ID NO: 20980 - protein, 176 aa, Homo sapiens
MRGLQGWGAESRTHSELSGTWLQLGKMHCLPPGLGGFGMKEGGRRGARASTLLSAPLAPSLQQYFILLIITDGVISDMEETRHAVVQASKLPMSIIIVGVGNADFAAMEFLDGDSRMLRSHTGEEAARDIVQFVPFREFRNAAKETLAKAVLAELPQQVVQYFKHKNLPPTNSEPA

SEQ ID NO: 20981 - protein, 37 aa, Homo sapiens
LQAAKETLAKAVLAELPQQVVQYFKHKNLPPTNSEPA

SEQ ID NO: 20982 - protein, 86 aa, Homo sapiens
VAFFYRSPFLFFTTGPPPPTSSSPAGLPLLESTVDASRPNWLPLLLSPPLPFLSIECTLYNFSGIVIENKIFTIITGFFQVTSCRL

SEQ ID NO: 20983 - protein, 69 aa, Homo sapiens
LREEAGRNSQRVGRSRMEGSISQQPGRPLRPREPKDSPGLIQQPLLPRREVLKSTKRVSLCHTGWSAVV

SEQ ID NO: 20984 - protein, 22 aa, Homo sapiens
MGWEPPTLSSSLGRQRGPGLAG

SEQ ID NO: 20985 - protein, 39 aa, Homo sapiens
MGWEPPTLSSSLGRQRGPGLAGSRSVTQAGVQWCDLGSS

SEQ ID NO: 20986 - protein, 36 aa, Homo sapiens
LGVDPERWSSRLALRGTLHLAADRVSLCHTGWSAVV

SEQ ID NO: 20987 - protein, 17 aa, Homo sapiens
VVLLCPSAMPTDSEGSL

SEQ ID NO: 20988 - protein, 8 aa, Homo sapiens
LLCLSWSP

SEQ ID NO: 20989 - protein, 23 aa, Homo sapiens
LWTMPVPSGFHPTTPRTETDLLW

SEQ ID NO: 20990 - protein, 20 aa, Homo sapiens
VVGTQMTDLVTPPANIQSGM

SEQ ID NO: 20991 - protein, 60 aa, Homo sapiens
LPTFSLVCEACVKQELLELQGQGAIIPAWESWKTSCRSQRSILTLKMGRMFFLRTNSFVF

SEQ ID NO: 20992 - protein, 98 aa, Homo sapiens
VGEEPLGRPKNHGDWGGLVAPMAALPAPLLQGGFPQLGGVRRRMASRHGAVLCLWLAEAASGWGILLLAHLPGSLVSRIFFPLKSYLRTFGSLAIFTY

SEQ ID NO: 20993 - protein, 17 aa, Homo sapiens
LTAGAAESLGKSRPLPV

SEQ ID NO: 20994 - protein, 874 aa, Homo sapiens
VELPPAGGPGRAEPRALRRRLDPASARPAAWCPEEAAEPQAMVPSRRTWNLGATPSLRGLWRVGRAPEPEPGMARPAPAPASPAARPFPHTGPGRLRTGRGKDTPVCGDEDSSARSAARPALAQCRALSVDWAGPGSPHGLYLTLQVEHLKEKLISQAQEVSRLRSELGGTDLEKHRDLLMVENERLRQEMRRCEAELQELRTKPAGPCPGCEHSQESAQLRDKLSQLQLEMAESKGMLSELNLEVQQKTDRLAEVELRLKDCLAEKAQEEERLSRRLRDSHETIASLRAQSPPVKYVIKTVEVESSKTKQALSESQARNQHLQEQVAMQRQVLKEMEQQLQSSHQLTARLRAQIAMYESELERAHGQMLEEMQSLEEDKNRAIEEAFARAQVEMKAVHENLAGVRTNLLTLQPALRTLTNDYNGLKRQVRGFPLLLQEALRSVKAEIGQAIEEVNSNNQELLRKYRRELQLRKKCHNELVRLKGNIRVIARVRPVTKEDGEGPEATNAVTFDADDDSIIHLLHKGKPVSFELDKVFSPQASQQDVFQEVQALVTSCIDGFNVCIFAYGQTGAGKTYTMEGTAENPGINQRALQLLFSEVQEKASDWEYTITVSAAEIYNEVLRDLLGKEPQEKLEIRLCPDGSGQLYVPGLTEFQVQSVDDINKVFEFGHTNRTTEFTNLNEHSSRSHALLIVTVRGVDCSTGLRTTGKLNLVDLAGSERVGKSGAEGSRLREAQHINKSLSALGDVIAALRSRQGHVPFRNSKLTYLLQDSLSGDSKTLMVVQVSPVEKNTSETLYSLKFAERVRSVELGPGLRRAELGSWSSQEHLEWEPACQTPQPSARAHSAPSSGTSSRPGSIRRKLQPSGKSRPLPV

SEQ ID NO: 20995 - protein, 762 aa, Homo sapiens
LGRRQVAGGYPASHPQQTLANPTLPASGSECLAGAAVEMIKVEHLKEKLISQAQEVSRLRSELGGTDLEKHRDLLMVENERLRQEMRRCEAELQELRTKPAGPCPGCEHSQESAQLRDKLSQLQLEMAESKGMLSELNLEVQQKTDRLAEVELRLKDCLAEKAQEEERLSRRLRDSHETIASLRAQSPPVKYVIKTVEVESSKTKQALSESQARNQHLQEQVAMQRQVLKEMEQQLQSSHQLTARLRAQIAMYESELERAHGQMLEEMQSLEEDKNRAIEEAFARAQVEMKAVHENLAGVRTNLLTLQPALRTLTNDYNGLKRQVRGFPLLLQEALRSVKAEIGQAIEEVNSNNQELLRKYRRELQLRKKCHNELVRLKGNIRVIARVRPVTKEDGEGPEATNAVTFDADDDSIIHLLHKGKPVSFELDKVFSPQASQQDVFQEVQALVTSCIDGFNVCIFAYGQTGAGKTYTMEGTAENPGINQRALQLLFSEVQEKASDWEYTITVSAAEIYNEVLRDLLGKEPQEKLEIRLCPDGSGQLYVPGLTEFQVQSVDDINKVFEFGHTNRTTEFTNLNEHSSRSHALLIVTVRGVDCSTGLRTTGKLNLVDLAGSERVGKSGAEGSRLREAQHINKSLSALGDVIAALRSRQGHVPFRNSKLTYLLQDSLSGDSKTLMVVQVSPVEKNTSETLYSLKFAERVRSVELGPGLRRAELGSWSSQEHLEWEPACQTPQPSARAHSAPSSGTSSRPGSIRRKLQPSA

SEQ ID NO: 20996 - protein, 728 aa, Homo sapiens
LSKVTQQVEHLKEKLISQAQEVSRLRSELGGTDLEKHRDLLMVENERLRQEMRRCEAELQELRTKPAGPCPGCEHSQESAQLRDKLSQLQLEMAESKGMLSELNLEVQQKTDRLAEVELRLKDCLAEKAQEEERLSRRLRDSHETIASLRAQSPPVKYVIKTVEVESSKTKQALSESQARNQHLQEQVAMQRQVLKEMEQQLQSSHQLTARLRAQIAMYESELERAHGQMLEEMQSLEEDKNRAIEEAFARAQVEMKAVHENLAGVRTNLLTLQPALRTLTNDYNGLKRQVRGFPLLLQEALRSVKAEIGQAIEEVNSNNQELLRKYRRELQLRKKCHNELVRLKGNIRVIARVRPVTKEDGEGPEATNAVTFDADDDSIIHLLHKGKPVSFELDKVFSPQASQQDVFQEVQALVTSCIDGFNVCIFAYGQTGAGKTYTMEGTAENPGINQRALQLLFSEVQEKASDWEYTITVSAAEIYNEVLRDLLGKEPQEKLEIRLCPDGSGQLYVPGLTEFQVQSVDDINKVFEFGHTNRTTEFTNLNEHSSRSHALLIVTVRGVDCSTGLRTTGKLNLVDLAGSERVGKSGAEGSRLREAQHINKSLSALGDVIAALRSRQGHVPFRNSKLTYLLQDSLSGDSKTLMVVQVSPVEKNTSETLYSLKFAERVRSVELGPGLRRAELGSWSSQEHLEWEPACQTPQPSARAHSAPSSGTSSRPGSIRRKLQPSA

SEQ ID NO: 20997 - protein, 867 aa, Homo sapiens
VELPPAGGPGRAEPRALRRRLDPASARPAAWCPEEAAEPQAMVPSRRTWNLGATPSLRGLWRVGRAPEPEPGMARPAPAPASPAARPFPHTGPGRLRTGRGKDTPVCGDEDSSARSAARPALAQCRALSVDWAGPGSPHGLYLTLQVEHLKEKLISQAQEVSRLRSELGGTDLEKHRDLLMVENERLRQEMRRCEAELQELRTKPAGPCPGCEHSQESAQLRDKLSQLQLEMAESKGMLSELNLEVQQKTDRLAEVELRLKDCLAEKAQEEERLSRRLRDSHETIASLRAQSPPVKYVIKTVEVESSKTKQALSESQARNQHLQEQVAMQRQVLKEMEQQLQSSHQLTARLRAQIAMYESELERAHGQMLEEMQSLEEDKNRAIEEAFARAQVEMKAVHENLAGVRTNLLTLQPALRTLTNDYNGLKRQVRGFPLLLQEALRSVKAEIGQAIEEVNSNNQELLRKYRRELQLRKKCHNELVRLKGNIRVIARVRPVTKEDGEGPEATNAVTFDADDDSIIHLLHKGKPVSFELDKVFSPQASQQDVFQEVQALVTSCIDGFNVCIFAYGQTGAGKTYTMEGTAENPGINQRALQLLFSEVQEKASDWEYTITVSAAEIYNEVLRDLLGKEPQEKLEIRLCPDGSGQLYVPGLTEFQVQSVDDINKVFEFGHTNRTTEFTNLNEHSSRSHALLIVTVRGVDCSTGLRTTGKLNLVDLAGSERVGKSGAEGSRLREAQHINKSLSALGDVIAALRSRQGHVPFRNSKLTYLLQDSLSGDSKTLMVVQVSPVEKNTSETLYSLKFAERVRSVELGPGLRRAELGSWSSQEHLEWEPACQTPQPSARAHSAPSSGTSSRPGSIRRKLQPSA

SEQ ID NO: 20998 - protein, 538 aa, Homo sapiens
VGLTAHVEHLKEKLISQAQEVSRLRSELGGTDLEKHRDLLMVENERLRQEMRRCEAELQELRTKPAGPCPGCEHSQESAQLRDKLSQLQLEMAESKGMLSELNLEVQQKTDRLAEVELRLKDCLAEKAQEEERLSRRLRDSHETIASLRAQSPPVKYVIKTVEVESSKTKQALSESQARNQHLQEQVAMQRQVLKEMEQQLQSSHQLTARLRAQIAMYESELERAHGQMLEEMQSLEEDKNRAIEEAFARAQVEMKAVHENLAGVRTNLLTLQPALRTLTNDYNGLKRQVRGFPLLLQEALRSVKAEIGQAIEEVNSNNQELLRKYRRELQLRKKCHNELVRLKGNIRVIARVRPVTKEDGEGPEATNAVTFDADDDSIIHLLHKGKPVSFELDKVFSPQASQQDVFQEVQALVTSCIDGFNVCIFAYGQTGAGKTYTMEGTAENPGINQRALQLLFSEVQEKASDWEYTITVSAAEIYNEVLRDLLGKEPQEKLEIRLCPDGSGQLYVPGLTEFQVQSVDDINKVWRREPLTTATLL

SEQ ID NO: 20999 - protein, 56 aa, Homo sapiens
VTAVTRDVVLLKDSMVGEVAGLVAGGPSGPGSPPTSLPPTTLPGVPGGAGPGHLLH

SEQ ID NO: 21000 - protein, 105 aa, Homo sapiens
LSGRGKDTPVCGDEDSSARSAARPALAQCRALSVDWAGPGSPHGLYLTLQQALQDKGCKSQSQGTKEEKLWKRQAPAPRRAREAREAGGTMNVENTGRTPEGEAH

SEQ ID NO: 21001 - protein, 80 aa, Homo sapiens
LAAWCPEEAAEPQAMVPSRRTWNLGATPSLRGLWRVGRAPEPEPGMARPAPAPASPAARPFPHTGPGRLRTGRTPEGEAH

SEQ ID NO: 21002 - protein, 31 aa, Homo sapiens
VDWAGPGSPHGLYLTLQRQGFTMLAMLLSKS

SEQ ID NO: 21003 - protein, 40 aa, Homo sapiens
VELPPAGGPGRAEPRALRRRLDPASARPIPEMRLRFLTGS

SEQ ID NO: 21004 - protein, 19 aa, Homo sapiens
MRARVRSIPEMRLRFLTGS

SEQ ID NO: 21005 - protein, 13 aa, Homo sapiens
LIPEMRLRFLTGS

SEQ ID NO: 21006 - protein, 13 aa, Homo sapiens
VQGHGCLVPRGGC

SEQ ID NO: 21007 - protein, 11 aa, Homo sapiens
VQGCLVPRGGC

SEQ ID NO: 21008 - protein, 31 aa, Homo sapiens
LRLLVDLLWWSWMRPHERGAPGGLQQQRLRG

SEQ ID NO: 21009 - protein, 258 aa, Homo sapiens
VAAMSEAYFRVESGALGPEENFLSLDDILMSHEKLPVRTETAMPRLGAFFLERSAGAETDNAVPQGFALLPRLECSGVIWLTAALTSQAPEILPPQPPMWLVLQGSKLELPLWLAKGLFDNKRRILSVELPKIYQEGWRTVFSADPNVVDLHKMGPHFYGFGSQLLHFDSPENADISQSLLQTFIGRFRRIMDSSQNAYNEDTSALVARLDEMERGLFQTGQKGLNDFQCWEKGQASQITASNLVQNYKKRKFTDMED

SEQ ID NO: 21010 - protein, 141 aa, Homo sapiens
VAAMSEAYFRVESGALGPEENFLSLDDILMSHEKLPVRTETAMPRLGAFFLERSAGAETDNAVPQTFIGRFRRIMDSSQNAYNEDTSALVARLDEMERGLFQTGQKGLNDFQCWEKGQASQITASNLVQNYKKRKFTDMED

SEQ ID NO: 21011 - protein, 219 aa, Homo sapiens
VAAMSEAYFRVESGALGPEENFLSLDDILMSHEKLPVRTETAMPRLGAFFLERSAGAETDNAVPQGSKLELPLWLAKGLFDNKRRILSVELPKIYQEGWRTVFSADPNVVDLHKMGPHFYGFGSQLLHFDSPENADISQSLLQTFIGRFRRIMDSSQNAYNEDTSALVARLDEMERGLFQTGQKGLNDFQCWEKGQASQITASNLVQNYKKRKFTDMED

SEQ ID NO: 21012 - protein, 111 aa, Homo sapiens [sequence omitted]

SEQ ID NO: 21013 - protein, 84 aa, Homo sapiens
LSYSLVSQTFIGRFRRIMDSSQNAYNEDTSALVARLDEMERGLFQTGQKGLNDFQCWEKGQASQITASNLVQNYKKRKFTDMED

SEQ ID NO: 21014 - protein, 221 aa, Homo sapiens
LRHGPSFSLSPQNCLRMVATQPIPKGHEIFNTYGQMANWQLIHMYGFVEPYPDNTDDTADIQMVTVREAALQGTKTEAERHLVYERWDFLCKLEMVGEEGAFVIGREEVLTEEELTTTLKVLCMPAEEFRELKDQDGGGDDKREEGSLTITNIPKLKASWRQLLQNSVLLTLQTYATDLKTDQGLLSNKEVYAKLSWREQQALQVRYGQKMILHQLLELTS

SEQ ID NO: 21015 - protein, 53 aa, Homo sapiens
MQKLPRSCQAISQLSIQKETYHSKDLRSCMPGNGMKTKCISHNKYYSNVEVII

SEQ ID NO: 21016 - protein, 45 aa, Homo sapiens
LRESAAAGSADAMDNVQPKIKHRPFCFSVKGHVKMLRLHCLVVFM

SEQ ID NO: 21017 - protein, 91 aa, Homo sapiens
LAEGRRRAGAMAEAGPQAPPPPGTPSRHEKSLGLLTTKFVSLLQEAKDGVLDLKLAADTLAVRQKRRIYDITNVLEGVWGLAAIPGRLLTN

SEQ ID NO: 21018 - protein, 96 aa, Homo sapiens
VYGASYHSMSSMARAAFSEDGALMDGGMDLNMEQGMAEHLKDVILLTAIVQAPGRALYLLWVNVLGPWFTADSGTPAPEHNEKRQRRQERRQMKRL

SEQ ID NO: 21019 - protein, 69 aa, Homo sapiens
LHPLGVAVGMAGSGRLVLRPWIRELILGSETPSSPRAGQLLEGGEGVRLPRDRGPAAAAAGLRGSCPGR

SEQ ID NO: 21020 - protein, 60 aa, Homo sapiens
LHPLGVAVGMAGSGRLVLRPWIRELILGSETPSSPRAGQLLEVSPHSGPGDRGGGPGWWD

SEQ ID NO: 21021 - protein, 104 aa, Homo sapiens
LEVSQAPVIFSHSAARGVCNSARNVPDDILQLLKKNGGVVMVSLSMGVIQCNPSANVSTVADHFDHIKAVIGSKFIGIGGDYDGAGKPWTVVLSHDQGIRSETH

SEQ ID NO: 21022 - protein, 40 aa, Homo sapiens
LRFLVLLGARPAFGTERSASRAPPGKFAVESRPLGPRGPA

SEQ ID NO: 21023 - protein, 8 aa, Homo sapiens
MHMKMTYR

SEQ ID NO: 21024 - protein, 125 aa, Homo sapiens
LLHAQGRVWYWHPSSAWQSWPTACGPRSASSPKMPTAPRPLRQHCLCPPAFKRLQGCSCHAAKVLSVSKFETQLEGLFLTIPADLRSSWRPGPTPSLAQGRLCLVRLEGAPGPAVCCQPLLVLVP

SEQ ID NO: 21025 - protein, 200 aa, Homo sapiens
LQLQPIPGPCPLHRVPGAWGRRAGTGREPQSVPGNLEAALLCASGPHCGQRSQARPRSLQLPNQCHSFTTRFSTNLQHNRVCNPWVSMRTGFVYSLYLLLSFVQGSLFLSAANVVSHACTLACTLPACHVPRCSHRPLARASPKAKLQTQSEPAKEALPGHGHQLSRLQCGPAPAGSEGCISTSQPRALPRVSHSRAITF

SEQ ID NO: 21026 - protein, 82 aa, Homo sapiens
LLDTNGLYDEDVCTPDNLQNKSSGQKGRKELLKGNGRRIDYMLHAEEGLCPDWKAVSQEGPAARAMQRESRARALQLSTAAP

SEQ ID NO: 21027 - protein, 234 aa, Homo sapiens
MDVAYHCYPNKCNDDALASKGALFLKVQVGSTPQDQRIVGYIACTHLHAPQEDSAIRCGQLDLLQDWLADFRKSTSSSSAANPEELVAFDVVCGDFNFDNCSSDDKLEQQHSLFTHYRDPCRLGPGEEKPWAIGTLLDTNGLYDEDVCTPDNLQKVLESEEGRREYLAFPTSKSSGQKGRKELLKGNGRRIDYMLHAEEGLCPDWKAVSQEGPAARAMQRESRARALQLSTAAP

SEQ ID NO: 21028 - protein, 165 aa, Homo sapiens
LYDVGVYGCQGCCSFKCLNSGLLFASRYPIMDVAYHCYPNKCNDDALASKGALFLKVQVGSTPQDQRIVGYIACTHLHAPQEDSAIRCGQLDLLQDWLADFRKSTSSSSAANPEELVAFDVVCGDFNFDNCSSEILEQEEPTLCLESWRQRCPKNEPLTRKAGGL

SEQ ID NO: 21029 - protein, 176 aa, Homo sapiens
LYDVGVYGCQGCCSFKCLNSGLLFASRYPIMDVAYHCYPNKCNDDALASKGALFLKVQVGSTPQDQRIVGYIACTHLHAPQEDSAIRCGQLDLLQDWLADFRKSTSSSSAANPEELVAFDVVCGDFNFDNCSSGEAGLLPTQVSSSGEAVGSVTARQTSLGSSKNSCSSRACGRGI

SEQ ID NO: 21030 - protein, 54 aa, Homo sapiens
VDLGEITRQMRREKRGGREQDLVTPPASGFLSCRAQSEASLRVSNPVRDTARGR

SEQ ID NO: 21031 - protein, 59 aa, Homo sapiens
VAYHCYPNKCNDDALASKGALFLKSLPARTQRHSLSCDCLFLQEKHKALRLPRPRARNQ

SEQ ID NO: 21032 - protein, 104 aa, Homo sapiens
LKEQLHGYFEYILYDVGVYGCQGCCSFKCLNSGLLFASRYPIMDVAYHCYPNKCNDDALASKGALFLKTEFHSCCPGWSAVARSRLTTTSASRVQAILLPWPPK

SEQ ID NO: 21033 - protein, 143 aa, Homo sapiens
MGPPGPRSKFTSTPPPIPPSAPLASAAWCHHRAAMGWPGPSPGALRGQPLWSTRVTVGGTPVTRLPTAQPLGTLSTAAARRMPASCASVARRAAGHLKLTTLCLGARPGTELAGAQGARRPTIISRTGIQGAWAAPRPPGSPW

SEQ ID NO: 21034 - protein, 19 aa, Homo sapiens
MTGWPTFAIDQPELHLARR

SEQ ID NO: 21035 - protein, 103 aa, Homo sapiens
LSPVGRAAPRSAAAIAACFHLLFKDRKLMVQIVISSARAGGLAEWVLMELQGEIEARYSTGLAGNLLGDLHYTTELHQAHWLQIQHLSRLVLVTQVWLLFQEG

SEQ ID NO: 21036 - protein, 87 aa, Homo sapiens
LAARRRARRPPLQGIPVLIVGHHILYGKIIHLEKPFAVLVKHTPGDQDCDELGRETGTRYLVTALIKDKILFKTRPKPIITSVPKKV

SEQ ID NO: 21037 - protein, 149 aa, Homo sapiens
LSPVGRAAPRSAAAIAACFHLLFKDRKLMVQIVISSARAGGLAEWVLMELQGEIEARYSTGLAGNLLGDLHYTTEGIPVLIVGHHILYGKIIHLEKPFAVLVKHTPGDQDCDELGRETGTRYLVTALIKDKILFKTRPKPIITSVPKKV

SEQ ID NO: 21038 - protein, 142 aa, Homo sapiens
VLAAAATAAGGSVVARWPRGAALGGRHCSARAGGLAEWVLMELQGEIEARYSTGLAGNLLGDLHYTTEGIPVLIVGHHILYGKIIHLEKPFAVLVKHTPGDQDCDELGRETGTRYLVTALIKDKILFKTRPKPIITSVPKKV

SEQ ID NO: 21039 - protein, 127 aa, Homo sapiens
LSPVGRAAPRSAAAIAACFHLLFKDRKLMVQIVISSARAGGLAEWVLMELQGEIEARYSTGLAGNLLGDLHYTTEVRGLFFPCLMPQESKLHQGGAPRTQSEDCLRFVIQGLANLRCSLLVLPLPLQ

SEQ ID NO: 21040 - protein, 727 aa, Homo sapiens
LPAHFRLCARSTSGAEPESARARGAGAERGEHREGERGAAGMGEFKVHRVRFFNYVPSGIRCVAYNNQSNRLAVSRTDGTVEIYNLSANYFQEKFFPGHESRATEALCWAEGQRLFSAGLNGEIMEYDLQALNIKYAMDAFGGPIWSMAASPSGSQLLVGCEDGSVKLFQITPDKIQFERNFDRQKSRILSLSWHPSGTHIAAGSIDYISVFDVKSGSAVHKMIVDRQYMGVSKRKCIVWGVAFLSDGTIISVDSAGKVQFWDSATGTLVKSHLIANADVQSIAVADQEDSFVVGTAEGTVFHFQLVPVTSNSSEKQWVRTKPFQHHTHDVRTVAHSPTALISGGTDTHLVFRPLMEKVEVKNYDAALRKITFPHRCLISCSKKRQLLLFQFAHHLELWRLGSTVATGKNGDTLPLSKNADHLLHLKTKGPENIICSCISPCGSWIAYSTVSRFFLYRLNYEHDNISLKRVSKMPAFLRSALQILFSEDSTKLFVASNQGALHIVQLSGGSFKHLHAFQPQSGTVEAMCLLAVSPDGNWLAASGTSAGVHVYNVKQLKLHCTVPAYNFPVTAMAIAPNTNNLVIAHSDQQVFEYSIPDKQYTDWSRTVQKQGFHHLWLQRDTPITHISFHPKRPMHILLHDAYMFCIIDKSLPLPNDKTLLYNPFPPTNESDVIRRRTAHAFKISKIYKPLLFMDLLDERTLVAVERPLDDIIAQLPPPIKKKKFGT

SEQ ID NO: 21041 - protein, 134 aa, Homo sapiens
VAYNNQSNRLAVSRTDGTVEIYNLSANYFQEKFFPGHESRATEALCWAEGQRLFSAGLNGEIMEYDLQALNIKYAMDAFGGPIWSMAASPSGSQLLVGCEDGSVKLFQITPDKIQFERNFDRQKSKRHFSWGGK

SEQ ID NO: 21042 - protein, 284 aa, Homo sapiens
VATDGIVAAVAIFPATTSLPFRTTRGADSELRTGRNRHISGLYAFSSGRLAFPCGRPDYWALARRTIGTGLERKALGLPGSSERPTSVSSYQGTRIRCSNPGGKMRPLTEEETRVMFEKIAKYIGENLQLLVDRPDGTYCFRLHNDRVYYVSEKIMKLAANISGDKLVSLGTCFGKFTKTHKFRLHVTALDYLAPYAKYKVWIKPGAEQSFLYGNHVLKSGLGRITENTSQYQGVVVYSMADIPLGFGVAAKSTQDCRKVDPMAIVVFHQADIGEYVRHEETLT

SEQ ID NO: 21043 - protein, 139 aa, Homo sapiens
LGLPGSSERPTSVSSYQGTRIRCSNPGGKMRPLTEEETRVMFEKIAKYIGENLQLLVDRPDGTYCFRLHNDRVYYVSEKIMKLAANISGDKLVSLGTCFGKFTKTHKFRLHVTALDYLAPYAKVCGAVSNSATGDEVKD

SEQ ID NO: 21044 - protein, 48 aa, Homo sapiens [sequence omitted]

SEQ ID NO: 21045 - protein, 162 aa, Homo sapiens
LFPSAQRPGVLCEVRRGRAGSMDPGERGPGSHEPPSSATLLPLYPFSEKIMKLAANISGDKLVSLGTCFGKFTKTHKFRLHVTALDYLAPYAKYKVWIKPGAEQSFLYGNHVLKSGLGRITENTSQYQGVVVYSMADIPLVSRDGSCYRTQVLLFKKGMSSI

SEQ ID NO: 21046 - protein, 140 aa, Homo sapiens
MVGRRALIVLAHSERTSFNYAMKEAAAAALKKKGWEVVESDLYAMNFNPIISRKDITGKLKDPANFQYPAESVLAYKEGHLSPDIVAEQKKLEAADLVIFQVWGDIGRGVRDICVLIVLDMYLISYEILNSYPLYCILCK

SEQ ID NO: 21047 - protein, 178 aa, Homo sapiens
VSSSIQHPETPLHISGFHLPYKPKPPQETEKGHSACEPENLEFSSFMFWRNPLPNIDHELQELLIDRGEDVPSEEEEEEENGFEDRKDDSDDDGGGWITPSNIKQIQQELEQCDVPEDVRVGCLTTDFAMQVGRVGLGRVSHTSSAVVLPRCTDVHGTGAVQRFFSWFWKPPVPFGDF

SEQ ID NO: 21048 - protein, 34 aa, Homo sapiens
VVTEIRDKATRRRLAVLPYELRFKEPLPEYVRLA

SEQ ID NO: 21049 - protein, 75 aa, Homo sapiens
MAPVEHVVADAGAFLRHAALQVRGAPSGTREIWAGRPSRSAWSRAERCLVRVGLSWGVLSAGHREEHLHHPGGGH

SEQ ID NO: 21050 - protein, 12 aa, Homo sapiens
MADASMLELVVA

SEQ ID NO: 21051 - protein, 26 aa, Homo sapiens
LKGGSIRWISTPSFSLQAFLDSVLLV

SEQ ID NO: 21052 - protein, 77 aa, Homo sapiens
VRRRGRVRSDSEDSHLGYFKMSFLLPKLTSKKEVDQAIKSTAEKVLVLRFGRDEDPVCLQLDDICAASSMCLMQRET

SEQ ID NO: 21053 - protein, 46 aa, Homo sapiens
VWGAVGQEVGARGLTHFALFFRLQYRSETMAYKGLVWSQDVTGSPA

SEQ ID NO: 21054 - protein, 156 aa, Homo sapiens
MQTEDIRLEPDLYEACKSDIKNFCSAVQYGNAQIIECLKENKKQLSTRCHQKVFKLQETEMMDPELDYTLMRVCKQMIKRFCPEADSKTMLQCLKQNKNSELMDPKCKQMITKRQITQNTGKILAWLSWPRGVSEKEFSGCRVTCSNSQGFVAWEF

SEQ ID NO: 21055 - protein, 79 aa, Homo sapiens
MDVKLDPALQDKCLIDLGKWCSEKTETGQELECLQDHLDDLVVECRDIVGNLTELESEVSGMQLTHWRRVAASILAFCV

SEQ ID NO: 21056 - protein, 79 aa, Homo sapiens
LSKNELKRRLKAEKKVAEKEAKQKELSEKQLSQATAAATNHTTDNGVGPEEESVDPNVGSMPKELLGESSSSMIFEERG

SEQ ID NO: 21057 - protein, 79 aa, Homo sapiens
VDPNQYYKIRSQAIHQLKVNGEDPYPHKFHVDISLTDFIQKYSHLQPGDHLTDITLKVAGRNSPWQITELPQQVGLRLQ

SEQ ID NO: 21058 - protein, 21 aa, Homo sapiens
MAAVQAAEVKVDGSEPKLSKK

SEQ ID NO: 21059 - protein, 435 aa, Homo sapiens
LAHPLATQHSPLAPLLQPIWRSGGGGGGGGRRMASELAMSNSDLPTSPLAMEYVNDFDLMKFEVKKEPVETDRIISQCGRLIAGGSLSSTPMSTPCSSVPPSPSFSAPSPGSGSEQKAHLEDYYWMTGYPQQLNPEALGFSPEDAVEALISNSHQLQGGFDGYARGAQQLAAAAGAGAGASLGGSGEEMGPAAAVVSAVIAAAAAQSGAGPHYHHHHHHAAGHHHHPTAGAPGAAGSAAASAGGAGGAGGGGPASAGGGGGGGGGGGGGGAAGAGGALHPHHAAGGLHFDDRFSDEQLVTMSVRELNRQLRGVSKEEVIRLKQKRRTLKNRGYAQSCRFKRVQQRHVLESEKNQLLQQVDHLKQEISRLVRERDAYKEKYEKLVSSGFRENGSSSDNPSSPEFFITEPTRKLEPSVGYATFWKPQHRVLTSVFTK

SEQ ID NO: 21060 - protein, 20 aa, Homo sapiens
LPHDFFEFRTKQCNRRAFFP

SEQ ID NO: 21061 - protein, 16 aa, Homo sapiens
MNLPQSSLHQPSGCDL

SEQ ID NO: 21062 - protein, 405 aa, Homo sapiens
LAHPLATQHSPLAPLLQPIWRSGGGGGGGGRRMASELAMSNSDLPTSPLAMEYVNDFDLMKFEVKKEPVETDRIISQCGRLIAGGSLSSTPMSTPCSSVPPSPSFSAPSPGSGSEQKAHLEDYYWMTGYPQQLNPEALGFSPEDAVEALISNSHQLQGGFDGYARGAQQLAAAAGAGAGASLGGSGEEMGPAAAVVSAVIAAAAAQSGAGPHYHHHHHHAAGHHHHPTAGAPGAAGSAAASAGGAGGAGGGGPASAGGGGGGGGGGGGGGAAGAGGALHPHHAAGGLHFDDRFSDEQLVTMSVRELNRQLRGVSKEEVIRLKQKRRTLKNRGYAQSCRFKRVQQRHVLESEKNQLLQQVDHLKQEISRLVRERDAYKEKYEKLVSSGFRENGSSSDNPSSPEFFM

SEQ ID NO: 21063 - protein, 76 aa, Homo sapiens
VPRPAPPGQTPAAPPAPSGRRARPACSPGRRGEPFLMQSAQRSGERGTPRTGPGSSSFAAAATTAATAARGGSSRA

SEQ ID NO: 21064 - protein, 33 aa, Homo sapiens
LPCTLHRGRERAREREERKKIIKRAKQKRRREA

SEQ ID NO: 21065 - protein, 25 aa, Homo sapiens
VRLQEMWAVPKRWMRLLLSSSRGPS

SEQ ID NO: 21066 - protein, 23 aa, Homo sapiens
LLIIYTGIWHFSKPREDRMAFCS

SEQ ID NO: 21067 - protein, 84 aa, Homo sapiens
LTDSAAEFPFPSLIRVFSALLPSVLPEPPSHPVPSFLIGTLCFPLFLQNFAKEFVISDRKELEEDFIKSELKKAGGANYDAQTE

SEQ ID NO: 21068 - protein, 92 aa, Homo sapiens
LATDDVRLFAFVRFTTGDAMSKRSKFALITWIGENVSGLQRAKTGTDKTLVKEVVQNFAKEFVISDRKELEEDFIKSELKKAGGANYDAQTE

SEQ ID NO: 21069 - protein, 160 aa, Homo sapiens
LQAPRSRRHRRQPVRPRRVPAALPSPPPARGALGRPGQCPAAAPRRWPPRSTKRLAGRRTTWCATTARPSSDDVRLFAFVRFTTGDAMSKRSKFALITWIGENVSGLQRAKTGTDKTLVKEVVQNFAKEFVISDRKELEEDFIKSELKKAGGANYDAQTE

SEQ ID NO: 21070 - protein, 34 aa, Homo sapiens
VSRCGSAAMATKIDKEACRAAYNLVRDDGSAVIW

SEQ ID NO: 21071 - protein, 33 aa, Homo sapiens
VSRCGSAAMATKIDKEACRAAYNLVRDDGSAVI
